United States Patent Application Publication US 2015/0376612 A1 - sequence listing, part 26

SEQ ID NO: 64236 - DNA, 1037 bp, Homo sapiens
tttatgaaaataatgtgacagatatcattgggcatctactgtgtgccagggatacaaggatgaataagatgtggctcctgttattcagagttcacagtgaagtcaggagtatagttataccagtaaatgatggttaaactgggtgataagtgcaaatagagggcggtacagtacacacagtgagaatagagtggtgctggtaattcatttatttaataaagagggagcatctttattataatttatttaatcaagagcaagcactggccagacactgttgtaggcactgggatgacactgttgtaggcactgggacagcagtgaacaagcaggtaaggtcctgttctcatggagcttctgttcagcaagagagagaaatagacatgtcatgaagagcgtgaccggtgtgaagatgaagaggaggataatggcaggtgggttgttgtgacacgtgagttagggagagtagctcttcaggaggaggaatgatggtatgtagaggaggagagagtgagtgctagcgtctcctggaaggggatggaagagatggagatggcattgcaggcagagggcccagctggtacaaaggcacagacataggatatctgggaggcccccgccattttgggtttacagcaagttggggatggtgtttttaggactgtactgtgaataccatgtttaggagcttggattgatctgttggtgactggctggcctgctggactttaaattgggaagagatatgattggactggtggtttaggaagttccctctgactctgagactggattgaaagagaaagacgagagtcagggtagtcactggggaggccactgcagcggctcgggaagaggtgatcaggccgtggaagagaggtggaatgaagaaattagaatgtgcaggactgggtgattataagccatagaaatcctggctagagcaggagttggaagagattgaggtagtaatgacataattcatatttgttcatttaaatccaggtttgtctaatgccactttaagatgttctctt

SEQ ID NO: 64237 - DNA, 1274 bp, Homo sapiens
acaagttaacagctgtagcaatgaagcaagtgtggggtccctcaggaggttctgctcctcttacaaagtcactgtcctgattgctggtccctgactcttggttaggctgtatcaagcttcctgatctcatcttttatttctcagggttgaatgtgcagagcctgcctctctcttctctactcctcttctccaggtcctctgcacctctttcttcatgaaagctcctcagtccagtcctaggcactcagggagtgtccatttctgggcccacttggataatttgcatcttttgagggacattctccataacagtccccaaccttatggggcagtctttttgaagtatttcttcatggagtcacccttgtcctcaaatatctccctcttctctgtccgtctgcccgtccatccatccatccatccaataatttgagcttcttattggagcaaatcactgttcttagtactcaggatataaaaataaattgccaagggactctcagttttcttcctaccactctgactatggcctctggaatctttgctggcattgcctcttcctgtgagaaccactgacattttatgtgcacctacacagcttcacctgctatctgtgtgctgctgtcggtgcatgatgaccgccatcccagctctgcaatttaccttgctgtgtggcttcaggcatgttccctaaactctgttgctgccctcagttggtaaaatggaaatgatagtgtacttatttgaaaagttgctttgcagattaagttaaataatgcatgtgaagtgcttggcacattggctggaacagattaagtacttaaatgttattaccaccaccgccatcactactgttagtattgctgctatcactaccattctttctgcccttgggaaatatatcaatcacgtgagaataatagggagtaaaatgagagaccagacttttatctgggtgagaataaatcaaatccagtatctttgggattgatatgcaagcattatggggcaattttgaattgacaattgagaggggagcctgtgggaagacttcattagggataagtgagtcttaaatagtacttgggcctgaattgataaagaagaggcatcaagtttagacccaagctaagttggaaaggtctttagccttctgtctagtaggagggttctcgggttggtgaccaggtacttctcaggtgaacacggtggggcctgtgcatttgtttgtttgtttatttatttattttgagatagtctttctccattgcctg

SEQ ID NO: 64238 - DNA, 1459 bp, Homo sapiens
aacctcagcctcccaagtagctgggactacaggcatgtgcaaccatgcctggctaatatttttattttttgtagagatgaggtcttgtcatgttgcccaggatagtctcaaacacttggactcaagtggttttcctgcctcagcctcccaaagtgctgggattataggcatgagccattgtgcctgtcctggggctgtgcatttaatgtgaggctcctcaaacccgtgcccacattggggattgtctctagatttatttaatatgctgcatgtttataattatgcctgagtgttttcagatgtctaaaatgcaaatctattcaaaacattactaaacattgtattagtttgttggctcttagtcattagatattaaaagtaggacttctattacatgggtggcctgtagaacattttggtgttagaaggggttcccaaacttgaaaaagtcaggaaccacagaatttgcctgataaaaccagaagcagatcctggcagcattctagctggagggtacaacccaattaaaatggctgtgtaataaagcgatcttatatctcataggacaaaaagtccagaggtacagtgatgctagggttagttagagcagcgtctcagtgacctcataggacctggttgttcgccttttccactccgccgtcctttgcgtgtcagctctctcctctcatgttcagcaaatggctgcagcagctcccggcatcacatctccatactaatgtcccaatatatttgttcctggcctcacttctctcagtaaggaaagctttccaattactggccagccttcagacttttccctcatgcctcactttgatgaatggcctaacttgcacattcctagatgaaatagggcctagggagtggaattcccacacacaggtcagggatcccagtggaagagggaacgtgtagattgaatcaggattctgccttcaagaaaggtggggtggagtatttgggtaggcaagaatatctgggcaggcaggaactcgggaggctgccaggcagttcatcagggcggtagctgggagaaggttcccaagcagtcacatccagggctgctctttggctaaggggcagaagcctcccaagcagtggccccagggagtctcctggcacaaggagaagtggaaaggtcttagagtgggatgataggatctgcaccctgtctttgtccccagcagctctgggccatttatcctctgtatagtgctctggggagagactgcaaatgcttcttttggcttttcttttttttgagacggggtctcattctgttgcccaggctggagtgcggtggtggaccacacctggctaatttttgtagtttttatagagacaaggtttcaccatgttgttttggctttgttaaatgagagcccactgtgtcctggcctaggcactgaagatatagtgaaagacaaataggcatggactc

SEQ ID NO: 64239 - DNA, 1631 bp, Homo sapiens
gaacagatctgggatctcatcctgtctccacatctcctaaacctggtcatctcctcagtaaatggatgctgttcctacaggggagggaagaagaacgcaagaggggaagactccttcctgagtgcacaccatgcactgagccaggtgcttctacactcgctgttcctcaagaaacctcatgcaggcagccttgaataggtcatccggtaacatccctttcctcatcagcctgccttgctaggtgggtaatgctgagagatatggttggaaagacccaggcagagtataggatagagactctagggctaggttttggtccatgctaaaaaataacatacaaattggtttcccaaattcctgatggattatttgaatgtgagttgagtcgctgcatatataccctgtgatttctctctctttctttttttttttttttcacaaaaatacactataaccgcaaaaaagacagtcaaacaaaagagggaaaaaattcatccagaactagctcagtaccctaacacaactgttttcattttaacttttagcccttgtctgtatgcaggcatgtttctctgtatctgtaatcatatgtaggctcaattttgtattctgctcttttcagtaaaccttaagtaaatgctttccaaatggttatgtagtcttcaagatgatttttaatgatcttacaatctatcatcccacaggctgaatttacttaaccattcatctactgttggacatctagatttttttttttctgtagttctgtgctattataagtaatactttgggatatggccttgtgcttattgtggattttttccttagggtgaattcccaggagcaggatttctgggttaaagggcacaattatttttttggctctcaatggatattgctaaattgctttccaaaagggttgtaccagtttatgatgccaccagcagtgcgtgaaggtaccaatttcagcatcttggcttgcactagatagtataatttttacaaaagtttggctcaatggtgcacatcgtttaattgatatttcttggattatgacaaggttgagtatggctttacttactatgttttgagattttacttagtatttttgttttcttacagtcaggacctagctgtggttgaggtcagattttctgtgtagagcttttcagactcttgaattttacagcgaaaaaacaaaccaaactaacaaaaaccaaacccagaattcatctgtaaaataaatactttggacatattttgtggttggattaactgttcgtgattttaacttccttataggtcataagttaatagggcggtatttggagagtagcggggcttttcctcttctccttagattctcctttgttctttccctctaccatccccccatttcctgtttccctcctcccctgtaagccctgttgttgtctttttggagataaaacataaaaggatcagcttttagtcatgctccttcaacttataaaatgtaggttgcctaaattatgtagtacagagtgaggataaagaaaatcacagtattgtaacacattgcctgtaactgctttgcaaaagcaaacgtctcccacgaaatcttagaaaggtgtgtttgagggtgtaatctt

SEQ ID NO: 64240 - DNA, 1803 bp, Homo sapiens
cagagcaacttccagttctgcaagcttcatttatgggaagtgccctatgcaggtgtaccattttaatcttttataccatatttttactgtaccttttctatgtgtagctatgtttagatacacaaatacttaccattgagttacaattgcctacagtattcagtatagtaatatgccgtacagatctgtattctagaaacaataggctataactgtaccaaatagcctagatgtgtagtaggatataccatgtaggtttgtgtaactgtgctctgtgatgttgatgtacgatgacgaaattgactgacaacacattttgttaagcaacatgtgactgcacataaacacctgtgcattcataggcaatcacaactgcatatactgaaacacacaaacacaccgccatatatatttttaaagaatttgaaagatctaagatgatattaaatgtagtttagtttacttttgtgttgatcaagtgttactaagctgtaattaatttagtaaaggaaattaaaatggggatgtggggaaaatgtgactctgcctaattgacaagaatctggggccgtccagaaaagcattagggccaggcagaagttgaaacctttgggaagtctggcccaggactttaaaaatgttttttccgggttagaaatactgagggtttccattctaaaggatgaaaaggatcttctcctttctccttagctagccagtagattctgtcttcctcttatgtcctccagttcctttttggttcattcactctgagtctcgtctgaataagcattaggggaagggcttcctggaggattcgagaagggcaaggaagaagtggaaaaaaagaaatcttatcccactgctgtggttctttgtcatccctggtccctgtccttggcagaatcacacagctacaaagtggtggaatgtgtattccaaccagacctctgtgtcatgctccctaccaaactcccaactctttgggctgatctctgcccgccctccttgtcgcctttcctggttcgattttttttttttttttttgggtgcttactgtgtgctatgcactgttctggattccggggttatagctgtgaccaaggcagacgtatgcttgacatatgttaaccatgaggcatgtatcccctggtcccaccaccactctgctccccatgatttctatacatatatctttctatcacaacagttactgggttgcattagagttatctcttggtgtatctgcctctctcactggactgtgaaatctttgagggaggagttagttacttttcttcatctctccatcacagaaccctgcctgaagttggctgcatgcttgtttaaggctaattgaacaaatgcttgcatgccttttatgacacacaactaaattgtgagcaatccaggtacctaccacttctgtgtctcagttggtccgacagaactagtacataataggccatgttttatcctccagctagacatctagagaagtaaataagccttcaagtgcttcatcactatgtgtgaattgtgaagaaaaacttttattaaaacgttaatatgattgtgacaattgtttactctggcaagtagtttgcctcttggattcctctctgtgaatctgcccataatgtcctgaaattccaaatgggtccttttctcttcctctcatttactatttctattcaaaactggaatatgtggacatgtgtacagccttttaagaccaaaggctttacgttttctagctttttgttttgttttgtttttgtcattgccctacctagaacaaac

SEQ ID NO: 64241 - DNA, 1930 bp, Homo sapiens
aattgctcagttacattattgttgtatcttatcttacctagcccaagttaaaacttctcagagtcagactgtgtgtttatacatccctatctttgcagttcacataagtccttaataaggatggtatgactaaaatcaatgaaagactaagcaaaaaaaaaaaaaagtaatcatctcaggtcctcagatatcttttacctgtgatatttcttggtgaatgagtaagactcaagaccttaggtttgtgcaaggactttgcttactgatggagaattcccagacagctcacaagcaagtgtgtgtcctctacttacaactgtcccttgtcatttcagcattacctgtttggagctgttccgcattgggtttgccctaaagctaaatttaagtcatgttggcagtcttttgtgcttttcagttgcagctctatattctggcagcttacagcttgtggggctcaagtctggatgtgcctagcttatgcatgccttttagtgtcactcttaccatttgcttggtaattggagggaaaaaaagaggaaacattttgctcagtagcaaatcaaaaattcttttctcctatgtgaaacataaaccaagagtaagggtggaggtgtatatagagaagcatcgtaagggtgatgtattagtccatttttacgctgctgataaaggcatacctgagactgggtaacttacaaagaaaaagaggtttaatggactcacagttccatgtggttggggaagcctcacagtcatgtcagaagacaaagggcagcatggcggcaggctagagagaatgagagccaagcaaaaggggaaaccccttatataaaaccgtcggatctcatgagacattcactaccacaagaacagtatgggggaaattgcccccatgattcacttatctccatctgggtccctcccacaacatgtgggaattatgggagctacgattcaagatgagatttgggtgggtacacagccaaaccatatcagatggttaagtaatttatatggcagaaatacatagaataagaaatactgtgcatgtaccagctgccttaaagcatggaaaatggagtaggggaagaaaatcaattactgccccgtaccttctgagctgacccctaagtattgataaaaatttagcatcaataaatatttagcagccttgaagaatgttttctaattttagcccaaagaataggtgtctgacaaattgatcaaattgcaatttaaacttctgttcctgtaaagaagaaaatactcctttgatatcaagagaatttgaagaggtggcgtgtctcagcccttgcatcatgtttgacacctgaatcttagccccgggataccagaaggcaggcacagaactttaactctgtacatgtgtagattctgcaaatcaccttgtccacatataggatctccctttttctagtagaggatgtggcaagaatcttcctgggactcatctgtagttggatgcttttcctttcagtttcagatgaaaaaatctttgaattttctgtatttacttgccttgctaatcactccttaagacagcctggcatgtgggctctgaaaatcagagcagtattccagcccctcccttttcatcagttaattaattaattctatatttattaaaggtgatgtgtgccaagccaggtcctaaagacacactccagtaagacaaggttgctgccttcatggagtttgacactggggagatagacttgttgatgggcagttggcagaggtgctctgatataagggcatggtgctgtggaaacaggcacagggcaactcagcctgacataggtatccaggaaggctccatggaggaagtgatagctctgttgaaatgagaagatggttggaaagatacaaggggtgactctgtgtatgtgtgaagcatctgttggaa

SEQ ID NO: 64242 - DNA, 1325 bp, Homo sapiens
tattaatattacaggtaaaccaatacgagggtggcctgggcatagggtaggcaggacctaactcttctcttatccccagactttagtatttcagtatttttgatgagaatctgattaatgatctgaaagttcctcaaagtctcctgtgatttaagcagatagcttttatccttggggaaccaatataattagtattagaactaggttcatgaatcttaagattatggagttcatctttgtccagcccatctcactatgctttgtagagaataacttagcagaaacagccccctgctaggcatcttggtaattgcttcctaataactgttaatttttggtttcacaactaaaatattagggagtctggtgaatttaagaaatagtgttgaagtgatggcaattgagattttaaaagttgcctgtatgacaaatgaaacagatttaaggtgggggagaaggttacccatgaacggggtggtattgaaaatatttaacagccagtccagaagggcattggcacagtagaaactacactgcaggccccttgatttgccggacacctatccttgttgaatagtgaggagaccttgggacactacgaaggggacagagcattcactggggctttggagcactgactctttacacgctgttatggaagtatttcagtattttaaacaaccagtatagttgtaccagtcgggtactggaggtggtgtgggagagtgtctgaaactggcaggtgttcagaggtgttgatagattcttcacttgtcatctttaattcattgctgagaaaactttagttgcgctaggccagattatccccaaaggcgtttggacagtgtcacattagaatttagggctatttagaaagcactgagacatgtcctttttttcagaaaatactgtgtatacagtgtgagaggcgcacagcctctgtcttcatgaggtccccagtctatcggtggccttgaaatttttctgctctttgactgtaggctaggaatctgtccttgagaaatgattacaaggatgtttgctacaacagtgaaaagttgggcaaaatctaaatgtccaagcatgagaaaagagctaaataatagcatatccaccccccagaatattatgtacctcttaaaaatcacagacacagagaagttttcaggactcaggaactatttctgactgtgaaatgttaggtgggcaataaaaacctaaagctgtaaggaataattagtgtaagaaaggacatcaaaatgcatgggtagcactgattattatttgatggtggaatatgggtaaagttaattttctttgtggat

SEQ ID NO: 64243 - DNA, 1049 bp, Homo sapiens
atcaataccctcctaactccctacagtgattgaagttaactttatttgaaatatccaggctgggccagagcacatcaagctagcagcattcttgcacgagagtagcacgggaatgaactttgatttcattttagggaagaagaaaaaataatgaataaatgctttttattagccttttccctccccttgaagtcctacctcttctacataaacctaattagcttcgacatgtttggatttagttttgagaaaattaaagctgagtaatattaggaatttgttcagtgggaatacttgttaaaaccttcattgacccaaatctgacttataaatggtattaaataagcaaactaaagaaaacttcatccccgtcttgtcctaaaataatatttttaaaagcatatttagagttaagtataatataaatatgttaccctgattaggtactaaatgaggtactgaagaagctgtagtggcggtattgagtgtagttatgaatttaatgttcttttcttaaaaaccaagtcctctttgacacatgttcaaaggtcttccttttttttcttctcctgagctgctctttctcacctctggggcacttccctcctacacttggcccgcatgcgtggtttaggcaggcccactgttatttttgtggtaacctgacactgggcccagcgcagccccctggctcttgtgggaggtgaactggctgagagccaggctgcgttctcccaggatgagctgctgctgaagcaggctgggctgagggctgtgggcaggctgcagcaggggctgggatgccacagaccaggcgggctgggggttcaccagtgaagacctcagactgtgcggctcagcaggtggcaggtcctgcctgaggttaaagaaaggtggagttggttgttgaggccacagaccaggtagtcagggtgtttggaaacctgaggaaggttttgaggccagtgagtctcttttatctcactctgtggttctagtctaaggtatgcctgaggctgtccttgtaattccttagacaaggatgaatt

SEQ ID NO: 64244 - DNA, 1049 bp, Homo sapiens
actgaaaatacttttgatttaaaagttcagattccagatatataacattctctgttcttcaccctttatcttcccaagtagacagacagacagacagacacacacacgtacaccttcaggagttgctcacacactcctggtgtttctggtgttttcgtgctttttgtatgaaacagtccacctttcgtcatggcctatgaggccccctgtgattgactcagcttacattttcagcctctgctctagcctttctactttcttgcttggctctctcttccccacatctcctccactaatacttggcctgtgagtctggattagcctttcagaccagcctaaatgccacctccctgagaaactctcattgatccgagagacagaataaactcctccatcagcaccctattgattcctccattgcatcaggtgacatatttattcacctgttcatattcacccattgactcattatttccggcaaccattcagtcctgttttttggggagcagttgccatgtgctaggcattctgctgaatgccaaacatagaaaaatgactgggctgggtgaggtggttcatgcctgtagtcccagcacttcgggaagctgaggcaggagaatcgcttgaggccagcagtttgaaatgagcctgggcaacatagtgaggccaaaaaaccgaaataattagctgggcatggtagcatgtgcctgtagtcccagctacttgggaggctgaggcaggaggatggcttgagccctggaggctgaggctgcagtgagctgtgatcatgccactgtatgtactccaacctgactcaaaaaaaaaaaaaaaaaaggaaaaattactaaaggcatgggcccaaaccttaaagatctcacaaatcctcaaaggtgagagacgcataaacaaatcattcctatgcggtgagtgagttcagttcatttgtactggctggcaaaggtgctacctgtgggaacacagaggagtggggaaaggccaggtcaggcttcccagtggaggggcttgaagtcttgcaggtatgtgtactt

SEQ ID NO: 64245 - DNA, 1047 bp, Homo sapiens
tgcttgttgaggacagggaatgtggtatctttatctccatatccagtgcttgggacatatggctgaagggacaggggtgggaggggctctcagtaaatgcttttaccacattaaattgaaacagataattagaaaacagaaactttccctttcatatttataccctatcatgtttcagaatcattttaaggcagcatgcaagactgtaaaatagcataaatagaaggtgggagaaagaatggagaaaaagaagaggatagaggtgaagactaaatgtggacttaggaatgaaaccaaacttgccgaccaaaaccacctctgagcactctctgaggggcctgccagtgtggctcagtgcactttggtggctactgagtaaaggaaaggccaatggcttgaccacgaggtaaaaaacacattgtgttttgtttgctgtagaactttcctttgggatctttgtaaagatcagtctgtgtgacgtgatgagcagcgtcttccacatccttgcattcactctagagacaaatcccattggctgtttcttctaataacccttcatatgctgatggcagcacatcaaagcataattcaaaaaaggcaaatgtattcagagctcctggaataatctttctctaaggtaactggaatcagaaaggcactgaaacagggcagttttttttttttttttttttcatttctttctttttttttaaaataatttttattgaagtccaacttacatacagaaaagggcacacacatcatcaatattgagtcccttgtgtttttccatttgaatgcattggcatccagagccattgatctattgatctgcactgacatgaccagaacctcctaagcctccccacgctgccttccagtcagtactcccaaccctaaagggtggttgctaccctgacttctaataacgtagatgaatttcgttagtgtttgaacttggtatgaacggacgcagacagtatagtatatatttctttgtatcttttttttcctcaatattgcgttggtacaattcacccatgttgt

SEQ ID NO: 64246 - DNA, 2070 bp, Homo sapiens
tatcaggtctttgctttggaatggtcagataggatagattgcctgaaactgggtctgtggccttgtccttttgaaggagtccactgataaagaacaacaatgatcagcttgactggtggtagtgacgggagaaaggaaggggcaggatttctgttctcaatggctaacagattcattaaggggatggggtgggctattcccctaaaggctggtaatgcagagtggtcccatcagagctgcatagcatgaaatcaatcagagcttttcttgagctgtcacctgggcaagtacttagggctgatggagcggagaattaatcagggattctcaggagggtaatgctaagtcctctaatgggatgcttagcattggggcttggtgaagagatattggcttgttgatgggattctgttgacacggaagtgatttttgaaaacgagaaggagtaattatccactcctccctgctgaaattagagggaacctgttggcattggcaccaaggctcactggctgctgctgtcgttgtggcacatgttgcctcagttctcagcatcagcattcccattccctgagaattctgccctgtctctgacaatgacatactttctgtgcttccatctcttctgtggttgcctacaaaatccaggctgccaatcttcacttgtatttttctcaggccacttgttagcaaggttggctagtgtcttaaatggtaggaaaataataacacaacccactttacatatgcaaaagcaattaaccattattagtgtctgacattcctctcagctgcccacagcggtgagtcaggatcatcactattcattaggaattaattagactgtccttgatgatatcagtcatctacagagctaagaattcagcactgcctacatcctactgtctagtgagggtatagtgtatttgatattcccatagaatgtgcattctgtttggaaaatgactcctagattgaatctctgttaagtataggactttggacaacttatttaggtctctgaacctcacaaggtggggataatactaaagggggaagtgcagcgattaaataagatcctctaggcagaaactgctggcattatgcctgacacctagttctgggagaaggctgaatttggttttgaggtaccagttcactttggaagtaaagcaccttttttccccccagtctttttgttggaggggagcttttctcctatgagagaaatttggactttgactaagattacagtgaccttcaagccatcaaatgtttggttgagttgtccactataaataccattccaaccatgtgattctctttctagaaaccctgaagtggccctcacttctactgacttctctctcctcctgggctattagaaatcttttctcttagtgctcgtcccgttgccactgtctgtatgctgccctttgctcacctgctcactcaagtttgctttaccatttgtcacctcttcgaatttcttccttggccacctccttggcttctggtctttacaccctggctgctccgcctcccatatctctttccctgtagctgtcaccttttggtaattttcttctccagtcatcaaaagggaaagggaaatggagaaggtaaaatatattgtctcaaaagttaccattctcctcaaaataagatttactgatgataaaagattacctcttaaaggactcaaatcttatttgtccctctaacacagaaggactattagttgccaataattgtgattaagaaattggatcagccacccaactcttcgttatttacactgtgcctggcttacagtctgtctccttgtgtcctcctaatttggcgattttctctgggtctcttactactcattggaaccttggccagagtcaggaatgtgaaagtagctgaaacacttccttttcttgtggaaactttgggtgttaatctcagtcatgttgttatcaaagaatatttgtgttttctggttgttggttcattctttttttattttttatttattaatttttttgagacagagtcttgttctgtcactcagactggagtgca

SEQ ID NO: 64247 - DNA, 1019 bp, Homo sapiens
agtcccttcagccatcccccactgtcctagatcccattccctgctatcctgactgagcactgggcataactactatttatcttaaagtgtggctcctcggagtaaattcatactgctgtgaactgcccagagctcaaggactggcctgtggttttgtgcatgtgtgttgttttggtttgtttttgtctttttttgttgttgtttggtgggtatggtggagaggaagaaggtgggctagccactgctcaaagaattcattcttattctcataatttatctaataaactactttggagcgagaacagactctagagtatagttcagtttgaatttcataagactcttagatcgtaacgaaaaagataatagtttgaattcaaaaggcccacaccgcaggcatagtcaagttcatctggaggtcagtcacaaaatgctttcttgtggcgtaatttataccttcacatttggcaattttgaaagtcctgtgtaaatgtacatatgttggtaagaggtagtaaatattttgctgacaagttctttgaatgatggctcagtagcagcatttaaaggcagacaatcagagggttttttgtgtattttttttttaaatccaggtgctgccaagtctacaaagctggaagggaagaagccaaaagtgcccactagttatagttataccattaattatataatattcatgtgcctcagagtttctgcacctggcatctgttgatatacacaggtgggggaggacaggggcacaggatacagttgggagagagcagggaggaagacagggtgcttgctgtcaggtaacggccctggaatatggagcagtccctggtgccaggtgtggccaccagcacctgcttccctcctgggtgtccgtgttgtaatactgcctggatttgatggggtgagaaggggaggaactgtggccacatgaaaccctccctactcaggcccttggcctcctcttttcgatcaatcctttctctctcatttttgggaggcctttg

SEQ ID NO: 64248 - DNA, 2178 bp, Homo sapiens
gcactcagtaaatggttttcgtatgaatcactgcaaacttgcaactccgagtgagtaccattcttccatataaatttcctctcgtctgtgaagattatccagcttctgcccaccattgcatttctgtgtgggtgcttaatatgatacttagataataaagccacttggatctcaaaattccatattctccagtaggagttatccaagcaaagctggtgactgaaccaaaatcaccactaaagaacttaaccgtgtaacccaaaaccatgtgtatccccaaaaagactgaaataataaaatgaaatgaaaaaagctggtgactgaagaacttgcactagagctagcaagagcattatgtttgtggttaccacatccttatactgtttttggttttctcttctaggtttattttcttgaaaaggctccaggcttcggcttggaaaatcccaccgccaaaattgagcccagcagctggagcggcagtgagagccctgccgaaaacatggaaaggatgagtgactctgcagataagccaattgacaatgatgcagaaggggtctggagccccgacatcgagcaaagctttcaggaggccctggctatctatccaccatgtgggaggaggaaaatcatcttatcagacgaaggcaaaatgtatggtaagtggcctggaacactcctttgaaatactacaacctgcagttgtggtaggggatagattgtagctggtcttccagcaagagctgttcattgtatggggttgagtgatatttgtagaattttagtgggtcatccaaaggactcaccctaaactaaaaaggagagtcaataaaggacctttgggaaaaagaaaaggacccctgggcttttcttcttctacatgtgtagtggcattacatcagaagctccaggggtccaggcaggaacataaatagttgcagtggcatgtacagacaccagatggtggggaggaggtcttctgaacacagaccagatcacaaggaaatactgccacttacctctaggtaactgatgtcactaggaatgggggcctggtgctcccgaatcccttgattgcccccagcccccttgaggaagagccagcattctagatgcttatatgaaatctactctttttaaaaagccagcacttttttttttttaaaacaactctgtacaggccagagaaaacatgtatgtgcatgggcttgatcagcctctgaaccaccaatttgctactttgctgccagtttgcagttgaatggtcagacaaggcattagcaccctgggtcactgtcaccatctccccttctttgggggttgccttgaaaggcattctgaaggaaacaccaagagtgccaaggagagagagacctgttaactatttggctctggatgcctagggcagcagcaaggatccacctgccggtctggggcttgcttgctgggtttgggcaccccctaacttccttccataaatgcttccagctgcagacctgtactttttggctgcttaccttttgggaagcagatggcaggtgtagttgcttgaacattctgcttgtctaattgagcacgttgagttgacagagttcgcactgtagctgagtctaaaaagatgcaaacacaaataacctaacctcaaagagaactggctcagtattttacctgaggttgttaacttctcatgggagtgattatttctgaacaattggaagtcttttttgtaataaggtgttgtacctttaatactgcacttcctctgtcaggagccgtaggagactgtggcttcaactagcacacactgctaaggagaaagcagatggtggtgcagctgccaccagctgtgcccccaccccgccctcctcctctccaacttggatgatgtaatggaaacaaggaaaattttgctttctgcagcattggagtctctcagcctgtcacacacaggggagaaggagacccaggccttcagcatttgttttatgctcccataatatcctttgtagccagggaagcctcttcgtatctggtgaaatggactggggatgaaatatctcagctactatgggaagagtgtttcagggccctagattttctctatgtctggatctttcctggtctcttcatctcagcctggctatttgctttgtgggtcttattttcatacctgaaaat

SEQ ID NO: 64249 - DNA, 1216 bp, Homo sapiens
agagaaaagcattttaatctttgaagcttctttgaagatgattttattatgggtagtgaagggtagccttgggacactaccttgtacaactctcatttgcttacccaaaaatggtttcaatttaaaacaaaggcatagtattagaaatcccaatggggcataaccactgcacttcatttcccacaggaaatactgggaaaggtcctgtcctttcaggaataaggttttggggctgagaacataattcaaagcacaagttaacttttgtcaactccaattttgtattgttctccattgagattttagtttatagacagcagccctggtggatttaaccaatttgcctataattcaattatataaatatttttatgtgaaaataattgtataagagctcttgttggtaattgggtctcagaggcagcaggctaagaagaacaaagagaagctttggatgtgagtagctgtatcaacaatgaacttgaagattttacccttggtcttggtctcagttttcttctgtgtaaaataagatagtaaagtagttgatgatgtccatgggtcctttggactcttccattttgtgatgctatggttttgtttcttgtcactgagcaagagggtcagttttgacaaatgtggtgctgcttgggagcctagcctgtcttgggtacccagtgtaacttaaattctgagtgcttcctgagtgtgcatggttttgatgtatggattcttttctccttaactcagcagcacatttagtgaccgtgttggtggctaacctgatttaaaatgggacagtccttttgagcaagcagcattaggaattttaactcatttggaagaacaatcttactggttgtgggtttttcagcaagtggagtatacagcctgggagagtgtgtatcctaattggggctcagaagatgcgttggatgcactgtcctgcagccacccccacctccaggcagctgccttggggaggaaacatcccccctgaactccctgtctctggtcgacatgaggagctttgcttctactgctaccttggaagggaaccatggtggttaatgggactattggtggtggagactggaccccttaagaggaactgccctggttgactgggagctgcctctgacctgcctgtgacttggaggatgagagacagttgacttgggagtctccctgttgaggccccagccactcgagaact

SEQ ID NO: 64250 - DNA, 6562 bp, Homo sapiens
tttttgtttttacacagctacgtgtgactcttttcctggtagatcatgggagaggagatagatagcaggaggacaagatgagagggaagttcttgatcaacaaacttatccagaattggatttcagaggagcaggctgtagtttaaaacaaaacaaaatagatagcaaaccacgggaacacctgaatttgttacttttgcaactgaaaatcccagtcagatagaccccataatcaaatagggcagggacaggaactaaccttcactggttgcttgctgtagaggcagagaagtatataacacttaacagtctggactctataaataatatgaatcctggccctgcacttctagatatcagatttttatcgagttaccttacttctctgtctcaatttcctcaactgaaaaggaggattagatagatcttactgtgtaggattattagaagaattaaatgaactaattgttatctggaacaccaccaccccctgcaatgtttgaactgtatctagcatatagtgagaggtatgtaagtgcttatgaactgaaaacaaagaagtgctctctgccaagcactatgctaaaggctccacatacaattctgtctaatgctcttaacaatgctttgaagctggtattatcatcctcactgtatagacaggaagctgagtctgagaggggtaaaatggcttgcacatggccaatataaatggtatagctagcaggtttcaaattcagggctgtctgactctacatcttggacttttctactgagcttttgttccttccttggtagagaccgttatacataaatccagtgaatcagtattgagccccagcgcagctgtattccagccctgtgctaggggttgtcagggatactgtagtgaaccagacagacatggtccctgccctcatggagctatctcaagttcatttgcaggaaactgacctgaggtcaggactgtgtgccaaagctttctgagaagtttgagagccctttgaagatggtcaccttccacttagccttttgaagcctattcttggctaccaaggtcgagggcacctggcctgttgctggcaggaagaaatcatctcaaataacatagcggagaggatcccagatcacaagcctggcctcggtagtggccaggaggatgtctggaagattctagtgccctaggatcctataagcagtctgggcagagctgttgcttccagacatcttcctggccactattgactttctccttttgcaagcagatgtcttcaggatccttgcttaggtcagctccaaggaaggaccctttcttactgggataccaggactactggtcagccccagagacctgaattgtgaggaccagcgaagatgagggggagggtgtctctagtcagtcctcccccgctgctgacctgtgccctgcccaccaggacagcataggacttaggattgcatctttctttacttcataggagcagaagtcagaagaggaaagagggctttttaaatgaggtagtggcagaactgacaagggggtatcagaatgagagtgcacacaagtaagtgggagtatgtattgattagtcagtacagcaaagagactgaaacctgtggtcgctacactcctctggatgcagaggactggtcaaaaaattgcagaatcatccttttataagatagtatgttctcataacagctctttgaggatcagggaggtaggctttgtcagtggaggccccagagccctggtgtggaaatggccatagactcccagccctggagggtctccaggccttggcaaagtgttcttctcggagctccatatgaacatcatgtggcatctttgatttcctctttcggacctctgattcagggtgttatttcaagttaattggttagaagcgtgaaacaaacagctatgtggtagaacaggctagaagctcccaaagccgggaccccaccgatcacaggatgtatttcaaggcctggaatatagaaggtgtcagtaatgtttgctgaataaatgcttatgggagatgaattatggttcaaacagagaacgtaggtgattaagcctgtaagccctgagggcctctcctgtgggaggaagtggctagaaaaaaagaaggaaaaaaagaggaagatgtttatttaatgatcttagattgagaaagaagaagccctattttttatgttggcaaatgttagttgaagagatagaaaagatttctgcacaaaatatggacaatagcagagcaagggttaattctggaatgctcagaacagatgagtaatggggaatttttgaaatagtttggttcctgtgagaatagcagggccagcgtcatcagcattttgattgggaagcttaatgtgtggggggtatgcaaaagtgtatgcacaaggtgtgagctcatgtgcaatccgggtacaaagtagctaattaaagatggctcaagaattggtcataagggaggtagaaggaaaagaacatgaaagtattaccaagttatgctttccaacagcttttctgtggcagtggatgagccctgggattcaggaagatgtggattcataaatcatttattgagggcctgcactgtgctttgaatgtgatggggacaacagacataaaataacttaaaaagctgacctgtgtgagcagttaacataccaggcactttcccattgctataggatgtgcgatcttgattattcctcaaaaacaacccaataatataggtactgtaattatgcccattttgctgctgaggaaagtgaggtccagcaaggtcaagttatttgcttgaggtcacatagtaaataagctgtggagctgacatttacaaccaagccagtcaatacaaatgactccaatattgatatggaaggaagtatattctgtactagagatatacctggtttagtagtggagcagcacaaagtgtgatcatttatgattggggaattgacttgtatatgtttgagaatgaaagagagcatgagacagacagacttagctaactttgaactttgggaaaaagatcatgtagcggtttttaaacttattttggattatagattattttggatttccaccccttggagaatctgtggaaagctatggaccctttcccccagaaaaatcacatatttgtatgtagttttaggactgttgcatgtaacttcaggcaagttctggagcacaggttcagacttgccccattggggaaaaggagaagggaagggcattctggctgaaggaacatgtgataaaggcatggaggcctggaagggcacagccctgatgtgcttagaaatgaaaatatctcctgggggaggggtacaggagccagcattgtgtcgttgcgggtccgagtgccatgccaaggtgcctggcactcatcctgggggcagacggaagccattacatttttttcaggagagatgacatgtctcagcctgtgtttgacaaaactagatctgaaggcgtgaagacaagttagatggctgttacagtagtccggtaggagagcctgaggcctgcactaggatgcaggcggtgctggtaggaggagggagtttcagagataaaaccaacagaattggctgatgggatgagatttgtgaaaaagaaggagtttgatttcaggttccacttctggctcattgggaggatggtggtactgttaagcgagatggggagtggaggcaggagaagcaggtttgtagagaagagaggaatgaggagttaagttttgtcatatgcttgatgtactggatgaccatccagatggagatgacctgtaaggagttggaaattcctgcctagagctcagtcagattgaagttgcaggggtagtttggagcctcatcatcagagaagtgatctgataatggcctgtgatgcccaggctcacaatttatcaagggcaaaactggcatggatattaaatggaatgtctgtagcactgggagagtaaagtgattgcctttttcagaaaagggaagacagattagtggttcccaaggctcactatcaacagaaacactcaaagagcttaaaagacaaaacaactactgactaagaatatctgggagtatggcctgggaaactgtatttctaaatgctccctgagtcatttgggtgatcagccaggtttgagagctgctgggctagctgcagtctgggtccaagaagacaggaccacatttttagagtgataaacaagtgagcagagaatgaggctaacatttgaagcagtctttatgaggttttggtgcaggaaatgaatgacgctagtttcattcttcagtttatgttcactttctacctagagggaacattaccatgaccaggtcttcagagagtttgaccatgcatggaaggagacacggtatcctgaagggcagaacaaattaagagaagactttttctaggacaggggagacacttggccatttggttagttggggaaaagaatttatgagttgaggatgtatttgatggagcaaaacccagaagagactttaaagggaaaggagcctcttttcctctgatgcagaatggaggaggatggggggagggccgagagggggcctcattgcttctctcaaatgaaggttattgtgggcttttgaaaagtagagcaagcttagtacagatgtacagtatagatgttatcattgacagacagggatgattaaaagaactactcagcagtgagtattagcagagagtattactttcttttttatttgaaatttttgttgagatactgtagattcacatgcaatggtaagaaataatacccaaagggatcctttatgcatgttgcccatttccccccaatatggttacattttgcaaaactggagtgtaatattgcaacaagcgggatattggcatccacacaacccagtgatacgactcagattttcccagttttacttgaactcgtttgtgtgtgcgtactaagttgtgtacactacttgttgtgtgttagtcttgtgcaggttcatgtctccaccgccacaatcagaatacagaacagctccaacaccacaggacccgggttgcccttctccctaactgctggcaaccaccgatctgtcctctgtttataaaattttgtcatttcaaacatgttatataaatggaatcagactacatgaaccttttgggattggctttttttcaactcagcttaattcccgggagattcatccaggttgtgtgtatcaagtttgttcctttttatcattgagtagtattctgtggtgtgtatgtaccacagtttgtttaaccattctgctgttcaagggcatctgggctgattccagtgttcaggcatttcaaatccactgtgaacatacacgtataggtctttgtatgaaactaagtattcacttacatgggataaatgcccacgagtgtcatttgctggctcatatggtatttgtacattcagtatttttttcttttaaactgcccaagtgttttccagagtagttgtaccactttacattctcacctgcaatctagtttctctgcatcctcaccagcatttggtgtcatcaccattgtttattttcattgtgataggtgtgtaattgatacctcatgtggttttaatttgcatttccttaaagactaacgatgttgaacatcttttcatgtgcttatttgccatctgtatatcctcttcagtgaaatgtctgttcatgtcttttgttcgttttctaattggagggtttatgttgttactgttgtgtttttggaattcttttttctagatacaactcccttttttggatatgtggtttgcaaagattttctccttatctgtagcttatcttttcatcttttctcatgggcaaagcaaaagaacttttagcagagcaaaacttttaacagcgaaagttttaattttgatgaggtcttatttattagtttttccttttgtgagtcatgcttttggtgttgagtctgagaactcattgcctagccctaggtcctgaaaattttctcctgtgtcttgttctaagagtttatagttgtatgttttaaatgtaggtctgtgatgcatattacttgtgagggaacccattgtcatgattctgtgattttctttacaagaaggttattgggtttattcatattttgacagttgttatggcttggtcgtaggagtctaagttgggaaagtgacagggtgaagctggaggggctggtaggccatgaggcatgctgttcagaggctctggtgcatgtaggagaggaggcaggacaggaggctctggtcatgcatgggagaggcagcactgagattagagatggaaagatttcaggggatgagtttcgaggtgtggccacaaatacggtcaactgatgtgaatgtgggcgatggacatgggagatgaggaagcaaggcactgtgaagctcatccacagtgacttgattaatcacttagatgctgaacttcacagtggtaaagtgtgcatttttaaagaaggtaccgaagtaaaccaggtgctgagggatttctttgagga

SEQ ID NO: 64251 - DNA, 1231 bp, Homo sapiens
aaatgatcattattgatggtagtgttctgttggtctctcactaaaggtgctattttagagactgttcaacttgataaatctaaatatagaagtgtgttcgttgggaggatcctagaaaaaaatctggaggaatttacagtctactaatagtggttgccacagggagatgggattataggagactcggtttctattatgtttctgtattaatgggattttttcaatcgcaaacatatgttacttttggaatcagaagaaaaaagataattgtgtcaagtttattttttcctctggttctgagtaaaggatattcattaaagaaaaatgtggaaaatagcaagagttagaaagcaaaccatattgcctgggtccactgtggtgtggtgtttactggcggcggggggttcacccggggaagttacggcagggtcacagtgggcagggaggggtgcaggggtgtttggagagcatctctcccttccacttgtgggtggctgaggtatcaagctcaggggacaggtggtcagagagtggcagtgctagggcgggggaggagaacagggcattcttattataggttttaggacattggtccgggacttcaacaggtgccctggccacttgagtgtgtcagtcagctggcccagctcagagacgcataattccaacattcatgtattatggtaagatggtgatgggagagagaaaggaagacgtccacatccattccttgaatgtgcataggctcacaccgcaaatagaatgaacgggatccacatctctgctgagtatttttcgttcagcttgtacatgagagtagacgtggtttattcctagagggttgggggcttctctctgccagtaatgtttttgatggccatgttatcctttgtaatagattcctggcaagtaatcttgtatttgtgctgcctttggacagaggtgggtagattttagagaacaaaaacactgggtactttacagtgtgctacagattctcatttaattataatttttaattataataaaataaacttgcaatccgaatgtgtttgatcggcttgatagtgacctgctatgcataccctgcagataattctgtctgcctaccttccctttcctcatgtttcagttctagctaaataataaaatcaaatttgttcttcaaagcccatttggatatttattattattattattattattattattattattattattatcatta

SEQ ID NO: 64252 - DNA, 1949 bp, Homo sapiens
ctttgggggaaatatttgtcaccccaaagttttacagcttctggggtaatatttaacatatgttaataagctgagtttttttggccatttacaaaggtcccaattgctcactgtatgcctaccctcttccctgggtctgcctctgtgctctgtgacttgcccgatattttgttgagacgggctttggcaactgtctcttagatgaatggttctattacaaacacagtagcttccatgaccgcttagaagagattgttgtttatgacagcttttattgagagaggtttggtgcatgataatgtcctgataaggacatttgtacctataaagtagccacagccttaaacatatttgattgtcagtaaaatattggggatgatgacatgccagatgtgaggtatcggattgcatgtttattcaactgttactgcaatctctgtactaagatgtgcccttgtattttctgtctcacagcaacacacaaaatgcaatggtgatatgatcctgattatgaaagatgctatttaggttacttggattgtaaaccatgtgtattaggaagcattctctcagtccccatatgtccttagacagcaaccacaaacagttgttaggtgaagggaattgtcaagtgggttgaacatacgcattgtgatagggaccttttgaaatgtatgaatcttagtaaggcctggactgaccagggcaggtgatgtgacagtcaaaataataataatgaatatttgttcttgcaatgaatttttgcaataatgaatatttatgcttgcaatgtgccaggtactgttctgaacacttagcattaacccatttaaaccttctaacaagtcttatgaatagctactattatcttacattacagatgaggaaaccatggcctagagaggtttagtaagttgccctgggtcagattctcatttgattgtaatcgttgattatatttaatcatgaaagtagtggttaagagctcaggctctggggttcctatcctggctccagtcctggatgttcttactgctgcctggctagggtggaagagagttttggttccaggtaaacaatagaaaagaaagaatgggctttcctggtgtctgggataccgttcatcctgttttttgctttgtaaactcctactggtcgttaaaaaacactccatcctctctgaagccttccttaatctccacaggcagagctaatttttccctctcttatgtttccaaagcacatgacttttaactgtccattaaaggcctcatcagactctttttttttttttttttttttaaactgtagtaagcactgtcaggctctgtttctgtgggtctgtacccactgagaactcttcaagggccagtgctgctcagcctccagtatggtccctggcacacattaggcccccaaaaaatgtttgaattagtgaaagttgttggtaataaaattccatcttgtgcctctcaagagttttctttcctacattcttggcatttttatgacatttacaacattttaatgaaacaacaagggcaagaattttgatttcataaataagaaactgaagcacagagaccaggatgttttctgttagattgttttatcttgagaaaccacctggtgaaacaaaacttaggagaattaagtcatttgcaagaccccactcccctgtttacacttttccatcataaccatattgatcttacacctgagatgttgtgaactagagtaatttgttcacagtagtaaagcataatcctagaaaagttagtctttgaccatttcttttccctggtgtatactggacataatatgtttgtaagcttatttgagatgtttctaagtggtaggggtgtgtgtgtgtgtaaatgttacttttttcagatcgactgtgggtttagttttagttgtctgaaaatcacttccaccactgattattc

SEQ ID NO: 64253 - DNA, 1460 bp, Homo sapiens
tggggaacgtgtgggcctgcatgtgctctgggtaagtgggggtaggagagtaggacaagtaacttcccagctgctctcttagacacagagctggagggatctggagagatcagcccagcctcctcagttttcagattggaagctgctgcccagagatgcccttttcccggttccagttctgagggcgagttggcccagcttggttgcagctgctcctgcatggctctttcctcctgtcccacaggtcctgggttccagggcacagaggttgttcccagtttggctggtgcctataatgaccatatcatttaatgttcagactacgacacttcagagaataaatgggggcaatgttaacaatgacaccaggaaaacagaaataaaccttaggcaaaccaggatatataatcttccttcctgtgccttcacttttggctcaattcttattcctatgccaggtgatattccctcatcccctaccgtcctggtcctatggcccacatgactttaggttccgggaacttacagatcttggtctttggaggtttggtctgtggatcttggtatctagaggttagaaacctcagggatctcccatgttggagggtccaggagatggaaaacctgggaataacatcgtgagcatatctctgacaatccatgactattcagaacctagatccaggaactttgattttcagtagctagggtgggtatgtcataatttactaacttagtttttttttccaacatacatttgtctcttgcacgtagcgtaagatggcatgctggtaacatacaaatcacgagagcagcatcctactctgcaaacctgtagccccagatagagctcagcaactcagccatgcaatcttctgccttggaggtggaggggagccaaggccctgggctcctgacaggtgtgtgacggagcagggcatagttacttgtctcccaggtgtccacagtcacagcacagggtgggaggggacatgagcagctgggctttgctgagaccaagccaaatggggatttaggcagagaaggtgttctttatttgagagtagagcaggtggagatgaatgctctgcctggtagctttctcggactgcactggcttgtttttctatctaaagctggcagaacccagaccaccatggatcctcaatgacaaaggccagaggagaggaaatggttcttcactgggtcttctggctgtgtccttggacctctgcctctcccagctgaccagagtggtctggatttgcccattctctcactggagttaggagtaggattgccggacctggcaaatagaagtacgggaggcccagttaaattggaattgcagataaacaaaaagttattttttagtatgagtatatcccatgccgtggttatattttatatagcaactctacttagtaaggactggcctgattttgcttacctctggggca

SEQ ID NO: 64254 - DNA, 3179 bp, Homo sapiens
tgccctacagcccaggacctgcccagggggctcagcgtaacagacccaccttggtggggggctgctgcttccagctgctttgcagcttctgtcaggccagggctgcttgagtccttgctctgctatttaaatctatcactcgttggtgacagctttctgcttaagcagtggcagcatgtatgctacaggtttcagctcattacctctgtagggctgttcctggactgctggctgggggaaaggccagccatacagactgaggcaccagccccaaactctgtattggatgttgctgagcctgggtggagagtggggccgtgctacctacagtgcctgctacctgtccttcagaggacctgtctgcagcagggccagagcctaaggttttgttttctcccagcctgatgggactgtgatacttggacatggacatcaaggagatgtgggctttgccactctgcttaagtgggcctgggcaagtcattttacctcttggggttcattttctctgttaataggtggtgaacttttcaagggtgattaacatgtcatctttatctccatatcccttggacacagtaggtactcagtaaatgatagcttaaatttgtaaaatgggaatgataggacccttatccctaatttgtactgggcagagacaatgaatataattctattaaactttgacaaatgggaataaagtgaaggaacccttgtatttccccaggttcatctcccatatccccagtattaaagaatctcagatgaatggggacttaaaaagttcatttgtgtatctttatttactgattcaaacttttactacctttgccagttgatctaaatagacatctctgtttaagcatcttctgtataaagaaggtgtataaatagtcaagaagcacatgaaaagatacttaacattagccattagggaaatgcaaattaaaaccccagtgagttaccacttcataccctcaggtgactatggtcagaaagacaataacaagtgttggtgaggggggtgaaaaatgggaagacttatgcattgctgatggtaatgtaaaatggtgcagcctctttggaaagcagcctggcagttcctcaaaatgttaaacgtagagcaattctatttctaggtatttacccaagagaaatgaaaacatatgtccacgcaaagacttgtatgcacatattcacattagcattatttttatatgtgcatctgaatgccctcatctccgttatggattggatgttaggacaccctatagaggagatttccagggatagctactcttgtgtttgtcttcttatatggggttcatgcataggaaatgccaagcttttggcctctctcatttataacttccagataacagcctaagtttggtctatgtttaaggaaattcaggagtcttttgcagggcttctgtagaaacctttatcaagtaaaagtatctggtgtttcccaggctttgctctcctgcattccttgtagtcagcagggaaggaccccttgttatgatgtgagttactctcaacatttcaggcttttgaagattaattcctgatctgagggaagattctggcagaactgggatatctctagaatgcactgataagggccttgtcagtttctggggtgggcaggtccttcttatagacggttttgtgactaagatacctgatcagtaggctttttttcctggctgtaactagtgatgggttgcaggtgggtgcgtgtggggatggaacatcttagagttgtctacaaagttaggcatcagagagcatgggtatcatggagagaactttttgattgagatttggggccaatttaagtcagttctctaatattttcttgcatttgagttataagctgttcctataagtaagtgataagggagtagtgggaaaatgcatccttaattaataggcagaataaagctaggtggccataggaaggccataaaaagcccaaggaagcagccctatttatttgtagaacataggtgaaatgtttattatatgcaaaacaagttaaaccaaaacatctaaatgcaccatagtatatgattacagaaacctgaaagatccaggagtaacaataacaaaggaacaaatgaactacacatgaacactaatcttccctggaactaaggataggtgggcacttagaagtgcttctgggatgggaggtcaggctgcagggtgatggacattgggcatgtgcttgggacactccttgaggcacatggagactatttgagatcacctctctgatcagaaagttgtttggtgagtaccaaaataagacaaaaatgagtaagtgtttttaagggagatttccctcaagctgtgtttggtagataactaataactctctgttctgggatattttctctctaggccactgtcattgacctctcaaatgcttgggggtgagaagggtaaagataatataaaaatatcaagaaaaggaaagtaaagggaaaatagtaaaaaaaaaaaaaaaaaaagtcctatatagtcctatgaagaaagttttgacctagatataaaaatataggcaagtctgaaatcttgttgcttttctctttagtttgccttcgttgatataagtctgtttattcatgtctgtatgctaaccgctgacacttaaatgtgaaattgttctcaggactctgctgcattgtcctactagtagaagtcctggttttagaacataaggtctggatatgtacagcctagcttttggatgagcaactctgtgcaagttccccaacctctgttcaacttcaaaataagggcagttatactgaacgcctgtatgggtgctatgaggattacatgagatatatagtaaagctagccaaaaaacattggttatgggccaggtcccaaaatgttacaaaatgagctgggcatggtgactcatacctgtaatcccagtggtttgggcagctgagacaagaggattgtttgatgccaagagtttgagaccagcctgggcaacatagcaagaccccatctctacaaaaaattaaaaaattagccgggaatgatggctcatgactgtagtcagctactcagaggctgaggcaggaggattgcttgagccaggagtttggggctgtagtatgccatgctcacacctgtatagccacctcattcca

SEQ ID NO: 64255 - DNA, 2192 bp, Homo sapiens
tttttacctttcccatagttgcctcctgcacacatgctctgtggttggcccccgttgctgactgctgattggagatgacgtgtacccatcctctagacagtctgtgcttttcctgtctttggagcttccagttccacccccatcagtttttttctgaccactccatcttgccttatttctctctctttccttttgactggaagagtactcatcttttctaacatcttttcataaactgttttgatttcacttatattgatttttaacgtataatgtgctggtgttctatttcctcagttagatcagaaggcccctaaagacagggctccattggtgttaaactgccatcttcaaggtctgggacttgatttctctttttttacctccacaacaaggcactcctctgcacccagtcggaattcagtgcctgtggtcaagtaaatgcatgaaggaagttggaacccgtggtgggtatgtttatttaaatgtgtaaaccaagaatgccttatggtgtgtatgccagaagtgaagttctcatctgtaattaccaatgaagaaaacaccttgtatttacggttgagtttggcaccaaatcagcactggtctttccttccatggtacaaatgttgtaaaactctgaatgctgcgtttccataaaaggagcatgcatttctgtggaggtggtgattgatgttggatgcctttaggcggtgccatcctactcatgagggaagcagtgctgttctaggctcagtccacgaattggtttgccttttctcctttcccaactctgccacctggaaaacaaaacaaaagcaacaacaaaaccccccccaggcattctgcctgctggcaccctgttagaataaaaagattagaacacttggtatctgttcactcactcaggtgaagtttgagatgtcctactgggcttttctatctgtagacccatgaaaatctcattgaagaggtgttgtggaaacatgagaaatacatgtttatcatcatttgtttgtttatttacctacctgtctaccaaattagaaaagttccaggcgtttatctcagtgttttacaaatattaacttgtttaatttaaatttcataaccaccctgagaattgagtggtatgttttcattatcccacttcacagataaggaatctgggcacagagcactgaaggcgcttgttaatagtcacatgcaatctttttcctatttcttggcttccagtaatttttcaggtaactaaatgcctgtgattcccaattaggtgtcgagttctatggcttttatttctataaatcattctggtttctttttatggtcatggctgtacttgtgtttccctctgaaattggcagaagatgagtgtgtgtgtgtcagcgtttttaacacccactaaaaataaatctcctacagtgctttacagtttataattgctttttcagatattatcttccttagtccagcaatgctggtaagaagagttattatttatttccatttaacaaatgaagtaagtggcttagagaggttaagagactgaacatatccttaatgtgattagtaccttggaatttgaacccaagtcctcttaatcctttgctcttccaagctgttacgctgcttgtaaattgggaaaccctatagtctgtttttcttgaagttctttgtttttctaacctccgtcaaaataatgtagtgttttgcttttttttaaacttatatcccaagcctgtatggtagaagatgtgaaagtaggggggttgagaatgcagtttttttgaaagagaggagtttatcagatgccacaagaaatacttttttctgtttttctttgatagcaaaagagtaaaaattttgcaaggcttttcttgatatttttggagtccaggggaataagtgcataatggtaataattaaatacagtttccagtaagggagttttctcaggtttagctgcacaggcttagaaagttgggtgagagaaggctttgaggagagattagaagttggagagcccatctgtcgtgccagtatacaaaaatgtccgtggatgatgactgcttgcacctccagagctagtctcctctaggaaaaatcaacagtcaccagtgcaggagaatgaatgagtcagagctctgggtcctgagccggttttacctcttagctttgtgatcttgcataaa

SEQ ID NO: 64256 - DNA, 1032 bp, Homo sapiens
aattatatattgtggatgtctaattccttttcaaacctagaagtaaagatcatgtaacatatcctagccaatattaaagcaatattattataaaaatgatctctgatgtagaaccactagaattagggccttaggtctacccatattgagtttgccctttttatttgcaaaatgcttgatcccagattgctatgagagatagacataatagtgatctttctgcttttgatagttaggtatcatagttttaagacagcccatggagttttagaaattgtgtctgtgtctacagaatcatgtgtgtgattagataaagattagtaggtacagaaactagctgaagcattgattgatacaccttgtaccttccaaagaattgatctgtttaaatcaagttagttttacagctccgtttgttgcttctctagattgattaggtggttttatgatgtttcttttatttttttcactaggaattttgctgagtatttttaatacctgaattgacagactggtttatcggtgttgggggtctgtgtgagcttctcattagtccatttacaatggcagcactttcatgtttaaatgtagacaaacctgtccctaatatttatggagcctgaggcaaagagtgtcagtggaagctcatgtactctatgttgaaatatttaaaggaaaattcgagttaatacactgttaaataacattttctcacctcctactttgacaaatttactttaataataacttggaacccaggttcaaatttagaggcctgcccccttctcttcccactccagctgtatgttgtaacatgttcatatggatgctgcagattgcacaagcaaaccttcttctccttcctcctgctaacagctgttcccaggccactccttgcagtgaagcatactcacacctgtgacacaatctgcccttttgagaacagattcagggaagtggcctacacagaccttggaagtggaaaagggttattggcttgagagttccaaagtcttgggtccttggtcgatg

SEQ ID NO: 64257 - DNA, 1042 bp, Homo sapiens
tgttaggtgaagtgtcctcttgatcctcaaaggctcctcaccctgggaggaggaggaagatggccagaagaagaccagagcaagaccctctaaagtctagggcccaagttgggccctctggccgaggtctaaggactgtacagaatatggataaaagcatgactaacttccaactgcctttcatacttcagagcttgaaaccgagtagtttcaaccaagtagttgggttggcctaagtagctttgccatttaacctcgtaaatgatctaaacatcaacatagtctgagagttgaataaaaaataagtgaagtagttgttcattgtcaggtcaggtttgaattctctcatacttgaaatccctgcaactgtgaaattgcctgtaggaattgcaggttgtgctaaacaatcaaacgaattggtaggttggctcccataggcaaaatcttgaggctgtttggggcaaaaaaaattacaaaatataactagtaataagtgggatgcaataagaatcaaatgtgatccaattttctggggaagcaaattgcattgcactttgttttattttaaaaaatgatgtgaaaatacagagcatcacagcacagacaaatatcttacaccagttttcacaataaaatccccaaatgtgaaagctctccctttttgcaaaggcactttggaagcaataatgtttgtgtgcatagttgagtttatcagagtatactgattttttatcccatgaggttttcaaggaaagtgcagctggtcaacctttagtgttttctttgccacagggtatagttctgtttctgtccgctcaaatacagtctttcaggaaacgaattctctgtaggataccttaaaatgtctttgtgttgtaacacagggtagggggcagtatgtttaataggttagtgtggatacgtgggtcctgaaatcacagtcctgctttttgctcctggctctgccacttctagttacttgtgtaaccttgagcaagttacttaaccttctctaagtttcagttttctcatcagtaaagtg

SEQ ID NO: 64258 - DNA, 2762 bp, Homo sapiens
tcagtgatggagtcctgggccactggggcagtgtttgggtgctgcttccactctggctcttgacaacagagtttgttccctttgaaacaagtttgtaggaaccagagtgtgtgaggggcctttggcagcgctgaaggaagggcagctggaatctttgaccccctcaggcccccgctggcctggctagagagctctgcctggaaggggacctctgttgctgggcaagggaaggcacctttggctttaggaagcctgagggtcttgtccctgtcctggttgccagggctctgcctagtgccatggaagggaagaccagattggaagtgattcagaagccgaataaatgaagagcgtgacagcacttgagagtctttgcgcatgtcatctcatttaatcccctaatagcagcaagggcgagaggcttagacatgttaggaagcttgtcacaccgtaagcaagacagccaggaattctgatctcaagtccagccacccctgaccatcgcagagctctgtgtgtgtgtgtgtgtgtgtgtgtgtgtgtgtgtgtgtgtgtgtgtgtgtgtgtgtgtgtgtccccgtccgtcccgagctgtgtgtgtgtgtctgtgtgtgtgtgcacgcgtcccggagcgcacgcacccatcagtgaatgctgcctccacgtgggcaaggcatatgcgtttttctttcattattctcagaaacaggcatccagtgcagaacgggcctgtaatggttgctgactaagtgcttaatggagatgtttctgctgataagcctcagttgaaaagggaaagacgcaggcaagctggccaacatcaaagccgggctttgtttatagataagggtaggtttcattctgtgggttccagagcccctgtccccaaatctcagagggggtgagttttaaacagaaactgtgtttatctcccgcagtgggctggaagacaggcctgctgggactcagaagcttccctccctcccatcctcccttccttcctttttccctttcttcttccctccctcccttcccagatagctagccactgccctcatttataacataacataaataatgctctctctgccccagctgtttccgtttggtttttgttcttcacatattttattcgtacttgattgtgggttatttaaagtaatttggaaaatatgaatattaagtagaggaatctggagaagaggtcacagaactgtaatggacccaagctgcaaaaatgcaaaacacagtgtgtaaccatatgtgtgtggaccttccctcttagttaaaactggccatgacatgatggtatgcccctcttaacaggtgtttcaactagatgtaaccaagtaataagtagcttcaatgattgggtgatgacgattggactaaattgtaatctgggcagaagtatagaaattcaacagttttaagggcatttgtgatatatgtgtatgtgttacttatgtgttcttcaggacacagatggggccaaaggacaaattttctgtgttttcagcactggggtgcatgagggagcaggtgtcggccacaccaacacatataagttgttgcctgcgggtacagatcaatgaattctttcctgttacttcatggctcagaggaaagaaggaagagccagcaagttaagatcatgtatatgacgtagagctaatccttttaaattacatgttacagcacttcaggttttgatatgcccaggactgaggtccttttaggttttcagaagactgagaattcttaggaacctagacagggcctctgttaaggctgagcaagctgcggtctgccttcctgtctcttctgttgggcagtcacgggggtgctgatgccaggtggcttgtgagccttcccactttgcactgtgcctgcactcgggtggctttttatcaatccgatactgttgcactcacgtcccactttgaggctggatgaagtcaagctgcccgccttgctgccaccctctctcattccagtgtctctgaccacactctcactaggccctctggaaatcccctgtaggattttggaggagcattctgagaacggttctcttgtatacgctcttgttgtcaggacacttgagccaaagttgttggtcatttgccccaggagccccttttcttctgcacgctctttttccaggggatttcagggtaggttcaacactttaagttaccccgccccctttttggtatttgtagtggcttacacgccccaggtaactgaaaacttttgttggcttattaggggcatttccacattggagctgtaatccgtggagatcaggaagacgttttctttgggtgacttttttctcctggtgatgcagtgggccagtgcaaggaggagggtgagtttagttgctatacacaagccaggtacaagacttccagagtgagagggataatttacaccctgtggctatttatttagcacatcttttgtgtgactctccagtgctagggacagggatctcaagatgagtaagacctggttcctgctcttaagatgctcatggtttagtggaggggacaaagtgggacacaggtgatgatggcattacaatgagaatgtagagaacctacaactgctgcacccctccctgttcttcaagatgccttctctggccatcagggcagcatgtgcagaggcccgctggtttggaatagtgtttctttccatgtgtgatgcagcgttccctcaaagccgaggcgaggtttatgcacactgcccaattg

SEQ ID NO: 64259 - DNA, 1562 bp, Homo sapiens
catgcgtagcttgaaataattcttctaacacctagaaattagccaattttacttttgaaggagatgagaataaacatttagtggtcagccagacggagaataaatggccagcatttgagattttcctgctcctgtttatggagagagactggcatgtacctaattcccaacttgttgatctgttgtaccctattttaattattttgccagatgtaaacattttcccttttttgtgaacggagtgtttacaccatctatcacatttaatgtattcggtgcctgtgagtgccgacctcttcaaaatttgtcgacttcatcatccgtgtgctgtccagaaatgagatcttgatgccccccaaatgaattatgaaaagcttttcatagtaatataattgatccactgttggccacacttataaaaaaatcaatgttaacgtgttaatatttcatgagtacccacgttgccagctccttgcaatgggaccaaactataaagaatgagaattgtttcacagtagcccagcacatggacagagtgccaagaaagggagttcagggttgacttgaaagtttgaagcgcaacagggccattgaaacacagtcctctgactcatgtcagattgttataattatttaatgcccacaatgcagctttgtccccacggatttatactggagaggtttcttacccacacattgtggttattagctgcaaagaaagcggcgtttgtttataatgacatggggtatatctggatggcaaagaaaacactgcagattctgtcttcttaggaaggaggcaggaatttggcagataacctataggaaattgggagacatgctgtcattacttttcatatatgtgggtggttgcagccaataaccattagacaccttttagttttcacctttgtcccaaactcttgagagaatggaattgcatgcttacttttcatctatatgacgttatacagctggtatgcccagagtgtatctcaacttaatctttttaaatgtgtctcccaaaatccctttctcaaggttctacatcctgcctccatgaaatttggtgtcaccaacattgtcttacagaaccactgttactatttttataaagagtttataaatatgttttgaaaagttctcatgtggctagatctcatcaagggattttttttcagacttgaaaaataaagttaaagaagtaaggctttggggcctccctggggacatgtctggtttggagatcagtggtggtgctaatggccctgagtccggcatccggctccttgggagaagaaaggtcattaagtcagagaggaccagtcaagtccagctcctccaaactgcttttctgtgtgtcttccttggatgtcctcccttcttcccctacatggaactctcagttgcctttgctgtcagaggaggttcaatatcaatgggtttctcaagcttagagggcaacagggagacattgaaccacagtagtgtgaaattgtccgcaggtacttacaagctggggtgtgcagatgcaatttataattgcaccggaaatacttgta

SEQ ID NO: 64260 - DNA, 1220 bp, Homo sapiens
gctctgtcacccaggctggagtgtagtggcgcgatctcggctcactgcaagctccgtctccaggttcacgccattctcctgcctcagcctcccaagtagctgggactacaggcgcccgccaccaagcccggctaatttttttttgtatttttagtagagacggggtttcaccatgttagccaggatggtcttgatctcctgaccttttgatccgcccgcctcggtctcccaaagtgctgggattacaggcgtgaaccaccaagcccggccggtaacaaagtcttaaaagcggtcttattctgtaatacgttggccagttttaaaccatttgcagtaatgcatttaaaagatgttatttcatagataacaaaatagcttcttgattttcatgataaacatagacttggagcctttttctttttccccgattgtgagtcagctcttggagggcatggacagtttctcacacctcctgggattagaggtggagaaacagaatgggctgggtgggcagagactgggtggttggagctcagggcctggggcagggagttgtggggagggagggtgggaaggtgaaggggaggtggtggcaggtcatgggggtccactgtgtgccatactgtggaatataaacctctccatcagtgcagagccacacagcaaaggttttaagtggataagtatgtatggggagtgggacgtgatctggtttgaataatgtatactcaggactcttgccatacagtaatttttttcaacccgctagacactgttgctgtggggaagtggagagtggtttcatccatatggcagcatcatggctgtgtagccctaaagccataggcacctcccaccccacccacccacagtggcatccacagttttagtctctaatagcactttgtctcctgagaagaaaagcaaagttgtttttcctttcttcttctctcatccccaaagcgttctccttctcacccaaaccatgatctcagatcttaggagttacaggtcagacatgtcacggagcctgtttgagatcagttgtctacgttggtgatgaaattataacaccctaaaagaagactttggagtaggaacttgccagggtcatcagacatggttgggttgagagaggaaatgcgattatacaaaaaacgtagaatacaaagtagtgcttattctgtgatcatggctactgtttcaggggacaggactag

SEQ ID NO: 64261 - DNA, 1751 bp, Homo sapiens
aagtgaacttaaaaagcaattcaaagctagctctaatttaatttataatttttacatctcaagacaacatttttagtagataattgtccagtatttggttttgtttttttgttttttacatatgtcaatttttacttgtcttgcagtttccattcccccagcacatctcatctttgctcatagcagcgaagaagagagagcatctgtcctggttctccttcaccttgctaatcaggctatccccctcagctcttcagggaatgtataatgacaaattagaccttgtaggacttgtgcatggagcttcagggtcttttctaaatggcaaaccaaagtggccaacacttgctagctgtgtgatcttgagtaagttacttgacttctgagctctgatttcttgcctttaaaatgttcccacttcataggtagtggttgattcacaaggttgccatgaatcaacaacgtacctcagtgaggtacctacctgtgagaagtgcctagtccctgaaggcgtttggaagtcatttcccagggcaggtcagatactgaggcttcccaggctgctgtacaggtgggcatgctggggaccttctcagacaccctggcctctttttctttccatctggcacaagagatgctttttctagttgggacatgcaggaggaaagagagagcaggtgcttccttgatgtgaataatttatttttccttcagatcattctgataatgcaccaacctttggatgggaaaaggtgcaaagctgggatatgcactagtgttacatcactggagttatgttggggatatgtccagtgtcagatttttttgtccaaaatcccattagcagaggaaaggaagaagatacatttccttggcaactattatgtcccaggcacagagattacagaggcaggagtgacagttgttgagggatacagtgggtatgagagggagggatgtaaactgaagagttcccatcataaaatgtggtagaatgttcacaaaggctcacctaccctaccccagggagacatttattctaattttgggggagactaagtgattggggctattcacttctccgagacaccagaaaatgagaacgtctgtaaaattaagaatatgaactctagttctgtctgcatttccaacttcttcattgtttcctttctcacaagattttaaatcccttgaggaagtcatttttcaaacagtattttctgtgaaatccccaattgtaatgtctactttatttactcctccactcatccttccttatcaggtttattgcatagtataatggaatatatgaaattaaaaataactacactggacactgggctctgcatacagtaaatattcagccgttgtctgcagacttgcctaagtgtgtacgcagtagttattctaggcaggtgctgtgctccaggctggaagttgtgtataggatagagagagagggtgcctcagagctggcagtttcctccagcagtcaaattctgaacacccagctatgcctcttgctggggaatctaaactttcacctttcagagaaaacaaggtctttggaaccagtgtgttctttcaaacaatgttggatactgcccgattgtttccatccgggaaccaagttttcaaaaagaagtccggctgctttgttaagataagagactgttgtgtgaaaattgctgagtgagagctcccactggaggctccttgtcttccaggccattaccagtttactcctagct

SEQ ID NO: 64262 - DNA, 6362 bp, Homo sapiens
tattgctaaatgagagttatcccatgttcatggattggaagactcaatattgttaaatcttcctaaaatgatttgtagattcagtgcaatccttatacaattttagtatgcatctttttaaaaaaaattgtcaagctgtttctaacagtatagaaatgtagatgacctagaataaacaaaacaattcggaaagggaagaaaaaaagattaggggtcttatatttcttagtttcaaaacttactacaaagctatactattcaaatcagtgtgttactggtgtaaggatagacagtggtgtaagcatagataatggtacagaattgagagtctagaaataaaccattacattattgtcaattgatttctctacagaggtaccaaagcaattcaaaagcaattcaattcaatagtcttttcaatgaatagtgctaggacaattggatatccacatgcaaaaaaggtaaatttaaattcttaccgcacacggtacatagaatttaactcaaaatggatcctaggctaaagtgtagaaggttaagctaaatcttttagcacaacataataaaaagtcttcatgaccttgagttaggcaaagagttcttagatattaaactggaagcacagcatgtcaaattacttttcgagaaggtttgctagctcattcagtgggtgaaaatgggtgaaaagtgagcacattatttaactatattctcttgttcctagttaggttgaacatatttttacttaccactcaaaaatattaccactttctgggctcttgtaggtctctgtcacatcttcgaactcaccaaacctttcaggagaaaatagttccttggagaagtacataaagttgtgggactttgtaccttggattacactttccctgtcaactctgggtcctccatagtggggaatccatagtggtttttgtcctgcaaataaaacagtgtgactaagtaattttccagaaatgaacagcagagtgggaaatagacataagtgagagtaatataacaatcacggtgtgataaattagcatgggatttgaaatcaacctgtttgggttcaaatcatggttcacctcttaccggttttgcaaaccttgggtcagttacttaactccatcaaatccttcacttcatctgcaaaatagagataagaaaattccttttctcttagtgttgctttgagcatcaaatgaaaaaatgtgtgtaaatgtttagtgctttgtacctagcatataggaacccattattaagtaatattacagtttggatttcagacctgtgagcttagggctcagactctagaggttcctgaactaggttttcctaggcattgcatgtagagtcttatcttaaaaaagttttaattgaaagattggcagcaaattcttcttgtcacttcagacatgatttcctttggggctcttgtactcccatggtttgaattcatagagtaactcaagggcaatagggaattcctctcaactctctgtctccaagaatacctctgggtgctggagagatgccacttatcaattctgttgttattgtttttagggctgtaagccttctggatagaactcagtggattttcctgagtagtgaagaattaagtgagatgagggaaaagcattgagagtaattatcagcagtggactatgcctgagtttttgttagccctgaacttacatatcctgactttactagtccatgagttcttcatagtcaggaactgtaccttttaattctctgcatctcctaggggctttctcagtgctaagcaaatagtaaatattcatgagatactgggattgtgcccagcattttctgagttttcaaatagatgaagttatagaatcatattcatatcaaaggaagttcctgtgtataatctcatttcattctgtcaacaaccctaggcttggggtgggtgtgttggtgtggatgagaacacttagtatccctattttacaagtaggaaaagtaagacccagataagttaatgacttgctaaaaatgatacagctcttgagagacagcagacatttgaatcccatctactgattctaggtcctatggtcattcctttgctttatgttgcctgttttgcagactgtcaaacgcatcagacacttccagtggtttttcagtgggtttttgtcctagtgacagtccacacatcctgctctcctattatcacatttgcaggaggaagtgagacatcttttgacactggtgatatgggagaaggagaaaaatcctagaatcaaagatacttactccttgcttccctctactcatactctctggaaagaaacgtttagggacttcttgtgttgtgcctgttgtgccaggacagctcaaatggatgcttttgtcacagcccctccacctttagcagaagttgttgtattcctagccaatgcaaaaataaacaagtgagggaaaatgacatttcctggtaatggaaagtagcagttggtgagactttagacaagaagcgggtgttccagccaatgagcagtgaccacagtggagctagttgtcggtttacttggctgaagaatatgtttgcctgcatcctgattgtcaataaagacgtttaaaaaccccagcttgactctggcgggctgagggtgctgccgtgccactgctgcaggatggagctctcttcctggtggagacttgattcacaaggacgctaattattcattcttcctccgtgcagcccgctgaaacaattgctgtgcttgttcggtgcacagtgtggcgtcggacagtcaggcctttttatgtaactgatggcgctgtatgttcatattgttctttatgtacttattttatagcttatgcagcagacattcgagtcaattagcttcttgtcttgcaaactgggcactgctgttctagaaccaagttagaagggtgtgttgagggcgacccgggcagacctctctcctttctttttgtgctgtgtgggttggtttcaagttacagcatttttattggctcttgtttgctgaaccttggtttcaaaagctgatgtttgagttgaatttcttaaagatacagcttttgttttcacaaaactgaagtcaggcaatatgcatagcccttgggagtgtgggttttttttttttttaactgagtgattttttttttttttaaatggtacctattaaccaaaaaatctaagcgaatggtttcctaactcacttttccttaactggcgtcagcatggagtccttgtttcttattgatttgcatttttttttttttctgtatagccttactcctgactcttttgtcctgaattttttttttttttaccccgtatttcttgaaacctgcctgttttggggacaagttggagtttaaataaattagttaaattctgttgtgtatatttctgcagatgataatgtttatgaagcatagattcactgttttgtgaggatttttaaatatcggaaagaaaatttcctgcttcctctttccatctccttttctgtggttttagccccctcgcccttaagagccatcggtttgttattgctgattgaggtagtggtggtggaagcagaggctctgatccagagaaactccccaagacggaagtgcagcaggcaggatttttatccagcggattttgacccagtagaccctaaagaaggtgcatgacagagactcatatttaccataccattgaattctcagagctttccgtggtggctggcccaaggcaattgttcaaaacatacgtgagagaatgaatgaacaaatgaccttgcctaccaaacgtctccctccctctgtgtaagcatcccttaaactctcccaacccaggtggccttgacatatcccatgctcacccaggaccctgaagtatgcctcggagcaactggtttctcctgaccagttagtgtcaactgagactaatgcagaaaacattgcttaccctaatgtttgcctttagaagtaaaatccaaactgaaggaaaggaccttgaatttgttttttattcttgctgacttggaacattgataatgctcatactgatcctctggctaaacatttttcttcctttatccatgtatttattgagctctccactgttagcatgaaaggtggagaagcaggaatacatggtgtgtgcttctgctagccttttactgtccagttgtagagagtaggcccagtgaactcagtcaggtgtttataagattgagcaattgagcagttgctgtatcctgaagactgtatctggtgctttactcttgtataattcttgagacaggaatacctgggtgttggcatcaaggggctgttgaggccatctttatttctccataacacccagcacaagacatttacatgtatgggttgggtagggtaggagttcatagctgtccatagagcagggcagggacatttctgagaaggtcagagaggtttgatgaggtgattttcctgagctgggccttgggagtggagagatagagggagaacaggtgcatggacacagaggccagaagggcatcagacaaaggacccctggggctgtgggaaagcccccgagccattgggaaatagaggagcttagccttgctaagaggagagaattcagagagccatgaggtgattgaggtttcaaagaccaaataaacaaaggaagacagcatcttggggagtgggcaagaccatgcctcacctggcaggtgaggtcagaggatacctgacctacgaagatccacaaaggctggcagtggggggcatcccagtggacagtgttgtgatgagcaaggggcccagaagtaggaagacttaaggagtcctaggccttaaggaagactcaacccaaacctggctacctctttaggcagcttgagtcttggcctctcctaccagctcctgaagggtagcttcatgttacatctggctgcagagaccctcctttttagaagcaggcagggagtggtgcccaggctctcaggacctcctcttgtctgggagactgcagcctccccacacgacacagcccagcccctttgttcttgagtgcctgctgctcacgtggtcttaataaacaaaatctagaacgtgctcatcctttaaaaaaatctgttagcctggttaacgtgtatataatatgtataaatatatgtatatacactaattatatataaattatattttgtgtcagttatatttgcaatcacacacacacacatgcacgcacacgcacatgcacatgcacatgcacattcacattgtaattcctatttaaagggaaaaacgagccagttttttaaagggaaaaaacaagcaaaaggtgtagggagagggagacacccatctctgcccccatccgctgattctcttcccttttctatcctccctctggctgggtttacggacaggcccttcttcctcctgcccttcatctgccgcaggacctcagtgctggtgatggtgagcccatgaccctccttctctcttgttctctgctcttgtggaggctagttccagccgttcagttccactgaagcaactgctttggcagacgaagctctctctgcctgaaatttcttactttcttccttctttggttcccatttcaccactccatggttcctcctccaggaagccttccttgtctggttttcttccttctaactctccccagccctgtctaaatcttacccttcttcagagcccatctcaaattttgtttcttccatgaattctttcctatagagcttgtccttctcctgccccctctgccagctgagggctttcttctttccctgaattcccccagtgccctgagctgatcttagatctgccttgtttgccattaattgaggagtacatattccccccaaactccttgagggcagatgctctgccttattgtctttgtgtcttaaaaatcttgctcttgtatagtcaagaaattattgtttgaaatggtttttaaaaatagggttctagaggtgtttttgttgttgttgttgtgttttttgtttgtttgttttaccaaaggaaaatattccacctggctgatatagtgagaccttatctctacaaacaattttaaaaattagccaagtgtggtgacgtgtgcctgtagtcccagctactcaggaggctgaggtgggaggattacttgagcctgggtggcagaggttgcaacaagccgagatcatcatgctgctgtactctagcctggtgacagagtgagacgctgtctcaaaaaaaaaaaaaaaatgtagagtctcagtttgcctataatatttatattgcacaataatacatttacttattttttacttattgaaatatgccacttg

SEQ ID NO: 64263 - DNA, 1100 bp, Homo sapiens
acacacaaaatatattaggttacaggttttttgtttacaattctaagcttctaagctctgttcatttgtatcttcataatttgggggcctatgaaggattgtttatccctaaattgaaagcaagcaaactaacaaaaaatgagatcaaacattgtcagagacggttgttcagttaatccaagcattcaacaagggttataaatacggcatagaagactagggggaaaaatccaagtttttgataaattgtcctcaaagctaaactgtttcttagcaaagtgagaaaaggcataatgttcccaagaccaaatttaatctatacattcttggtaagaccttatttttctcctctttccattaagtttaaggtttccttctgcttcttgcactaatcattaataactatactgttgtcacagctcaaaactttcctattgacacttcagtcatttttaaagatcttgaatgttcaacctctatgaagctaaccttttgcactctattaaaatttaagaaccatttgattctcagtgaatgccccagctactggatcatgaaagcattaccttgtgccaagggcatgatgcagaacactcattcctttttaacaaataagaagaagtttgacttttcatttacacatcctgccaattgctaacaagtttccatctcgttcaaacaccagattgatcctaagaaattgaaaatattgatttaaccctctgtctgatttgtactgcaggcacctgctagtgcagtcttagcacattacaattgcttggctgtaattcctcaggggaccactaataactaccacatctgtcttttcatcttccgaaattatgctagcagttgtccaagtcaattgtgattcatttgatactgctctccttcaagacatattgcaaccaaatagacttgctcaccagtaatatatctgatgacatagttagttcttgttaattgacagaatgattcaggcttttatggatggcattaattggtcccttgtgtccatgcaataattgaccagacagagaaggcagcattttctttcaccaagtcaggagagttttgaggtgagataaatgtagtaagga

SEQ ID NO: 64264 - DNA, 1244 bp, Homo sapiens
gacaattcccaaatattcttttttctcaaaacaatatttttcattccaatttacttattaaaaaaaaaaactgggagccgggcatggtggcttacgcctataatcttagcactttgggaggcagaggccagtggatcacctgaggtcaggagtttgagaccagcctggctaacatagtgaaacaccgtctctactaaaaatacaaaaattagccgggtgtggtaatgcacgcctgtagtcccagctgctcgggaggctgagacaggagaattgcttgaacctgggaagtggaggctgcagtgagtcaagagcgtgacactgtactccagcctcggtgacagagtgagattctgtctcaaaacaaaacaaacaaacaaaaaacaaagctctttttgaagatcacgagcttcagaaagaaatactgcatccactctgtccacatgtttctggcctgtccattcagttaacagttattatgtcccaggtgctaggctgtgtcctggggactgaggtaacagaaattacaggataaagctcctgccgtgtagtagtactttagggagtagtagagatgttggttgggaaagaagtgatgccagaatgtggcgggggttatcagagcaggttcagaacgtaaggagcacgaccagggaatcactaacttcgcgtaatggaagggtttgtttcagttggatattaaaagatgaatagaaatttgcaggcagcaacaagagttggcattctaggtgtagtaggggactatatgatagaaagcccacattgaaggtaatgtggtaagactcattaatctaagaaagatccttctggttgtagccttaaggaagggtgagagtgggaacagatggaaagtaaggaaaacagttcggaggcagctttaagagaccagaaacgggcctggcgcggtggttcacgcctgtaatccaagcactttgggaggccgaggcgggtgaatcatgaggtcaggagatcaagaccatcctggctaacatggtgaaatcccgtctctactaaaaatacaaaaaattagccaggtgtggtggcgggcgcctgtagtcccagctacttgggaggctgaggcagaagaatggcgtgaacccgggaggcggagcttgcagtgagcctggatcgcgccactgcactccagcctgggcgacagagcgagactctgcctcaaaaaaaaaaaaaaaagaaaaaaaaaagaccagaaacgaaatcgggccaag

SEQ ID NO: 64265 - DNA, 1051 bp, Homo sapiens
acaaggtctttatggtagtgccgccattgtttttaagaagacaaattttaatccaaggttaaaaacttcacatttgcttatctctttttcctcttaagaactaagagtccagagattagagtaaaatcaccttttcctcatagttttttctttcaacgtgttagaaattcctgtttgaaaaggaaagccagttcctccccctttttatgtttgaggggatgatggtaaaatcacattattcagtcagtttccacatgtgatttgttgcctatattttttaatccagggattaaattgttgccaccaccagcatcaaatcattggggggcaggggtggggaaggtgcgagacagttggttatagacatccaaatatgacgacagaaaaatctccacagcaatatggcagtggagcatttgctgacttcagagtgccagatcaaccccaatatttttttcagggatgctaaacctcttgtaactgctaaattggatttgttactgaatgaagtatcagctgctgttggacaagaccataaaagccagccggctggccctttgtaggcagggcttacccaacgattgatatgttttagcacttttgggattattgtgattaagaggaaaccattctgaatgagtgagcaaagggggtaaggacacacagcccacagctggtgagcagcatgtgttggctccaaggaagtcaccattatggctttctcctggttcctgccctgattgacgtgtatgaaatcttttttttttttttttttttttttggagacagggtctcgcctgtcgcccaggctaaagtgcagtggcgcaatcttggctcactgcaacctctgcctcctggattcaagcaattctctgcctcagcctcctgagtagctgggactacaggcacccactaccatgcccggctaatttttgtatttttagtagacacggggtttcaccatcttggccaggctgttgttgaactcctgacctcaagtgatccaccctcggcctctgaaattgctgggattacaggcatgagccactgt

SEQ ID NO: 64266 - DNA, 1049 bp, Homo sapiens
aaagaggccggcttgccaggtcctgcggagcgcctttccaagcctgtgaaaggcacgaatcatccagcagccgagcatgcttacagctggccctttgctagctttgatctgcgaatcaggccacaccatgaatgcacttattgtcatgttatgtgtacacagtgtgtgaattattgaaaatagggaggcctgagcctcatctggtagagattacagtgcaggcatgctgggcgaaggtctgtaattgaaaatccccagatgctgtttatttggcctttgtcacatgacctgctgcaggaagattgtctgaacaaaatgttgcctgcatggagagtggagcccgccctcccccaccccccagagcctccacaggctcagtctgtgcacagcttaaacacctgcccaaaggatttttaaaggcttaaaatagattcactcatagcatttaaatagagggcatcttgcttgttggtttaaactgcttaagcggttgttgacttgtggaaccttctatccacacaagggtttgctggataatttcactctgagatatctttacaaagcaacattcagggcccgagccacataagtagtttgggctctgcctttttttttttagaagtcaaacttctgtgtggtgaatgagcttgcagataaagctgtgttgactgtatatattccttctgtctgtagaaaatattgtgggtactgagaataaggccctgagttagcatgtctgacttccgtttgtccagttcattcttacctattctgcctataaacaagttgaggtgtttcttagaaaatttgtttttctcaattaaatgctgaatgttatgctctctgtcagtggtggattgaagtaggatactaaatctgaaattgatgaagatcacaagaattaaaaacagggaagattgagctaattttgaagtaagaagggctttaagctttccaggttcattctgttagggaacaaaacagccacatgtcctctttcattgccagtctgtctcagctgtgcttgtggcttcctctttgatttcttg

SEQ ID NO: 64267 - DNA, 1064 bp, Homo sapiens
acaggcagaatgtggtgtagcaagcttgtgctagcagtgtgcacaaagtatggtgagcaggaggggcagacccagcccactgctggggagtgagtggaggaagtgccagctgcagaggcctggcagctcaggaatcattcattgttcagtagatttggtggggtgggggtgggggtggtggccatttcacacaaaggaaatagcacccaacatgacaggaataaggatttttagagacagaagtgtgtgtagagagtggcaggagaaaagacaaaaactgatttgcccatgtaacgttttaattttttacggatagaatgtgttcatgtgttacctagatcattagaaatttattttattttattttagtttttagagacgggtcttgctctgttggccaggttgttcttgaactcctggcctcaagcagtcctcctgtcttggcctcccaaggtgctaggattataggcgtcagccactgtgcccagcctagaaatttaaaaggagaagaaaaaccaagcagctgtcctgaatctaagctcaactgaggaaggtgattttcttggtttgcttggtcatcatctccagtgggaaccctatatcataggccactgctttctctgtcgtgactagctggtatggggttacctctggctgcttctagttttgagataggtctgatgtggctagggcagtggggtcagtgagccagagcatggcaaccctaggaggaaacatctctgggcacctgtctcaggcccttcctgagtacatctatccatctaatcgttccgtctttgattaccattgtttggcttctagcctcatttctcttcctagaccataaactccttgagggcagagagtgtgtattattccagcgtgtttctcttctagagcctagcctaattccttttgtacagaaaatattctataaattttattgaatgggagaggaaagtgccttggggccagattatgtaggccttggatgcttagagagttgaggctttattcttctgtattgtggatgagaaattagagaactttaaagtgatgtgtgt

SEQ ID NO: 64268 - DNA, 1047 bp, Homo sapiens
catgcctataatcccagcactttcggaggccgaggcgtgtgtatcacctgaggtcaggagttcgagcccagcatgaccagcgtggggaaactctgtctctactaaataacaaacaattagcctggcgtggtggctcatgcctgtaatcccagctactcaggaggctgaggcaggagaacagcttgaacccgggaggcggaggctgcagtgagccaaggtcgtgccattgctctccagcctgggcaacaggagtgaaactccatctcaaaaagagttgaaggaccattttagagccccagaaggtgccagagccttcccattttctgttactaatgcatacagcagccctctagagtaggaactgttatttccattttacaggtaaggaaatagaggtctagagaagttgagcaagtttcccaagttcacacagctcataagtccagtttcctcagaagaatctaggcagtcatacctttgagtcaaaaaaccagaaatcggcagcattgcatcattaaagattcttcattataaactagcggtgtttagcacttcaaatgtgtggatttcacacttctctaaggccaaataattaataaatagagtgcttttagcaaaccttttcattaataagactttcttgggttaatgttaagattagctttttttggaccaggtctctatggctgtggcttggggaagtggcagggacatgggtatagggcatgaagaagcaatgagcatgcattggtcataagagacgagaacaaaggtctgaaaaattgtgccacttctcactgaaatagttgcaactttaaaaggatttacagatttcaggtgatattggcagtgctgtctaattttcataatctttttctagatcttttcttcggattttctttatacaaaagaggtgagctccttcattcatttattaaaaccatttattgagcgagacacggaaagaaaaaaactatttcatgatctcacttatacgtggaatcttaaaaaaaagtcatacatatacagagtagagaaaaaacaaca

SEQ ID NO: 64269 - DNA, 1915 bp, Homo sapiens
ttcatacactccatgtctagcacatgtttcaggcacgtttcaggtgaggtttcttggaggggacatctgagctggacctggaaagattttccttggtggtcttaagggttattgcagctataataccttagcatggcagggtgggttcagggaactggaagcttggtaggtattttgatggtggtaaaatgaattgtggtggtggtcgtggtggtggtgtgtcatgaaaaatagttaggggccagatggtggggacaacactgaacaccatactaaagcagtttattcctttagatgtgggcagtaggagccttggaaggtcttataactgagaactgtgttttaggtagctgtgtagaggatggattagaaagaaaaatgatcagaggcatagttacagtggtaaggctagtcaaactactcattagaggattaagaaagtgattatgtggcgtatctttattgcctcatagagaatgagccactaagaaaacttcattcatatttctttttcatctagaaatagttagaacagaaataacttctatctaacatagcagtgttgtattcactatgcagccttaaacatttttacttgctcatctctttctgacccctgtaacccaaggcaaatgtgtagtttgtaagcggttcctctaagatgcgggagaacacagtgttctatggagttgtcacatgataatgttatcagctgccgttgactgatacaaactcctgagaaggtgggacttgagttatcgccagacactcactggcagggatatgagatagaagttctgagtaaccaggagttaacacagcctttctctgtatgttctttctctgaaagctgttttttttaataagcccctgggtgaatgcagacacatattatctccagggattgctattgtttacctcctgaaggccgtcagtcctttggtgaacttctagtttgggaacaagtagtaccagcccctgacaaccctgaatgggcggcctggctgtttctggtgattttccacattggtgctgatttctggtcaatgatttatattgaggattaactgagaacttcctcgttggatatgctgtgggactggttcagaggctgtttttcatgagcctgtccttacacctaatcttagcctgtgccccttctccctccctggctctccatccctctcactctgtcatttactccatcagtctgtagccactgaggacctgctgtgttctcagcactggatgcacagtgatgagcaaaacccagtttatgctctgggctcctgtggacttctctgtctggtagtagaggggtaggcacatgttcatcttatagtctcattcagataaatggaacacagtagctgtgctgtgtgctgtgaccgagaggcgtaggttcctgtgagagcacatgttagggtgatctgaccagttctcatgggttggagttcttccaaacaagacataagcacctccaaggcagagatggcgtgttttctttttctttctttttttagacagggtctcactctgttgtccaggctggagtacagtggtgtgatcttggctcactgcatgcttgaactcctgggttcaagcaatcctcctgcttcagcctcctgagtacctgggaccacaggcaggtgctaccaagcctggctgatttttttttttttttttttttaagagatagggtctcactctcagccaggctggtctcaaactcctgggctcaagttatcctcctgcctcagcctcccaaagtgcttggattacaggcgtgagccactgcacccagcttgagatggcatctttttacccccataattttagcatgtttcttgtgttccatccacacacagtccatgtgtgaccagtggatgactggccagcttccgtaggcctcctt

SEQ ID NO: 64270 - DNA, 1837 bp, Homo sapiens
agatggatggggagataaaacacccccattctgtagacctctcccaagacagtgacatgtggtttcctcagtgtccccttcatctatactttttggttgttggcttgcttgctttctttttttttcttttttctttctttcttttttcttttttgttgagacggagtctcgctctgtcatcaggctagagtgctgtggcgtgatctcagctcactgcaacctctgactccctggttcaagcgactctcctgcctcagccccccgagtagctgggattacaggcatgtgccaccacgcccagcttatttttgtatttttagtagagatggggtttcaccatattggccaggatggtcttgatctcctgactgcgtgatccacctgccttggcctcccaaagtgctgggattacaggcatgagccattgcgcctgaccaggttgttggctttcatatcctaaaatatttttttccttttgatgaaccccagctgatgaaaacagacttcatgggctaagcacagtagttcacgcctgtaatcccagcactttgggaggccaaggcaggaggatcacttgaggctaggagttcgagactagcctgggcagcatagtgagacctctgtctctacaaaaaaaaaatttaagaattagccaggtgtggtgtacctgcctgtggtcccagctacttgggaggctgaggtgggaggatcacttgagcccgggagatcaaggctacagtgagccatgatcatgccactgcactccagcctgggcaacagagctagaccttgtcttaaaaaaaaaaaaaaaggagtggtgggggcatatgactagaaggcagtttagcactgtcttgtagaatcttgcctgagaaatttctttgtaaaccactctccccatgctttgtgctgatgccggcatggggtctcctgtggaagacatctttctttgcttctttccactgggttatcttcttcctttttttttttttttaactttatgttcatgatctggtgccaaattgggactacagggatgtaggagcctcttttctgacctgaagaatgactcggtccataaatgttgagccacctgagaaagggaggcggagaagagatccatgtcattggttcttgttgccaaggactttatgacttggttgcaatcatgacatgtgctgaaatgatatcacataaggcagaaaaaaatacaagttaccagcaaagaagcccaggtcaaaggctgtgaatgtttagggaaaggggaggcctccaccagctggtaggttcatgaaggatgaggccttgggaaggtaggcagattccagacatgcagaaatgggcaaggacagtacaggccatgacagcagttgtgcacccaggtacaaagttcaaggtgttcacaggaaacattcgataatctagtagtactactgggctgagcggggtggggggatatgtagaagacccttgtttgatgtagctttggtctagcagtcaagggaaatgagttttctttctgattttccttgttttaatatggaagaacggggtggagaatcctcacacatccttcccagtgaagggaaagggccagcagatgtttccttagagaagccaagctagagcttcctaggcccagggcagtccagtccttcatgggtgtgagtttgccttaggactggccacggccagggaagagaagcattgcatttgttgcttctttcttggtggctccctgactccattcaattacaaagtggctcttacactgttaaagcttgagtgtctctgggctacaatttctagccacagaccttcatttgctgtgcctcaa

SEQ ID NO: 64271 - DNA, 1059 bp, Homo sapiens
taagttggcatatattgataatttattgtgctccttaaaaatttaatgcagtgtttggctgcattaacagaggtagagtatttaggatgagagaggtaataaactgactctgatgctatagcaggagcactgccacagttctggactccaagctttgaaaggaagacagacaaaggatggtcacaggatggtgtgtgggagtgttccaaagcttgtcagataacaaagtaacacaggaggtttagcttgtgtacaactccaagaggaccccagagctgctgttaatatctgaaaggcagttaaataaataagggactggacttcttgttaagaggaacaggaaggatctggggatgaaagttaaagcagacccccaaaaggagggtcttcttattcttaaatatgttctaagatagaatgggctacttcctcaattttagaagtgctgactaaggcttatgaggactttcaggaatgcgaatggatgacctaggggtactttctagcccccagatttcatgattcctttgccttccagtgatgaccatgtcctgcacagtcccagcactggcaggtggtggacagagccatgactctaggacattctaggcagtgatgagagagtcttcgcaattctcagacaagatttccctaaggacattttgatgttcgtcttcatcagtgtttccagttctttactctgctagggaagatctgggggatatggtcacttcctttcagcagaggctgtgttatttcctcattcattcttttctctgtgcccagcagtgtgctaggtgctagggggacattgaggaagaagacagagttcttcccctcttcaagtatgcagtatatctgggaggaagtaagacaacaaacacaaattttacaactaactataaagttataaatacagttacagtttgggtacatcctaggaagaagtacagtttttgccaccatgggggtgtagaacaaggcaaccaaacctagttgggcaattagagaagacttccccaagggagtgacatccaagtgaggccttgaaggagaaat

SEQ ID NO: 64272 - DNA, 3557 bp, Homo sapiens
tcccagcacttaaggaggccaaggcgggtggatcacctgaggtcgggggttcgagaccagcctgaccaacatggagaaaccctgtctctactaaaaatacaaaattagctgggcgtgatggcgcacgcctgtaatcccagctacttgggatgctgaggcaggagaatcacttgaacctgggaggcagaggttgccatgagccaagatcgtgccattgcactccagcctgggcaacaagagtgaaactctgtcttttttttttttttttttttttaaaaaaaaggataaatttctattcttagatgctggtctaagttcaaatttaaatgcctttcatcttaatttttcctagtaaacatttttgcagacaattgtgctgttttatttttctagtattagtaaacacatagttgtaattttaaaattcttgattctgaattttgttttttgctttcaagggctttgttggtttggtgttttggtaacccacctcatggtaaattcttctttctttcaggtaggaatgaattgatagccagatacatcaaactcaggacaggcaagacgaggaccagaaaacaggtaaaataacccacctggaaattgtgcatgtcagcgaatggcccaaaaaggcattttggctgcagtggctggctatgctttggctcctaggagcccccaatttgagttccctgtaaggacgtcagtgttggaggtattttaaattggctcagttttcactgttcatcatttcagtgaccctttattatgtggtcttacaagttccttttatactcacatgggaaaatgtcactgctaaggacggtgtatgaaccgctcctgtactgtatttcaaagctgacatttctttcccaaaatgtgcacctgtgaacactgcaaaaactgcaagtgcaaatgcacttgcaggtcatgaaattttgaggttttgtgcattgtaaaatcctggagcgattatatattagtcataatttcaatgaaaaagtaacgccagcagccttgagtattggcctgaatgtaatgctaaatgatgtgcgtccagggaactgttgctttttaagcgatggctttttgtcagtagctgctgtgactgaaatgaagttacaacttcaatacctctgtgcagagcagtatcaggaattctctgccctttggcagagctctgcctttcctcgttctttcagatgtaaaacagcccaaatctctgacatgagccagtttagaactggaacgaatgagaaattagtgtttaactaaaaacaaaaaaaagaaaggaggaaaaaaaaaaccctaaaaacctcatgggtgagttgttcacagaaaagaattattttttaatgtcgatttatgctgaatgatacagcatgaaccttaaaaactgtaatcagaccaaaaggctaactaaaccgtggtctcattaagattgagcagcagatttcagttctcttcccagtgaggaattgttttcatgagtgtttataacggggagaggcttttcccaggaatgctacttgtgccacagcctgggagcctggctgctgagtcagcacaaagagaggtggcctcctgccagcacgcagaggcagcgcattgtctgtttgggggatgctagtggccctcgtcaagtcagagaatcacagaagaacaaaattcgggtgaaaacaagtaacagcaggagccagatggagggctgaagaggatgggggagtttctgcttctctgtacttaagaaaagtaccaaagcaaattggaaaaaaaaataattgaataattgaagctcaaagacaaagttaaagataaaaggaccgtttattataaatcctgttttagagccgctggagagttggaaatggggtaatcaccacacagtctgagtcgctgaacttttaaatggaaagttctacatttcggaaaccagtggatctaatcatctacattctgacagtgcgggacctgggctgtctgctggtctgtgagctctggtcatttgcccggtgaccccttcactgagggactcttctaaatttaaccaagtcccactgaaagagatgcagatttcagtggaatcattgtgtttcagaagctgggctcggctacatttccacgccccggcatcctggggatgtttttaggcagcagttggtgatacctctccaatgtgaatttgttgttcagcaaatccatgtggttttcaacccagatttttaacaggatggctggctggctgtattcacacatttcgctttgtaataatatgcaaatccacttggcgcccagtcaatacccaaaagagtggaaggattaaagatttttataagggcaaaaaaaaaaaaaaatagctctgctaactgggtctttccatttctctttgagatctaatttacatgtcagtattattttaacgtttgctacagaatccagagctcttaatgagatcagaatacaaccaacagcttcagctttttgattctgcagaatgtgctaatttatggatagtctcttctaaattgagaaaaagggattttccctcctgatactgagaagctataaatattttcatttacctttactcccacctttttaattttagaatgaaaacagcccctctcatccctcccaaaattagtttttcccagtgcccatgatttctcttgggtgggaagactaagatgagtcttaactttcatcctgaatcaagtcactgcagtgatgacccagtatgaaaagcttagagcagcgctgggggcttgtgtctggctgggactgtgtattcctaactgcagagctttgttgagatgcaaataaccaccccccaaccccaccccaaaaccctcccaaagagtagcgattttatatttgatttccttttttgttttgttttgttttgttttgttttgttttgttttgtttcccctcataaacccgaacaatgtaggtgtctagtcatatacaggtcttagcaagaaagaaagttcgagaaattcaagccgccattaaggtacgtctggcttgcccacttgtagggggcttttcatctccatggttacaggcttttcctttgttttcctcccttcccctaccctgcaggtgtctagtcacattcaggttcttgccagaaggaaatctcgtgattttcattccaagctaaaggtatgcgcttttctgctttttggcttgtggttgctatgcatctcacttcctgttttccatggtgactggtgaatgcctggtgctgggattctcgtaacctagtttccttgcatgtgagagctgtttacatttctttgtgtttaatctctctgtttctgtactagcctcacattaaactcaatgtgtgtgagcgcgtgtgtgtgtttgcgtgtgtgtgtgcgtgtgtatgtgtgtgttcctaataacaatgcaaatgcagcagagagctggtcttgataacttttcagcacagaaacatgattttttttttttaaccttcagatgtccaccaagcagccatgggctaggaaagcttaaaaaaagaaaagtccagagatgcaaaattgagt

SEQ ID NO: 64273 - DNA, 2747 bp, Homo sapiens
tgataatttttcatatacaacttctttctgctttttccctttataaaatttataataaaacatacctgacttttatttttctgtaatgccctattttagaaatgcaaagagattatagtttgcaaggaggagctttcgtttataataaaaattgattttggcacatattgatggctttcccatgtgcctttttcggttctgttctgatatttttctatacagtaattaaatttgtggttttgttctgaactaaaaaacagtgtagtctcacaacacttgagtggtgagcactgggactcttcccaaagtccttcgacttttttttatgcaaacaaggctggctgtggaataggacaagtgattaggaaggagcatttggtgtgccctctgcagtgggcagcatgctggctcgctcgcacgtgtggctgatggtggctggcttttagctgcactggctgagcagttggaagactaagataactttgtagatcctgctttttaaccaaaggtgcaatactctctatatggatgtaactaccccagtttttgctcaagttctgactctgtttctagtttctctgagctaatgaattaatgatgtacaaagaagtttacagataacaatgttgtttccatctgtgatgatatgaattgctctatttctgcactgtctgtgtggttcctgtggactcaccagggcacacagccttagactgaaagccctataagtgaggaataaagctcttctgttcagaagggattcccatgtgatataggaagcactctttttctcacttggtgaattttagagttttcttccatagaaacaatttttctgttgctttatacatgtacatatgtaaaaatacacagcggtatttatgtttgtttctaaaaaaaaattaacaataataaaaaagaaacattcccctgactttcagccctgggccactctcttttggggcaggcacaaggaagagacagaaacagaagcagtaggatagcaactggctcagcatttaagctccaagaaccacctccgtcttcttgtagtttcttccgttctttcctaccatattgttcttggaaaaatggagtcctttgtttttccatctgctaataccaactgagtgttccaggcatggtgcttgctcactgtgatgggcagttaacagccaatatcctgttcagggagctggccatgtaaatgggaatgtaaactagaggagcactttgggtaatagcgggagcagccaaaatgaaatgtggggtgcatcccggggatgagcttcgtggagagtatactgttaagtttggcaattgaaagaggaaaggcagcctaatgcgtgctccctcatttaagctcactatgaagtgacttacagtattctgcttttggggcatgatactgaggaaactggggctgagagagtataattgactagtcacaaagccttcctagtaagtggtgaagccaggatttgaactcagatctttttgcaccctaaacgaatcattgttttagataaaattttatctagtgaaggtgggagaatgttttcaagcagagggcttcacaccagcacactgtacctaaactgtcacccctcacagtctttggggctgggcattcagcctttgctaccagcccttcacttggcatccacattttaactttgagcccttggtcaaaacgtggacttaatttgggttggtgctgtgagggtcatcagtaactgggggaatgacatggtcctggagacagagctgcttggcaccactctgagggcattaggacagtcgcagagagtgaggctgtctgtcacctgcttgcaggagttggtgctgctttctttcactccctccatgagcattttatctcaaaggcagtatacttaaccttcctaaccagccattaccaggatatgggctcaactctgttgatgtcccagctccatccatacccccttgttcagctctggaatctaatagcacatttgtgaggaggcagggacaagcatctttaccgaggtcatcatggggtcaggctgatagccatggtcttcttggcctcccacactagctagtgagataaactcgctacagataattgaggtcatcccaaaagacaacaaggatagcttctgggtgggtggggagcagaggggagtggcaggaagtatccaagcttaaaagagacactgtgctttgcctgggaagatgtaggaaggcctcctggagcaggtggctggtggctgaccatcccagtaactatccttgcagacactgccctagccaggttggttaccacttctccacaaactcagacgtcgaaggggtagacaaaggtctatggtcctcatgtgaagaccgaaaccagacttgcatttgtctgtccctctgtggagttggaaaagtggcttacccgcaatggaggccactgccagatgtgtcttcctggtgagtcttcttgcttataagcttctctttactttccagggaagggtgtggcagagttctttgggctggtgttttccagcctttttaaagtagcaaaactcatgttttgaattgaagcttactccctcaaatccttagtaatggcctcttaggctattccattgaatcaggtttgaaaagccccctgttttaggcagaaggaaaaggaggtgtctacctcttatgctgtcccttccagcctttacagagagctcctgtgtcccatttaaagcccatgtttttaaatt

SEQ ID NO: 64274 - DNA, 2263 bp, Homo sapiens
ttgagaacctaagtgtgttctaggtccttttgtagacgttgggcacatagaattgaatccagagtttctgttcttgaggaacattgaacttttctgttatttttccagtagatatccacagctagggggctctgcagtagaaattaaacaggatagtgcagaggctgcccaagtgaaaagaatgattcattctgggagtgagggaattaaagcttcatggagaagtgtcattagaactaaacatagttgaaggcagagaatttccataaagttgggactatctgggggaccatgaagagcatcatgtaattggggacatgcggtgggaggtaagactggaggagcctaagggaagggccctcgattatcccactgaggagaagggattcatctgtgggcctaggggcatacatggggttcattcaaatttaccctctggaaagacctcgccagccaggttttgcaggatagctaataagagggaggccaagctggagtcagggaggctaattcctgggctgctttaagagtggggaagagagtcacaggctgggaccaggggccaacccacaccccctggggctgctccgtggcacttagcactcatccttggctggctccctgctttggtgctctctgcctgctctgtagtctttcctactcattgtgtttaaagaataaattataagttctgtccttatgaagtctgaaaagtgttgtgtgccagaacttttcagaaagattttcaatagcagcatttaaaaatcaacttattaaaattgggttctcttaaagtaatggtaattgactaggagtgtgcatcaaaattatgaagtttttgttgcaaaatttaaacagtacagaaaatatattaaacactcatgtttatactatctggaattgatcattttcattatataagttttttttaatgaaaaatcaagtggcaaacattattctgtactttttcctctacccaccctccgtcttcaaccaaaattaatcttcctttctttcctaccacccacaatgtattttcttgccacttacttcccttagaaaatcaaatccagtgaaagctctctcttctcattttgctcctagatttttgcccattgtctttttctttttcttttttttttgagacagagtcttgctttgtcgcccgggcgggagtgcagtggcgccatctcggctcattgcaacctccgcctcccgggttcaagcgattctcctgcctcagcctcccaagtagctgggattacaggcgctcatcacgacactcagctaatttttgtatttttaatagagacggggtttcaccatgttggccaggctggtctcgaactcctgacctcaagtgatgcgcctgcctcagcctcccaaagtgctgggattacagacatgagccactgcgcccagccgatttttgcccaattatctaccatgaatttgtgcaatagccattggcaccaacatgagacttttcctctggaatttttagcagcttaagatagactcggccaacaatttggtgaccttggatacagaccctgactgcagaggagagatacgaggttcaggacatataggggatggttgaactagaaagggaataatgcgaggagacagtgaaccaggagcagagaagctgggagagtagagacaaagcgtcagtagactgaagctgagattcaagagctcggtaagatggaaaaaagaaaaaaaaaaaggcatttgtggccagagcacagtgattttggaaattaaatttatacattcagagttgtggggattttctcccccgccccccccggggttggggcattttcaaaatatctaggacaaggctgggcacggtggctcacgcctgtaatcctagcacttcgggaggccgagatgggcagattgcctgagctcaggagttagagaccagcctgggcaacacggtgaaaccccgtctctactaaaatacaaaaaattagccaggtatggcagtgtgcaccggcagttatagctacttgggaggctggggcaggagggttgcttgaacttgggaggtggaggttgcagtgagccgagattgtactgctgtaccccagcctgggcaacagagcgagactctgtctccaaaaaaaagaaaaagaaaaaatgtctaggacagaagctagagtacaaactgcaggcctagaagagagcttagctttgaaggagttgtttcttagtgatgggagtgctatgtgtttgtctcctactcagacaa

SEQ ID NO: 64275 - DNA, 1022 bp, Homo sapiens
tccagggatttattatcccagcatgtagaaagaatgcagaagcattctccatgtgttaagcagtctttttcctactcagagtttctttgtagagttccatgcaggagtctctttgcctgtatgttcagttgccctaagaagttgttcagaccctgctcagagtccttctttccccattagcagcaaaaaggcagtcctttcttgctgttttcagaagctcacggtagccacagccaaggtctgggaagcaccaccacactgtgggccatctccatcttcccatgaagatgggccaagccacctctggttcacttctcgagtgtgtttaggtgagtgtatgactcgggacaaaactaagaggaaaggaagtcttcgccgtgccctccgctcggcaggaatacatcttaggcagtagatgtattcacgtcaggctctggatgtgtattgaagaaaaacctgtacttgctgacattgcatcatcccagtagagcagaaagagacctgagcccctctgattatgtccagtcgccggtgactaatttatgagctacatgtgctcccccggggccattttcttgttctcgccctggtggcctttatgatttgatttctgaacaggccattctttccaaactgctgttccttccaataggcagagagcttaaagttcaaattgttgatttaattcttttgagttcaagaacttcactggggcattgctaaagtccacactgctgaatcatgtttgtatcatcactgattccatccaggaatgggcctgtccacagggaaggtagacgtacttcacttcactctgtgttgctccgtgaagccccctgagccactctgctccttcaggacttggctgttagcagtgcaggaggcaaggaaagcctgagcaacaacctcctttgtctgtgtccacaccaagacacttggccttgtcacgggatttgggaaatgatataatctttcctggcatttcccaatcttcagggggagttcttttgcatttatgacat

SEQ ID NO: 64276 - DNA, 1101 bp, Homo sapiens
tgccctccatcctttttccaaaaccataatatagttctgtgatgtttatctgctcaaggggtatggctaataattgcagaggtcatgtggagccacatagtgcaagattagaaagaacatctgcaagattacttcttaggaaagtattttgtgttttgtctttttctgaaaaagtgattgtgcaagcaaattgctgtctttcctcccttgcactatattgctggttaaagcatatttgaagaaaaaccatttaataactatcaagagtttttgaatccatggtcgtttttttgactttactattttttctgacgtatttgatggacttctatatgaataaattacattggaatcctatctttaaattctgaaatcatggcccatgaataaactgtttggaatatattgattatgctgttcattaaaattccatatatggcagctatcatatattgtatatgcaagcatgtaacctttttatgttatctttaaagtttgttcatggtaatacctatagaatatgagataattgattttgcagaataatcaaaagctgagaagcagaaggaagagaagggaacaagactcctctgatatccagactgatccgtgagatgtccttgagttttaagagtacaccactccagccatgtgcatttgtgatattgctgtcctcctgtcatgtatattacatgtagatattttccaaacattgtgtccatttcaaccataaaaaggaggcaatcagcagaacagagagctatagcagcagtagccttgctctccttcatgaaatatgaaagcctgtttttacttagaacaataacaatttgtaaggcttcaggctgaggagtttatgcatgacacagcctgctggaccatgtagcagaggcagcgagaccattgagtgtggtgtgttggaaattggttaatgataaaagtagggtagatgatgagacaggcatcccgagtctcaggtcagttggaccgtttgttcttagaacccatcctctttcccatcaaaagtccatagaccacccatagttcctgctccatgagtgttttctgcattgcaggtcatgggcttgggttggggttcag

SEQ ID NO: 64277 - DNA, 4136 bp, Homo sapiens
aatgaccttgagcatccatgaaaagctgttacttgaggctccttagtttttcagtcacagccagagtaatatataagacataaaaattaatgtggctgggcgtggtggcttacgcctgtaatcccagcactttgggaggccaaggcgggtggatcatctgaggtcgggagttcgagaccagcctggccaacatggtgaaaccccatctctactaaaaagacaaatacaaaaattagccgggcatggtggcatatgcctgtaatcccagctactcaggaggctgaggtaggagaatcacttgaacctgggaagcggaggttgcaatgagctgagatcatgccactgcactccagcccgggcaacaagagtgaaactccatctcaaaaaaaaaaaagaagaaattaatggaagtgttaggctccgttttctttttcccccctcccctccctttccttttttcctcccttcctccttccccttttctccctcccaccctccctttcttccttccttttctccttcattctttttttttctgatggagtcttgctctactgcccaggcttgagtgcagtggcttgatgaacacagctcattgcagccttgacctcccaggttcaaacagtcctcccacctcaggctcttgagtagctggaaccacagaagtacaccaccacacctggctaatttttttttttgtgtgtgtgtgtgtggagacagggtctctctatgtaacccaggctggtcttgaactcctgggcccaagtaatcctcccacctcagcctcacaaagtgctgggattataggtgtgagcagccacacctggtcttcccctttccctttttctttattggctctttttcaaaggttaatgtaagctttttggaaattcacattgtcttcctgacagttatagggcaaagtagtatctacaccctgggaacacctagcacatctttcttagaagcccttagcagttgttcatgagctttgattttttaaaaactcctttggccttgcttttgatgccttgatgtgtttttttcatcacctttggttatatcagtaagcattgaagcaccctctctgctggtacttggtgtcttagcctgaagctccctttgacgttccctggaggtggaaagcactctttttattttgatgtcaccattttgtttttgctttgatggcatttgggcctggaatatagaccctctattggcaccggtagcctttatatgcctacgaggctcaaagccctgcctgtgcccaccgggcctgtctcataccaggaggctatttctctgtctgtcctggggaagccacagaaccagtgcaaaggagttgaggggtagttttttattgttgctgttgttgggtgcccttctcaatcattgcctttctagatagccatctggatcaccttttcttcctaaaatgtgaaaaggcccacacccctatgcattttattgttcccaagtattatatgtttgtgtacatatatacatatgtatatatacacatatatatatgttttttttttaaccaaagaagaaaaaaaatccctttttatgcaatccttttaacaaattgtttattattgtatccaggtaacaagcatggtaagtattttcaccaaactgagtattctgtattttagctgtgcttggcagacttttttggctagctttgtgttgttagccttggctttcctagaaaagacccgttcaggaaaaggagaaaccacgtacctgtagcatcccctaggctcctggcttcagtacgaacccacgtagccttagccccacggcggggatacctgagaaagcatgcaccccgccagcatgctgcttggccctgttacccccaacccccgctgcttctgagcctctccagccaggtgtctgcagggcttccaggccttgcatgaccccagcagctcctgggaccatggccctgtgacagtcaggacacacagatagggctcctcgagctctgtggacggtcctaccccagtccacagctacatctcttctctcactcctcctcccatccgtttgcttaaaagcagggcctttatttttttttcttccttaaatgttttaagtaattggagaaatcttctggaagctgacaagctaaataaatacgttgtccactcttctgagaggcttcacattctgttggaaaatggatttaatccctaaaaaaagccttgccccattgggtcttcccagtaaatgttgagaggtacggtaggttgagtgtggtttagccttctggctgtgttatttatccatgcatgtttgctttttttggcctattttgtggctctgtattttagtccatgtgctcgtggctgtgcctgtgtaacctgcctggtagccatgcgttatgtattaagttggtgtgtcactgtcaccttcaaggatcagactgcaaaggataaggccctgcagcacatggcggccatgtcctcagcccagatcgtctcggccactgccattcataacaagctggggctgcctgggattccacgcccgaccttcccaggggcgccgggggtaagtcatgagctcagtccagtaatgacagctgctggggttggggttggcatgtgccagtgttaagcctcccacctccatttcttgtcatgtgggtcaggtatgtgagagggcaaaggctaccttgtcaactgataactgagtctaaagtggtgaaagtaaggagggaagggaggcagagagctagagagaaagggagggggaggagaaggaggaggagaggaagaaaagaaaaaaggaaaaggaagagggagaaaatcagaagaggaaggaattctgagtccctgaagacatggaattaaatgtgcctttctgggttgggctcaggcgtcttctctctttatctttttcctggcccttggtctctgtccctctgtcttcaggggcaactagcccctaaagggacaaggtattctattaacatttacattttgacacctaccaaaggctgagaagcattatgttataatctcaatcctccaggtaatcttaaatgctgcttattgtcattgccattttgcagatgaaaaagctgaggttattcagtagcaaaacaagagtttggatagctgggatcatagtggaatggatagtgatgtcaagaatcagccccagggttgcttgactcctgaggctgctctttccctcctctatgtcatgccccctttccagcccacaccaatcgcagcagggaagctcgctgcagagaagctgcctgcattgccgcttggagctcctggccttgttcaagctttgtcctctgccttgctgggtcttcactgctgttgacgcagaatattatgcagggaatgtttcagaatgaagggagggtacatggataaatcagtcagttcaaatattggtgagccccctgcagcacgcgcagatctttgcttaggtgtaaggaaaacaggagctgctgcctgcgtctgcccttgggggcattttcaggaaggaggcgctaaggggagctctgggttgccagtccaaggatataggttgtggtctcgtgcaagtggtgaccgcatttgcactctgggaaagcgattctgttgggtgatcgaacctgctgtcttttagcaggggttgtgatgcgtaggcatcctaaactgtgctttgaagtaaactcgtaattctgaggcctttgcattttgccttccagttctggccgggaatgattcaaacagggcagccaggatcctcacaagagtaagtctgaggaggggtgggcactgacaactacgggctggtcccagcccacgtggggagagctcttcctggaccatagtgtctcagggcctggaggagaaaggagcattacactgaggtcccagaaggcatcccctttttattgtgtacttaggcccctggcaggaaagagactggcttttcggatctgggagaggtggaagcaccccattcccaccttaagtattagcagtcatccagctggaagcaagaagtggacccctcttccttcatggtattgaaggctgagctgtggtcctccttgcctgagaaagggcggcacaggtgatcctctagcccatttcattctagccagccctgta

SEQ ID NO: 64278 - DNA, 1007 bp, Homo sapiens
agctccctcagtccctgcctggcaaggtcgctccattggcacaaccaagcttcgcctggtggaattttcagcttttctcgagcagcagcgagacccagactcggtgagtgtgcccagagaggtgtgtcttgaatccaggatttctttccctttactgtttacctccttgcttctctttctttcctcctttaccccgccccatgcctgacaaatatcctgtgtgaaaacgggcctaggaaagaatagccttttgattaagtaaaaagggattcctattggcagatttgtagaaaacagcagagcaggaggtgtattactgtcctggaccccaaggtgctgtggggaatacttgagtcagagagagggacgtttacaagctcttatgttttgtaaaatttaacaagaagtaacatttattgagccttgccatatgcctggtcccatgcagagttatttagatatatgatcacaattcatcctcataaaaaccctaggaagctaggtactaactgacaaatgaggaaacagagagcgtaagtaactttcccagagtcacacagttaatctctgatggattagagattcaagctcgggtcctgaaaactctaaagcctaatcatttagctgttattccatactctctttccaactctgttttctcaagatagcaagttgttctcttcttaagaacaacttcttaagaagaagtggccaggcatggtggctcacgcctgtaatcccagcactttgggaggccgaggcaggtggatcacgaggtcaggagatcaagaccatcttggccaacatggtgaaaccccgtctctactaaaaatacatggccacgcacatgtagtcccagctactcaggaggctgaggcaggataattggttgaacccaggaggcggaggttgcggtgagccaagatcgcgccactgcactccagcctggcgacagagcgagactccgtctcaaaaaaaaaaaaaaaagaagaagtaacaaaatggca

SEQ ID NO: 64279 - DNA, 1080 bp, Homo sapiens
tgctgtctgtgtgttgcctgccttaatgtcatttctattatcgggagacagtgtcaagaatgagctaagagcctgtggtagataaccgagatgctgaacaattggaggtgacctctcacgggagtgtttgcacttcagcttgagggaaggcctcccgtggggcagaggggcttgaccagtcatcaccagagtggagaacccacatgtggcccactcatgtctttgtccacaaatcatgaactttgggagctggtggaaaaatagagctgcttccaaattagggggaaaaatgagggaaggaatgtaaattgggcccatcaggacaggtacaagaaaatggggctattcagaccaggaaagagaagaaaaggccaactggatgactccttccaagcagctgagtggctaacaggaagagtgatggtgagggttaaatccgtctaggtggaaggcattaagacaaactgaaagatgccctgcgtgactctgtcctgctggttctttctgggaagcatacatagttctttggttgaaggctgggctttggcccagatgctgcttctgcctcttgtaactggtgtttccatgacactttgttgtttacagagtactttgtggttgagtatttcattctgtccttacagtgccccatcagataggttctgttttccccatgataggttctgttttccccattttacagataaagaaactgaggcccagacatactaagtgacttaagattaaacagaaggaaacaggagcccaaatcttgtatttcattgtatccttttcactatcgtaaaagatcacctcccagttttgagggtctcttgaattgtctttttttttttttttttttgagacagcgtctcgctctgttgcccaggctggagtgcagtggtgtgatctccactcactgcaagctctgcctcccgggttcacgccattctcctgcctcagcctcccgagtagctgggactacaggcgcccgccactacgcctggctaattttttttgtatttttagtagagacggggtttcaccgtgttagccagggtggtctcgatctcctgacct

SEQ ID NO: 64280 - DNA, 1317 bp, Homo sapiens
gctgtgaaattattttgcctaacctcagtcactattgttggtgtcgcttctgatattcctatgttacaaacactcattcttcagttgaacacaaatgatttaatatatgcaaatgaatgtggaagtttttttgtttttttttttgtttgttttttttttttttggagacacagagtcttgctctgtcactcaggctggagtgcggtggcgcgatcttggctcactgcaagctccgcctcccaggttcactccattctcctgcctcagcctcccaagtagctgggactacaggcatccaccaccacgcccggctaattttttgtatttttagtgagacagggtttcaccgtgttagccaagatggtctcgatctcctgacctcgtgatctgcccgcctcggcctcccaaagtgctgggattacaggcgtgaaccaccgtgcccggccgcagattgttaataggatctatatttgattttagtggacatgtgagggcctgaaggttggttcttgtgctagagggaaaaagtggtggctgaccagttgaagtgatggagaattaataaaattatttaaagcatttgacagtatcttaagtaccagcctctcaagttatatactgtgtgctttattggacaaacacaacgtgctattacaatcaaggtataatggtacttcagggctaaggttacactgaaaaatttgtatcatgtagatagtttctttggctcttagagtttttgtgacttctcagactttaattttgctatagttttgttccaacaacagaaacattaaggccatctaagataaactcagctgatacattttaacaaatttgggcatacagtacttaaaatataacatccagcattaaccacattaatttgataagcgaacaaagtgaccaataattaaagggccctaagtaagttaaactttgcatttgaattctctagatgtttgttacagacagacatgtacatatgtttccccctacttctttgtaacggcttaggctcattagacccaaggggttataaaatatttttagtagagaagagaacttataggtagtgctggcaaaaaaagaaattatgtagccaggttccatgctatttgtcattagtgacttctttcatctttattgagctctgtgaggtaggttattctattcccttctacagaagaggcttggagagatgctgccttacagtagccagctttgcaccccagcctgcctgtagcatctcttaagacaagataagacatgattgctggctgggtgtgatggctcacgcctgtaatcccagcactt

SEQ ID NO: 64281 - DNA, 1006 bp, Homo sapiens
agaggaggaagcaggattgctaagaactgacttgatgataatgcttttgcctttcattctcaaaataagcttgttgaaatacctattagagacaggaaagctcagagagtttaagtaacttcatctgggacctggctaatagatggcagggttgactatttgaactttgtctgaatttcacagtgtatgagaaaatgacacttaccccactatctgggaaaatgggaagggcagggattgttctccattcacagatggacatttgatttgggctccaggacaggagagagttcctgaagggtcacctgggcttggtgatggcagcccctcagccagaaggaagggagttttgctgcctggtgttctggcccttatctttattccaaggggctggacctcctggacgtggatgtgggagttagcagtcttcatagtcagagggagcccaaggtctcccctctgggggactggcaggcctgtggttgagcccgcatggaaggtctgtaaatatatcctgcagataacatgattctttctcgtaaaggcagttggtcaaacgtgggcccaaggatgatttaatttcacatttttatacttctttcaatggcctaaatttacagatcaactaaaattccgttgtcagaacacagatcctttcttggtttggaaaatgtgaccaggacagctctaaggaaatatgacattaatgaggcctgtggaagaaagaagagggggatggctgtgcatgggggattaggttggagacacaagataaaaagcaaggtttcagccgggcgcagtggttcatgcctgtaaacccagcactttgggaggccaagcaaggcgtgtgggtcacctgaggtcaggcattcaagaccagcctggccaacatggtgaatcccccgcttctacaaaaatacaaaaattagctgggcatgatggtgggtgcctgtaatcccagctactcgggaggctgaggcaggagatttgcttgaacctgggaagc

SEQ ID NO: 64282 - DNA, 3235 bp, Homo sapiens
acccagatcccatctgacaccacagtccaggtgttcatcactcctcactgcaggctccctaagcagcaaagaacagcagggaccaggaaacaaagtgacccatagagcagctttgaaggaagacgaaagtcctttattaaccccccccgggtatctcagaagccctttgcaagtgaatggttgactttcgagggttgcattcacctttattattatttgcaactgctatgaagaataactggagggattatagcaaaacaaagagaaaatggacatttctccaagtcaaaatagaaatccacatattaagatggcatcaggtactgcgtggcatccttgatccaggtagggttttactggtgcaacatctttttggtgaaccctacctgcagacaagcgtcccagctcctgtccagctgtcctgagcgtttgagctgtaggaaagctttgcagtctgacccgagctcctttaaagcccaaggaacttgtggctaacacagagtaaacatcctgaagtaatgttttttgcttccttttatggttctttcccttcctcagaaaaactccataatctttcaagatagtttttgattggtggtttatttaataaaataattgtataagccagattgaagcacgtggcccataggaaaagcagtattctgctccttcatggctcctcaccttccagttctactttttggggaccattgcttgcagccttttcagccatttctttgtattaatatatttacctccacatttctaaataacatgcttatattgtatatctcattctattaattttaggcatcatctgttgacttcttaacatagaagactacgatttagttctctaaatttagtatatgcccccctccgtcttcctttcagtccccctatgtgcttttctctaaatttagtatatgcccccctccgtcttcctttcagtcaccctatgtgcttatatcacattaaaaaaaattagcattcagttaattttacaaacccatataaattttgcacacagcgtggttaatgttatatattggaaccatttccttaattgtaaaacgtttttttctggggtgtatggttgtcttcttaaaaaattgttcagttttacatagctacaccaattcaccctcaaagtttcgaggagaactcatactcttctccagatggtgagatataaatcaggtccgctctcttggtgacatccttccaggagtcctcagctccacggatccactctggactggttgctgacctggctggtttctttacctttcttctatgttaggccccatctctttttaaaacgtattccatccttttgtaggaacataccctcctatagctccctgggaacaagttgcaaggaaggtcagttttctgataccttaaatatctgaaagagtattctactttcatgtgtaatggataatttgatgttcattatggtttttgccttggacttgtgaaactttattcatgttttctaggtgatttccacatattttctccttgctaatgaacaatatgtttaatgctggagaataaggtcattcttataaaaagagcaggtaaatgctaatttagttcatgtgatatgtagaagtggtgttgactgtctttattatccccatcttctctgtaggaatttatgagaacatatatttatttgggaaagatagaattctaagtatcgaggtaataagcttgctctgtacagtcactctgtaggttctatgaagatgagcactttgttgttagctcatggattcctggtgtctagcacagtgcctggcatgtatgatggatgataggtgtgctggttcattctattaaaatctgtaaaacaggcagagtgagtaccttttccatcgttgaccttgagatgttgataatcagttgtgcctctactgagtgcctaggggactcttttggagaagtcaaaattagcctccgttttggatattgaggaaatcgagtcttgggccttgcatatgtgagtcattgacattcgccctttttctgctcatatcttgatcccaaatgccagttttctttcccaaatgccagttttctcttatgagtatttgttttgtgccccatagaatagaattgccctttttttgttttatgtgccaccttcacttttggggaaactaccactgctggagaagaaacgagatttatttgggaaggagagaagcaaataaataatccaccttggcccacttcccttataaggagaactggcaagactggaaatagagccttcaccaaagggtttttagaattcatttcattaaaacttgaacccaacatacagatttcttcctttcagccttctggatttggggacagagggattcctgacctacccaggttgaatgaaggggagagggtggtctgtttgtttcaatgctgtggtctccagggcaccttctgtagtactttgtattcttagaaacagagtcaccacctcttggcagcagtgaagccactcagatgccaatggtcagagtttggtttcaagtcaccagccttgtagagacagtgcccagtttcctttggcaaagacagcctgccccttctctattcatttcagccttgaacacagaggtaaattcctcaaaatagaaacctttgtggactctatctgatgcatttgtgaatcatgtttgtcactaattctaatttaacttcatagaagttttaaaacgctgtttagtttttttgctgttgttcctttcccaaatcaactttcaaaaaacgttggtttaacggtgttagaaaggcttagacattttcttttgggggacagtgtgattaatgtttgcagcaaacgcaagggctgtggtgttgacagatccaagttttattaactccaggactattcctggatgtgtgacctcaggcaagtcagttcatctctaagcttctatttcctcatctgtaaaatgatttaaattaaatccacctccagcagcgtcatgaggcaaagattacctgagatcacatctataaacaacacattgctcacagcgcccagtggacacaaggtctcttccttccttccttcaggcacaggtgagaggcccacactctgagcagctggttatgagtgggccattatcagggatttgaacagtcacttggcttcactgcttgctcccagctcttggcttgtgtttcttttttctttactaggcaggagggatagcaa

SEQ ID NO: 64283 - DNA, 2426 bp, Homo sapiens
cacattaagttggtattaatgcctattcagtgggagaggcatgcccgaagagtctggagtataacgtctagaccagtggtctcaaatttggctgtgtattggaattcactgaagaagctttaaaaattatgatgtttggcctctctcagggattccagtttaatccagattatgcccaggcctttgtgatgtttaaatgatccttgggtattctgatgtagcctgggttgagaaccattggtttggacacactcctttgtggtccagttaccatgtcttatcccaaagcaaggggaagaaaagggttcactttgtgagtgaaatgacttaatgtggtttagagttttttgtttgttttttcatgaatgagtgacctgtgttctttttcatcagccatgtatggccttgtagatcttctctgtgatctgtaccccagtcctaactttgcactgacagtgacatattgagcagcccttatgtagaagttttggattggttactaaggggactggtgacaaagaggctcagcactcttattcctgctggaagaaggaagtgggtaccattgctcagaccactgtatctacgctgtcccaggagagttgggacaagaagtgcattctgggttatgacatgagctaactgcacacagatttcttattgggctccaaagagtatcactttcattttcagttgggtcaggtgaaattgggtaatacaattgtttcttggtttggtagctgggtaacttaagctgttgttattaatgtgtccgcaaaaaagccttttttagatatttcggaaaatatatgcccttgtcagtaaaaagcaatgattgtctcaaccctaagctataatcgcttttctaaacatactcatcatttcaaaagcattgatcctggactggaaggcctaattccagaattttggtactactgctctttatccagttcaagatggatgagttccaggttgatcaaagagtttgtaatgggaatgtttctgttggtttcttacagtacaacaaacacctcttcgtgcacattgggcatgccaaccattcttacagtgacccattgcttgaatcagtggacattcgtcagatttatgacaaatttcctgaaaagaaaggtggcttaaaggaactgtttggaaagggccctcaaaatgccttcttcctcgtaaaattctgggtgagtaagacattgctgtgatttccgtggtttttgtctgaatggtcacatctcttacatgagcacagtgcagcacagctggctttggatttacactgagtgcaccttcatgtgcttctgcacaattgccaagggagcacggactcacacctgtgaactgtcctcatgccggccttatgcatccacatggtgcacctgggtgacattctctgtccctgccaaagggcacaagggacaagcagcctctttggacttcacttaaattcccggagctgggatgaaaataaagttacatgcttcaagattttgtaagcatcagagaggaaacagaattgctttgcccagtgtatacttcatttgtgctttaaaatgacgggcaaagtcccctggctgctgcagctttgctgatgttccagagcctctgagaggagctttgccaccctttggcactagtcagccttgggccaggggaatgctaatgggtcagaatgggcataagtataatgtgtgtgtgctaagggattggggcaccagataacctgctagcgctgcgagtttatgattcctcagcctttacacacatttttttttaaaactgttttaagtgtttgtgccccttagcatggcattaaaggccctaagcgacctggttccagggtagcttcctcttgtgtcctgccaaacccctgttgccccacctgtccagtctatgctctgccttctgtttgtctagatggactttctgctcctttctccctgtaccactgggccagctccttctcctccatgagacaatagctccactataatagaaccttccccatttgagcagaccattgatttctcttttaatcccattgcatttggtaatcacttcccatgctgtgtcatgattgtttggaggtgtcccccttcctctgggctctgcctcagggggccttattcatatagtggcttccttttttattgaatgcttgctttgtgctaggagctgtgctgaatgctttacgtgcatttcatttcatcctccacgttttaggtggaatttgcctcagctccacctaggaaaaaaggctcgtagatcaccagagacaggcttgtaggttgggtacctggagcttgacatcagatctgtgtgactttaatgcctctgctctgtttcctcgttgcataatcccttgtggaccctgaccacaggatctgtcaacctaagcctctacgtatctctatacc

SEQ ID NO: 64284 - DNA, 1057 bp, Homo sapiens
gaggtcctcaataatttatttggtcctgtttgcagtatcgtacatgatcaccaaactgctgctagaatgctcacacctgttacggcaaattcaaaacccaggaaaggcgtctcctgggaatttacttgaggtcagggtcaggctgtctggtacatcaataatttatttacgagtgtaaaggggtcctgtgatcaaaaagtttgagagccactattttaaaggatgtaaaaaggggttgtttatccaagtgaatgaaaagctaattcggaattatagaatgttatgaagagaaaccattttcagtaatttcaaattcaacagtagtgtttttaaataaggtttctgataattagcatattgtttgaatataaagtagcatagagtgcgcttagaaagtcttttttggttttgcctccaaaattgcccttattttacccagtggatgattttaataaatgttttccatggtggggcccttcagtcatgaatcctcaaataacaaagtctagattgcagatgtttagagtatggtagctgttgggagatgtgcaaatttagaaacagttactccgagatcagatacttgtttattaagatttgcagaattaaaatggagaacttccatgaatatgatagaaaacatcactccttcagtagagttgttaggaatatttaacctttataaagaaattcagtcataactatgttaaaataaaggagggaaggcaatttaaattcggtttgcaatttgaaatgtcattggcttcctctaatgactcagtaagaatgaattacatttagaatatctatccttggatatcagtaggtgcttccagtgggtgtttccgaagtaggtttaacactcccttcgaaatatcttttagcaatatgcttagcagatgtgcttatttttgttacaacagagactctatacccagtccttttcttctctctttttcaaatggcctaaagtctctaggctgtcagtatcagcctgactcttacctgtttatttgatcgttcctgaatttggttttcagaatatctgctacgtcca

SEQ ID NO: 64285 - DNA, 1937 bp, Homo sapiens
gctgctacaacagaatgccacagcctgggtaatttataaagaacaaaaattcatttctcacatttctagaggctgggatgtccaagatcgaatctgtagcatctggtggaaggcacatgaagggccagagagagccagcttactcctgaaagccctacttatagcagcgttaacccatatgcaagggcagaggctcaacacctaaacccatcccaaaaggcctcacctccaacactgttgcactggggtttaagcttccaatgcatgaatttggtgggggcacattcagaccactgcaatgatcaaacgctgcagcagccagtttccccagtggacattgcatcctgctgaagacatttctctctgaagcacagtgctaatcataccacttccttggcacgcaggctttcaagggagtatccatttcctacaaaatacaatctaaactgtcttcttcgcccccataacctgtgcccaagttgcatttccaaactcccagtctgaggtccttaatccatgcccagaagctagaatgcagcactccaggccttggcctgcactgtacccccagccttccctgcatgtgccagtctaaatcattcctcaactgagaccacctgtggaaagtcataccttccattgctgcaactctaagtatctctgacatggtacttattttctatctgaatgatagttattttatgtatcttccatatcagttgtaggcaaaacccgtacattgtctagcatgaacctttcatagtaggtgcttaataaaaatgtgttaaatgaatggcaacttaagtcattatttaacatctttgtaagccagtctttaataggaaccatttcccctccagatattctaatttttaagaaagtttctgtttgtacatatatgacaaatggctagtcagctgcagtctcttgttttttttaaaaaatatctctaaagatgagtgaacatgaatccaattaatatcctgctttctgtgcatatttcaaagaccttgtggatcttttattgcaagggtatagtagtattctgatactgaatgcaagaaagtaaaacaaaattgatacttgtagcatgtcatttcaagagaggactgcccaaattagcaaactctttaaaaaacgacagatgggtattgaacttgtttctagatgagcatcaccttcccaagccagccctcttcattcagccaagcagaggtcttaccctgaaagttactgctcggtgccatgactcctgggatgagagaataacccacacctccatttcctttccaacaggctgatttaaactgcaatattcaagatgatgctggggctttttatggtgtaaccagtcagtacgagagttctgaaaatatgacagtcacctgttccaccaaagtttgctcctttgggaagcaagtagtagaaaaagtagaggtaagttggcctctgtatactggaaacttcattcaagggcagactgttgccttcctttaaaccttccttggggcagagagttgtatttttggatgtctgcttcttaccttctgtattagtccattctcacactgctatgaagaactacctgaaaatgggtagtttatgaagaaaagatgtttcattgactcacagttccacaggcttaacaggaagcatgatttggggggtgtcaggaaacttagaatcatggtggctgaaggtgaaggggaagcaaggcacgtcttctcatggtggcaggagaaaggtgggtgggaaccaccacacacttttaaaccatcagatctggtgagaactcccacagtatcacaggaacagcctgggggccacctgccaccaggcccctcctctgacatgtggggattacgattcgagttgagatttgggtggggatacaaccaaaccatatcaccctccttctttctcccacttctttttcc

SEQ ID NO: 64286 - DNA, 1056 bp, Homo sapiens
agtattttcttagtttcttcctttcataaacaggtgacattcaggggctcatgatccgtgagaaataatcagttttttctaaagtagagagattagctatattggttgttaacctatgaggctttatcacaataaagagattttctttgaagaactgtagctagctggggcctgctcttacagatctcctccaggtaaagcatcataattaggcagttttatttttttctgacctttgctaaaaggatctgtcaacgcttcttaaagctctcatctttccaactaattttttaaaaaacttccagaaaaataatggattctatgtatagcaataaatttggagatagtttttttttaattaagtagattacgtaagtagtatagcatatagaagatgattcatgttgaaaaactaaaatgcttttatgggcagtaatatctgtttcatgtgttttggagtcaaaagtgtaaaaatactgaaatccttttttcctcacagacggagtatgcaaggtttgagaatggccgatttgtataccgaataaaccgctccccaatgtgtgaatatatgatcaacttcatccacaagctcaaacacttaccagagaaatatatgatgaacagtgttttggaaaacttcacaattttattggtaatggttttgtctctttcctctgtgggcagatgctgccatgaggcttgacagaagtgaggaaggtgggcctgggaggcgctgggcctgcgccgagggaactgaccaggttgttggattgggttcctagtggtcagtcagcagttgaatttgcatcatccatagggaaaacttgggcttgattctgtagaagagaaggggttttatctggctggggtttctaaggttcgcagaactggaattcagttgggtaataaaaagtgatgtgtttttatctctggctgcagagtagaaaggcctggagaacttttaaacatccggctgtatcctagatcaattaaatcaggatctgtgagaacaggacccaggcatgtgtatttttttaagttccgcaggtaatttca

SEQ ID NO: 64287 - DNA, 8328 bp, Homo sapiens
cattgtagcccataaatatatgtactgcaagactttattcttttaggtagggactggaattattacttgtcaatttaaaaattcagataaaaaataagacaatttcttagagtaaatgattgccttgcgggacagaattaaagagaattctttgttgtaaagaaatcagccccctaaaaaacaaaaacacaaatgtgctaatttttgtggtcctttcttgggcatagattatgagtgaccctatctagaaggtatttcttacttatgataaccacgtttagatgggcttcaggtcatagttgtagtgttctgaatctgtgttagaggacacagagtgaggctgagcaaatctctcttggacttaagacttgttcttctccaattaagtcatagtcgtcatacacagatggaatatgttttcatccttttggtattatatactttttttttatcttaacaggtggtaacaaacagggatacacaagaaactctactctgcatggcctgtgtgtttgaagtttcaaatagtgaacacggagcacaacatcatatttacaggcttgtaaaggactgaacatggttatttatatatatagatatctgtatatacacacacacatatgtgcacacacacactctctctccattatcgaacgactgactgtaaacctcaccacacagggtggtgccctggccccgaggtcaccccgacttttctaaatcttgtttgagtgaagtcattttttcatgtgttcatactatcattgtagctgtgaagttctggtacagttgtaaaaagagaaattgagttgtttctctatgttcttcagatgtgcagcccacaattcctcgggaaaggtgaacctgaacaacccaagtctctctctgcagagccctgtttctaattgtggtagaaaatattgagacagagcatttgccatgggacatttacagcctttatacaaatgtatttagttctcttttttccaacataaaattcttgttttaagatacaagtaaaattaatctttaaatataaatgtaaattagtacacaaaactaagaatctttagacttatctttgtaactaattagggtggaagttatgaaagaatgtaattcactaaattattttttaaatgaaacctttttttttctttttgaaaccaaatgttaaactatagccttaagaaatgcttggtagaagtgtcctaatgagacaaatttgtacttttatcctcaaggttaacactaatctcctaatccattaaactcttgaacaggtattacaaaggaagaaaacttcaccccttatccttaacatatatagtatatttaaaaaatataaaattgtattgtactaatgtgatgatggattatttaatgaaaaagaaaaaatggctctttttgcaataagtagatacatactgaaaaaatctaaacttacaatgtttatagtcttgtgtgtgcagttatattttatatggacgaccaaattttttattaagatgagtaaatatttgaaccactgaattttaataacaaaattttaaaattggcatgaatacggaatactgcactgtgagatgcaaagtatacagaatctgtggctgggagaaaatttcatcaaatagacaagtaaaaggctcatcagttttagcatctctgctccccagaaaattgtaagcatcctcaccagcctgtggatacattctttatttctagtgacccaatatgcatattaacctgctataactagggctatatgtgtaggtatgtgtatacatatacacaaatgcacatatagagttaacacatttagtgaacacttgtttagtgtcactcagtttgctaggtgctgatatgtacgtatatctcaatgtgtctgtagacttagatacatcctcttgaagcacatccatttctttagcgtctctcagtaagttacagtacttgtttgacttaggtttaagaggcccagctacctatctctgaccttttcaaataggctcatttgggagattcttttgccaggagagattcaactttccaatctaagtattccagagcattgcccaggcagagttggtttgatgtggccagatgttttgagttatttcccttaagtgtttcactggggagagaacagggagtgctcctccagcttcccaaagaaatatgtttttgtaagtggtaggaacatgtgcacacaatagaacatgaaataagttttttaacttgtaaaacatgtcaagatttttccaccaagctagaaaataaaaaacttagttctaccacatccaattaacttacacacccccttccctgtctcaacacctgctttgaccctgcttttctattattacatcagtcagcatcttgtggtccctaacatgaggatgtggctggctcgtgggaaacagcaaaacactaagcctgacctctcccaaattgggaagaccagaggagaaagtgcaaaactgtccccatttggaatgcccattccttctagaaaccagttggacagtgctcctctgcccttcataaacagactactgttgggtccctgattccaggctggcctgtgaaggattgccccaggtgtcccctttcacggttgtcacatttacagtgacttctgttgaacacccctcttagggatgtttcttttgctcttatttcctgcatctttccttaagggaagccccatcctctcccaggaccaggagtttatgaccaggcgagcacaaatggctaaaagccaagctgtcctagaacttcagtgggagagctgtctggttcatattctacccaggaatggtacttttcagtgcagccaggagggctcttgggatttcctttccaaagcacaaaaatactgggacccaagaagaacagctagaggacaactctgttggcacagagacggggacagcccagtctgctgacctcacagggtcagctgggcccccctggtgcttcaccacctgcatcctcttgctcagaatgcctttgcagttgagttttctgggtttctatgattgaccttgaggtttactccttgctcttacaacatttctaaggatttttaaaagtttacttcttgtcttgttcttctaaagctttctccaggacagatattttccctgtcttaaccactggtccagtcatcccagtgggcttctctttgtctctcccagattagacctttgggtgagattggcatcacaacatctaatctgagtctgtcttttgtccttcattctgtatggcagtctccctttgttataaaagctttctaaagcatactaaagaagccttcccagagccccgtcttgcttctcttccaggtgctctatcccctcgagaccctctggtgccaggcttgcttcacggccatcttgtgttgtcactgcagagtttggaggccagttttccacagcctaaacagggaggagctgcagaatggggctctggtctctgggcattcatttccctcatagaggctgagaataaaacaaggacttattcacacatgttctagaaccccagaatggcccaagttacctgagaccagggtttctcaaccttgacaccattgacattttggactgggtaattctttgttctgcagagctgtcctttgcactgtaggagatttactaatatccctggcctctacccagtagtaccactagcacctattccccacccagcgtgtctccagatattgtcaaatatcccatcgggtgcaaaatgatccctggtcaagatctgttgcccaagatgttacaggtcacaatgaccacatttgaaattgttttccctttcattttaccctgtgaaagcatctctcctagagccttgcaagaggcaggtgacattgtgtccatatttcttcctgtttcagaacttctgtttcacaacaatttctctctcgctacaagtattctttcactcagcactggggaagttgggaacagctggtcaccatcatccctttaatcaactcacacctgtttaaagagtgtttctgatttgaccttcatcccttagtttactggcgttaaaaaaagtctcagcaattttcattatttctcgtgggtctcattatcaaacctttacttatttcggcatatttcctctgggcttcttctagtttctgccttacaagcaatgctgttctgtaaatttattgaaacctctggaacatttcacctttagagatggaggatggaaggattggtaccagaagagggctaagatacgttttctgtcttgagctgaaagcacagtctactctccttcgttttgtcgatgagaaagttgaggccagaggggaggtgacatgtttagagtcacccagctggttagtgacagaaaaagcgtgagagttgtctaggattcctgccactttggtccctggcctctcctgggggaggctgctgttcttaggtgctctaagcttaatccctcagaatgtgtggacaggtcagcttagaagagatggggagattcaggatccccctgtgccagagcacagcctcaccggatgctgcttcccacactgaagtgtcctgtccgaccattgctatctgaggcatccacaagcaggtaggaaagctggcgagccattttacttcctgaggacaattccccagccacaggctctgagtcaaatttctatttggtaagcatcctagcagcaaagtcctgcactcagaccagccaaaaaacagcccccattccaagtacttggtgtcaaaagtccccgaacgacttttaaacccaagtcttcttaaggtttcagtactgtggtggctttagcagttgtttttgtgcaactataaattatttaaatcatctgagatgacagtcaattttacaaaccaggtacatattaatttgtataattttgtatatgctctggtacactacctgaactaacgaagggtagaactaattctgtttgtcagtgttcacacctgtaacattaggaggatatgtctgcattgcttatttctttatgttggtgtttctgtggcaaagccctgcacatggcatttctgaaaagccttaaatctttaagatgttgcatgtagggtatgcagtgcaaaaggctgcctcagaactgtgagcccttttgtaagctggaagcatttctcttactactgttacttttgtaggaagttttcaattcagagctgccaaagtgttcccgtaagcagtgccttagtaataccttagtcatgccgccagccttttcttacaccaattcctaatgttcatttacgaattggcccaatattggaaacaaaacaagcaaaaattgtcttcatttttgttttgtaagcccattttttctccagttctataggaaactgactgcttggtgtaaaatccgaaactggacacaagtcagttctttcaccacactcaaatgtatataccaaaacaaaaggttgcaacttcatagtttactatgaaaagcaaattgtactttttaatgttgccttttaaattcatgaccaaatacttagctatttgtgaatcttctgcactctagcatgaaagtgcctttggtttgagattccagcttagaaaagtgctgccataataacgataatttgtagagagaccaaaaatattttgagatcaccgtaatgcctttggtttaccgggatgagtaaccaaccacaggcctctgttcacaagagcacgacgtggtccccgcctgctgctagtctgtctgccactgggggcctcccaacatccatagcacacttcagcggaaggaccccagaaactgttgtgtttgtgtgtgctgatgacctagtgtgtcatttcacctcgtcacccagccctgcgtccggatgaggggacttctgcacaaatgacagaatctcggctggtggacagatactacagctttctcctcctccttgtgttcgtgttcagtctctgtggagactttcttttccattcaaatgacagtgcgcacttatctggtttacacaatgataccattttgaaagttggaagcctcaaactgagacgacagtgcagaacaaaacaaaagtgagttagggtcgttaaaattgaagtgttcttcttagggcaaacatgttgactccgagtattgtgtatgaatgtgctacgagaaacttccaaagagcaccattcacaatttggcattttcaaagaatgttccagccctcaaaggggcaactctttaaagtccttgttggcttttatccaaaccttgtagaaattgggaaagctgatagaggtaaggaagacgagtgaaaaggacaagaaggccaaacaccagccaaaaagaaactaggaaaaaaagattttctttgctaatatagatgtaaaaataacatcagacatctttgaaaattagcctctaaactcttaatacatacgttctgtgtgtctctacctggcgtctttaagaatatcctctctgggctctgaaattttaggagtgattcttatccactccaagttgtaagtatttgtagaaatttgtgcaaacaaacaaaaactatcaaatgaaaagaaaatgtactcaacctaacttatagttagcagctggaattctcaactcttccctgccagcactataccacagtgtggaagaaattagtcaaatgcttgttttcctgcttctcttttcaactgttactgtgctttgtttgaaagtagttttctctctcaaagccgttgcttatatcgttaagaatgaaggtttgtgtttaaaatttattgcattgcaaagggtagtttcactgaagtcatgcaccattaaataagatgaaatatttgtatttattgtcctacttcctaagccgtaacttcttttcctctgtgaatttgcattgagtcactcatgctacactacatcgctttagtatttgagatggcatttatgtttcctctcgtttatcatgaaatggggtcagattccatcagattccacctctgtcaggtggactcttgtctgccttccatgatgagattttttttctccttcccctttctttaagagaggctgacagatctaggtgtcaatcaattggaaaccagtctctgattttttttcattagttattttctatcattagtttcactgtgtaaattagatatcaactgcacttctttaaaaaaaaatacatctccctattacctccttgaaagatttacttctgtaggcctttttcaataggctcatgactgcagacaaggaaaaaaaaagtaaaaacaaaaacagtatgtgcctgaaaatgacaaaaaaaaaatttgtaacatttaaaaaagaaacctgaatagcctttaattctttaataatacacttaaattttatgtaaatcggttttcgccacgtgtgtttgttcacattctaaatgacttaatgggattctcacggtctgtgtctttgtgtcacgtgtataaaatgggcttgtgatgtaagcgtttcatctggtcagtggttcctttgatattgtactgctgctgggagtgggctgtggaacctgccttcgggtaactgggttcctcttgggtagattggagagatgggggtgggcgtgggcaaattctcacacatgttttcttaacctatttgcagaaactttcaaaaggcatttgattaaacctcttggcagtacagtattcttgtatttgttaacgtctgtgtttaggtactggtacctttttgttttaaaatgttctaagtgttggctttaaagtgaatttatctttagtatgatagttatatgaaaattataggatttgtgtgcagagaatttttttataaagtgctttgtaaaaaaaaaaaaatgtattctagcttttgcggtacatatgtgtgataactttaatacccatgacagttaagtgcaattatttcatcactctaaaaatgctatttttgtgtcagttcctgcaggtgttttcatgtctttgcaaagtgacacattttgatgccttcttgataaagtggtagacattttgtagctttctagaaactttgtattcatacggtatcaatgaaaaataaagaaaatgaaagtgtgggtcaccttttttatctgcagaagtgtatgttgttaggaatgaaatgtgctttatgtattgtgagtgatgatatgaaagacagagtaaaggaggtcacagctttcatctttttgaaggtgtccaccaagcttgataattggaactttaggtgttacatctaacagcgtttcttaaacaatacccacaagtcaatcaatccacttgcctatctcactctttagtgcatcattaaaattgacataa

SEQ ID NO: 64288 - DNA, 1021 bp, Homo sapiens
ttaaaaccaaccatgaccttaacggattttacccaaactcgtctaacttcagtatgttttgtcagagattaatcagttacttgttcaaacttaaattgagatagtgtaaatatcagggtttcctagataaggacagaaaagaaaaaaataaaacaatctcatagtactccttgggtgaacaatgtgattaacgatggcacgtagtcatggaaaaaaagataaaaagtgagttaagaacttgaattactcttgtctggcacacgcctatgcacatgccaggagatgcaagtgcaacaccatctcagtagctggcgacagagctggtggggactccatgtaattgttccagttgtttcaattaaaacttatcagttgtagctagttgttggccccgcggaaggagcctgctggccgatttccctctgcagctcagtacttctgaggaatgtgggatctaatctgtcctgagaaggttattaacaatggggcatgtgtgtggtaccagcatggtgcagaagcctcttatcaacctactcttgaggggctggctccagtttcaacactacatgtgaagataacttaagaggtcttgctttatacagaagttccttcccttgcagagattctctatctgcttgttgccaatgggagcctgcccttatgacctcctcaaaccactgtttgtgctgtctcctttttagagacagcaccccccacccgccccgcactaccaccaccactgccctggtattacaacatgtgtgcctgtttgcagattttcaagtaaaaatgggaatttaaaggccattttcttaattgatgttttcaaaagacattagctggcataactatggttttttagtttcatctgatgcaggaaatgtctatgcatttggtcttgaacatgataaaaatgaggaagggactgaaaaaaacccaccatccccagacaatcatttgatcccataaacacgaaacctaatgatagctttcattttgaggcagaggtaaaatcctcatt

SEQ ID NO: 64289 - DNA, 1034 bp, Homo sapiens
cccctctctagccctgacctgtctctcctgtgttctgctagcaggtccgttgtggacatgaatggcagcctgtaatctgcatttgtggtctcggagttacaggtttgcagactgcttgcaagcactgtcacattgagtcctcatgacacactggagcctacatcccttcattccccaggctgtcctaaaaggcagtttggttgggtagtttagcatacagactctggagccagatttcacatcctaagtattccctactggcttcgtgacttgtggtcaattttcttttgctctctatgccttggtgtcctcatctataaaactgggatcatagtagcccctacatcagagagttgaggtgtggattaaatgagttaaagcattggaaaaagtgtgccagtctattcatggcacattgcaaacactcagtgaatgttgctgtcagtcttgctgctcttcgttgccttgccggggtgccttggcctggtttgtagtggtctccacattcagcctgcctgtctgccagaccttgccatgtgcctggacactgtagtcaagctgaggggctgtccattccctgtaccagcccttggcccagtccatccctcaattttcacgtgtccaaatcctcctctgcttttaggacccagggccttggtcctgcagcactatttcttcattttgttttccttcctccccacacctggcagcaatgtccacattgatttttctccaattctcttaggttctgctgcattccatattgtgttgggctgtctctgaaaatatctcacctgctcgctcagcctgagcattctgggagaagtttatcttgctttttccaaaatgacaggcacagggagcctttaggccatggttgtccaatgcacattgatcttgtggaggaggagatgggatggggtgggcactcagggacggagcaggtggagggaacaggatgcacactgcatagaggtgggggtgcaacagggccataagtggacatggccgtaagtacttaggtctgcatggaa

SEQ ID NO: 64290 - DNA, 1520 bp, Homo sapiens
gagttgggaaaaatgcattatactaaggagatcttaatcctggacagtcttctctaccaggcagaaaggttctgctctccactggtcaaggccttgggcctatgtgtaaaactgggtacctaacaaacacatgggcagacgcctgcagctccttactgggtagcacatgacacatagtatgtccttggcaaggccatttgctcattcctctgtgtaggtaaccaagtgcaacagaagtggaggtatagcccatgaatgtgaactaatcatttttaaatgatttggtccatgggcaggttagaagatgaaaccttcccaaggccaccaaaacttgatttcttgcttgaaaatgataagatgcagttataaaatgcttctgttgatttggaaaaaatgtgtgacttgttcaaaacaatatgtattaatagaaaatgtaacataaataagaggatacaaaaaagagcttaatgtttctatcttctgggcctagcaatagtgatttttttttccttttggtaggaaaatgggggctcagtggaataatcagttttatttctttttcttttaacttcatgaagggtttgtattgttcattttgttatttaatttgttcatttgctaaggaaagaacttctttcttggaactctgcggagtgtttttagatggactttactggaaaaaaacaggaattgaaattatattcacagtgcgctctaaactcttttaaaatctcatgcatggatggaggaaaatgcactgaaatatcaatagtggttctcacctcatggaattagaggtgacttttattctcatctccttctctgtggtttcctatttttcaacgagtgtgaattacttttatcatcatgaaagaccagttaaaaattaatctcacaaattaacactctcaagccaaaccacgaatttttgtttttcacaacctggcttggactataaactgtcacactatctcagacctatgcagattcttttctgagtgaggcattgaggaacttgttataaagatgatgctttccttctggaaatcaagaaacaagccaagggcttataatgtgttaggaaagatgtcctgagtaactttcctcctggaatctgactagcctttattacagctacttaaggaaatgagttttgtgggttccctgttcactgtgtcaccatttttttctttatcctgtactcatatgtacctcagggtccccagattttcttatcctgggattgcatgaccttgtccttggctctctcgggcccctgccgtttccagtgttctctgttcatgttcacaatattgttgatttggctgtggcttcttcccgcagtgttcttgtagactgaagagagcacattgctgcccttgtccctgtgcagcttcctcttcctctttatcattgctcaggtgagtggcctgagcagtgctcctgggatgaggtgaagagaagcagtcaagactgcagggaagggctaggggtgctgagctggccgagcttccctgggg

SEQ ID NO: 64291 - DNA, 1053 bp, Homo sapiens
agcctctcaggcactgctcttggcatcatggttatagaggtgaaacaggacaaggtctctgctgtcgtgaagcagacgtctacatgtgtgagatgtagaatgtgacgtcaggtatgatcatgctctgaaataaaagacagtgagaccggggtggagagggaagggcctgtccaagaagtgagacagtgagctcgttgggggtaaaatccataaaattcctcttggggtgactacagattgtcagctgcgctgtcagcaccttgttttaattgttttacttggctgccattgccaatgcccagctgactgctccctgcagcgagaactcccacctcaggcctcgctttcttcagctctgctgagcgtgcctctcctgggtcggctcccggttctcctccagctgctgagattccagcctccacagcctgctctgctggttctctgttctttgtccttagcttctggtttggcttggtccctttcacgtcatccttaacgtcctccctgggtgagctcatccaccactcacctctgtcttgaagacacccggatctccatatccggtctgaacctcctcccagtccacactcctagtggtctgccccgagggcacctcaacctgtctgtcccctcctgagtgccacatgcgtctttctccctgtgctgcctgcttggtccacgcccctcagttgcttctgcttcatgagtcgtcctggccttgtcttttccctcatattcccttggttaccacatcctgaagagctcatcttctaatttgtcaactcagttcttctctgtctctccactcctgtgtttaggattcatcattttgttctatgacagcctcttaattggtcatcctgtgttcatctttttcctccctcattccactgcccacattcctatcaacgtgatctttctaacacatgtctgatcagagctttcttttgcttaaagctctccaagagctcctcattgcttagaaaataaaagctaacccccttcagcggggcctgcagtcttctcatcatctggcccttggccccctgcagc

SEQ ID NO: 64292 - DNA, 1050 bp, Homo sapiens
aagtacagatgctgacttgggacccctggggtcagagcttcttcctatttgttagactcctcagtattcactggggactttacaaggtttaaaatgaagacaaagaggccctcaggcacccccatgaagggccactaggtatccttacccttcaagaaaagcattctcagctggattaagggggaaaaaggctgtcagacagtagttcgcaagaatagatattctggcttatttaggaaatttgggattcatccaggaccaaggtgggtggacctcattcctgagaattccttgatggattatttttcattttgaattgctattatcggtccatcaaaaacaagagctaaaaaaataaaaagtcaggggcaaagaatatagagaagagacattcctgaggtctcagcatgctgggagacacaacaggcgtcacaaactcaagcccaacacaacctgtcctgcactcaaagctgacaagaagagcaccccaataaacccaatggccaatgaacctcccatttcaggtacattttatcacattatgaatctgttgcttggctgcacaaacagaccactcctcactcttacaacaaaaacttcctgagccaggtaaactatgctggcacttggaacagagagagagagacagagtgtgtgtgtgtgtgtgtgtgtgtgtgtgtgtgtgtgtgtgtggtctccacccttaaggagctcaggttgctgagcataacaggtaagtaaatcaacagtaacaccgataagtgctttgcaagagagacatgagggtgttctgggagccaggaggaaggtcatttccaggtcatggagaggtgctgggtagggaaggatggtgtcctgaagatttgggggaaactggagttgagttcccaagagggtgaacagagaccacgccattcccaggagagggcccagcattgcaaaggcactaggaggtgatggctgttggtagctaggctgaggttagaaatgtgagttagggaaaaaggaaaacccaaagtggggtgggggtgggggagcaaaagctgcagg

SEQ ID NO: 64293 - DNA, 1025 bp, Homo sapiens
cctctttgagcatcagtgtctccttctacaaagtagggacagtaattctttcccaggggtattttgaaggatatacgaattaatatttgtcaggtgcctctcagatgttcagcacaaaataaacagtgtataaatatgagtcctctcttatcttcctgctgtagagagaaagttcgttggggatgctccaagttggtggctactggctgaggatcctggagtaagaggaaggctaccatgtaaacccagagatgaatcatgaacaatgtgtattctcaggagcttagtatttgatatgggagcctaacaagcaaatagtgtgtccagtaataggaactgattaatagaggaaagattaattaaccttctaggtgggtggggtggaaaagtaggtggggtattgaaggttcaacaggagttcgacagagaagatagaccataaataataaatatacggctgtatccactagagataaagttacattgttttttatgtacatgttgacttcttttggccttgccaatgcactgatatattcaaattcagctcctctctttttctcttcccttttcccttcactctgcctttcctccagccctgccttgaaatactcagccactgaaaatttcttaaagaatttctttatactttagtaagtcctcagaggataccagttcaccctactgagattttacaagaactttggtgtagctggggttttttttgcattcctttttctacggtagatataagttcttttgggttgcccatcaatgaacaaactaccaaccatttgatgtttactgcgtgactcctgtataccaagcacatgtgccatttcacttagtccccagaatgtcagagcagctttgtgaaatgggctgcccgttctttcttatggatgaagaaactgaggcttaggtaggttaatatactgaatattatacatgtagtgagtgggaaagccacagttcacctccagggtctttttctccctctttgctgccttgcttggggtcctgct

SEQ ID NO: 64294 - DNA, 1021 bp, Homo sapiens
gtttgtaagaagggagatgctggaaccccagttatctgtaaaccccacctggaacttgagcacagtctaggtattctttaaacaaaaaaaaagaaaaaaaaagaaaagaaaaaaagcagcatttgtcagatcagaatcaaataaggtgaaatgtacccactgcgagaaaagaaccaatgacttagtgtggcttggagtatgcaaagatcaatggatccatctgcatgaagaagactcccactcactgacaccaccatcttgactattctcttattaaaaaatggaacaggggaggctgcggagcagcagagtcactccccagagagccaatgccactacagagaacatgcatcccagggcttaggttttcttggtgagaaaaacaccacagagtgtcaacagtctctccctggaccagttcgtcccctcctgcttttcttataaaggaatcactataccaagttatcccaatagaaatcaaagacactcaaagatcttcaggtcctgtcatctgtcccctcttctccatccccacagctctagcacaacactcagcatcaatttcctggacgattttcacagccgctaaagtaattctgctgcctccctcctacagtccagcccccacactgccaccagctggctttctaaaataaaagtgctgaccacgtcactcacctcctgaaagatgtctactagatttgcactgcctatgaaataaactccaaagtcttcgcttgcatgcaggcatgcattaactcagtcatttgtccatccacccacctcgtgtttcaggatcacccactgtgtgccaggctctgttttaggccctagagtgctgaatgcaatagataagaccaggtcccatcttcatggatttatattcttgtggggtaagacaaacactaaataagaagacaaacaaacatatcatataaagtcagagagtgatgagtgctaatgagagaaaccaaagcgaggtaggacagaatggttgaagcagcggggagagggggcagaa

SEQ ID NO: 64295 - DNA, 1316 bp, Homo sapiens
ccacttgccaataatttcgctctacatctaaatggagaacaggagtcatataagttcacagattgaatggatggttgatttacgaagcccttgaaatgtggctgcaggccgatgctggcaaccccataattagatatggcatgctctgcaatgatgtattttttaactgttttttaataactcagttctccttctgggatgaggagaaaaatggaatttgttaaaaataaatcgagattttagtggcttttcagccttctgctgcttgttgctcaaaatattctataaataagagaagccctgccctatagtgcactgtaaacacccacagacactcacagccaaattcttccaattatgaccctgtgcctgttgccaagctactgcaaggacctacttgaaaggcggccatctaggccatttcctgattaagctgccctgtagcaaggaatcaaggcctgctgctttggcattgtatctagtctcaaataattactccgtgttcctgaaattaagccctttccttgtgatagaattacaattcagaggtaagtgaaaggctaaccactcacccatctgtccgtctgcctaagtcgtgtgtgcatttaagaccctgagctgtcacatgttagactttatttaaatcaggtagcagaagtgcactcacaacagcatctttaattgcactgagcaaatcaaggtcaaacaaaaggaggtcaactatcgacatgacaggtgagtcagatgcagcctgcctttctgttcagtggcttcctgactcatcagtttggatcaccgttgcccagcccagcaggctgaaatggtcatttaaaaatccgtaccgtaccccaagaaggcaatgcagttatgtcaggtgtagggcttactgctctgccgttcaaatgccagtgtgtgagttggaactgccccgacctctgggcttccacgcagcctcaacaagccattgaagaactgcatgcagagaatcaggagatgacagtgtgccacattctcgctgagagaaactacttccagctccttagaaaccagaatgttcaaagcagcaatggagcaaaatgggctctggctggaaactaatcaccccccacctcccaccatgaggttttcatgtcagcccaactgggtgagtgttcaagagaagtgtcgtccatattggccctgagaccttcaaaaggtcctgtgacatggctcctgccccaggaactcactctctaaatgggaagcccattaatgaacaagagaactaatatgtggtcagattttccaaactcaaaattgagacctatatacttgga

SEQ ID NO: 64296 - DNA, 1056 bp, Homo sapiens
cacacaaccccttgacctggatcttactcaagtcagtctcctggccgagtcacacacaggaaaagttgctagaacacagtgaaatgttcaagagcaagaaataagagagagaaagaggagaatctgccttttgaaaattggttcagagctggggcagcctccatcatgaaatagtgttaactttattaactacagaaataattttaaaactagaaactattttaccaacaagaaaaattgctagcttgtactgaaattataatccagatccaagaaaaaaatgaaatttccaaactaaagctcatcagccattttccaagtatttcctgtgcacttgttactgcaaatttatatgttctcaactctgagaactcgaaagcaggtaagtggctgtaggtatcaaagattaggaaaaacaaatatgtgtaggtgaccttggggacattctgtgtacaaactaattgtttgctatctgacaacacctggcaccatgtttgagaaccactgtccagtctggctaggaactccctgggcaggaagatcaaccatctcttctcagaaagaatggattcaataacccaagggcttcagctttggatcccagctgctggatctgcccacagccctgattcctccctccccacctctgaccttctctgtagtaggtggttcacatcctagcatgtcactgtcttttactctctggttggttgtctgtctgtagccaaatcctagtacgtcttcctcatccgtaatcactccccgtcgcttgttcctctccatgctagccgctacagccttagtttaggcccagaccaaccccgcccggcctcttcgcatcctctaaaaccgctggcctttggtatcccaacaggtgacttctccagaggctttcacagtttgccctccctagcaaagttttccctacgtccctctgccccttccagcctcagaaagagaagtaactccccaaagcccactccggcttaggcactgtgcctgacatgcagcccagggcaagaaagagatagaggttcaccacacaggctggcacca

SEQ ID NO: 64297 - DNA, 1020 bp, Homo sapiens
gagaaagatggcccatgacttcatccagagtctttgcttcctgtgctctgggatgcctgggcttttctggccacagccatacactgacagggccagaagggctgagatgctgggattgaaccatctttctctttgtgagttgctttccagatagcacgcattccggtcactattttccagagatttaagcagcaaagtgagggaccctcgggcatcgactcagagacctggaggggagcagcttgaagcaatgtaaaaagcactggataaaatctggttctaccaaaaatagggctatgagagttacctcacctccctgaaaggtaatatctttatctgaaaaatggggatgataatactactaacctggaagattgacaggaggattagatgagattctgcatggacataacagtccttggcatgatgtctagcagtgaagaaacataaatatgagaataataacttccttcttcctccgctgtctattccttctcttattctagtcctgtctgctgttgggttttgtctgttgttttgggtaaatagctaacctctctgcctctttttgtctgtagaaatgctactggttctgaatgggtacttcgcgccccctataggacatcgtgggaatgtgtgtgggtgatctggatgtcacagtgacccagacgaggcttttactgggggaagaggggaaggcaggggtgctagatataatgcttggggaacaaaagattgcccaacatctgcatagctgcctaatgctcagtgcattcttgtgggcaaaaccctgcttaaaattatctgggcctagagtctgactccaattaacacataaacacaaataatttttgcatgtttttaatatatactgaattttctgcgaacacagctaccaagtatataagatttacctatttgttatgaataggtgcaagcatttcatatatctttcatgatgttttctggtgtagcggtgccccaatacttacatattgatttacatgttgtcttattttt

SEQ ID NO: 64298 - DNA, 1020 bp, Homo sapiens
taaaaataagacaacatgtaaatcaatatgtaagtattggggcaccgctacaccagaaaacatcatgaaagatatatgaaatgcttgcacctattcataacaaataggtaaatcttatatacttggtagctgtgttcgcagaaaattcagtatatattaaaaacatgcaaaaattatttgtgtttatgtgttaattggagtcagactctaggcccagataattttaagcagggttttgcccacaagaatgcactgagcattaggcagctatgcagatgttgggcaatcttttgttccccaagcattatatctagcacccctgccttcccctcttcccccagtaaaagcctcgtctgggtcactgtgacatccagatcacccacacacattcccacgatgtcctatagggggcgcgaagtacccattcagaaccagtagcatttctacagacaaaaagaggcagagaggttagctatttacccaaaacaacagacaaaacccaacagcagacaggactagaataagagaaggaatagacagcggaggaagaaggaagttattattctcatatttatgtttcttcactgctagacatcatgccaaggactgttatgtccatgcagaatctcatctaatcctcctgtcaatcttccaggttagtagtattatcatccccatttttcagataaagatattacctttcagggaggtgaggtaactctcatagccctatttttggtagaaccagattttatccagtgctttttacattgcttcaagctgctcccctccaggtctctgagtcgatgcccgagggtccctcactttgctgcttaaatctctggaaaatagtgaccggaatgcgtgctatctggaaagcaactcacaaagagaaagatggttcaatcccagcatctcagcccttctggccctgtcagtgtatggctgtggccagaaaagcccaggcatcccagagcacaggaagcaaagactctggatgaagtcatgggccatctttct

SEQ ID NO: 64299 - DNA, 1846 bp, Homo sapiens
ttgctatgttctgagaagttgattcttggtatgctctaaaggaaaagccaatgggtttcctgacggtctagacatgggggtgactcccagtccatgaactgcacaaaggcccccagccaagggggcagctagggctgcaaagccacttgccaggtacatgccccatgtgacagctggaggaagaggtccctgtacaccatccacccatccagggaggagctgctggtttgggacatgttcagtgtgggatgcctatgagatgtctaggtgacaccacaggccctgttgctgtgagtggaggtgaaacagagcagtcacctgccacccccacaactctgaacactgaccacgtcccgtttactgagcatcaaacacgtgcctaggatggttcctgccctgacgtgtctcctttggtcctcgtaacgaccttttgggggaggcatcgacatcacatagaagatgacactgaggctcagagaggtatggcaacttgtccaagatcacacagctgagaagggctagagcagggactggaacccagatatgcccacctccaggctgggactctgcacatgctctattgcttcagtgactcagcaaataaaagcaacagctctgtcccaagtaggagaaagagggcagggcaggctcatacccatccctcctcccacctacggggcaaggatatcaaaaaccagtaacaaggacatgaataaccaatgggctgggggaatggcacatctgttcaatgggttaactaaaagttagccaggtgatcctttctgtttaaacgtgaacaactgaaaacctttctaaaatgcacttgtccatttgcctggcaagtgcacttggaggaagatgatgtaatctataacgagtctcgggatcttcccagccctagatctaaaatgttcgtctgaatgtatcctgcctgaccccagaaataactctacaaattcctcttaatgaaaatgaaatcggcttgttttttttccttcatttgtctccttctggcaagaagaatttaaaaaaaaaacccacaaacttcagtgatttcagtttcatttttctgagctttggatatagtgagtatcatgtgtctgtgggtctgaacaggcatgagtcgtacagctcaaggtcatttttctgagaaaatactcagtgcaggaatcacaacaaaaataacaacacaaaaactattggcagaaaccacacaccaggcttttttttcatgctagtcagtgttgtttcgtttagttctcaaagaagaactaattaattgtgagaggggtcagataaattgcctgaaatccctcagctcacaagtaggaaagccagggttcaaacccagctctgtctgactccaaagctctgtgacaactgaagcaatactaccttttctgagttaaaacaaaacaaaatctcttataaatcaataaaaaggcaaatacctcagtggaaaactaagcagagactatgaataggaaaccccaaaagatgaaacacaaagaccagtaagtatacaaaaacatgctcaatctcataaccgtcaaaatttaatagataatatgccactttcactgctcatattagcaaagattctatttaaagataataccagtattagtgaagatgtggtaaatgggcaggtcagtacactgtatatctgaatataaactgatatatcttttgacaaagtaatttcatgcctaaattaaattttatgtttaagaacatcatctcttacatagtactcttttaatagatatgcactggcatctgttaatatatcaatagatataaatagatatacatttaataaattttcatttaattagtattcatt

SEQ ID NO: 64300 - DNA, 1021 bp, Homo sapiens
aagtggggtggtgggaccccaggacaggcaggaagggatccgtgggacaggaagcctgcagagcatcagagcctcctggcaaggccaggcagtgggcgtgtctccagagcaggctggccaggcgtgggaccttcctggcagaagaggaagcaagtggcagcagaagaagaggctgagggttctcccctaggtaccagacaggcaggacaaggtgggttttgacaatagagtgaggggattctgggtgcccgaggagaggcagggcaggatggtggtcagggcggggcctcttgggttccaatcccagccctgccacttactagctgcatgtcctaggcaagttaggtgacttccaggagctagagatgcctcatctgtgaaaggggtggattccccgcactgggttgttgtgcagaccacatgagttgaatagaagaaaacacctagcatgctcagtggcgtccactatggccatggaagtggatggccttgtgctggttgaaaagggagaaggctgggaaaagtgatgtcaggagatgcaaactcaggttgaaatcctggggatacaagaactcagagatggtgagagcaggggtggcaagaggacatgaaggaacttaaagctggagagatccaggacattgacccctgggaacgaggagggagttgaggagagtggctgcagggaaggctacaggtatcctgggggtgggtctggaaggcattccagagcgcagcatttcatagcaggaagcattgaggactccaaagaatctgaaaagtgaatagagttttaagagtccaaccgctttgttttaatataaaacagagagacaactcctcctgtgagaagcttggactaggacaatgagaaaggtcagtgggatatgaataacagaattttggagctgctcagggagataagatgtagaaagcaaggacaatgatttccttagggagacgaagcccacaggaggaaaagcggaacccagcagggtgacagctgctgctgaggggtggg

SEQ ID NO: 64301 - DNA, 1069 bp, Homo sapiens
gtgatggaaataactagatcagaggaacagagtagagagtccagaaataggtgataaatcaataaaggtgtatttcaagttagtggcaatgggatgcatggactagcaaatggtgttagaaaaaatctcctatccattagagggaaataagaaattcctaagcttaggtagtatatcaaaataatttccaaatagcattaaattaaaaaaatcattaaaatcttagaaaaaagaatatttatattattttgggtaagaaaagacttaaaacatgtcacttttggtcccacatacaaatatcgtaaacaaagttaaaaagcaaaagggtgggaaaagtgtttacaacatcaatgatgaacaaagaattaatattcttagtatacaaatttattcgttcattcaatatttattgagcacttagtatgtactagaaagtattctgggcactaagggcacaagcagtaaataatgttcctgttctcctggtacttagaccctgatggagaggactgccagtgactatggtagattattgtaggtcacattttgataagggctaaggacaaaacattacgtaggtggctgggctagggaggcttggcagggtttgcattatgtggatattcaagggggcttcactgatggaatgacatgtgaagaaaaagggaaagtcattgaatgtcgagctgatagcacatttgctgtttttggaatgtcgagctcataggatttgctgatggattgaatgcgggttgtgaaagaaaggagtcagggtggcttctaggtttggggcctggcaaccagaaggattgacataggaatgactgagaggcttggcttggagatagagttttggttatggatgtttcagtttaacatctctcttgtatattcaagtgaggacgtcagggaggtggtcggccataaatatctgtaattcagggtgacatctaggctggagatataaatttgggaattgttgcagtgttgatagtatttgaaagaatgacactagctagagcccctggagagtgtgtgtagatacagaagagggcccaggacatccatg

SEQ ID NO: 64302 - DNA, 1072 bp, Homo sapiens
ttgtggactctggtttgctaatcttctgtaattcatggagactcaattaattaagcaaccttaatccctttcactatcattttaatgtaactgaagtcatctgtgactgtcaggcagagctttttctcacctgagattatcacctggcctcaaggaacagatagaattctagacaaaagggagaggggagtttttgtccttccgtgcggcctgcgtgatctctgaactttagaactagctggggaaactctctgcctgtgaggaaccccagggcgtctaattgggaacactgttctagaatgcccatgatatgatccagtgctcctagaaacagctatttttgcccttgggattacattgtttgaagggccatgctctctcctttcctgtgggataaaggaaaaaggagagaggcccagctggcagtccatgccctcctgataaatgtatggattggagaaggcggtgagggggatttggaactccttcctctggggatttcagtctgttttcttctactgaaccacaggatgcaacgaaacttggttttctgaagtctgtgaaagggagggagatccttgctgtgaccccaggacttctgtggccctcagccccactacgcccctccatcccaattcctaaaatctaggggttcccacctacctgagaagcagaatatttggcagtagtgcctttgaaaagctgcctggggctctgctcagtactttgttggtactttaattccaccctcctcacttcgtcccttccctgccaaatagatatgtatgcacatttatctttgatgctcaatatgttttgcaaacagaataagcttcatttatccagaatgatggggggggagaatgagaggttatatagatatttcaatcctatggttaactaagcatttttataaacactacatattcccaattttcaaacaatcagaatatggtaaaatatatgttaacacacaaactcttttgagatgataacttttgtttgataacctgagaagctggtccaggttttatagtaagttcaagttaattttcatttgttttacccttat

SEQ ID NO: 64303 - DNA, 1052 bp, Homo sapiens
agttcttctgccgttagtaccaggctgtgttctgaggctgcgtcatgacagactgatacagggggctgcagaaattggctgccctaaggcttcaagctcttccctcggaggccagccttagcaggagctcccatggctctgtatctgcggcagctgcagcaaactacatttccatcgttgctgcacctccttaggaggaccatcaccaatggcaggtgcacatcagtcagtgtcaccctgcctcagcgggaggagtgtgacattcctcagaggaggctcctggggacagatgtagcatctgctgcacctaggtggggacctagttttgatccaaggatgacggcgttggttactgggtgccctagtcagtgaggctgtgactggaaagaattggtgccctgcccaggtcacatggccacacagcgggctcctcacagacctcagggacagcccacggggctctggatgctctgtgctatgaagccaccacctcccttctctttcctttcacccccatttcaaaatccaatttgacaaaggctgagaggaaaagaaacgaggagaaatgaacaattcagtttactctgaagagacaatttttgtagcttttctcctgaattctaaagatgaggtaaacataaaaaaattaatactgacctggcagtgagaccattttcttggagactttagttgaaaagtctaattttaaacattctgcaaattctaaatttgccttgtcagatgaacattgaaaacagttacaactcatttatttttgtcatcttttcttgatgcttggttacattttataagaaatcgtttttcatattgttgttcagggaagctcacagtcagattgaaaagcggcgtcgggataaaatgaacagttttatagatgaattggcttctttggtaccaacatgcaacgcaatgtccaggaaattagataaacttactgtgctaaggatggctgttcagcacatgaaaacattaagaggtgagaccctgggctctattgtcctttatgtccttgcccacaaatgttaccaccc

SEQ ID NO: 64304 - DNA, 1045 bp, Homo sapiens
cttagaacaatcttgtaatatgttccgtattccccccattgaaagatctgactctgatctgatcgatagcattatggctttcttctattgctgcaaaataaatatcccacaatatgtggcaaggacagagggtaagaggctatctgacaagggagaaaggtaggcaggttaacacaataccagagaatacgtcacttggaaatccactccatactgtgtttgcagtgctgtgtcacttcttagctctattgaacctcagtttactctaaaaattaatgataacttataggatcaaataagagtaacatttataaacgcttctagaacagaacttttcacctattatgtcccccagagtttttattcatttattcattcactcacacactggtatttgcatggaagcttggtaggcagaagacttgaagaatcaaaatgacatttatgtaaattagaattaatgtaaatttaatttttccaaagatttctgctctttttagtctcagagcaaagttatggaggaagttgctgttatctctgttaatagacaaggtgactgaagcatatgatatgcgtgacttgcttgagaacagagaggctgaacagcagagctggaatcagagcccacccctatcttctgccttctgaggtcttacaggggaattccaagattgttgccttagaagagcataaactgtttatataattgagggttttcccgtcatgttatcaaaaccaacctccagatgcctccttcctggtgtcaggcaaagtggttggacatatgtacaggttcacataggaaaagtttgaggtctcatgcacaaaaacacaaaggcaacatgcagactgtgcatgcttacttgttgcataattgattttctgcatgcaattgacttgtcatgtttaacatttcatctccccagaatgatctgattggtcagagtttgtttgactacctgcatcctaaagatattgccaaagtcaaggagcagctctcctcctctgacaccgcaccccgggagcggctcatagatgcaaaaag

SEQ ID NO: 64305 - DNA, 1039 bp, Homo sapiens
aaaccctgtctttaccaaaaacacagaacaatgagctgggtatggtggcacatgcctatggtcacagctacctgggaggctgaggtgggaggactgcttgagcccgggaggtcaaggctacagtaagccaagatctcgccactgcactagatctagcctgggtgacagactgagatctgtctttaaaaaaggaaccacattaattagattaaaatgtggtataaatctaaacctcagtgcaaggcttctagtttttgctgcctcctttttatcaggacaaccaaatgccagaagctgcagcagctgaggccacaagacagctgaggctgtctctttttccagcatgttgtggctgtctctagtagccagaaaaattattagcctgtgcatattctgagggaaagcagtaggcagcagtaaatttgggacacctgggtccttggtccaggtctattaccaattaattgtgaatcctacaggagaccagtccccaggctggcctctgttcttcatccataaaataaggaggttggattagatcaacgctgtccaacaagactttctgtgatgatggaaatgttctatgtctgtgccgttagccacatgggaggctaccatggccaacgagtattttattggacagctcaggactaaataattgcttccaagtcctagattcaaaagaatttcaatcacaataatggttctggaacattccatagattcagacagcatgctatccctactgtttttcttttagccatggacatcaaggcaccccacttaattgtctctatatgccaaagaatgacagaaaaatctctgtatttatgatgatatcctattgaatctcattttttaacagagactctcatcatttgtctctttttttttgaaacagggtctcactctgttgcccaggcggaagtgcagtggtgcaatcacagctcactgcagccttgacctcccgaggctcagctgatcctcctgcttcagcctccagagtagatgggactacaggtatgtgtcaccatgcctg

SEQ ID NO: 64306 - DNA, 1059 bp, Homo sapiens
ttgtaggtggcccaaagaggacccaccccactgttccagggattccagggggaacccgggctggggcaggaaaaataggccgaatgattgctgaggaaatcatggaaatccacaggcaagtaacaccttctagttcctctgttaaaccagtggttctcaacccagggaaattttttcccccaggcaatattttgcaatgtcaggagacatttttggtcttcacaactgggtgggaggttgctacttaaacatcctgtggatagagaccagggatgctgcttgttaaacatcctacagtaaacaggacagttccctcctccccacccaacaaagaattatccaatccaaaatgttagtagtgcctagattaagaaatcctgccttaaataaagaagctaaaccaaaatagcccagcgctaaagagaattcttgagaagacttaactttcttatggctcaaggagcttctcagtgcggatagatgtacctttactttacaggaatgcaggagtagagctgtgaactatcagagtgatctggaccttaacaaaacattcactttttttcaatcaaagagctgcccaggattagtactagaaaccaagcagatcagctagttattactagctgtcttgggagagacttcctttccatatgaaagagaaggagcttagaagcagtccacctgggtctgagtcctgggcctgtctctctacctggctatgctgagacttacttaacctcttgctctctgttgatttaaaccataaaaagaaagcactatttcccaagaattgtgttaggattgtgagggcactcaggaaagttccaggaacacagcctgacatatagtgagtgcttaaaaattaattaaatctgtctttaagagcagtcgagagggaagcagttatcataagtctgtccaaatttggggaatagagaaggtggtaaccagattcttcagaacgaaacttaatgtaacataagaaaaggaagaaaacactgctgccgctggattctctcaggagaattagaggctggcctgttttccaattggcca

SEQ ID NO: 64307 - DNA, 1016 bp, Homo sapiens
tggaggagtggtctctgggtcacccaaaagctacattcatccatgtaggagctgagagtcctgtggttacacaactgccatcacactctccctaaactgtagctgcaatgccaagtgatggattctttcctgaggtccttcagcctgacaagtatttaggtggatttacagttctaagtcttcccttctataaatcttctgagagatatgctagataagaaaggcctggacccatttttcatcaaccactgccttcgaaggctgcttttcctgtcactactactaggctaccttttagaccctggtgccgtccatgtcctaagagtattcactagctaaacagtgtttgtggagaaggggacaaattgttttctgtggatcaaagatggaggttgatcttagaagttctcctccaattcacctggattctgtgaggaaataaaactggccacttacttgaaattcaccaactgaatgcaaactccaatccaagggctttgtcagtgagatgcttgactctagggactgcattctagatcaggtgcctgtagaacaaatccagcttgtcatctgtttttgtaaataaagttttattggaacacagccacaccgattcgtatctgtggctgctttcaagctgcagaggcagagttgagcatttgtgacaagacaccatatggcctagagagcctactatctggccccttacagaaaaagcttgccaaaccctaatctagatcttcatcccctttctcacctttaccccttaacaaagcacatacactccactgaaaaaagaaaaggcagtgtaattctcttttctgacaggataagagggtcatcgccttctagctgtggctccagcccattgaacatcacgagtacgcctccccctgatgcctcttctccaggaggcaagaaggtaagactgatgattcttagcctaagctagagaacctcttgcccaagatctgaaatgttgggggtgggagtatggaattgcaactgcgattgct

SEQ ID NO: 64308 - DNA, 1068 bp, Homo sapiens
tctggagactgaggtgggagaattgcttgaacctgggaagcagaggttgcagtaaaccaaggtcacacatggcactccagcctgggtgacaaagtgagactccatgtcaaaaaaaaaaaaggatacatagctagagaccaagatctgctccaacatactcctactttaataatgtttttttgatggttgatatattgagtaattgaaagaatgatagaagattttatgaattacatcagtagggttttcatgtctggctcatgaactgatgagtaggtggatggaatattgttttcacttctttgttttaaatttgtttctttaggatctatagcagaaaagctttctaaggcgaaattgggtgagaggtctgtgtgtgtctcctcagtttttaaaatctttctttctttcaggttatcctacctacaaagaaaaagtaaagaaaaggcctggaggccgcccagaagtgatctacaactatgtccaaagaccctttattcgaatgtcctgggagaaggaagaaggaaagagtcggcatgtagactttcagtgtgtaaagagtaaatctatcaccaatcttgcagcagctgcagcagacattccccaggaccagctggtagtcatgcatccaactccacaagtggatgagctggatattctccctatccatcccccttctggcaacagtgacctcgatcctgatgcacagaatccaatgctgtgatgctgatcttccttgaaaccatagcatgctactcttcacagtgacgttgtactctcctcattctgcactgcaaggccactcttcttcattgtgagatgcacataacaatgtttaggatattgcagtgtaggcttttttaaagaccaaaggtagctgaatggtttttttttaaatgagtacaactctagcattttgaagttccagttgtaaatgtatttgtttaccagtaggtttgtgaaattggttctttgtatgggggatggtcctttttcacacagctaggtcttttcagaagtggtggaaattggcagctggggtactttcagtttggactgatattcatc

SEQ ID NO: 64309 - DNA, 1062 bp, Homo sapiens
taggtaaaatgaaaaagtagttaggtgaacggaggtctcatctaagtttaaacttccacatttcagagatgtcagagttctctactgtttctgaaaatgttaccagcccttccttaataataagttttggctaccttatgctccagatattttatgctttctttacttttctttttccaggattactataaaacaggaataatccgttgtcctgatggcatatctattcctgaactgagagaagcatgtgactatctttgtatctcttttgaatatagcactattaaatgtagagatctcagtaagtatgatgttttgtgtgtaagtggtttgtagaattagaatatattggaacaaaaagcctgaaattagtgctatttacctagttagacttaaagtatttaattcaattataaagcattctagtaccacaaagattattaatgaaagcttgcaaagaccttgatgatctccttgtgcaattttccaaatattttttcaattttaataattttcttttttgacaaacccagatttcctcctagacagttttctatattatttatttgttaccagttttatctcctagatttggatccttggctttggtcaagtgtggtcatttggctgcatttctttgattacatcatccaaaaatttataattttttgtattaccacgtgtgataatatgagcactatggaaaacacaaataattctcaaaaacaatacctatcattaaagatcctagattgaatgtctagccctcatgtatacataggattaaatgacttcatccaagaacttcaaatattgtctcaaagcagtgtgtagaaggttttaatcccaactctttgattggtattcttctctcactacttcttcagcacccctactcccattgttacttcttcagcacccctactcccattgtttctcccaaccctgagaaaagatgtgattatgcacaaaaaagtcaaaatagtgtatgagaagtatcaaatgttgacttaggtacttaagccaacacttaagtggttggagaagttcagaggaagggga

SEQ ID NO: 64310 - DNA, 1743 bp, Homo sapiens
attgttgggcatatctcattcgctttccatttttcaatgattgctctctttcattgcctgatgtgccgtgtcttgcagactgttgtttcctatattccgtttggtttcttgggttgtttcagacaagagtatgaactcagcccttgttattctatcttggctggaaatagatattagggctaatccagtcttcatgtccttacctatccttagttcatgaatttcaaactcttcaatgcagcctgaaacagagctttcccctctgaacttgctcatcctcattttcttttgtacatattaactatttttgcctttaaagtgatttcttaatctgaaagtattgaattaaatatagtaggacataatttgtcttccatgacatctgattttgaaggtctgattcagggttcagtctatatgggaattaaaagaaaatatgaaagtgtattatgacaccttttgaattcgtttaaaatctaagtggtttagagatgaagccaatgttttagcagtgtctagtctttcagctacagggatgtctggtgaaaacgcttttttaattactcagtctgcttggcccttactcaaactgaacatttagcttgtatttgtcttactcgttgttgtgcttgtaccttgtccattaaattaccagactcacatttagataatgtgctttcttatagttgaaaatgatgaaaacttagctgccagaataatttgaagagttattttttctatatatgatctttgttctatttaatgtggattcctttttttcctactttagaaaacaagccagaaattccagtattcctactctaatgattttttaaaaacataaatgcagtaggatcttttgatctgtttgaaagaaaagattatgttctattgatgcagctgtcctctaattttttttcactagaatgaaggtgggagtagaatttttctctgtaggttgatgagaaacaaataactgataaaggctgttaggttgcctttatttccttagaagtaactttcaggataaatacaaagtcaactttatcttctgtcctggtattctgttatagcaaggtgatgactgatttttataatgaaagaaaccaccaaaataacaaaaaatattaaagctaataaaatcaaccaaagagatgacccggagacactgaaagattttgttttctgaatcacgaagattagattttaactcgtgtggttttgctaaaggagagcagtataatattatgaaaggggcactggaatgactcaaaaggcttaggttatagtgttattagcgtttctactaaatgctgtgtgaccctgagcaagtcttgcagttttgaactttaacatcctcatctgtcataaactaaataaactaacatttcatgagtaattatgtcgtgccaggtacgttgctggtcagcttacttattatagttcatttaattcacctattcaccttagaaaataaatagaatctacattttacaaatgagaaacctaagtttccagaatattaaggatcattcaaaatgccaagcaataagcattagaggacaattttactctaaagccatgaacttccttctgtttctaaaaagaactttaatatttttgaaccatattatatgctaacagtaaatttccaaattgccttaggtctggctttattatttttattatcatcagttttcttatttgcagtgtactctaattattgaaattttatctatttgt

SEQ ID NO: 64311 - DNA, 1467 bp, Homo sapiens
gttcataccagatttgcattctaaagtttgatgtgaatagatatttgcttctacacttgatcttagccaaaaggccaagaagcaatagatatttgcttctgagagtgaccattttaataagatttaaaagtttttagaaactttactgcctgttgattcaccttatgcttcaaagcatgattttgaaacaaagtgaaaagttggtattaaagaaaacagaagcattattaagtcataaagctgcaaaatttaaaaatggaaatattttcttttgtgtttaaggtggatttgtttatgtaactagaggtgcttggaagtgattgatattccttagttgaagaaaattgtgatctcagaggatcatgattaagggttctaatttgggcttttgtggtaagtttactgggtagtatatgttggtttgtgaagttttcaagtggtgatcagttggtgatggtagatgtttttaatctgattgtagaagtgcttttggtttcttgagaccatggaccatattacaacaagaggatgcaaaaatctatgtagattggtaagagaaggaatttagtgcactctgctaagaaaagtgtgaaaagaaaggactattagaagaagaaaggcatgacttttattacttaagtgtaattaaaatggctaagtagttgttttctattttggtattctcaggcagctgtgttttggccaagaggtcaattctggtgtacaatttgctatatatatatatctgtgtgtgtgtgtgtgtgtgtgtgtgtgtatgtatctccataaaaccttaccataattaggataatgagcatatacatcacactcaaaagcttctttggtgccctttgtaacccttccctttgaactcctatacccctttcttgtgaaaccaccaatatgttttctgtcgctctatacagtactctatgtttcctagaattttatataatttattttttgtggtggagagagatctggcttcttttattcagtgtaattattttgagattgattcatgtcgtaacttgtgtcagtaaatcattcttttttatgttgagtagtattccattgtatggatatatcgcaaattgtttatcctctcacttgttcataaacatttaggttttttccagttttgagctgttacaaataaagctgctaagaatgtttgtttacaaattttttttatggataatgtcttcatttcttttgggtaaatacataatggaatggctgaatcatatggctagagtatgtttaatttcttaagaaacaatctcttctccgaaacagtttctaaaatggttgtaccattttccattcctaccacaagtgtatgagagttccatttcatacatgtactcatcaatgcttgatatagtcagtctttttatttagccactctaatgtgtaatgatgtaacagtgtcattttaatttgcatttctttaatgacaagtga

SEQ ID NO: 64312 - DNA, 2996 bp, Homo sapiens
cagtttcccttttaagtcacttcatagccctagcagcagtttagaaatgcaaaagtttggttgctttaaagaatagttcttgagtggattcttaattaagtacaataatattttctctttgattttaaagagctttactgcccagaatggatacacaataaaattttgaaaggaaaaagaaagttagctgtatcccagttttctaaaccctggcaagctggcagagctagaattagctttacagatggcatttggcaacatatctacatatctctaagccctcaactcctgcgttttgttatgcctgtctatcaattacaatatccaatcactgctcagagatggagaaatgggacgatcacagctcacacgatgctgttttgttagaaacgtcagtgctgcacaacccacggctgagtcagtgtctgtgagaaaataaactgaattaatatgtagagggggttgtatctctgaatatttaaagcctaaatattgcaacagcattattacacagtagagggaggaagctaaaggaagtctatggacaggtgaggtagggggagactggggaattttctgattgttcagaggaatcttgaagatgatggaaatatcagatgtgctaaagtttcctagtaatgcccaaggatgctgacctggctttcagtgcttcattgtttgaaagagcagagtccctttatactctgatttcaaaatttttttcttgtttttgtgtgtctaccttggcatatactaaaggaaggtgtgtattcatttattacatgatatctctgggttataattatttacatatatgaatttgaaagaaagattgagagggatatgtgtgacctttgtttcattatgatcatttacatgactaaagataaagatcatatgtctgattttcagtttaatggcaagttacttaaaataaatgaaatatgtttttattgttttcgtgggtttgatgctttgtgttttatttcaagtaacttgagaatgcattgtgtttggtactgttttttatgaatatcattaaaaatttatttaaggagagagtaattttgcaataatatttttgatttatttgaaaataaaattcaagataaatgaaataattgaaattttctaaagaaggaattgaatatatttttacatttgaatgaactaaggattaactgaaccatttatatatagtactttacagaactgaatgtacttaaatgataaagctctaattggttaaagtgactttctttcaagtcaaagaacccagaaactgaatagatgatctaactactgccactgaggttttggattagtgagtataaattttcaaccagacaaaatttctaaataaggataatggtttttcctgtgagattttaaatcttaacaggtgatattgctcactttattaggaaattttacaacaatttaaaacattttgactaatggtttttttccttctctctttattacccttatcctgctgatccttaatttttttggacatttgggatatacagcattttacatttactttgtttttaatgtatttatatggtttataacattctttccttgaagtgtcaggaagttcttttaatttcccccatttaatttctaaaagtttgaatggtcatcttatggttgtcatgacttatttatatagttctgttcgtggtatcttgtattgactttttttgtggtttagggtccagaaatgtttttgtcagcttattaaatagagttataaaagcagaatctcaagctagaccttttaatcttatactttataggatactttccccaggttgtgctgattcttttaagataataatgtctgtcttattgtgaaaatggtacatactcattaggtaaatttggtaagcccagaaaaacatatagaagaaaatgaaaataagtttttctattataaaaagaaaaataaatattttggcatataacctgttttttctgtgtatatataaaaatctaaaataacacatatgcacttaaaaaggcattactgtagtgctgttatgtaacctatccttgaaaaaaaagaaatttaattatgaacatcctttagtcatgaagtgatcttctattgcataattttaaaggattacatagtgttttgtacatacatattttgtaatttatttcaccaatccgcatttttctgataactgatcagagaaaagatcagcatgatttcacagcataaatatctccaaaaagaaagaatgtcttaaggagttaagtaaaaatgtaatattgattatttttctgacagagaaagatcttcagtgtgattacacagtgaaccctttaaagacatacacattacttttaaagcaaagcaaatagctaagataaccatcataaagtataaaaaataaacaaaaaatcaggaaaactagagctcagatgaactgagacttcagaaaaatgtcaagaccaccaaaaaaggtttcttatattacatttaatgtaagaataataatcaaggaaagtataataataatgcatgacaatgagagggaaaaatctagctcttgaagcttctttgtcaaagtggaagaggaaaccactaccacctctaacagaaatagaaataagacaaacattgataggaaggacatgaaggccaatatgagtatagaggtaaagaattcatctgattaaatgagttgtcttctgggccatttaaaacatcttataaaaggaactgcatgcaacaccttaaaattattgttattatttgtgatctttgaaggttttctgagaataaaagaactgctaaaagatgggagattctgggcttgattttgaagcaggtaggagattttggaattaaaaatggaaaggactcatttatgactgacttgaagaaaaacagtttaaaaatgattagggataggtttgttaaaattagattgccagaccaacttagatttttctctgatgcagttagtagactagca

SEQ ID NO: 64313 - DNA, 1080 bp, Homo sapiens
attcatttcaagtttcaggccatctatctattatttttaaaactttcattttctgctgtgtaacttaatgaggaatgcctcattttgtacactttgatctgaaattttaagatgttaattgacaactcagaaacctcacatattacaggtatgtaagcatgttttcataaagcaatatcttctatgaatattacttaggggatattattgagcatttaacttacttgaatataaatttcttcttaccactgataacaaataccagctttcttgaaaaaaaaaagccataatattgtgataatgaaatcgtttttgtgattttaaagaaatagttcaggtactttatatactatagctagaaaatttgagtgattggtactttttaagtctcctgataatatgttcacttttattgtggacttttaatgttatgaggtctaaaatgttaatattaagttgactttttaataatttataagtccatgccaaattgtatgagtgtttttttggttttttatgtttgttcattctgtgtgtgtgtgtgtcagcatccaaactggggcttttgttctttttctctatttcatggatattattttgtcatttagattaaagatatgttggttttgccaggtgtggtggttcatgtctgtaatcccaacactttgggaggccgaggcaggcagatcacttgaggtcaggagtttgagaccagcctggccaacgtgacaaaaccctgtctgtactaaaaatacaaaaattagccgggaatggtggcatgcacctgtaattccagctgcttgggaggttgaggcacgagaattccttgaacctggtaggtggaggttacagtaggccactgcattccagcctgggtgacagagtgagacgctgtctcaaaaaaaaaaaagtattggttttatcacattaaatgtggggctgtatttatatctactatgttatatatatgtgtatttttttcaagtgaattatatagtattcatcctagttcttgctgtttttctgctgaaaaacagattgctaaggtataatactgcactatataatgaagaggtgaca

SEQ ID NO: 64314 - DNA, 1019 bp, Homo sapiens
attgacatatttttatgttcaaaataattcatggtttttatagtcatctaatacctgattgatttatgatacagtcattcttaaggaaataacaaataggaaataggcttccttttccaggagcattcagcaaataaactatgtggcatttgctcaggaatttgcatcagtcatagattcaaaggaagaatttgaatcagcagttcttcctttcccccacttttatttttatttcactcatggatctacctacttatttatgtatttattatattaaatgctcatttattataaaattttcagctgtttttagaaagaaggtactatgagaaaaaaattatagtaaaattgtttctctaaaatgaaaatgtattttctactgatttttgatatgaacacaattttaatgagtttatctttggcattctttgtgaacttgtactgcaatactgtgtaaaactcaggaaagtatagtattttcccagttttggaatttccctttgacttttatgtacaactctacctcacctcccaccatcaaatccagcttggaaaagtatatagaaggtatacaggagtgggtgtcaggaaacctgagttccagtccaaattgtatagctttgtttaaattgtttaacttcatttggtttctcttttggtgtctgcaatttctgaaagtcaaatcatctatttccaaacaaatactttagtctcagcatttttcgagatcaagattttattctatatagtgaattatccttgttctttataataccatttagcagcattgtgatctttggcaaagttactaaaattctgaggctttctattctgtatatggggatcataatgcctaccttgcaaggtgattgtgaacattaaattggatagtgaatgtggtttaaaagtgtttagctcagatattctgtaaagctgttgttaagtgagtttccttatcatttcatttgactatagtagaaatagcagttacaagcctcacatgtgaaaaggcataaagt

SEQ ID NO: 64315 - DNA, 1103 bp, Homo sapiens
aatgtagttaatttcaggagttggtcagttatcaagagagctggttattataaaagtgagcccagcccttagtgttttctctcacccaagttctcttgcctttctaccttctatcatagatgacacagcatgaaggcccttgcctcatgctactgacatgcttttggactttccagcctccagaaccatgagctaaataaattcctgttcattataaactacgcagtgtcagatattctgttacagcaacagaaaatggactaagagtaagattttagtaggctggatgaagccacaagatggctgaggtttaaaaggcacattgttggtaataagcaaaaatatcaattctttttttttttccctttaaactcttttggacttgaaaaaagtaccaatttttatataccttgcttggtgcattggaaataacatgggctttttgttagactggggttttaatcttatctcttaagatttcctcatatatgaaacaggataataatatagagttgttttaaggtttaagtaggagaaaatatataaacttcctagaacttcgatagtgaaaatagaataagtggtctccatacactgtgcattgtctttgttttgttttgttttgttcttccatttatcattaccattaattgatactacctggaaatagtgtcccgaggagcaattatttattttgttactatagtcttgaagattctgcctatcccccaacccccacctcctgtttagacagaatgtccaagagaaggggaaataattgcatcatctttttctcagttaacttttggcagtctcctgaatgcctgcccctagccaacaggcccagtggttccagcctctgtacagatgatttctagattattttgaatttaaatttatttctatcatgcctaaacatagtaatgaatagtgacatattttccaggaattttattttcggttgtctggtaattattttttgatgattacaagatccaaacaacaataaactttagtttttctggacattggggattcaagtgccagattctgaaggacctttttatagtaaggagtttagatataggaaacgaggagccatt

SEQ ID NO: 64316 - DNA, 1026 bp, Homo sapiens
ttgtgagcaagtgttttgtctcagggcaaattttagattccttaaacttttcggacagtgcagacgtagaacatttccattatcacactgttgtgataatggaaagtcgcgctgagcagtgagtgctacagtctagaacttgaatcatatttaatagagcctttactagcctgttgaattgatggctgatagacaaaaatcggaaaggaatggaaggtaaggggaataatgaataggtcaaaatggaacagcataataaaggttatatgaaaaaacataaagcatcatggaaggaaaaaatattgtttaaaatattgtctgactttgtttaaagggtgttgcttcttaggagttgaccataatctcctttgatttaggcatcagcttcaggagcattgcctgtattaattgatattatgtcaagatggtttgcttcaactaaggtgtttctggttttgaagtcaacactttttggtcatagtagaaaattaaaacattgttatttctttaggatattaaaaaaatatgccttttgagttttaagaaggtagcctataaactaaacagtgtctagttacttaacaatgctaatcatgtaatgtaggtactttgtaaatgcttaaaatatggaaagattttcaaacatttattgagctgtttgtgatgggaaagaaacaaatgaataacacttcatttattgaagtgttaatgtgttaattaagaagtcagcaaaatttgaatagaaattctataaaagtgataaaatcaattagcacaaagattttatatccaaatcacctctggaacattaagggttgactgagctgactttggaagtcttaacatcttggtgaattagagatcaccctttaagtggacaacagggctgggcgcagtggctcatgcctataatcccagcactttgggaggccaaggcaggcagatcacttgaggtcaggagttcgagaccagcctgaacaacatggtgaaaccctgtctctactaaaaagaatacaaaattagcca

SEQ ID NO: 64317 - DNA, 1932 bp, Homo sapiens
aaagctttgttttcttaaaacttgcacggaaaaggttctgatgtctttcttcttcagatgcaggtgccctgacacccttatctttgggaatggggcgggggaaggtgagacatcggttagtaatttgttagtgtgggccagtgtgactgtccctgggcctcacagatttcctgcttctcctttctcagtattctgagtccatgatgaaaagtcactagtccagacatgctgaaagatagagcttcacttgcttgtggctttgtgcacttagtaaacaagattattttacgaagatttattatcttgcagagttttcatgctttttatttaaattagcaatctaaatgaaacagcacaggatattaattgtatttggacaactgagttccttcccgcccctatcctcccaaccccccaactacacaaatttgatcaaaatcttttagagagggggttagggataaattttcaatgaaagagactgtggaaatcggaataagagatataataaagaatgcagccataacggccaaaagagtttctgtattagagagcctgtccaggattgaagttcagtcctgaaacccaggactgcagttgtcatttgaatataaagcggaaagcagtagaaaatacttgggaagggatttgaaagtggaccaagactggtaaaaaaaaaaaaaaaaaaagtgtgagaagaattatttctgatgatgtaaatgtgttttataaattttcccaatatttctcagcgtgtatgacctaacagctattatattaatacatacaaagtaggaaggaagtttctgaagcatggaatgtggtaaggaaccaccagagagtaacagtgttcaatcaggaaagcttttagtgtttcaacaatgtttttgtgttcgttcaccttttttctcactcccagaaaagctttcagatagacttctaaccctatgtaattatgttacccttccaccagtctgaattttcttctttctcactccctctaagccatgtgaattttttaaattattaactatggagttgcaaaccactgtggtctgcttttggctttttataataggtgacttagggaagtatggaagtgatatggaaaatattgtgcacctttcaaagccatagcatgagcaacaaactcacatgccttcgggtactagttagataatgaaaatgagggaaatgcactatgccttatcagagagacatccaagtctcaggtccccctaatcagtgctatataagaatatggaccccatcttcagcattctcaagagaactcggaaatctagatttttgcattcagtgtcttgcgtcttaaaaatattgacaactaattaaaaccattaaaaatatcatgtgactgaatcaaatccaaacctgtccatagttgtattctcctctccagtttagaagctctgttataaatcaaaattaataaattttatgactggaaaaaaaggaggtttaaagcaagtttggagtttcaaacttaaggggtcttgggaaaaatgtcacatctaattgaaaacagtagttaagtttaatagcctttaagtatagttatagtagggcaatttgaactggtatttactataaacgttttaactgtggaaataactgaagaaaaagcatctcagtatttatggtttaaaaactcagagttctgagcaaagctgatttataggtatcttgtacagaaattgaattatttagaagctctttattgtatttgcagctaatatataaaattaaatacaagagaccctctacagtccatttcaggatttgaatgtttattgtttgctgtgctatcccacattgtcttcctaggcattgacttactggaagaaatactgatcccttggattttattccatgccagatggagattggaggggtttggcaacaggatggaaa

SEQ ID NO: 64318 - DNA, 1034 bp, Homo sapiens
ttcctagtataaagcactcatttacattttctcctgttccttagtactgaatatgcacagtattttaagttatgtatgtttctttttattttctttctttatgtttactctaatcccattacagattaatacttttttttcaaagacagaattttaatactttgcccaggatggcctctaactcctgggctcaagagattgtccacctcagcctcctgagtagcgagaactacagctataggcattcaccaccacacccagttttgtttctttttaaatacctcacacctctctacacttgtaccatttgggtattttttcagagagtggcagaattcttaatatagatccctagtcatattatgttttaatcctatctgttacaatgctttgggctgcaaataacagaatctctgtctaacagtttaaacaataaagacactctcatatacctaatatctaaaggtagtcagttccaaggttgattcagcaatctatgtatgtcattaaggacctgggctgttcttatctttctgctctgccagacgtcagaatcagaagatagtagccacagctctaataattcagtccatcagcctccacggcagcaagaaaaaagaagagactaaaaggacttttttttttagctcttttttttgtttgtttgtttttttcagaaaggaacatcttcctcagaattcttttccttcctcccccagcccctgaacagattttctcttttatcttgccagaactggatcatatgcccttccctatataagtgccttatgaaagggcaggggggaaccagtgaggttccccactattttttttttgcccttctgcaaaaacacagcaacgaggcaccttctaagagggcatctcttagaggcagagagccctcagcagacaccaaatctactgacagattgatctggaacttctcagcctccagaaatgtgagaaataagtttctattatttataaattacccattcttagatattttgttatagcagatcaaatggactaaa

SEQ ID NO: 64319 - DNA, 1220 bp, Homo sapiens
tctttgccccgccgccgcccttcacagggccgggaccgcgtgggggacgtacggtggggcctggtttgcagccgcggagcccggggagccgcctggggtgggaggccgctagaggtggcgaaggtggggcggggtggttagccgagcagcgggctccgcgtgctcgcgggagggtagcggcaaagggaggcctagtgattgcaggattccgggtctggggaggaagaaagtggtgggaaataggtgatgctcagaaaagggtgctgagggagaaggcgcggggccggggagtgtggttggcctattagaagtaaggattgatagggcctgggtggagatcagctgggagtgaaggggggacgggcttgggttttgaaggtgaaggtctctggagaactggggacacgtggatctggagtaagaggcacctactgaaaccggaaggtggctgagaaggttttatgtgaggtgtggacgggaggctattggactagaaggcattagttggtctgttaggacaaagtatacaagcagcaaacgcggtagatttatgtgtggtaggtgaaggctgtgaatcttttatgagtagttgagcaagaacagttgtctgattctgcggtgtcggagagtggagggtctcaggtagtgtcttggtcaggtttgaaggttaatttactgctagtggagggccaaatactcaaaagagtttttaattctcactactggggctgatcctcctcctacactccacccctcctgccatccctgtgacagttcatctcgttttgcctcagcagcacaagaactcactccctccgaagtaatggcatacatattgtttgcttttgactagatggcagtcaggaatcccttaattctttatgttaaaaaaaaaagtgttggtttaaagacaacatcagaagatactctcagaaaatctgccctccaggggagtttctcagctgtcatgttgggcatgtgtaatatagcataaaaatgatgcaagatctcttacagtaatacaagtgagaattaacgtataagtacaatcctgatgtatttttttcaaattaatttaaaaagtaaacagagacagggtttgctgtcgcccaggctggagtgcagtggcgagatcatagctcgttccagcctcaaactcctcggcccaagagatctttccaccgtggcctctcaaaggcttgggattacaggggtgagcc

SEQ ID NO: 64320 - DNA, 1053 bp, Homo sapiens
tgtatgtactgaaaggtggtatttgcttaacctgaaggatcaagttactaacccaccctgaatggtggagatacagtctttgttttcctgaacacttgttttcttagagtttaatacatgaatttaaggtttaaaaaaacccaacaaaccactgatagaattgtgtcattttaactgcttcttttggctttatatccttcttcctacacattggttctatagttcctctcattaatgggtttgcaacaggcttagagtttcagttcagtaagacaaaatggaagtgctggatttagatatagctgatcaacttaaacacttataaattcaccattgttttcggttcccaatttgaagagtggagacagaagtcaagaaaataagcttttcttattcaaagaatgattcccaaaccaataggatttgccctaggatcagtacagacttattacagtctcctaaacagagaggaaagagttgcgtaaattcatctagcttttagtttaatttcacttagcccatagggattctgagaggaaacgatattaatgtgattcctatttcatctaggcactgtagcataatccttcaacaaattaccacatttgattctcatataattctctaaaatgtgaataccatattacagatgaggagagtgagactcagagaagttagtaactttccaaggttggagagctaagtgacagagctgggattcaaacctttctttgtctaactccaaaactccatgcttgtgaaactaatagcacggaggactgatttataccttcaactgaaaaaaaatgccacaagccttaggtatttgttaccttagaagatgagactcttgctctgagtgtttgtgctctgtgacactgcctctaaataaatgacagtgattttttagtgtctaataggataccttatattttcttgctttagagatgtatgttttcatattttagaattttttgaagatgtatattgtctatatttacttcaaaatgtttgtgaaatggttactatgtcttaaatgtatctcaaaattga

SEQ ID NO: 64321 - DNA, 1032 bp, Homo sapiens
ttatgaatttgtgttgggctgcattcaaagccatcctgggccatgggttggacaagcttgcattaaggccggcagcagaggctgaggacttaaaatgtattctgagcgctataaatgcttttttcttttgtttgtttttgtttgctctctcctgatccactgcctcctccaccttcgtttgtggatgtttggagcaaccatcaggctcaattccagttctcttttgtccctagtacccatgctggatgctcttctcaatcagatctagatactaagcctgggagccaaagtttatgcagaaagtaagactgtcatgagtagctctgctgttctgtgagcaatcttttaattatcttgatttccttatgatttagtccagcttttggatcctgaccttgatgttttctcccaggttccatttaggagattggtaaaaagagctcttgcctcattatagtcctttcctgtccttgttttgcttgggttgctgtttcttctggtatggctattctaccaattcagtcttatctgtttcttctagaaattcttctgtttcttttctttcttcctttttgtttgacttggtttaatggagctattttttccaggttgttatgaacatatattttttaattatgaaaaatttggacataaatcacatgtatctactccccagcttaaataaaacataaatacaattcaagctccttattctctctctggttgtattgcactccctctcatgcatctattaatatttttccatctgtatgcattgctaaacaatacagagcattgttttgaatgtgttagagctttttgtagtgacataatacatgaattcttctgcaccttgtttttattttttctttcattatggttgttttcttaatatgtcttttctgctgttttagaggaatttgggtagagaagataagtcagctcatgtatttcttactctaactttttaaaaggggagatttaagcaccttttggatatactgtcactaagagacacgtagtagaaagggc

SEQ ID NO: 64322 - DNA, 1067 bp, Homo sapiens
ctctgtcaaatctgggataaaaagttaaacttgactcacaattgaatatgcctttaaactgtaatcattttgtgatctgattgtctagcaaaatttattcctttgggtacacttaaagaatgtttaatgttcagcttaaatcctatatatgtaatacttctgaagtttgttcagtttctggtttgcgtttgcttaccaactttttccttgaacatattgactttgttttcctttttaaaaatttgttctaagattttaggtagaatgtaaatcgtgtttttttctaatctactaaaagggaataaaataaaaatgaagtgaagtgaaaaattaagatctagattttagaaatctgaatgatcattttaaacattgtcctaatgtctatattgctgaagtctattctgaggggtgatacaatctaatcagccaaggcatggacagttcaaattcaactttgtgaactaccagctttgtgtacttagcaaactccttaactgctctgagtctcagattccttatctgcaaaatgaggataatagcgtgggcctcatagggtgttttctatacagaataatggcaattaagaatagcaactttaggaattgtatagtttaagtttctaaaaaaatagtcatccttggtgggaaaaaaatggtgataatgagttttagaaagtggaaaaatactgctgtaaaataaatatttttccctcttgatagctttttgacagattgagagatgaaaatccagattttagagagaaaattatagcaatcaacagcgaactcacccaacctaaactggctctcagtgaagaagataaagaggtgatcatagattctaccaatattatattccactgtgcagctacagtaaggtttaatgaaaatttaaggtaagtacaagtaattatataatatttgaacttcagtatagttattaaaaaatctcattttaattctactttttagtcaatttgttttgaatgtgatttgatactatttgcctatgttaactgtggctttcagtgtcctacagagtgttaaaagaattctcttcttctt

SEQ ID NO: 64323 - DNA, 1189 bp, Homo sapiens
gttaaaagtatctgatgatgaggtccaggagtctgcatttttaataaactgctagttatatgttatgccaagtatgagaaccctggtttaaggtctttagaagtattatcaacatagatttctttgaaaaacctaagatgcctgtagaagaaagacgaacaagaaaatgtattggcacttcaggtcgttgagcttttttttctttttaaatttttctttgaagtgatttccatgtcttcatttagtgaaggattctaattacaaagactttctcattttgtacccccctcccaaaagcctgtcttaccgaagatacatttatgactccatataaccaaaacaatgagaacattatttttgtttagtactaaatgacttctgatataacatgtcagagtctcagtctgaaggtcaatggagtagaaattggattgaggtaaaacacagttaggttaactagcctggcagagagatactagatgttactcacttgggtgcagaatggcttcaggtttgggctctcaggtacagatgcaaagggaaaaaggcaaggcatagaagtgttcctctcaaattatcccttattttcggtgacctagaaactctgtcaccatcctcagggacatgtaacagaatatcctttgtgtacttttcccaaaacatggctcttcctgcccccattgttttgcaaatgcaaaagaaaatagtgcattcccttatagtctagtggacagtatcctctatgtgaaatgtctttcttgttggattttcacttgaacagattttctccctcaattaaggaagaaaaaaaaatgcatccatgattttaagaactcaacccaattatttcattaaaaaaattatttctagtgtgttttcatagggtcttggatactattaaattaaaagagaaactatggcacaggactttttttctctcctggagttactccttgttcctggtgacccaaaacttgtcctgtcctcaggaacctgtaacagaatattctctgtattcctctcccaaacagtaccctccctatccccattgttttgcaaatgtgatagacatcaaagcactgcttcactttacagtgaagtagactggattctatctatgacatctcctggtcttttaaaacaatagttggatttttttcttaaatactgaaaatataagaattttaga

SEQ ID NO: 64324 - DNA, 1035 bp, Homo sapiens
ttttactttttctcttactaacaatatatacaaacatttgagaaactgaaaaagaacttgtaagctaatgctgtatctcctttccttgctgcaaagaaatctagctaacataattttaagataactcatgggtttgttctgtaaactcgttctagtaataaggcttactagctaaagtttctcctgagtttaggcaggtttttttttcctcatgtatcaactatccctttcatttttcaaatctcatctccatggtggaatttttcctaagttgggtagcaatttcccttcaatttaattgatgttcttttcctttcatatacaaaaagtacttccatatacagaagaaaattttatcttgataatctctgttttatgctttcttatcaattagtatgggtatcattagagtatgacaatatactgagtctacttgcatacacagcattattgacaagaagtaaaaacaagtacataatgtattagaatcagaagtttaggaaaaaccatggacaccacctagtatatcgccctccttttacagatgaacagagtagaccatttcttcaaagagaactggaggaatttttttgacttcatagtaggttgctaattgaatttttatagcatgcttcaatttatttttattgttcatcatagcatttgttaatctcattagagcatatgatttgcagtgctgcaccttaaatactaggccttttatgccttttgtgttcattataaatgtatgttaattataactgtatataattaacatgttacttcattaggtggttatatacagatctgtatttcctaacctgcaaacttccagaaggtttcagatatattttggaatttatttggactttagagagggtatataatttatgtactgtgtaataagaaaaaactttaacttgatctgggttagtatccctgatcaaatacatgtaaaatatatgaatgtttaagttgtatcaaaaaaaagaccataagtcagtgtagatcagattttgctatccactgtatgat

SEQ ID NO: 64325 - DNA, 1333 bp, Homo sapiens
aagtcagaggagatttggtttgtttcttagtagcaaaaagaggcagaccttccaggaggtagaccccttcctctgtagatcacaaagtaaaaaaggtacagggtgttagggtatttgtgaattcctggaatgagagaaagcagaaatataaaccagttgggtcaattgatttaggcaaaacctaggtctgtgtaatggtagtaagtgatagcatctgttgttgctttgacaattattctatttttctctgttttattcataattttgaggaggatttaccattttccctaatctcaggctattgaattagtaaatagcataaaatcaaacttgaacaagcttaattttgtaaaaatattcaacaatataaaccctcttttataaatttctctttgcagagagttaatggaagagtagtaggtagccctttgaaaatgattttactcaattatttttgatcccagaggaagactgcttctgtttgggactggtagaaatagtctggcctgaatctagtctgttttttagtttttagaagacagctaccaagtatatatttggggttgtagagttcaaataataaatctctagcttcataatgtttctaagcttctctcccttttaaaatttttggtattagggatggattgataactttaatggaccaagtggtctctttattgcggtaagtaaaccttttgatttatttaatattctatacatttttctgctttttgtatatctttaaatatatatacactatggcttatatatcttaaggtgttgtttttaatttcaacaaaggcagggaaaggaattcttcgaacaatacgtgcctccaacaatgcccttgcagatcttgttcctgtagatgtagttgtcaacatgagtcttgcggcagcctggtattccggagttaataggtatatgaggtgacaatgtcgcttattaaatatatagtaactgaaaagggaagacatagcttttgagtaatgttaattaatccctctatccagatattgccataccaatatttaggctgtatcactgccaactccaagagttggtattatcacagacaatagcaagtgctcccatcagtagtaatgaagaattaatgttaatgctcatgtattacttacaggatagacaagttcacttaaaaatgaaaaaaaaaaaaataccctcccctaagcatgattttttaatccaaactaaaacttgttgaatatataaagagctgaaattcacagaatatggtttacatatattaaacatggtacaccagagcagctttaatcagcccatgaacatctttcctttaaaaaataat

SEQ ID NO: 64326 - DNA, 2025 bp, Homo sapiens
tatatcaagtggtacccagagtaataaatgaaggagttaggaagtaggatacagtttgccagaatattttctattaacctgtattaatctatttaaattcacagattcacagcagatatacatgttcctagttctataggaatagcataacttaaataggaatagttaaaacccattgaaattgagtcaattttaaattgttggttgatgagttcaaatttaaagtaaaatttttttggcattgatttagtgataggtcttatttaacctctaattgattaattacccctgcagaacaattttgatttcaatgtagattttttatgacatttgtcctaggatttttctgtggcatttttatttcagtgtaaaattgaccattagagcatataagaaaaagataaaatctaaggtgattttaactttatgataattattttcagtattcttttaagaatatttaaacatttttaatgagttaggtttttttgtaatcttttattgtgttataaagtttagtaaaagctgaaattgagcgttatattttagtgactatctcaatatacatttctagtaaagtattaatatagatgatactaggtttgattatgttgacattacatagcctatataaattacaacagaagttaattttgggttgttttaagcctgttaatgtatgttaatttgagcatcttaagcaaaggatgattattttccttttcttttttaagtaagtacagtaataagagtctggaaagaggaacagaaaggaagaagctatcgtgagaggtgaaatatagaaagtgacactgtaaactgacataggtaaaacattaaaaggattttaagagtgaattttagcaaaaattcattcatctaaaattcataaatagcggcagttacaaaaccacttgagtttagcagtctaataaccatattctcttagctactagagagtagaaaagtttgttttttaaatgtacgaactctgacatctttggtaaaatattttgcattataaaaacatgatttttttttttcaaaacttcattacatggttattatcaaagctgttacacaacttttcttcttcagagtaccatgtaatttccactttcaagaggaatcctctcgaacaggccttcagacggcccaatgtaaatctaacctccaatcatcttttatatcattactggattgctgtaagccataaggccccagcattcctgtatgatatctacctcaggatgactggaagaagcccaaggtaatggtgactagctctgtcttatctgttcctctgttaaacaacccatgcttacactaaaatgcatattaactctgtatttgtttatgcttatgataaggcttaatagccttttgtgaatgagaagcctcttgaatttaagactttgtcagaaaagcaaaggtagtgttgtaagtcactctaatttgtttaaagtttggataagttattgtcatgtattgaattctaagtcttactttaggcttctttctgaataacaatatttaaattgctttgacgcttatttttcctacaggatattatgtaagtcattccttcaagatgaatcctttaaaccaagtattcaggtgccccagttttaagtttaattccaacagcctatcgcatcattatcggaagggtgtcagccatagagtatctgcattattgctcgattgcactcatgttgacaggtcagaaaccgcggtaagaagaatagcagtaaatacactatgtattggtaaggtggtggcagcttgctggagagatgaaaaaaatcactagcatgagctttacctttagatttactcacctgattaatcacaatcagaatgctaggacatttcttagaatttggagatctttggggacactaactatggatcacatcgtattgggtcgttcatcctccaaaattccataatataggaaatgtcctacatcatggttgtcattgttattataagctgaaattaagcccttctctccctcttaaa

SEQ ID NO: 64327 - DNA, 3495 bp, Homo sapiens
cagggttttgtcatctaaatctggtcaattggcggatgacgctctttaggagtgattttgtcagcatagctcctcaagtatagttcctcaataattgatatgtgaactaaagcaacgagttactgactgcccatacgcccatcataaatgatggtaagcataggataatggctttagacagttttattcaaaaagagagaaattgggaggcacccagcaaacactggtctataacatttctgaattccagtcagatatgtgttgatgatttcttgataaggagctcagtcttattctctgggagttctctgaggttcttgcctctgccctctgagtcatccttccttttgcataaaaactggcctgtgggctctgtgtgcagccaagtagccttcttatcctgcttcgtgcccatgaaaggttaggggatcagggcaggaactggaaagcttttcttgtaaattaaggccatatagtaaatattttaggtttagcaggacatgcggtttttgttgaagctactcatctttgctgttaaaaatgaaagcagccatagacaataggcaaatgaatgaatatgactgtgtcccagtaaaactttatttacaaaaacaggtggtgggctggatttggtatataggctctggtttgctgacccttgatatagcagtctcttcattttttttttcttgtctatccctttacatgtaatctgacatgattgcttaaaaattgtgtgagtttccggtgtatctgttttcaaggaatccagcctattagacgaaagccatacccataagtttctttgacacaaacccttctctatcttgggtcccctgtgaggttcctatgggacagcacttttagatcttaaatccttgcctcttagatcctgccttttgaacaataagagtttctgttacacatttctttaagatctggagagtgccttttgtctgtctgaaagttctggaaggcactgcctaggtctttctaaagtcttagcaaaggattcatcttcccctaccctgctatgctcagaaactgtttcttaaagaattcctggctgacattttacatttcctccaaattccactcaaatagttcatttttttaagatcatctttgtcctcttttgccctctttcagcaaatttctgctagatcattgagtttattagtacactttctatattccatataaccagaggtgacagtttgttgtcctcacttcaagccctcaccaacagctttcttaaaaccctttaaggcttccattaataatgttttcctggtcctttcacatttcactactgatcacctcacaggccttagagattttgtttaccacttgaccctgaagccaataccacatgttttaggtttttattatagcagcccctcccagtgttgagatctgtgttgagatttgttaatctgttttacataacaagtcacctcaaacttagtgtcttaaagcaatcattttatttgtgtgtcacaatatctgtgggtcaggaattctagaagggttagcttgatggtaatggctcaggatctttcaaatgattgtagtcagacagggactggaggaactttgctgtggagggagtggtaaaggggggaaggggacagagtagctggggtggctgggcatctctctctctccagtagtgtcataccctctccatgtggcctctccatatggactagtttgagcttcctcgcagtatggcagcctcagggggagttggacagcatacacagtgactgaaggcttcaagggtgagtattcagtgagcaagacagaaagctctacacctttctgacctagcctcggaagtcacatcatgtcacttccacctcattctgttggttctaagttattttcaactctcattgagaagacagtcaaggtgacattgtattgtaggtgggcatgtaggatggagataatatcataggcacctttggaaattaatatctttcctaaataggaaacgttaaggaaacagtcttcttaactgaggtttgtgctgtgtgaggctttctaagtatcaaagcaggacagatccttgacctccgggagcttataatctgaatgcaacaaggaatataaaggtttttttacttagacaattttgtaaatgttaaatacaaagtcttataatttataatatttcatttgttcagaaatttattgagcacagtaatagactttacaccttatattggggccttactatgatgcctaattctacattaaactgatgtcagtcatgtcattcatttcatccagtttacttgtttacataataattctgaatgtgagctagataagcatctgacctgacattttttaaaaaatggctccatgatcttatgttttggttaactagcataactttatctagcttaacttctctaaaccaggtatctatttttaatctgtgtacttctcagctggagacatttgacaacatttgcaggtatttttagttatcacaacagggggagggctgctaccagcacctagaggccagggatggtgacaagcatcttatagcatgcaagatagccctccacacgaaagaatgatcagacccacaatatttatagtgccaaggttgagaaaccctggactagataatcattaagatcttgccttactctaaaggattgtgattatttttttaagttgccataataaagaataaatacatattcagaacatacctggcaatgtagtcataaacatctgttctaaggtatgtttaaccaaggagtgatggtgcaaagttttacatttcttattccccaatagttttcaatccagtatttttgttgcatgataaatattctataaatttcacacacaaatatatggcctttcaaatttcttccccctccccgattttttattgcaattattttttgaatggctgaattactgattgatgttagggtgattgtgtcacttgaatgaatctgaagataagattaggtgagagaattatcagtgaacaagagttaagaaaaactttttaataaggtatatataggaaaaccgtgttagctgtgtgtgtgtgtgagatttaagtatgctaaactggcgtgatagtatatattgatgtagtgacaaacttgttgtatctttttgtttagaaaaaaataatcacctaatcttttctaagagcagcatgtgtttttcccccagatgctttttatctacagaactatccctgtccagaaattgccttagatgcttgataattcgttttgtgtttgagattttattttgaagttactttattggatgaaatatagtttttttttacatagtttatattgcttcattttcttccagtattctggattcagagtttatttctaaatgtattgaattgtgttatcagaagtgcttagctaatgatacttttttgatttttttctccttatttctaatgtaatttccctccatgcccctcccatttct

SEQ ID NO: 64328 - DNA, 1778 bp, Homo sapiens
tatctatttcagatagttttcagcatgagtcattgatttcacagcacatccagatgatcaagagtggtgccaatcattgttaaagaaaagttgttttgtttttttaaatgaatagagttgactatgtggcaaacgaatatttctgtattgtttgcttcagcagtgctgaagagttggaattataaatataacacagtatgttattaattcacaggaaatcttagcaaatgcagctgtgaattaaaatgtagtttaaggaatagaaagcaaggaaatattaattgaatccattcatttgcttagtattttatgtagaaaatttaagagtattgtataccctttgagaattaattctgtatatcagcagaactctgtttaggtggtattaaatgcatttgctgctgctttcaaaaaaaatttgttttccttttggatttataaattgttcatccaagatgcagaaatagtcttattccctgctgatttggtacacttaatgattaaatgttataattttaatactaatgtctatattatagggggaaacttgcaccctgggtggtgataggatttttcctaatctatacaaaatatgaatctgtccatttttcttacaatacaggatgatgaaaacaataactcgtcttcacaaagctatggtgtttcttgaatatttcacaagtaattcttgggtttggaatactgagaatgtcaatatgttaatgaatcaactaaaccctgaagataaaaaggcaagcaagtattttctgttttatattagaaaataagtagcatactaattacagaactattagcaacctgagaaatattttccacagctattatgcaacaagtaagccattatttatagtctctcataaagctttagtcataattgttagtggtgaaataaaattgctgtatcttaacatttctagtgtaagtattttagagtggcaaaggtattttcaaagcatgattgaaatgttgattctttttttcccttaatgttggtttcagagagaattttatctttatgtgtttttctttcaaacactttgttttctcttgagttttgagaaaaagcttctctaagaaattgttttttataaactcttttactttttgttattccacattttgccctttgttactttggaacttaaattctttgtgtatgttctttttgagcttactctagatgttttaacatgtatatctaacacagactaagttaagcaatatttatagcctccttcttaataataataatatttagaaccttaaaatgttttagttgtgattaccactcccactcacttaaaatggttgtattaatacattacttcagttctctaattttttttttctttttctttttttttgagatagagtttcgttctgtgcccaggctggagtgcaatggcacaatcttggctcactgcaacctctgcctcccgggttcaagcgattctcctgcctcagcctcccaagtagctgggattacaggcacataccaccacacccagctaatttttgtatttttagtagagacggggtttcaccatgttagccaagctgctggtctggaactcctgacctcaggtgatctgcccacctcagcctccccaagtgctgggattacaggcgtgagccatcacacccggcacagttctctatttaaaccccatgttgagatactcttttgttcatttagtttttatttagatttctccctctctctctctctctatatatatatatatatataaaatatg

SEQ ID NO: 64329 - DNA, 1532 bp, Homo sapiens
gcctcaaaaaaaaaaaaaaaaaaaagactgtagatttgggtcattacagtttctcaagagtttcttttttcatccagtgccagcttcctttctcttcccacttactttttttattttcataatgttttatttaacctaacatataatcaaaaatattgtttgaacatatcaaaaacctaaaaattatttaaaggatattactttctgttttttcatactgagccttcaaaacccagagtgcattttatactccactgcatgtctcagtttggactagccatattaaaagtgcccaagaggcacaggtgggtacagaaacagaagcctgtactgcctgcagaaccatgagccagttaaacctttttatctttacaaattacccattctcaggtagttctttgtagggttgcgagaatggactaatgcacctaatcactacctcctctgtcttcccagagggaacaactcttgaattctagcactcaatattagttttacctatttttgactttatataaatggtattatacagtattttttcattcttctgttgatagacatttgagttatttccagtttctggctattaggaataattatcctatgaacattctttatgtctatatgtacacatttgtgtagggtatatacctagaaataggatagcatagggcattcatatgttcagtttagcaggtaatggcagttttccaaagtggttgtatcagtttacattccagagggcagtgtatgagagttcctgttaatccacatcctccataacacttggccttttaattttgattttcaattttagccacttaggtgatatatagtggtataacaaaatgattttagtatacattacctagtacataaaatgtttatttaaaaatagtaaaaaaaaaaaaaaaagtaatcctattggaaaatagattagagagatgaacagtttacagaaaatgattcccaagtatttgaaaagatactcagctttactcagtggaaatgcagactaaagttagactgggatattatttactatttatcaaatttacaaaaatgcagacttggacaatgtactctagtgagttcctggacaaatcagcatccttacacattgctggtagaactatatggtgtatgtttctccattcttttattttcagtcattttgtatcttatcttttagatatgtcttttgtaagcagcatatagttagttgtaagcagcatatagctgttagtttttattttcagtctgacaatttttgacctttaattggagaacttaacccctatgtaattcctatcattttagatttagtctgactagtagtgctttgtatttgtcactctggttttaagttcttttttcttttttttttggccgccctttagattatgttttgaataatttaatattttcccatctatatgtgttacatagaattatgttcctttttggtttagtaggttactctagagattacaatgtcctttaatttagcaaggtctaatataaattgatac

SEQ ID NO: 64330 - DNA, 1954 bp, Homo sapiens
agcatgtatctgttattgttgttattaggttggtgcaaaagtaattgtggttttggccataatgcatgttttaattctatatatatattaagccacacaagccagtatttttattgcagcttatgcaataaatattcatacagatttaccagcgtaactgtccttttattgctctttatttcttcctccatccccagacataaatctagaatcattctcctgcctaaagaatatccttaagtttactttctctaacatgggttttctgctgatgtcagattgtctcaggttttattctctggaaatatctttatttcacctttatttttcaaggatatttacactggcatagagttttatttaggacttattttcattgcgtacttagaaaacatctctgtcttttggctttcattgcttctgttgagaagtcaacttacagtctaatagttgttcttttggaggtaatctataggacctttttctgactctcatatgcctagatgtgtgtgggggcagggatgggggcagtgggagttgtatttgtgttttgaattggtgacttggtttcttatttttggaaaatttccaggcattgtcttctcagatactgcttctcttccttttttttttttttaaataactgttcttatgggattcccaataacatacacatataccttctcaaaatgtttcctaagtcttcattttaatgcagagttactgcatttttatattttactgaattttttatagtagctttcccttcctagaattggctatttttagataagtgatggtatatactgaataatatctttgtaactccaaaaaattatcttattatatgctaaggagcactgagcaatgcatagccctcttactttgccataacatttctgaaggctttcttttctggatttacctatccttctcatcaaataatctaattactgttatccaaactccttagccagctttcataacatatcttgatgtcagagatgttgttttcataacgcatcttgatgtcagaagtattctccaggaaaattagtctgttcagtaggcatgaactggaaatgtatcagtacgtgcataaagtagtgaggaatacatagatctatgtggacaatataattttgtctttttttttctttgtttagcaaaatggtacaggcttttttcttcttatatttaacctacttctctttaaatgctgacattagtttccagattatcttctcaaatgtttccatgtttaatggatggtatgaactaggaatacaaacttttcagtgactagcggtaagatttcagaagttaattctgtatttaagaattttgtaattatgtcacttggaactggcctttagaaaaagtgtgaatttctgactggttgtgagaaaaattagtcaagaaaataatcagtaatttttttgttaacgtagaccttcaatattgatgtacggcagttacattgggcagaatatatagagaactactgcttgggaactaagaagtacgtattgaatgaagaaatgtctggcctccctgcagccagaaaacatctgaacaagtgagtttgatgcatggatttgattgcttcttgtcttccttatgaaatattccacaatttttttggtaaactggtatatttgctatatctgtcattcaaagatgcagataatttttaatggtaatctcttatatttgtagtgctttttaatgtgatttttatgacactttttaagactttcacattattatccctctcatgcctcataactctgtgcgactttgcagggcagccagttctatagatgaggaaattgaggcttaggaaagttatatttgcctaagccatattgtattgagtggcaaagcaaactagaatattgatctttgactccatattcgaacctcttttctctacatcatttttcttacattg

SEQ ID NO: 64331 - DNA, 3423 bp, Homo sapiens
gcttggataagggcttatccacttggcctttgatcttgtgactgtcacctgtaactgaaagagtaagttacttgtctgacaacttgtaagcaactaaagatgtcaaaaaaaaagtttgctctattttgtctgtactgtgatgtatgtaatgaatgaacctttttagattagatgggaagctctagaaattcaaggtacatatctgttttacctacagtatacttaatgcctatcataagtttcaaattaatatggatttgagctttgattaaaaactcagtattaattagctgccatctaacaatatttttttctagaaaatactgtctaacatatctcttgatttgctttccaggttgcggaatatacgttatggttttaatactatccttgtgatcctcatctggcgcatttttattgcaagatcacaaatggcaagaaatatctggtactttgtggttagtctgtgttacaagtttttgtcatacttccgagcatccagcactatgagatactgaagaccaaggattcagcattagaacatctatacatatggtgatctaaatgtacaaaatgtaaaatgtataagtcatctcactttttgtcaagacattaaaccatcttagatcggagtgtgaagtaaattatggtatattttatgtaacattttaatgtttatgctcataaaacttagtgaacacactgtgttatgccagctcaaatctacagtagccaccaaaaccatgacttaatattttgagccctagaagaaaggggtgtgctgaggacaagagtggggaaataggaacactgaccagtataactgtgcaattctggaacatattaattaaaataatatgccttaacatatagtgaatttctaattctaatgttcagtgcaatggaagacatttatttggacagtaatactagcaaagttggtagatatttgattcttcattttttgtttttttcattagttgaagtgggttttagttttgtttaaaattataaccagcgtattttcacatcattctgtaagttaaatgatatcaaacatgaaagagatgttctcatttttctttttctgattaaacgtctgatgcatatcatttttctataagtaatcagttgcttttaaaatcagaaggctatattattctaatgaccctattcgatctaaatgggtttgagaatccatatcagcaacatacgtgttttttgacagaaagtgaaaacaaattccgtaaaactgttagtatcaaaaagaataggaatacagttttcttttccacattatgatcaaataaaaatcttgtgagattgtttatgttttgaagcaggaggatttcttgagatttgatggaagtgggagttgggaaggattcaccatacttgtgttctcctccctttataaattttattcataggacttttaaaaggcttgtgctatctttccagtgaaaactgaaagtgcattattatggaagaatgtatttgcaggtagtaatagcattaaaaaatatactcgtgtgtaaacacatactaattttgaccttgaaagatgaattccttcaagaaaaataaaataatgcttaagataatgtgtacgaaattaaataaaggactttatttacatactacataaggtagcaaactgttgaatgagtttgaaggtatcacttattttttatgcatgtgattttagctttagaaagaaatgcgttatagaaacaagtaatagcaagaaaattgatgtatattttaatgatacattaaaattcccttttaatcataatagttaactctacttactgttttaacatacatttgatttaacaaattgttcagcataacacttctaattaagtttatcaagttgtactgtattagataatcagcagtgtatctggagtatgtttaaagagaacagttcgcaatacaaaaagttacatggagctttacatcttaactttctttgtcaatttaaatgcaatgtataaaaagtttattttgctattgtgaaaaactaaatgtaaaggaaatcacctactttcatgcaggtgtataatcttgaaaaggaaaaatgcttccatgttgaagccagattttctgtagtaaaacttttaaatattattttaaaagaaatatgtatataaatatctctatattctttggaatgatactaaagtctctggtctaggaccataccttatataaaggtataagagaccatgacaatgtctgaaaatggaatagataatgatgccttttatttaaagtggcccacataatatacattgagtactccatctctccaaatgtatttccataatgtgttgaaaacatgctaacatttgtatgatttttatacttctgccgaatagacttagaatcagatgaattgtctgtgtgtcttgcaaaagagttggggacaacttgggcaggcctatgaagtgcatagggagtgtatgtcttctgaatggttttattgttcttgtaatctagcttaaagaaatgttaactgggagggtgctgaggccactcactgcattaattttgtgtgtttagagttctgttgtcaaaagaaaactaatgaataaattagtttgtcattctagaatttaaagttctaagattagtataaagagtatatagattgttaatccccaccagctagactttgaacttaagtcagacttaaagatttgagaaattatttgtgtcatttactagacgtgatttttagttctgtttgattatatttcctacacaaacttcttatttaacaggatagcctactaaattaaatgtttcttatttcacttaactcatttgattaaactgtattctaaaacatttggggtttttccccctattcagttttaatcttggaatatgcatttgtaaattgtgatgtcattgagactatatttatatttgacttggcaacattaacatgtcctaagacttagtgcagagaagcttggcagtacgttctttgacttaaggatggcataaaataatcatttttgaacctgtgtaataaagcttgaaagcagggaaaagaatttccttttcccccttttttgtgttgtctataggaattaacttgggattgttttgtgggtttttgtttgttttaaatgtaaattgagaatcttttataagaaataaaagcattattgggtgcctttgtttgtaaaccaaaaagtaataaatgaatccctatatttccattatagtatttattgtatttttatgttctgaaaattacccatggaacaatatgcttaggattacaggaagcagtccttacttacacttcttgtctgttttaggtgtacttgttaattcttatgtcctaattttatttaattctgagttccttacacagcattttagggaaagaatacaggcagg

SEQ ID NO: 64332 - DNA, 1024 bp, Homo sapiens
caaacttatgtgccacagaatgatggtttgggaaatggaaatagatgggcaggaaaatgatttctgtggtcaaatgtttgcaaaatgctgtgtactagatacccttcttacagattcataatactagcataatgaaggttttgcaaagtcctggcgaaaaaaaaaaatctgtttaatttggtttcacccagtatttatggtgacatctattaacattcacagtttggtgaaacataggcataatctattttaaataggtttgaagtcctatatggaatgatgctgagaatgttaggatttcataccagcaaattagtcatgggtagatggagagggttccagtcctagcatccaagaagtcacttttttttaatggaagtaggcactgagaccttcccaacagcctttctcttttttaaatcctcgaaggtcttatttatgtatttggttcatttgtcaaatatagtcattttgacagacttaacaactgtggttaactccagcccacccctgaggagatcccgataagaaagcccacctaggcatcgcaatacctgcagttcttagacttccactgtgcttggcttatggaaaaaaccccacagaatctctgaagcatctgtccattgtccagactcacccgtcattgtctggcctccctttgccgccatctgtctggacattatttgtttctttcttagtttaatgcaagctgagcatccttcctcagattccttgagcagtttggctcttggcattaatctacactggtcattaagaaaaaatcagaattttaaaagatgaaatcatatctataaatgtcaatatataacatgtctatagtatctagttaaaatgtgggagatggccttgtggaaatgaacaaagacccctgaaatgagaacagagactgtgtgttcagagcctgttgtataacaagggagtcagctgccattactagcatttggcagagtctcaaagacaggcagaggactgggaaagccttctagtgaaaacaagagaa

SEQ ID NO: 64333 - DNA, 1029 bp, Homo sapiens
tacaagctcacaaacacccaaggttgagttataaggattttcattatcatattatttaaatatgtgcaaagataaccagatatgaactccttatgcttatagctctcttaagatgataaaaacaaaatagtgatactaataataacacaaataaaactgcaaacactttaaatgctaattaagaacattgctttaatgtgatgggtgatgctgttttgctgaaattaaatgactgctcacaatctcgatgcaatgctgaccctcgtagcctgggtccttccgagtttggtatgcatacaccagggccctttgggctaactcagttctcccactgttcttccaaccactgacaacacattgttcaggcagcagcacacgtatcctttgggctttacctagtcaaaatgtctttgatttgttaactctgctttccttttagaacccactctctttagcagctgggttctctgggaaggagacctgcatcaagattagagtgcaggaagttaccaaagaatgttcttgggaaccacagctgtgggaggcaggggaaggaagcaggatgtgcagagggagaagttgagctgtgtcgcaggcccaacaaagacctctaccaaccaactcactgggctgggtggctcttcagagttgtcctgccttggggacaagagcactgacctttgtgcccctggaggatcactggatgagggtcaccctggaaggaagtttgacctcacattaggctgtgttatctagccaatgccaaagaactgacagctaagagcaaccttttaccatcatccctgcagctgggaagtaagtccttcactcctgaagagagatctggacagagcgtcacattgtcttccacactaacgcacaataaagttgtatagggcaaccgtgagatgtgaaaacaaatgcatcccagccactgaactgcctggtgatgcttgactagatctttgagatgatccttaatatgtacacaatctattattttattctcacaaaaatataaatataaat

SEQ ID NO: 64334 - DNA, 1029 bp, Homo sapiens
tcttttttctttttgagatggagttttgctcttgtcacccagactggagcgcaatggcgcaatcttggctcactgtaacctccacctccagggttcaagcaattctcctgccttagcctcccgagtagctggaattacaggtccctgccaccatgcccagccaatttttgtatttttagtagagatggggtttcaccatgttggccaggctggtcttgaattcctgacctcgggtgatctgcccaccttggactcccaaagggctgggattacaggcatgggctacagtgcctggcctgcttattttcatcttatgaaataatttgcatgttagaaacctggggaggcccaggaattccatatcctgaggtgctttctgccagtgactctatgattctagagcagaagggtgtacaatctccctggcactcctaccgggaaaggtcgatgccagagtgggttctaacccagtaccttccgtgcgattctctcgatgacaactctggctacttgagtgatggacccaccctctgggtcatagaaaggactctgaggatggtccaggctggtcaggggccggattttctcctggggaatggtgggtttgttgggtgactgcaagaaaacatacagaggtagagagtaagaaataaaattgggaaaacccacaaaagccatttgttatatggatcagagcaaagtccttgataggaatttaacaagcataactactatttatatttatggaattgtgttcatgccacatactgtgctgagaaatttctagaactatattttaaaattcttccatgtccatggtaggattgtgctaagatgaagaagccaagtttcagagaggccatcccagctaggaaacggctgagccaggttggcctgaatcccaaactctttctaatagacccggcattggaaaacttttttagtaaagggccagatgctaaatattttaggctttgtgaaccatattgtgtctgttgctaatattcaactcagctgtggtagtgagaa

SEQ ID NO: 64335 - DNA, 1038 bp, Homo sapiens
atgagcaaaaacaggcctaaaagctgctaggacccttctactaccatgtaagcaagcctggctagaccactggagagaccatgtgcagagaagccccagccatctcatgaggccccagatacgcaggtgaggctggtctggtccaattgtgccaccagctagtagtagccacatgaatgagtccaaactagacccaagaagaaccatccagtggacccagttcacatcactgatccacagaatcttgctaagtgattgtttaaaaagactgttttgggatggcttatgcagcagccatataaggaacactaaaccactttctcttatgccttactccccaagtacttggctcccaaatgctaagtatagagaagtacaatttttgttcttcctactcagcataaacatgctgctctccaagaaaacttccctgaccccagagattaattaggttagatcttttgattactgcttccatagcactctagattcctcttttatagaacccaccacatttatggttacacatgagatatttgttaaccacactacagctaagagtcatggaggaatgtaccgtacaactatgtacctgccacatagtaggctttaatgaatgtttgttgactggctgactaccatgtagaacagacagcactttgatatgcaaacagctccctaatcataaggatcctgaaccatcaaggagatcctcatgcttcaaaaagaataggcctttaaaaatcagaaaacttgatgtacatgttaatcttcacttttttacatgggcaccttcagcactgaagtccctggcaggcattttctttttcttctgaagtcctggaactctgaagttaagctggagtttggggatgtataatctttctcttgggttacaaataaaacctatctggcctctgtgtctgtttgccatccccaaatcagtcaacacaggtctgatacagtcaccctcttgcttaaaaccacctacagaatcaggtcccaaaatccttggtgggccactggccttgtgtggtc

SEQ ID NO: 64336 - DNA, 1008 bp, Homo sapiens
ttaggagttcgagactgcctgaccaacatgatgaaaccccatctctactaaaaatacaaaaattagctgggtgtggtggcgggtgcctgtaatcccagctatttgggaggctgaggcaggagaatcacttgaatttgggaggcagaggttgcagtgagctgagatcgtgccaatgcacgccagcctgggtgacagattgagactgtgtctcaaaaaaaaaaattgtgtaattatgcactgtacttgatagtataactatgttgatatggaattatcttccatgtcttctagtacaattactgcccaggaagataccatgtttatcctgtggcttttgttactgtagcactatcatgtatccttggtagtactttcagttggcaaagtttatttgttttagttaacttcagataacgagattgcttacataatatccagatttaatgagaaacccatcaacttttattatctcagtttaccttttttcctctttatgctttactttgtattattattattattttttgagacagtctcgctctgctgcccagtctggagtgcagtggcgtgatctgcactgcaacctccacctccatggttcaagcagttctctgcctcagcctcccaagtagctgagattacaggtgcctgccactatgcctggctaatttttgtagaggtggggtttcaccatcttggccaggctggtcttgaactcctgacctcgtgagccacccaccttggcctcccaaagtgctaggattacaggcgtgagccaccgtgcctggctggattgtttttattactacatcttcaagtcccatctccatctctccctcccttcctccctccctgcttgttcccttcccctccctcttcctcttcccctccctcttccccttctttagtagagacaaggtcttgatctgttgcccaggttggcatgtagtggcgccatcttggctcactgcaacctgcctcgggctcaaagtcatcctcccccttaag

SEQ ID NO: 64337 - DNA, 1593 bp, Homo sapiens
ttctgtgaagctaatacaatggtcatttccagacaaatttaaaggaaacactaaggctgcttcaaagattatctgattcctttaaaatatatgtctatatacacagacatgctctttttttaagtgcttacattttaatagagatgaatcagttttggaatctaagctgtttgccaagctgaagctacaggttgtgaaataatttttaacttttggaatcatactgcctactgttactctaaatagaaatatagggttttttttaatgtgaatttttgcctatctttaaacatttcaatgtcagcctttgttaaccttaaatacactgaattgaatctacaaaagtgaaccatctcagacctttactgatactacaacttttgttttctgatggccaaaataccaaatgcctgttgtatttatggattaaaaactgcttataaaaccctgtgttactactcctactcttggagatgataatattctatgtggtcaaatatttggactcatttaggacttagatatttcagtgtacttgattttttaatttaactctttttcacagccacgctaagggtaaaaaggaataatttccttctgtcttccttttcaagtatttctgggtaagggattcaaaaaactaaaactgtttttgtttgtaatataaaatatggaattgatctttccagggtcagagatgattaatgtttttgctatatacttttatacattattttcttatcaaactagttaacaagtatttttatatgtttgtaagcagatatgctttcatagcataccttgtgtatatgtaaagataagtatttaattctcactgttcacttttaactgacaaagaaaaacaagtggaaactacagaaactgtggtagaacttttacttgctggtctggtcttggttgtacccatctttggccagtcacataactactcaagaaaccttcccaatagagtacaacaggatgagactctgaaatcactttcagtattccctgctagatattgattgttatttcaagtattaagtgtaagcttttaatggataattagtataactgtggatggcatctgattttgtttttaattctgtggattgtgtttaagcaattcaatagtatgttcctgattttgagatgctaagtggtattgcacagttgtcactttatcaagtgtgtacaacagtcccatgaagtttatagagcatacccttgtatagcttcaggtgctagaattaaaattgatctgttatcacaagatgatgtttgattactcattgtgttaattaagtggtttcttaagggaacaagtgttagtgaaacttactttagtagctctgttccttttctccagtgccttagggtttgaatctagaagtcagcattggtcattcagcaggtggaggggatgtgaaacagtttgatgttctttgacttgttgaatatttacttaagtccgtgtttcttaaactttttctatgaagtgctcctgatatagaaacccaactgtagaggaaggtgaatacctacacagataccccatgaagatgaaactgaaaacagctaaagccacacaca

SEQ ID NO: 64338 - DNA, 1010 bp, Homo sapiens
tgcattcataattcatttctccccacatattgatgagtgtcacctgtgtaccaggttttggggaatgcaatgatgaagagaccttatggcctctgaaacttacacttttctccatcctcacctcttgccattttctctctttgcttaatgtattccagctatgtgacgcttcttttagttcttggaaagcccattcactctcatggcctcacacattcagttttctctggcaaggatacttcttcacacccccaccctccacccctcaactccatactctgttatcttctgggcttaaatgtcacttcctcagggaagctttcgctcatctccctgacagggttgtatactttaatagcaccttacactttcccttcccagaatgtattactgttgtatttaatactttttgtgtgatctgtatttggaaatattgttgtaggctagtatttccatcacagatatgttcttctgcattgttctgcagaggtgggctttagtttatcttgagctgttaagtctgttgtttcaccttatgataaaacaacttggcctcttggctgaattattagcacaatctgtggccaggattagatggaacaaatccagttgttaataatgtaccataaacataactgttggaatttcaggtaacacaggaagaaggacaacagttagcacggcagcttaaggtaacatacatggaggcatcagcaaagattaggatgaatgtagatcaagctttccatgaacttgtccgggttatcaggtaagcaaaacacattctagatgtgtgttttaataaattactattaaatgtttttagtaaggatattttatatggaagtgattcctttctagggattaatgcacatggtgcattacaatttttaagtacatattctaggcacttctagaatataaaatataatttaattatgaagtataaagtacacataggattttgataagaataaatgctgcttccaaagggggtgatggtgtgaaga

SEQ ID NO: 64339 - DNA, 1396 bp, Homo sapiens
ggatatcttcaaatattgggaaattaacatattccaactaacccttgggtcaagaaaatgaaaagggaaattacaaagtatcatgaactgaatgaaaattagaacacaacatcaaaatttatagcatgctactaaagaagtatatatagagacatttgtagcactaaatatttgtattagaacaaaggtctcaattcaatgacctttagtttcttccttaagaaataagaagaaaaagagaaaattaaaacccatagtaagtagaagggaaataataagagaatgaagaccaatgaaatggaaaatagtaaaaccataaaggaaagaaaaactggcagagtgtagtggcttatgcctgtaatgccaacactttgggaggctgaggcaggaggattgcttgagcccagcagagcagttcaagaccatcctgggtaacatagtgagaccccacctctaccaaaaaaaataaaaaataaaaaccctaaactggctttttggaagatcagtcaaattgacaagactcttgccggaatgatcagataaaaaagagaaaagacacaatatcaggattgagagcggtatcttcactttagatccttcagatgtttgaaagataataaatactataaacaactttatgccaataaattcagcaagttaaatgaaatggacatattacttgaaaggcacaaactaccaaaattcactcaagggaaaaaaaaagataatatcagtagtactttatctacaaaataaattgagtttgttttaaaaacgtacctcaaagaaaacttcaagcccagatagatttgccggtgaattataccacacatttaaggaagaaatactactgattctgtacaaagtgttccagaacattgaagaggagagaaaattctttgcaacttatgtgaagccagcatagcactcagaaacccaaaccagaggaaagcataagaaatccacagtccaatatctctcatgaacacagatataaagattcttaataaaatattaaatagaatttaacaatatataaaaagggcaatatatcactcaaggagagtttattcctgcaatgggttgttggtttgatatttgacagtgagtcaatataattcatcatattagcagtctaaaaaggagaaatcatataatcatctcagtaagatgcaggaaaaaacatttggcaaatccgccatccattcctgataaacgccttatgcaaagggagtagtggagaactttgttaacctgagaaaggacatctacaaaaaaattctctaactgacagcacacttaatgttgaaaaactagctttgtttctaagatccaaaataggtcaagagtattcccgtcaccacttatgtcattgtactggaggttctaggtagtg

SEQ ID NO: 64340 - DNA, 1094 bp, Homo sapiens
gtaaaagcgagataattcatccgcagcagatctgcattacaagaaatgtgaaaagatgtccttaggcagaagggaaatgataccaaatggaaatctgaaaatgaatacagagtaccagagatggtaattatgtggataaatataaattactcttaccataactgaatatttaaagcaaaaataaacgcattatgaagtaaaagttaataacaaaaaagagcaggagggagaaatattgttgttaactagtttgtttttttcttgagagacgggttctcactgtgttacccagactggccttgaactcttgagctcaagtgatcctcttgcctcagccacccaagtagctgggactttaggcatacaccactgcacctggctctgttgtaagattcttaaaccatacttgaattggtatggtatcatttgaattagactgtcatgaattaaaaatgtataccataaattctgaagcagccactgaaataacagatatatagttaattaaccaacaaaggaggtaaaatgcaatcataaaaacaactcagctaacccaaaagaaggtagagaaagaagacaactagaacaaagaatagataatatggataggaaactaatagcaagatgactcaactgtatccatgagcacattaaatgtaaattgcccaaatgtctcaattaaaaggcagatgtgttagattgaataaaaaaacaagatgctacaagaaatctactttaaatgtgaagacacaaaggttaaagtaaaaggatggagtaagatatttatatagctactttaattattttcatgattgcctggctagcaataatgaaaataattaaagtagctatatgaatatcagataaagatttcagagccaagactattaccagagataaagaagagtgttatataatgataaagagattaattcctcaagaggacataacagtcccaaacattcgtgatctaatagcttcaaaaatcttgaagcaagatgttaagaactacaaggaaaaatagacaaattcacacttaaaatcagagacttcaatacccctctcgataactgataggaaggtagaaagaaaat

SEQ ID NO: 64341 - DNA, 1043 bp, Homo sapiens
atgttagccaggatggtctcgatctcctgaacttgtgatccacccacctcggcctcccaaagtgctgggattacaggcatgagccacaatgcctggcccaagaaaatgatatattatcttaatgctaagatttggaaatgtccactgatgaaacttggtatagaataaattttcctgctaaatctcgttcaaatctggttataaagttagagtgaaaaaatttgttcttcatttcaaatcaatataaactgtttgaaataattaagaatatggcattgcttacattataaacctagcatagacagttcatctattttttttagatttaattttgtttttttttaagaccatttccttgaggtttctaaacctgattatatttattgatgttgcccagtggaccctgcctgtggctcttctcagttctttctagtactagaaactctatatgtcattgcatctgggaaataatggcaaagtagatgtgcattgaaggagttctcttcctatctctcgctgacttttgcctcacccctatatgcttcctgtcctgaatatagaaataggatctttctcaaaccttctcatggtggtagctccagtaaaggaataggtaggagacctaggataggtggagatctcctgtagggtaggcagtggcagattagggaagggaggagggtgtatgcccactagaaccccaaagaggctctgccattatcagcttgggtctatatgagttatttttaagttgtctatacaccagattgaggatccctagcccaaaaatctgaaatctgaaatgctccaaaatctgaaactttttgagagccaacatgattccacaagtggaaaatttcacacctgatgtcatgtgatgtcacagtgaaagctttgtttcatgcacaaaattacttaaaatattgtataaaattatctttaggctatgtgtgtaaagtgtatataaaaagtaaattttgtgtttaggcttgggtcccattcccaagaaacatcattatgtatatgcaaatacagtattctaa

SEQ ID NO: 64342 - DNA, 1067 bp, Homo sapiens
tacccaggctggagtgcagtggcacaatcactgctcactgcagccttgacttcccgagctcccatgatcctcccacttcaacttcccacatagctaggaccacaggcatgtgccatcatgccctgctaatttttgtattttgggtagacactgggtttcaccatgtttcccaggctggtcttgaactcctgacctcaagtgatccacccaccttggccttccaaagtactaggattataagcgtgagccactgcgcccggcctttttttttttttttttatcttggcacataaaataatgatggtcttacaatcagtgtcatcttagatttgatgaaaaagggtaaattcacatactgggacaagtgaactatgctagggcatggtataggctgaagctcagtgtgataggaaaagctcagggtagggaatggggtgttagagggatagttacagtgagggaagtttcattctagatcagcagtcagcccagtagaacagccacctagtgggaggctagtacaactgattgatggctcaggagcaggtattgcccaaaatcctgggtatgtggaattggaattgtggagagttgttggtgggtaataagacttcgccccacagttgagatttaggaactatgtactcacttatggcaggaaggctttataagaagggggctatgagagaaaatatttgcaaatcatctgggcacagtgatgcatgcctgtagtcccagctactcaggaggctgagatggcaggatcccttaagcctagagttcgacaccagcctggacaacatagtgggatcacatctctataaatgaaggaatgaatgaaaaccattgaaaaaatatttgtaaatcatatttctgataagggatttatatccagaatatagtactcttacattcaatgataagataaaatttaataaggggcaacgatttgagtagccatttctgcaaagaagatatacaaatggccaataagcacacaaaaaggtactcaacatcccactagggaaatgcacattaaaactgcagtgagagactattttacatcc

SEQ ID NO: 64343 - DNA, 1045 bp, Homo sapiens
tttatctgcaaatgctgttggccctcctttggaagtaaacacggatctggccactttacacctccattccagtcacctcccttcaagctgcaattttcttttcatgatttattgtaatagcttcttaagtagtctctgatttcacccttgacctataatccagtcttctgactgcagccagtattacttttcatatgaaagtcagaacattttattcatctgcctcagaccctctagtggttttcatttcactttgaataaaatctgaagtcctcactctggcctgcaagtctccgcctgcctccctgttaattttctgaactcattaaccactctctcatgtttgttgttgtagctacactggctgtcttgctgttcttcagacatgttacagtactctcaccgcactgcctttaacttaatgttccctctgcctggaatgatactctagatcacagcatggctcactccttcagttgatccaggattcccttctccagtgtcacattgtgcgtggagccttctctggctatcttatgcagtatcatatcctcccctccaactcctgctgttgccagcccccttcatttttcttcagagttcctatcacctctgatgtattatgtttgcttatttattgatggtcaatacttcaagaaactgccagccctctaagagcctggggattagatcctcagctcctgacacaatgcttggcacattataggtgttcagttagtatttgtagattaagtggggtggtgagtgagcctagggaagattcttgtggcagttttagcagtttagtaatagaacatgtgctgtggaaatcaccccctttaattctagttttgcttctacagaccattctctgttctagaagaggtgagaaatgaaattggggtttaggatattggtaggtaacgggatagaggggagaggaagtgaaaatggaagtaacagtctagactctgggaagcaaaagttacaactagaagtgagttggttacctacctgtttatggggcacccttccatttctaagt

SEQ ID NO: 64344 - DNA, 1079 bp, Homo sapiens
ttttttcataggtcagaactccaaaatcaagttgttgtcgtgctggttgattctggagtctgaggaagaatcatttccatgcctctgtcctggcttctggtgcttatcagcagccctttgtgctccttggcttgcttgtggatgcatccctccaatctctgcctctgccttcatgtggccttcctctctgggttattttctgtgttttgcatctcaccctcctttctcttataaggacaacagtggttggatttaggtccagggccatctcactttaataactgtaaagaccctatttccaaatacggtcatattcataggtaccaggcattaggagttggatatatcttttttggatgccaccattcaggccactacagtgagcaagcctcttcctgcatttgcaaataagcactatgaaagtacttttactaaatgcaataatagctatagaatctgacctatattatatgcatataaatgtgattcagagttacatgtttactttcttttcatgtggtttacaattgatgtggcattcttttactatgaattaggctgagcacatacagacaagctataatttgtgtctctaaatggtgtgagcagggtcttaaattctgtgaacatgtgctgtttagctcttgactttttaaacctacgtacttgggtatttttataagataaatgtttatagttccttttgatatgaatcatgtttgtctccacataaaagtttaaaattatccctagcgacctagtctgatttaaatttgtgtgccataagatattttataaaaacagaattgctggtagaatgaggttaagtaatcaaaagtaagactggttgtccttggtgtgaatagacagccactttcagagaagtgctggcccggcctccaggcatgtggtttggagggaatctctggttgagaacatttgctgctgctgctttcccattttgagatgaacttgatgaggaatttagttcttcgtattattaggaaagtaaaacaacagtgatacaggtgtgagattgcttttttgaattttattgtgccatagacctatatgtcttc

SEQ ID NO: 64345 - DNA, 1014 bp, Homo sapiens
agagtttgagaccagcctggccaacatggtgaaacctggtctactaaaaatacaaaaattagccaggcatagtggcgtgtgcctgtagtcccagctactctggaggctgaggcaggagaatcacttgaacctggaggcggaggttgcagtgagccgagatcgcaccactgcactccagcatgggcgacagagtgagactccatctcaacaaaacaaaaactacaaaaaaaccatgtgcctgcattcaaagatttggtttggcaataattttcaagctatttttcattctcagtatttcaacatttgctattacatggcagctgttagatgttcctctttattttatggcatctaattgataattattttttgaaaaaaatgtaatggaaatgtggaagaacattagtcaagagctcttgaataaaattcgttaatattttgttctgcatttattgcttttctgcacttcttatttctgcatatattatttctaaaattgaggatttggttgatatgtaaattatgattagagaccagaacagtttaggacccaaaatgatcaagggaaagcacctcgctggaaacccccatgacaataaaactctccttgtagttcccatttgtatgtttcaattataaggcttatgttaaaattagatcagaatttccatcatagactctcaatttcatagttgtgtaagtgccatataaacctaattgtaaacaaaggcatttaatgatggacattatttgaacaatttaagatcaggttatttagctcacaggctagaaaatacatgtctagtttcacattttaaagttgagagattgtgaagatgggctttggttctaaaggtgaattttatagttttttctaatgattttccagattttctacaatgaagatgtgttgttttataacataataaattaaaaatacttgctaaattcttttttctttactgattgctcttgagacttactgcattgtaaacaaatgactattttagatgt

SEQ ID NO: 64346 - DNA, 1181 bp, Homo sapiens
ttatttatgacaggctattttttgagcatcttttggatattgcactgtgcgattgtcactttccattatgtaaatgaggaaacagtcaaatatgttcagagacgtaaaattttagtccaagatggtggaagaaggaccaaacttcctgttatgggtttctgatctgggctttctgctttaaaatctcttctgaactacgttttttttgtctttttattagtttaaaattaatgtttttaatagctctgtggttttgagactgaatttttacattcttatcacagtaaatgtttgcttaaaaaggtggagttgatctggtctccctttatcttgcctctgagtaccctaaaatgtggatttaattttagtgctagaaactgtttagtgggtctagttgttttccttaattaaatttaagcttttacatgtgggtgattagaaaagtcttatccagaacctcagttggcattttttagaaatgactgccatgtagtttttttttagtagactttaagaactttagagttacagaaaacctgagaagatagtataggaacttcccatatatctgtcacctagttcctctattgttaacacgtatggtacatttgttagaattaatgaaccaatgtggatacattattattagctaaagtctatactttattcaggtttccatagtttttacctaatgtcctttttctgatccaggatcccatcaagataacacattacatttagttgtcatgccttcttaggctcctcttggctgactttccttgtttttgatgacccaactattttgaagagtactcattaagtattttgtagagtgcccctctattagaatgtgtctagtgttcttctcatgacaggtgtagggttatgggttttgggttaggaagaccacagaggtgaagtaccgttttcatcacattatatcaagagtacatgctgtcagcgtgatttgtaactgttgatgctgaccctgatcatctggctgaggtaatgtttgtctggtttctctactatgaagttgctccctgccccaacccttttccatattgtattctttggaaggaagtccttatgtgcagctcacacttacggaatgaggatgctgtctaattttgaataaacatttaaatagtagaggcttagtttaaaaatttacctggagt

SEQ ID NO: 64347 - DNA, 1411 bp, Homo sapiens
tgactagtcatgttaggggaaggaggaatggtatagacataagattttaaaatattgacgtgcgtcgtgtgtttacttatttgcaatcttttttttttttttgagatggagtcttggtctgttgtctagggtggagtgcactggccgatctcggctcactgcaacctctgcctcccaggttcaagtgattctcctgcctcagcctcccaagtagctgggattacaggcgcctgccaccacacccagctaattgttgtatttttagtagagacggggtttaccatgttggccaggctggtctcgaactcctgacctcaggagatcagcccacctcagcctcccaaagtgctgggattataggcgtgagccactatgcccagccatttgcaaccatttttttaaattgttgtgttaagttactataaaaattaacatttttatagttttcccacattttactgcatactactttatatgactttatgattgttaggttcttaaacaatgaattttgacttaagttcttttatatttttatttttaccaatccatcctatttaaaataaattaatagtatgtttaatatctttcagaaaagttctttccctgtgctttaattttaaccagttttagctaatgtttttgcacaaccttttctaaaagcaacaaataattgattaaggggaatctgggctaagctgaagcttaactctgaaagctgtgttaatgagtttccataggaaaaactgtctactgcttttattttgtttatagattgaaattagctaaatgaaagaataagtaaatgagagctgcttaaattaagacatccattaaaattttttgtcttgattactttcccgtctcagagtcaattgatctggcttttggtactgagcacatgactctagacaagcatgcagtcattctaggcatactgctatttgaaaaaacagctttaaaaagatgttagaacctgggaaaaaatatcttgctctcttgtggtttcacaggatgccaaaggtttagttgcttgtatgtttcactcaattgctttctgttcaatgaataaaatcagcaccgtgcattagaactttgcagactcactgcaaaggaaatagcaggaggtaaagtgacctcaaatgaatgtggctttttttgtggggtgcggtgggtgggcagtgctacaacttaataaacaaattgagttttgcaggaagaaaacctttaacccatctttatactctctcatggtgacatttttcttctgctatcattcccattctttaaacatttttacaatgattagttcattttaaacatgtaacatagctacagttgagttgtttagttgttttataacgtatatgtttttcgagtccatcagtaaactggaattataatcttattt

SEQ ID NO: 64348 - DNA, 1035 bp, Homo sapiens
ttgtttctatggttctttattttattattattattactatttttgagacaaggtctcattctgttgctgaggcttgagtgcagtggtgccatcatggctcactgcagcctcaacctccccaggctcaagtgggcctcctgcctcagcctcccaagtagctgggactacaggcacacgccaccacgcctggctagtagttagttcttttttattgtttggtagtatttcattgtatgatataccacaatttacttgtctgcttattgatagaacatttgggttgtttccaatgttcattaactgtgaataaagctgccccagacattgatgtacaagtcattgtttggacttacattttcatattgcttggataaataccaagttgtgattattgggtcgtatggtaagtggatgtttaactttgggaaacaggtggtttcttataaaatggttgtaccattttacattcccagcaactgggtatggaaattccagttactctgggtctttaccgatactgggtattttagccaatctaatggctgtgctgtggtatctcattgtggttttaaatagcttttccttgacgactaatgatattcagcatctttttatgtgcctattggccattggtatagctccttttgtgtgtctgtatgtcttttgtctcttttgaaaattggattgctttgtgttactgagttgtaaagtttcttaatatatttggaacacaaatcctttgtcagctgtgtattacagatagtttcttctagtccatatcttgccttttcatttgttccttcccttttaatacttacatcctctttctgtagtagacttgccagaacttttttttttttttttttttttttaagagttggggatctccctatgttgcctacgctggacttgaacttctgggctcaagtgatcctcccgccagtctcctgaatagctgggactatagatgtgcgccaccatgcccaggccagaaccttataacaaaatagttcaaacaaaatgaacacagtagat

SEQ ID NO: 64349 - DNA, 1049 bp, Homo sapiens
ataaatgcatgagaatgacagataccaaattcaggatattgattacctcttggtgttgggggaggagagaggggaatattattgaggaggcatgcaagagtcttcaatcatattacaaatgttttgtttcctaagtcgggaggtgagtatgcgtatttatattttttcataacattttctgaggtattttatagttaattaagaacagagaatgtactctgacttaactgtgtagtcaaatggaaatttttagctgttaatttggtgttaaaggtatcatgacttgtttgacgagacacaagtgttttcttcaggggttttccttcagagtaggaaactatttttatttttattttttttttggtccttctcaaacaacaaataaaacttgagtacattcttattacagtaagaaattcatatttcaatttgtggataaaacttgtacgtgaatgtgtgtgttatgatttgctttaagaattactatacatggtttctgaagatttctccaaagcacagtatctaatttttgtcttggtagttacaggaactgatgattaattttgcctttagtttcctatatacagaaatgcctttaacttttctcagcaccgaattcataacactatttgtaggtatacaaaacaaatgcccacataatgtagtttgaggtaggtttaccgattgaaagaaaacctggagtatcatactagacctgtgctctgtgctatgctgttgactttttttgctcatgaaatttattcctttagaaaatggattacttttggaccgagaagattttcatcaagtgttgaattttcagggggagggataggattatttatgtaaaaaatgtgctgccactcttttggtggctttgcgtatgacaggaatcttattttcatcatgggattagaaaaaatgccgtggtcattgttcatcttaaaggctttgcctgatttgggtacttatgcctttgagagaggtgggatgggggagagaaaaggaattctgtgttcttggaacaagaatgtgaaagtatatacatt

SEQ ID NO: 64350 - DNA, 1011 bp, Homo sapiens
attcatatttgcattttcagaatcgtagactaggaatacctttgttacacagaactaagcacaacaaaatatttgttgctatttgctagtatcaagttttgagtggaggccaggtgcggtggctcactcctgtaatcccagcactttgggaggctgagtagggcagatcacttgaggtcaggagttccagaccagcctggctgacatggtgaaacctcgtctctactaaaaatacaaaattagctgggcatagtgacacgcgccaataatcccagctacttgagaagctaaggcagaagaatctcttgaacccaggagtggaggttgcagtgagctgagatcacaccactgcactccagtctgggtgacagagtgagactgtctcaaaaaaaaaaaaaaaaaaaataaagtcttgagtagggcacaggaaataaatagtggaaaaaagaggcttttggaaagatgagttgtatctattatggttccatagcatctagttactgaagaagagaaagagctggctatcattttggatttcagaaatcatgtgtggcatatacacgttgaatcttgagttttagaagttgatccgtagcattcggttttagccaaaatagtctttggagaagatagtcctttcttaatttctgtctggcaattctgacttgggaagtatacaacagtctgagagtaaggtcttaaaagttgtaacttttgttttatttcctgatgaattttctcttaatgcctgtttttggttaatgacgatgtggttgacgtttcagtagtcaaaagatgcgagctgaaaggaaagctaagcaggtagtcaagtcaaactgcagaggaagatttgtggtagatttaatgtttaagtttcagaaatcacatggaaaagatatgtggctattaaatttgtaattttgtcctttttgcctctaaaattaaggtgtgtcaactaagggaaatttgccccatgcaagtaggcttgtgtgcaggtacacagaggcatac

SEQ ID NO: 64351 - DNA, 1049 bp, Homo sapiens
ggcatgatcatagcttactgcaacattgaaactcctaggctttagtaaccctcctcctgtcttagccctctgagtagctaggactacaggcatatgccaccatgcccgtctaacttttttatttttattttttagagatggggtctcattttgttgcccaagctagtcttaaactcctggcctcaagcaatcctcccaccttggcctcccacagggctggtattataggcgtgaaccactgtgcctggcctttttatttttaaattgacagataaaattgtatgtatttattatgtacaacagggtgttttgaagtatatatacattgtggaatgactaaatatagctaacatacgtactatgtcacatagttgtcatttttgtggtgagaacatgtaacatccactcagctttttacaagagtacaatatattgttattaactatagttactatgctttacagctactttttattttgaattgtgatttaaagaacatttccaagtactttttactgaaaacatatctaagattaaatttacttttgcatgataaatgatgatttggctgggtataaaattattgggtcccaacatttttgtgttataacagtagaggtcctgctttatttgttatctttgtctggcctcaagtttctgtagaaataacttcactaggtgtatgcttgcagcattctcttatcattggaaatggacacatttatcaggatatgactagaagtttttctctgtcactagtattctcagggaaatgatgaaacactctcaggtctgggaagacttctccatttttgtattcatttttttcagttatcttcttaagtacctattatttacacattgattttctgtaactttatagtacattgttttaagttagctaatgaaaaggataagatcctctctattctaggaagatttatcaaatttgtcttctccatccttgatgaaattttctggatgtcacacataattactgtctccaaaacatatttagtgcccttgatttctcggtctgatattaaaca

SEQ ID NO: 64352 - DNA, 1041 bp, Homo sapiens
aaaacaaaacacaaagataaattggaggttgataagattgatttcctagaggatgggtaaaaaggtatatggtggaaaggatagagggaatgggggcagggacccttctgaggatacctttctgacttttgaaaccatgttaatgtttcacatactgagtatataagcagcaaacacaccaaccaaatcaactgatgacaaataaaaacaccttaacagggagtacaaatagaaacaaatgaactgaaccgtatttcaaatgagtaacttaactacactgaaggagtgaaaaacaactaatttaggtaacttttgatcctagtatttgaactctgtcctcaggataaagacaaaaagattgaaagaaacattgaactctagttaatagagttaactagaatttttggtttttgttgttgtcataaaggcatgggtttgcaattttgaagcaattgtctatactgttataagcaaataagtaaatatattgtggaaaatgggagccagtttctcactgttggagaagggagttacaaaggtgaaaaatgtgaaggttaaaatgaactctgatgtttgattggaattgcagatagtggcataaattcatagttttagaagtatgtagatataggccgggtgtggtggctgacacctgtaatcccagcactttgggaggctgaggcgggtgtatcacgaggtcagcagatcgagaccatcctggctaacacagtgaaacccccctctttactaaaaatacaaaaaaaaaaaaaaaattagccgggtgtggtggcgggtgcctatagtcctagctactcagaaggctgaggcaggagaatggtgtgaacctgggaggtggaggttgcagtgagccaagtcgcgccactgcagtccagcttgggtgacagagcaagactctgtctctaaaaaaaataataaaaataaaaaatgaatacaaaaaattagccgggcgtggtcgcgggtgcctatagtcccagctacttgggaggctgaggcaggagaatggcgtgaacctgggaggcg

SEQ ID NO: 64353 - DNA, 2931 bp, Homo sapiens
cttgagcatgtgtgtcttttaaagctctgtcatttatcggctgtgagaacatggccaaaatactcagcctctctgagcctcagttttctcgccagtaaaatgggtctgattacacattctttataacttttatgacaaagatggtagcattgtatccagcatgttgtatgtgctcagtaatggtaggtgttatcagtgtttatgcctacagttctgtaacatgtttaaatgcaaagggaattcagactcagagaagtctgtggaaaaaattgatgaaagcattatgtaggcttggtggtggggagaatggaaatgtcatatgtgggagtcatatgctagtttggagagaggaggtggcaagtggggaagtgggattgatagttgatttgggacctgtgatctggtctctgcaaaaaggagcctttttggagagacaggaacccgaccacctggatgcagtctcagctctaccacttgctgcatgtgtaattttaggcaggttacttaacttctctgtaccttagttttccccatctgtaaactggggaaatatggtggaccacatatagctgtgaaattaaatgagttaacatgtcaagggcttagaacagtgtctagtacagtctgtagtaaagctgcatacatttttatattaattttagattatggagctaaagcgatttttttatatttacacttaatagggtagctattcattgcctgactcctggaatgttaaaattcattccaccatgattgtttagcagtagtaactggagggagagaacacagcagactaatcattttaataagcagaagtcagttctcttggtaggagattagaatggcacaaattggacttacttttttaagactcctgaaacaccagactgtttttacaattttcagtatatatattttctactatgtgattttgagcagaaaaaaatataaaattgggaacggagaatttaaaaacaatgccttttaccctaactttctttgacttagatttagttgttaccttctgttcatatgaagagttgcaaaattagggaactaagataattaaattgagataccttttcctttttaaaaataaatataacaaatcataaagtagccatgataaaatgtaaagtattatgttatttaatgaatatgtgtgtgtacattacctcctcctttctgttgctcatatttctttgaaaaatgtgtaaagttctgttggtaggtagaacacctaaatgttaagtaaactctaggtaggaaatgacttcaggatggtacagagtggttaggagagactgctgggtgtgtggggtctatgtctctctacccaggtgactttgagtagtttcttaatctgcctttatctcgactgagcttctctttcttccccatgaaatgttgggtttggttgaacaaatttctgcacttttgaaattctaggagtgtttttttttttttattcatttaactagctgtgtgtttagtcaagtttcttaggttctctaaacccaagtttcaccatttgagaagggagaataacattaaataatagtacccttagggtttttggagtaaataaaataatgcaggtaaatcatccagcaccgtgccatctacagagtaagcaaataagaattgttggctgggcgtggtggctcacacctgtaatcccagcattttgggaggccaaggtgggtggatcacttgaggtcaggagtttgagaccagtctggccaacatggtgaaaccccacctctactaaaaatacaaaaattagccgggcgtgttggtgcgtgcttgtaatcccagttactcgggaggctgagtcaagagaatcacttgaacctgggaggtggaggtcgcagtgagtcaaggttgcgccactgcactccagcctgggcagcagagtgagactcttgtctcaaaaaaaaaaaaaaaaaaaaagaaattgttacttggttttatttgctgctgttagttctgtatcttggtgttcctccaaaacaaaatttgtaattttttcatttttctttgacacataatctggtctattactttaagtcttcattgccctctccttcctggctcaaccctatactcccctccttacttctgtgtggtattcaggtgatgaatgtggattccgttttgagttggagaaatttctttttgtcagtttggatttaattttaagaaataatgaggtaagcatttaattttggggttagtgctttatctggtaactctgagaaaaggccatatatgttttaaaaatttacagggaggtttatatattttttttagcatattaactttttattcaacaatttgccagattttgaggtaggtaggggttagctgatttctcacgtcttgaatttcagtcagtcctatgacctgttagtctggacccagcattgctttttaaaagtttgtcttttgctgagtactttttcattgctttttcctggggcagagagccgagaagagatttcaggagatttgtgttaatagttaattgatccacatgtgaaggttgtgagtttaaattcccaatttgctgttccattgctacatctcgaagatttttcctgcaattagaaactacttaaactgttaacttttatctattattttgaaactagacatttttagtgtttaaacttttttaacattaatgtacaaatgaattgttagcattgagaaataagacacctgcccccaaagtggtaccatactaaaggttttcttgtttggggaacagttgaaatggtcctgcaggcaattcctagataaaatttctgtacacccaaggaagaacattttcttatagaggatgactgcctttggagaagaaggaaattttaacctgcagtttcttaacttacgtcttattcttgttttgttcattctctttct

SEQ ID NO: 64354 - DNA, 2475 bp, Homo sapiens
ctctcacgcactcgctcactggctagggattagagcggtgtgtccgtgggggtctgaagcccgggttacctcccgaacctcagccccaagcggcgcggccccgcccctccccgccccctcatgcatatgcagcacctcagcctggcagcccggcccccagacggccatttgtggcggcgctggaggctgcgttcggcaggcgctgcggagacgcgtagaggagcgcgccccccggccgctgccgcccctggcccgtgccgtcaccccgcttctccgcgcctcgggcggtacccagccagtccccagcgccgcgctaccgcgctgaccggccctccagacgcctcccggtacccgggaccccagcccggccgctcgcccgcagcccgccggccgcacacgtccccggagccgggcctagggcgggcggcagcggcggctcggcgcagtcaggctgggctctgtagcgtccccatggccgcggccggctggcgggacggctccggccaggagaagtaccggctcgtggtggtcggcgggggcggcgtgggcaagtcggcgctcaccatccagttcatccaggtacctggagcgggcctgcccggggcgccggagcggcggcgggcgggggctggcgctacctgtggcggggcggccgccgcgacctcgccccagaggcgcctcgcgggcccgggccggggccagggggcgggagggcgcggggccgactacgctcctgccctgcggccgcagcgtcgcgctcctgcctcctcccgggcgcggcgtcgcgggagtagggcttctcaggaatgtggtcgggagggcggagctggaagggtgggaagcaccgatccaccttattgctctggccgaggccagagacctccgggagaggctgggccaccgagccgggctttactgctccgagggtccgggcgtggggctggagctggagccccgcgcgctgcttttccagccgcctgcggccgcgccttcaccgtcggggcgatagcggtggcaacttggccgcggctccgcgtggtctccgggcttccccgcgccgcctgagccggagctgcccgcttcaagtactgtgtatttctttgtgtgtgtgttacgctctttttataagtactctcttaggtaatatgtccgggtgggagtgtgtgataatgccccggggaaatggtggcttctaggaagttaaaaatgttctctgatggggtgagaccatttcctaggaattcctgatgccgtcctgcttctcgccgtgcctaggtgaagtttgggatgggccgggctaggatatgaccgagtcgtgcgttctgttttctaaccaccctctcccctacccccagccctctctggttgctagagacggtaagtcaggggtttgtggtaaagaaaagggaggtggtattcttccttcttagaatttgctcttggggagaggtttgagtagtcttttttgggatttttaaaacacaaagccccgatgtctttctgcttttgtcaacctaaaaggtgtggcatatgctgggagagaacgaaggtaccctgttataacaggaaacaaggatatttttcacagtatctagagtatgaacggtgaaatatttttgtctggtttccttttcacccatttgtcattaattgggatacctgaatagcttatttcacttagtgtttatagtgacattaaaatattgagtactgtaacaaatgtgattgtcacctttcacattgagtaaatgagcaataattgctgctataatattccctggattactgctgctaaaacctttgaatccaggaagaaaggatgttttatgtaatgagcatttacagtatgcttattagtgggttaaaaaaatcactgagtaaggggtgagattggtttaagtttagcaggctacagaatcagggatgctgtcaggttgctatttccctagggcgcagagagattgtacgtatctaatggcaaagcaaaacaatttatagctaaccctttggggactagtctgatggctgagggagggtgggggtgaggggataagtggaggagaagtctaggagtgggagaataatcttgggttacaatattggtagtgttatttaaaagatttgaaccacaaatatttacgtttttttgaggaaggggccatctgaattatttgagcccatgttaattaattaaggtgttgggcctttttgttttggggaagtaatggtattaaaccattaagaaagcggtaattgggcctggcgtcgtggctcacacctgtaatcccagcactttgggaggccgaggcgggtgaatcacgaggtcaggagttccagaccagcctggccaatatagtgaaaccccgtctctactaaaaatacaaaaattagccgggcatggtggcgcgcgcctgtagtcccagctactctggaggctgaggcagtagaatcgcttgaacccgggaggcggagatt

SEQ ID NO: 64355 - DNA, 1020 bp, Homo sapiens
tcccagctactcgggaggctgaggcaggagaattgcttgaacccgggaggtggaggttgcagtgagctgagattgtgccatttcactccaacctgggtgacagaatgagacttcgtctcaaaaaaaaaaaaaaaaaaaaaaatctggtgacggcttgaaaaatctagcactgaaaggtaattaccagtaaagtttggtaagtctgtttggtatgtccttgattttattgttgataatggtgtcattgaattgaattggggcttaataatatggaataacctactgattgtacatagtttaaataattataaatatcttaatttttctttacagggaatggccttaagtcttggagataaaatcaacttgtcacagaagaaaactagtatataaaaataaacaaaaagtccttgaagctttacagttaatttaggtatgggcttactggactccaacatcttttgtactctttcatgcttatatagaatctgagttcatgctgaatacttttcagccaataatttatagcctttcccttaaatcaagattgagtttaaaattatagtttgtcttttgtcttaacagttctgaatgctgtcctcaaagtatataatgtttcatgtaccaagacccttttcacagtacaataaacagatctattcataaatttttgttattttataaataaatgattacataattttagttatatggcaatggatttcttttagttgggttataaatttctattataaatttaaattactgagttgtgaatatatgcagctttattaagagaatttacaaattcaatgatataaaataaggtaggccttgattcacttggttgttttttacttatttaatattccaacattgctatctctaaaaatgcattatcatgttttgaagggatttgctcttgaatttagctccagggagaaagtatcaaaataacttttttttttttttttgagatggagtctggctctgtcacccaggctggagtgcagtggcgtg

SEQ ID NO: 64356 - DNA, 1022 bp, Homo sapiens
gggaacatcgtccacttgtatatctgctgcagtgcctagtatgctgcaactgctatgtaagtactcactgaattgaattatttgtttaaccacaaaaaacaaagtgtgcctgagttcgaatcctatccccaccacttatcagttgtgtgatctggaacaacttacttaacttctctgctttcatttcctcatatgtaagatggaaaataataatactatcagaattgatgggagtattaaaccagtaatatttataaagcatgtagaatagagctctgtacataataagtattatataaacaatcttattgttaatagtgtagttctttggatatttggatattaagattttttaaattcaagtttgccccagtgattgcgaatctttttgtatatgtaattgcagtttatgatgtctctggagcagcaagtgacagaaattgtgtggttctcagtgatattcacatcgacatcatggactatatccagcctgcaacttgcactgatgcagaattccgtcagatgtgggccgaatttgaatgggaaaacaaagttagtccttgggagattttctcatattcctttatctttcttccttttgcctgctgttgaggagtctgctaataaaattaatctcgctaaaaagtgtttaacatgaaaagcaaatagtctttcagtatctgttcttgcaaattagccttaactaaaaatcatgtaagtagtttggtaatttgctgttataaattgattagagtagcagttctatagccaatctgataggtttagacattataggtaatattccatcccttctatgtatgaccaagagcttaccatttaatctagtgcccgaaaaaggctttacaaagttcatggtctgttgaggaactttgtccctttgagccttgacttttattagaaatattctatatgaggctgggcacggtagctcgtgcctgtaatcccagcactttgggaggctgaggcaggcagattgctcgtgctcaggagttctagaccag

SEQ ID NO: 64357 - DNA, 1050 bp, Homo sapiens
tgtatttgaaaattattaagaattacaagggtcaggcatggcacttcatgtctgtaattcgagcactttgggagggctaggcaagaggattacttgaggccagggattcaagaccagccagggcaatatagggagaccctgtctctacaaaaaaattaatattagctaggcatagtgtcatgcctgaagtcctagctcctggggaggctgaggctgccagaggatcacttgagcccaagagttcaaggctgcagtgagctatgattgtgccactattctctagcctgggcagcaaagcaagaccctgtctcttagaaaacaaaaaaagaattacattcttttaatttatttcttgtcctagataattttcttttcgaaaattgttagttccattttcttttttttttttttcttttagttaatggaatttctcagtgacaacaacgaagcagcagctgctgatgtcttggagtttgttcgtgaagccattcagcgctttgataacctgagaatgcttattgttgagaagatgcttgaagtctttcatgctattaaatctgtcaagtaggtttaaaatacatttaaatgtaaggtcaagtaagcattttatcagtttttatctttaaagggtcagttgatagaaaatagaatggagaggacaatcaagccaaaataagacaagtttgtacaacaagcatctcgctaactccactctcatttagtctataataaatggcccaaaataatttttttaggagtgatttagctcagggtctctattctgattttctctaaaacattgtgaatcttaaagtaactaaagagcatatttttaaatggcatcactttttggctattactattatttatatcttcctttcacatttaatgaagagaaagattgaaaatgcaacctaaatctgtctttcccttcagagagcctttgctaatgagaaaggactgttgcatctaaattttgcttcatttaaagcatctgatggatagtctctaacagacttgaaatatgtctcaggaaggaagggacaagta

SEQ ID NO: 64358 - DNA, 1113 bp, Homo sapiens
acaactctgggtgatctttatattcttgttgtttgtgtactgcaatgcagatgagttagactttgcctctaaactgaaatatgcttaatcgatgtacttcttgggattcttttcctgcatttttctggcttgttccttagttttaacccttaaattttggctgttagtaagtatgtctacctatagcagctttttttcatccttttaatttgtaatgcctctaatcttctgtaagtttgaaaaataacaagggactagaggaacccattcctcagaacaaaatgtataatatataaactctagtacagggattaattaatgagtgtattttggcttcatgggagtgtgtgtgtgtgtgtgtgtgtgtgtgtgtggtgtgcgcgcgcatgcttattttcaaattttatgatagatgaataacttcttaaaatgtatttctttttttatataggctgctgctcagtgttacattgatttaattattaaggagagcgacaacaatgtaaaactcatagttttggatcgcttgatagaattaaaagagcatcctgctcatgaacgagtactacaggtaagtgttatctgaaaaagagagatcctaaataaaatgtttttcaaatttaggtcattctcaagctttgcccatcttggttaacctaaatgcttggaaactgagcagtttatattttgatcagctaaagtgttaactattgagtcatcatagccttttggggtattatctttaccacaaaaaatatttctaaaatggctggacgcggtggctcacgcctgtaatcccagcactttgggaggcagaggcgggcacatcatctgaggtcaggagtttgagaccagcctggccaacatggtaaaaccctgtctatactaaaaataacaaaaattagctgggtgtggtgaagtgcgcctgtaatcccaactacttgggaggctgaggcaggagaatcacttgaacccaggaggcagaggttgcagtgagctgagatcgtgccactgcactccagcctgggcaacagagtgagactctgtctcaaaaaaaaaaaatgtttttctaaagtgaatcagtattatatttttttatcttttcggtttgta

SEQ ID NO: 64359 - DNA, 1001 bp, Homo sapiens
gttaatgtgtccttacttttgttactttacattttctttttctctttcacttgtgtatagcatacacattttaagtcatcagaaaaccttttacgaaacagtaaaaatataaattatgatgggatgaataaataagtgcacagctgtaaaaattattttgttcacaccatcctatctagtaaagccatttcttatctatgtttttgttggcctctaacttgcttctttctgaaattactgatgttgtgtcatagtgtctcatcccattttgtctgatattttcatgtcctcataagactgttcttagctttcatattgagaaaactagcatcccataagctgacattcatgaaaaaactccatttgaaaacaagcgttcctgaaatcggttgaaatgttaatgttttcttctccaggtctgtcatgctaatccatcagaaagagctcgttttattcgctgcatctataacttattacagtcatccagccctgctgtaaaatatgaagctgctgggacattagtgacactctctagtgcaccaactgcaatcaaggtactgtgtatttcttttggggccagattagatgatagattttctgtcttagcactcatgatttagtgacatttcaattcactatgtggttacatggcacagagagaataactacaaacttataaaattatttgatgccttacattgttcagccttccttcttttcttccttcctgctttcatacacacatatatagatacagacagagaatgacagtacagttaacctctgacaacacaggttcgaactgcgcaggtccacttatacatggactttttttctacctctgctactcctgagacagcaagactaatccctcttcctcttcctcctcctcctcctcagcctactcagtgtaaagaggttggggatgaagacctttatgatgatctacttcctcttaatgagtagtaaatattttccttatgcttttcttaacattttct

SEQ ID NO: 64360 - DNA, 1021 bp, Homo sapiens
ggggcgtaatcagaaatagtccaataaaatttattgatacttttactggagagatgttttcagcattgtagttctgtatattacagtgtccaatatatgaggacacataggagatttttcttttaggtctcagtaataggaataactatacacctaagcagctggttttgattgtatggataccctgaatcccataacacatagtgttttccctctttggtttagctgctagaaaatcagaccccaggtttgtggctcatttccagaaaatatatttaactttatgtcttatattttatatgttaattttattcttgatttttttcccagttaatttctctttgccctgatctcctcatttgttttatattgagttgtaatgtgtgtattttttaagatgcattaagtccttctattgaatgaggtggagaatgataaatatattcttattttttttaggatcgagctttggattacttaagtacttgcattgatcaagttcaaacatttggagacattctgcagctggttattgttgaactgatttataaggtaagaatgataatctatgatgagtaaaataaactcagcagtttaagacagggttaaatactttctttctgggataattattgctaggataatatattttaatagtataaatattttatagcatagcctattaaagcctttgtttcttttacttttggtttattgtattttccaagtagaatacttgcttatatcctttctaaacctccataaagattttgataaaaattcatggcttgagccagtgtagctgcacataaatcattgtgaacttcccagtcactgaatagattataattaggctttaaaataaaattcaagattttcttgagcatacatcagactaaaatcaaacaaaaaagccttaaatactttttatgttccctgtttgtaaaagagaatagaaaaactttaaatgcattaatatgacattgtaggccattgacaggaaatctaaaaccagctaaga

SEQ ID NO: 64361 - DNA, 1122 bp, Homo sapiens
gcctagggctgctttgctggaggaaggggaggaggaagcgggtggggcgaggtgggggtgcagcgcgttgattaagggacccgcggacatagagtcggaacccaccaaggaccgcgataaagcgctttagggttttggcagagtattcaggcacaaggtctcttaacttgagcatgcagattgtgtgttgtgtaaaaaccatacggtccataacattgtggggtgtggctggggggactgtcactgttctgtgggccttcattcggctatacagcattctcaaacactggaccgggatgcgatgagggagtgatagataatataccttatgccagagctgataatgtggtttttactagaatttatttttatgggaacacgatatagattgacctgccctttctaatactttaaaaggtcactataggtacttgtttgtgggttttttttttttaatttgtaatgatatgtctgtgtttatttttctagattttctggcatccttaaatcttgtgtcaaggattggttataatataaccagaaaccatgacggcggctgagaacgtatgctacacgttaattaacgtgccaatggattcagaaccaccatctgaaattagcttaaaaaatgatctaggtaaacttcgatattattttgagaatgaaatgaaaaaagaaaaaacaaaaataaaaaactcatatttcatattcctttataattagaaatgcttaatttttgtctaaagtttttctaggatctcttcgatagaccttttattaaaaatgcgaacttctttaaatattggttgtttgaaatagaacatctcagtttatcttagtaaacctaaagaaattgtaatagtttagatattcctcaaaatgtcataatttttgtagacttcaatatattaatgtggctgattattttctctaggcaacaggttgaggatgtgtattggaatatcttaattccatcgtgcacttaacttcatgttacttagcttgtaaaaccaaaagaactttgttctttggattacccacccaaacaattaggtgaacactggaataaacatgtattttccagaaaagtttaccttttcattttttatgcatttttgcaaa

SEQ ID NO: 64362 - DNA, 1078 bp, Homo sapiens
tattttatgcattcggcatacctaactttttcttactctttttttttatatttctaggctacacagttggtctgctagtttatatttattggaaaacaaacaaacaaaaaaaagcttcaccctaaacaatgttagagtaaaagcaaacaaaaaagaaaaagaaaaagaaaaagaaatctgcatataagtggaccctcactgtttaaacctttgttgttcgagccaactgtattttttttaaataaaaaatctttattccctcaaatcatgagcactcaaggagaaaaaaaatactgctcagaaatgttaacaggacagtgaactaaaactgagtattcagaatatctctttacccctttttctcaatttttaataacgtaatatttgtgattagatgtgtatattgatcaagtgttcattttacatattttctttttttctttccctgttaagcctgctcaacctgctgatgaacctgcagaaaaggctgatgaaccaatggaacattaagtgataagccagtctatatatgtattatcaaatatgtaagaatacaggcaccacatactgatgacaataatctatactttgaaccaaaagttgcagagtggtggaatgctatgttttaggaatcagtccagatgtgagttttttccaagcaacctcactgaaacctatataatggaatacatttttctttgaaagggtctgtataatcattttctagaaagtatgggtatctatactaatgtttttatatgaagaacataggtgtctttgtggttttaaagacaactgtgaaataaaattgtttcaccgcctggtatattgggtttttgtttttttaagtagcttcaactctatatagtagtctgggattacaactggtcatttgcctaattaaattgccttatttttagtgatggagaaaaataatacctcttatctgtcatagccttataacagttctccagtgtatgaactggctgcatgagaatccatggagatttggtttagaatacaaatttcagggttcaactgtggtgattttaattaaaacttaagaaaccaccacttc

SEQ ID NO: 64363 - DNA, 1142 bp, Homo sapiens
acagatggagaccatcctggccaacatggtgaaaccccgtctctactaaaaatacaaaaattagctgggcgtcatggcatgcacctgtagtcccagctactcaggaggtgaggcaggagaatcgcttgaacccgggaggcggaggttgcagtgagctgagatcctaccactgccctccagcctgggcgacagagagagactctgtctcaaaaaaaaaaaacaaacacaaaaagggagaagtgttgattatttggttatctattgctaggtaataagctaccccaaaacttaggggctagaacaacaaacactacttctcacaattttgcggctgactggggctcacctacatggttctttgctggtctcacctgggatctctcaaacattgcagtcatttgtggggtgcaactggaacacccaagataacttcagtcacatgtcttctttactcacaccttttaggtgtcttagaggagcatctagaaggcagagacctctgctaggatgactgagcctctgtccacgtagtttcagggccgcttcttcagcagggtctctctagcatattggcaactcagggcttgcaaaagtcagaagtgaaagccgccaggcattcttaaggctgagatgcaggactggcacaacatcacttgtacacattctgttggttaaagtgagtcactggcctggcccagattctgtttgagcagagactgggagaaatgctcattgggggccagctttggacactaagatggctcttcataaagagaaaagcatcaagaagtgaatctcaggtgaaatatgggtctttttgctagatgtttagaatatacatttgctatttatagatgcttatttgatagcagtgtaattgaaagtaaaaaagaatctagtatggaaatttctacagcatgagtttttttaacttggaaaggatattgttggtactatttgggggatcaagatttgcaatatttaaactgtttttggtaaaaactagcactgttgggaagaatgctgtggaataccacaaactagtttggcaaaggggaaaagaatgtctaaaaagtgctgattgtattttaaacatagtagtgataatacaaggaaagcttttattcctgagcaatgcaaag

SEQ ID NO: 64364 - DNA, 1069 bp, Homo sapiens
caatgagcaaatataaggactaggattctacagaacacattctacaaaacttggagttgtataatttatagtcgggattttgatttgacctagcaaaagagaagatcaaaatcgtaacaaaaatcatgagtcctctcattaaataaaataagaatcagcaatgtcatagaatgctattaaaagattatatgactagcattaaacttggctgtttttactgtgataaatttagtgtgtaactaaaaaccacaatttgagactgtagatttgataaataacagaagcctagcataacaatgaaattaagaaataattgttaatttattacatataggtaatttaaatgaactagttaaacatggtctgcgtgccttaagagagacgcttcctgcagaacaggacctgactacaaaggtaagtattgtcttttccaattgtagatattaacgttacagtttaaacctttattgcataaatgtaatggagtatatatgcaacattctgtaatttgggatatgattgtcttggcagattcttttcctttaagctatttgctaagtaatccaattttattttttaaacatttctttttggtacaaagcagtaaaaccagtaaatttcatgcaaaatgtccttcattattttcagcagattggcatatcttggtattatttagttaacaaaaatatatatatattgagcacctaccatgtgcaggcactttctaagcattgaaaatacagtaaacacaacaaataactttttcttcatggaacgtacatcctagtagggaaagatagacagtatatacataagtacattatatagtatattagaagaagataaatgctatgtaaaaaataaaaaagcgttaaaaggagaaagaatgaccaattggatgtaggtaggtgtaatttaaaataggtggttgaggatattctcaccaagaaaatgaaatttgaggaaaagatataaaggaggtaagtgagtatgagctatgcagatctagagcaaaattattctaggaaatacaaatgcaaaggccctagtatttaaggcaaggaggcca

SEQ ID NO: 64365 - DNA, 1201 bp, Homo sapiens
ctcctctagagtgcttcttatgaatagaagtaacagtggcagaaacacgtaaagatcccccctgctgtgttttccatttcttatatttgctcttttggagaaatgttagtctgctttcaagaaaaaaggacagagtagataatctttttgctggttcgagatctagaattacgacaagcttgctgacagtgggaaggataagagaagagaggttgctgtttttcttttgttcagccttctcttctctgttccataagtgctctgatacaaagattttctagagctaaaaaatgtttcagtcttttttaaaaaccttatgtggctccagagtttagcacaaaaacgcacccttgcaggcatgtctttcttaccttctgtttttcttatatggatgttatccatgtaaacgcttggaagaatttgaagtgaaatcaaacaatttagattggaatagttgtctataatttgaaattactaaactttttttgtttcttttttagtaattttatgcgtcaggagtgtttggattccagatttgtattcgatagaccactgcctgtgtctcgtcttgtatctctaattggaagcagtatcctttttatgttagcatttatggatatgaactttgaagggttttgatacttgtgttaattattaggaatataataataatatgacataggtaagattgtgaaaactttaaaacaacaaattggattgctctttcattagcctttataagcaatttatatttgctagacacaaataagcccaacttcaggaaaatcatctaagcatctttttagaggggatttaaagtttcttaatggttctagatgtcccaagaaatcctagaccccttgtatccaaaacaaatcaggttttagatgggaagaaattattttgctggcactctttcttaggttcggtagaaagtcaaacattttatattaggccaaagaaatagtgtcctattgcattatttctctggtggattatgcaacaattaaagaataagccagagacctttgttaataatgtataatttgaaaataaagacagtacttcattccttgttaaaacaagctcgttaaccagtctaagagacccagataccaacacaacgatatggccggagaccatatggtgttggtctccttattgctggttatgatgtaagttcattgaatattgttatatg

SEQ ID NO: 64366 - DNA, 1027 bp, Homo sapiens
agattgtgccactgcactccagcctgggtgacagagtgagaacctgtctcaaaaaaaaaaaaaggtctcttgattaaaaaaaaaatcagttgagatttaactgtgctcacctgatatttgaaaaccctaatttttaatttataaaagatcttctaagatgtgtgttttttgttttttttttctttagggcaggattcatcaaattgaatatgcaatggaagctgttaaacaaggttcagccacagttggtctgaaatcaaaaactcatgcagttttggttgcattgaaagtaagtacagtaataaatatgtcttcctctgtagaaaacaatgtaaatttcaccatagaaaataaggttgtaaacttatttttacatttgtctcttttttttttttttttacatcttataatgtctctatttagagggcgcaatcagagcttgcagctcatcagaaaaaaattctccatgttgacaaccatattggtatctcaattgcggggcttactgctgatgctagactgttatggtaagtataatcatgaaaaataaacatcctttttgtttcataattgattagttttctcaaaaagatccagataaggtattttaggaagttgtctgccaaagttcttgtaaattaagattatgaataccttggtggttttgagtttgttattaaattttccattttttgatccctgtaggagtaactaataagattaaacattagcacttttcagaagtcactgagtaatgtgatgtttgttaatacaatgtatatcgtttgagaccctgttatgtctaagaagaacgtgatacttttgtctggtttctaaggacaagctgaaccacacttgttttctttgtgcttgttttcttcaatacatcagtatttattagacatttattttttgcaatgctcaatactggatactgcagggtatacataagtgactcagacatggatcttgtcttaagggaacttgaaggcaagtttatctataaactcaaatgtagtttatctat

SEQ ID NO: 64367 - DNA, 1013 bp, Homo sapiens
attaaaaaataagtcatacatgtccctaatcataaaaacagaaagggacgtttagataaagagctgtgggagtatatgttagggggatttgggaagaaaaggagaagacttcaagaaatcgacatttaagctaccttaaagaaaaggaagacttttaaccatttattagggcccaataaaagggagcagcataagcaaaaataggcaagaaagttgattgtgaactttagtaattgagcctaaaggggttgatatggagggtgttagaataagagtttggaaaaataggacccatttagatctgcttctccctctcccacgagtttatggtaaatgtagaattggcttacatctgagtacagtagtaatcttccagtaagactgcatgaacagagtgccttaacattgaatggaaatacaagcatatttcttaatgaatgttaagagttgggatttgaaatgttcttctattaacaggtatttttttcttttacttttagtttcgaaatcagtatgacaatgatgtcactgtttggagcccccaggtaaaataatgtttttaaaccttttctgtgaagtggctttttgtggctgcaatatatttagaaacttgtgagagcgtaggcttggggaaaatggaatataattattttagacgttcttggaagttgcatttataattaaaataggtttcctgatggacctagaggacattatgttaagtgaaataagccagaaacagaaagaaaaatgtttcatgctctcacttatatgtggaatcttttgtttaaaagggcaaatatatatatagagagagtaaaacagtggttaccagggtagggggtggcagtggggaggaaaaaagaggagatacaaagtagcaaatatgtaggttgagcaagtggaaagatctaatgtacaacatgaagactacagttaataatgcaggtagtgttttgtattcaagatttttgttaaatgagtagtttatagcccttgccacagcagaggaa

SEQ ID NO: 64368 - DNA, 1027 bp, Homo sapiens
agcattccaaagtattttgccaaatggcaaaaaccgcagttacttttgcaccaaccttaatgcaaataaaagcatgtacacaaacaagatactcgaggaagaatacagctgacacacagaaacggatcgttatcttgtggctttcctgcagcctcgttcctttcagtcacataacaccccaaatctgtggacggttaatgagagctagtatcacccagagtcacggctgttgactcggacgactttagatgcagcccgccagcgggagaaactggagggaatccgccatacacaggaacctagaagggctacgtgacaggggctgccccgcagctctcagccgccggcactcccagccaggttttcccgccagtctcagttcctagatcttccgaggctccgcccgccgccgagcggtcggaaagttttaaggagggggaagtgttgcaagcctatcgatatctctggaatagactgcgctaccctgcgccgccgccgtcaaactcccgcagacttctctgtagatcgctgagcgatactttcggcagcacctccttgattctcagttttgctggaggccgcaaccaggcccgcgccgccaccatggtacgttgaatcccgatctctggaaggtttagggcagagctctggtgactgggggatgacgagccacctctcctgtcatccttagcgtcgcccggtgccacgaggtatgagagcctcggcagacggccgggctccggcagtgattcagcatctccggcctggccgggctaggggttatcggtagccagtgcggcctttccaccgctttcgcttcccggggagcctccgacacttcctcctcggtcagctagatgagttcgcccctcaggttccttcagtggagtagattctgagcggtccagaatagctcctagtgctgtgtatgggagaggagaagacagagacttgacttggaggcctacctgtaccaccagtgcggacttgacccccaggtttgtgttcctggacagcgtccgttttc

SEQ ID NO: 64369 - DNA, 1129 bp, Homo sapiens
ttccctggattcagatctgcctttcaggagttcaatgagggaaacaaacaggtaggctaaaacaattggaatacaaagtattaagtacagttaaaaagagatctaaatggtaccacagaagtggaccagtcaggacaggaaacagatggcatactgaaaaggagtgattaaagagagtttaataaggaatttatttacaaaggtataggcagttaaggacagtgaagcatcaacagtgaaaattgctcctacacctaggcctgaagaaacaaagggaaagagctattaccaaacttcagaaagcaagctataggagagagctacctcacaggaactctgtttcaggtaatgcagcccctgccaatccaaggcctggaagagagggatgtaggaaaatattacaattgtactcttctgtcctctgagtttctttcagcgtgtcccactgttcaaatctaccagaaagtcagaggacaaggaaacctgttactgtcatccaaagaggtcaacctctgaggacgcagggcaagtagagaatgctggagaggggatctcaagtggccagcaaagaacaacccagcacagaagcgaagggactaacactttcttaagatttcataaaagaccttttaaaggaggttatatttgagataggcactgaaggataagtaggggtttaccaaatagagaagtgaataagacattttaggcaaaaggatagcattgtcaatatctcatagatatacaaaagaacttgcatgggctatatattcagacaagcaatcccatttggcagaagcacatgatgcttttggagagatgggtctgaaaagaaaagttaggatcagattataaaggctcttaagtgccatgctaaaatgactggactcgatcctgtagttaatgaggatccgctcagaaactttcagagaaagagagtgacatgagcatagtttaagttagaaaaagatccctccaatggcagtgtaaaggatggactagagtactgaaagactaaaggcaggaagatcattttggggatctttgccatagtccaggcaagataaaggtgaatggaactaaagcagtggcagtgataaggaagcaaagattctaggcattttctgaa

SEQ ID NO: 64370 - DNA, 1030 bp, Homo sapiens
ttccctaacttcttttacttctcctacgtaccatcccccctctaccagcatttaatctatctccattaatgaatgcattcattcattcagtatttattatgtgcccggtgtgctggacactgtgctagatgacaaagatataatggtgaagatgtggttccttagtctaatgaaagcaagacagtaagaagactattacagcccgttgtaacaggagctgtgatacagaggtaataatcctcagtgtactctgggatctcaggagcccagactacagtaggagtagcaggtaaggagtaatgctctggaggactcagagaaagtgatttctaggcttgatattaaaaggtgaatataagttacctaagtaaagtaagtagaaaagataatctgggcaaaggaagcaagcagtgcaaaaatctggaggaattcagctatagtgcatttggataactcaagtatcctatggcttaagtgtaaggtatgatgggactacagagatggtgtggccctactaatggaactggagtttgttattatttgttacataaaggtttatgttctgttatcatatttgcttatttacatggctagctctgcaatatattcttcaaacaagaattctctcttattcaatcttagctcaatcttcatgcctatagcaagtacttagcctacagcaagtcctcagaatttttcaagtgtgttgatatttctcaaaactattttaataaatcagactttaactgtatttcctttgatttttggctttattagtcaatgaattttaatagaaaactcttaaaatagaatataatagaaaaaacttttcatattgtgattttaaaatatttttcttaacattcatttgcaccaaatcactaaaagaaccctttttcctagatttacaaaaacaaaattacacatatgtttatgtcgtatttcactttcaacataaaataaatgtttcagagatgtgtgggtcattttttattttaactcaagtgacagtacctgaattctttggctg

SEQ ID NO: 64371 - DNA, 1054 bp, Homo sapiens
tgagtttgtacagaagggcgtgacaaaactagcaccagcattattgaaattcccgttataaattccataggaaataataaattgatttgaaaattagaacaaattcagattaacaggtgtgtgtgtgtgcatgtgcgtgtatgtgtgtgggcatttaatctgaagttatcatctaaagtaggattggcacgtgatcatggaaacggtagggagtagaaatccagttttgtgagtttttgtctgggcctagccattcatactctgccattaagcaatcctataacttttactggccttgttcttctcaaatgtgaaatgaagcaattaatttagataacctttgaaatcctttctagtcttaaaaagctctgatttctgtatgccaaaaatacataggcatccttaagactcacctttcaggttgccaataatataataagagcaagagccaagagcaaccttttatattatttatactaccaaactaaaccaaagtctcagtgttgacaagtaaaaataaagggattgtgtcaaatgactgttttctgaaaaataaaatccaaagccctcttcacaaaatcgtcttcaagattctctagccgccttttagctgtcattcaggtttttataaggctacaagcccaactctttcaataacccatagtcggagtgcatccctctgaaggccaacctagcacctgagagaattctaaaataaagtgtaaggacgtgaccaaagaccatcagaagtttacttaactaaaaatatgcacaaaaagaatgagctagctatgtttatagtaactcccttctctgtttacagtctttgtcaaagattattactaggccacatttcttagaggtcagattatttaattattcccttgccaaacttaaacaaccaataaaattacttagttctttaggttcaagaatttatgaccattatctgtcatgaaaaaaactgaagtcacagtatacctttgacttttcccagcactttaccccatccttattttacctgactttgccttccctcacgtctttttttttt

SEQ ID NO: 64372 - DNA, 3150 bp, Homo sapiens
agagtaatttagatgaaaagacagcagtataggtgaatataatattttacagattaattcaatgttctttgtatttgttgcataattaggagactgttttaacagtttaaactttaaacttggtaattcctggaaagatgccaaaagcatttccattttttcaccataggtttacatatttttgttttttttttaaaagggattgaaatcattagcaaatgagtttacatctttatatagtattggaaaagctacctgttgtacatcaccaagaaacttaataagtatagttactattattgagcatttatgaagtgcaaaacattttacacatactgtctcagatcctcacaagaacggtgtttggctggtgccattaacctctagagatgagaaatctaggcatatagaggtaacacagcttcacatgtctagttaagtggtagttctgggatttgattagatttttgagttttcagtgctgtgttctgcacgactaactggtaagtatagtggttttaagtaggagagtaagagcgtacaccctaggttttctgaatttttggattagtgatatgctttacactgggagccaatatgttggagacaaaagtttcttgtccttaatgcatttgatgcattcttctctcttcttttctgttctcttccttcacttcttgtctgtcttctcttcgaaataatctccaagctactacattggttttatgacgtgttgaacactgatctgtaatgttccaatgacacaatactttgcttcttgatttggcttcagaggccacttctgtggtcaaccacttgaaaaagttctgttatgccttttgttttctcagtttactaccagtgataatagatagtactttaggaaaatgtgtgtcgggagaaaaattgttttgagaggatttattatggaacaaagtggtatcaactattttcatagaatggaattaattgaattttgaccaaatgtgaacaaattgcattttttaacactggaaaattgttttagcagtttcatcacttttgtgggcaattttcctgaacttaacagttacagtttaacatattttaattgtaatttgttggtgcggtaattctgtctgtcctcttgtaagtggaaaatttctaggcttcttaatcctagtgtggtgctctttccatcacagcatagctatatatgtatatagctataccaggtagcttcaattattgtttatattagaggaaaatacaatttgtgcttctaaagagggtgtaatttcttagtgcagaaaacccttattcacattctacttctaataggaacatttttgcacacttaaagtatatgtgaatagttcagggtttatacatgcctacctaatattctgtctacaaaataattctattttgacattactagaaaagggtatttttaacttagcagatactatcataacaagaatgtttatttatgcttgttccagaagtctaacagtggatttgtgctttttgtttgcatgtatattatgttaaatatattgagaggaaatcagtacttttatggaagtaaaagatcaggagattttctgattttcaaagtgttgtatatgacaatggtaaaaacacttgcttgtttcagaaggtgaaggaagatgaaaagattttagatgggacctgacataggagaaaatgtcctggattcatagacagaggattgaggagtcttggcttaactgtttaattttggaaaagtctgtgaacctttctgaatcttagtatcctgtcaaattaagggatcctagtagatgaattctgtaatatcttctaattctaaaattaaattatataataccttctaattctaaaattaaattcttttagtttacacttttggtaaggtagaaattaaaataaaataagatgtcacaaactagtagttcttgaagttttacttaaatgttgaatgttgaccttgctaacctatactttccaaggtataataattgaaaaagatgagcaaatatcctgtatattttggataggactttaaaaaagtatatgggggttcatttgtaggatggtaacaaaattattacatgttcatttccttaagaatttaaacatttttattaacctctttgaaagccacttaaacttctatcaatagaaatgtttttaattgtagaataatagatttaaagtagtttttaacttttgggatgttatattactgtgttgaaaaataatggcatgtttgtaaaacatttgattttataattagatttataatatttgatttaaatgctatatatgtatcagttcagttcttaactaaggtttttttttttttttggcaaagcatttagagatttgaagcccaaatctaggtgctgttaatggtgttctgctttggtgggttaatggaaagaagcactgagtttgtagtcttatctgccaagaatcagcagaaactaataggaagtttaaaaaaatcagtcgtctgcatagaagctttaatcagaattaaacaagctacatttctatgccattttaattgcatattctacagtgcaattttcagcttttcaatgagatcactttgtgtttgactaggtaaatacaaggttttgaaaggcataagttagtgtgtgagatatttttctatacctttagtgctaagtgctttctaaatggttaggtaaatatttaaaaattccgtggccctaatgcccataaatattacttaaagttttaattttatttgaaaaaggtatacatatgtagtgtgagagcctaaaaaagagagttttttttaaagtgtggttatttactcacctaaggaatttgcaaggcataattccctgttaatttctttaagaatactgtagtatttgtgaaatttattttatggcttcagtgagtgagtgttttattccaatttcatgttactattttgtggtaaaatatcagcctacataataattttatactttattttgtaaatatagtatgtactctgccatgagtattatttttcaaaaacacagatttgatagagtcactctgttttaaaaatctcttatggcttttcattgtccacaggatactgttcatgcccttgacccttgcttgcaaagtccttcataatct

SEQ ID NO: 64373 - DNA, 1050 bp, Homo sapiens
taattgaaatctgctcattatatattgtacaaggaaaataaattgaactccagagagataaaaatactggctgagggttattctgtgagatatttggaaaacggggactagaacctaggtctttactcctagtccacttttactttccacaaggagcatatatacttcccatcatagccttccaaggctgtacttaattttgccaggtatctccaattatgtgaaaaaaggcagtgtctctggttaaaggaggtaggcaagaagtgagagagagtcagttaagagggactcttgaaaatcctatagtttgtaatgaccttgatgacaaacttctgatacagttatttcagagtaatttgtaaggatgcagctggtcgcaaactcatgtacctacataacatttattttatatgttgaagacagaggggagggtcaaaaggagagtaggaagaatggaagtgaactgactattgcctgcttcgcttaaaggcattcagtttaaacaaaagaaactgaaaaactgttagctaaacaacattttggaagaactgggttctgtctgtgggtggttcctgacagtttataacattgacttgttgttcatcttgttatttacaagctgatctgcacttatttaggttgttgttataagcctgttcttagaacttggggcagaagagtgtatctcccacttttttttttttcttttacaaccaacaactttccttctggcattgatttacctagcagataactttacagatttctcctcctccatctgctacagcacgttctttggccacctcttccttacatttcatacaacttgcattcagcaatgttttttttttttttttttgagacagggtctcactctgttgcccaggctagggtgcagtgatgtgcaatcttgcctcactgcaaactctgccttgcaggctcaagtaatcctcccacctcagcctcctgactaggtgggactgcagtgcgtgccatcatgcccagctaatttttgtatcttttttttgtagagaaggggtttcgctgtgt

SEQ ID NO: 64374 - DNA, 1262 bp, Homo sapiens
tttttttgaataatcaaaatatatacttttcattatatagattcagaaaggttctgaaaacataggagatattttcttttaaagctgcactcagaattttatttctgtgatactcaggtgaaagtatgtagtttcccttttcatttaattttattaaaattgaattaaaattttctttctttttctttctttctttctctctctctctctttctctctctctctctctctctctctctctccctccctccctccatccctctctctctctctccctctccccctctccctcttctctctctcggagagaacatgagtattttcaggaaattagagatttgaatttgaaatattttttgtatatcaagaaatccatcaatctttgtttaactatggaatcttcagaacatcagagttgcatgtttttaagcttagagaaaaatggacacactgaatcttagcaactgaaagcaaatagacatacgtcagtatctgtgtatagtgctgacacttatgtcagcactttatcctatttgcttgggaactcttgtttagtagtgtgtttacaatgaggcctttcagtggagagggctacatgactgaatgtgtgtgtactctgtattgtctgagtacattctatgtgtaaactttaagatatgtttatagacatatttgttattgacatttagtcttgtatttattttatttctcagaagtattttatttgttcatttttgataactagcactcagccattcactttttatttctaattttggtgtctttgtgtaggtcactgagtgtgattccagataagttattacagctagatctatgtggctcatcagccacatatttggtttttttgttgttgttgttgtttgtttgttttgagacagtcttctctgtcacctaggctgcagtgcagtggcatgatcttggctcactgcaacctctgcctcctgggttcacgcgattcttctgccttagcctccccagtagctgagattataggtgcccaccaccatgcctggctaatttttgtatttttagtagaggtgaagtttcgccatgctggccaggctggtctcgaactcctgacctcaggtgatccaccatcctcggcctcccaaagtgctgggattacaggcctgagccactgtatgcgtcccacatatttgttttagagagggaagttcgtgcaattaaaggtggaataatctggatttgtcataagtcctatgatttcattgtgctttagtt

SEQ ID NO: 64375 - DNA, 1046 bp, Homo sapiens
tttgaaattgctatctcagtggcagtatttcttgacaaatacagtattgagtgcttttaatgatcttttgttaattatatatggctccgacagtagagatttgagtttggcttaaatgaataaatactatttttacccatggtcaccttaaaaattggagttaaagtgttggcctgctggtctttttccttctctttagttttgctagtaatagtaagttttatttgccattgtataggcttaattggttaacatgtggctgctaatatttagtaaggttaatttttagtatgaaaattaagagtttcattttggtttttatataaagtgaagctatgtattaatagatttggtagttaattatgctgaataacaaaagtctaatatttggatgatcagtatattagtagaattagaaatacttgctcttgaagttgtttaaaaattgagatagaaaaagaggaagttgattttattaatgctgtaaaactgtcaaaaataagtatttagaaaggcatatttgagtgctaaattacttatgaactgacaactgttaattctttgcttaaaattaaaatcaaagtataatgccattaaaacaagtatagaaaaggcatgccagtttcccccatatttagggtattatttttcaaaacatttgctgaattaaaaaaaggttacttaaatttcaaatgtgtgttttcctctaaatgaaaattttccctttttcctcagtgtttttctgatgttcaagtggcagtaggtgtgggaagccgttgcaagcagtatctcccaagagtgagcttattctcctattgtagatatcaggatatcattgctttccttttctgcactgtatcatgttttagttattttatggaaatctatcagagtggaagagcaaaaggtcagttggaagagaaaaaagatgaaactgaaactaaaagtggttaaatatacttacattaggtatcaattactacttgtatattatccatgttacattttaaatttgcattggcttttttgttgttctttaggtacct

SEQ ID NO: 64376 - DNA, 1059 bp, Homo sapiens
tggaatgctcttcccccatattttcacttagcttgctccctcacttcataccagtctctgttcagctgtgatcttatgaaagaggttttccctgaccaccctatataaataagccttctttgacacctgcctatcattctgtattcccttagcccatttttatttttcttcatttcacttatcatctaatatgttcttgtttattattttttctttccctctagaatgcaaagaccttgtctgtcttattaatgtctgcatcccaacagccaagaataatgcctggtatataatatgtgggttccataaacatttttttttagtgaatgaatgaatgaatatataagtctggagctcagaggagatttcagtgctgaaatgtaaatttagtagtcaatagcatataaatggtcatttacactgtaggactggatgaaattatcaagagatagtatggagccaaaccagaaaagggacccagattcaagcctttcgctgatttttcatttataaatcagattagaaggacccaacaagttaggaggaaaaccaggagagacatatcattgaaactaagagaggaaatgttctaaggacacagctttgttggataatgcttacaggctggattaagatgtgtttgtaaattaaccattggatttgcaaagatgaagattgttttgtggcttttaagagttatttcagtggagtggttggggtagaaatcagactggagtatgacaggtgaggtagggagagtgaagtagactcctttgagaagtcttgctgtgaagaacagagaattgaatgatcattgaacggaggaaatgtaatcaaggaaggacttaagtattcccccagagttttctgaatttgcaattcattcatcttgattatctccccttgaggtctagctgtcatcagttaactggaggattgattcataatccctttttgcaaggtggcaaagcttacctttctcctcaaacctatctaccaaagttctctttcttctttaatttcattagagtccttggtaaatgattcacatttcttttt

SEQ ID NO: 64377 - DNA, 1021 bp, Homo sapiens
gagtctttaaaggttaccaataacctcatgtgctagttctctcagtatcctgtgactataattcattctgactaagaacttggagtgacttacctgtcttgggctttagttctggcattacaatgtttgttcagaccttttcagtttctgacagagaaaactgggacaatctaggagttaaagagttttactttctctttagtggtattatactatcttctgaaataaggctttgttgttgttgttgttctatcttggtttaatctatcaaagaaaagaaaaagaaagaaaattccttttgttgtctcttgaactttgcaagccataggtaattttgaggtttgggttttttgagttcactggttaaattctttaatttcttttcccagctctcttctaaagttcctccctccttcaagttttatgctatggagtcatggctgtcttttctgtgagaacgttgaaatgttttattaaattttaaggagatccattgaatatatctagactttttctttatttgtggccatcacaaactctgagctgacatggtcactccttgcattttctccttgattctgataagccctggaatccttcatttaggtattacttgtctttgtacaagtcaaaggctactgttattcagtcacttttgtcctcctgccccattcttaatcttttttcttttgccttacccctcttttccacttcttctaaaagttatctagtattctagtataatctgttgacttttgctttctaaactatctactgtttgctctcatttattccattgctttgggatgcttattcagtgaccatagctaaactgataaactacttagtcttcaggtattaaggaatgatagtgtgtggaagtggtaagataacatatttgtgttttgtcaggagtctaggatccctgtttttcccctttgtttccctattcaccatccattggatcataggaaaaattaactgttaatgtaagtgaaaagtaacttagttctttggaggg

SEQ ID NO: 64378 - DNA, 1034 bp, Homo sapiens
gccctaaatgatggatatatttttttatgaaatatcttctgtaataacatgatgttctgataattcttgggtttataaattgaatcatttggtgtgtgaagttgacatattattctcagatgccaattctgatttctccatgctgaaaattacgatggtaagaatccaatagctttgatttccttaggtaaatattaggctaaacatccagtgctgtatcttcagtattttctaccaggcagaagaattgttatttttatgcctctgtgtttaaatgatagaagtaagatactttaattgaaaagagaataaaaaacaaagtatcccttttagaggatgaaaggggagcaggaactccccaggtttttaaatattttagtacataaaatatacacaacaacttaaaattgttacttttctgggaaaactgaagcacatgcaggagattttaaaaactccacttgatgttagatgattaaatagtgttttgctttggaaattgaaaagcaagacttgttataaaaatagttcattccataccaataaaatcttattggcttgtttatttttattttgtaataagatagagtgaatgtggaagcttgtgttttaagaacttcttgtcctgtttagattatgttaaataacatacaacattttttaaaacagcttttataaacaactaagactttagacaaaggaatatgagtatgtgatgaggcttgacccaattaggtaggcaaaaactttaaaaaatatttcatggcatagagggagaattagttcactttttattaattacttgttcttttctgagttacatgtatatttatgggaattaaatatttaaataattgggtaatttaatgtgataatctaattttaccagccagtttctttagcattttaattttcactgttccttaactctatataaataaacaaatcaagagaactcattattattaatatcaataatactaacaaatcatgctaacatttcttgagatcaatctctagagtaatatgtaagc

SEQ ID NO: 64379 - DNA, 1068 bp, Homo sapiens
cagcataccaaaaagactaggatagtttaaaattgtttttcttcaaaatcaagtttaatggggttcttatttaatatttcaaagtacataatatattcacatggttcaaaatgcaaaaagtggaaacagtcataagttgacaattctctttcgcattgcttagttctcaacttaccccacaaaagtaaccactgttctcagtgtgtatacatattcttttggaacattaaaaaaattgacatcacagttgtacatatttctgtggtacatgtgatattttaatacttgtatacattgtgtaacaatcaaatcagggtaattgggatatccatcacctccaacatttatcttttctttgtgttgggaacattacagttcttctctctagctattttgaaatatacaataaattgttcttaactgtaattttcctgttatcctatactagaacttattccttctaggatttttttttagttgtcttgtgttcaagaattagcacaatttatcattgtgctagactctttaatcacagtaaaacactagacttgtgtatttgcttcctaataaacgagcagcgctattaatatagaaaaaagaccgttgaattaaaaatagaagtctttaaaaattctagtagtacattcatcattgaaagactttaattatcatctgattttcctttctatgccatttggaattataaatggtaattttttctttgtgtggcactaccaaaaagtgcaatgtttgggaaaataagttatttcacattgaacagtagttagacattgtgctcagtttagataggattacttgaagcttggttttgatttgtcagtttctttagcttatacctgccattttgtagtaacagtcaattcagtattatattattctcagattttattattttatgctattttttacatgaacaattagtatttaatggtcctttgtaaagttttttctcaaaatgtagtgttaatttgtctgcatgtttaaagtttattggaaaagttattttgcctattcagagcgtaaaacttttagtacattttgttttat

SEQ ID NO: 64380 - DNA, 1048 bp, Homo sapiens
tagtttttgtagggattttgatcatcagttaattttatcagttgtcagcattagggtttagaaatgttgaaaagttaagcaaacccagttagaggaaaaggatttcagaagtattgatcacaatctggatcattgttatgtgatacttttatttttttaaagtttatgcagtagcacctacattagtcaaaacccaattaattagtacttagttacatgacttcctttttagcactctatcttataagaaagaggttaatcacaagcattcagagggcatagcaataaaccataaataaaataactctaatgtattcttgagttagttttcactctatatgttactctttctttgcattttctgttgatatttgatactcaggatagtaatttttaaaaatagtaattcttaaaatttttaatcagaaatcatattgatatcagtatttagtgtgtagaaaagtgtactggtacattttaggaatattttaaacataatattaattaaacaggatgcctaaatgcctcatttcctgagcattgtagttaatcaaggaaggttattttgggttctggaatctactgatagagtaagtcatataagaaccaggaagtaacccttattccttttctttgtgttctttaaactcgttattagaactctatatcgaatttgtctctccttttggaaaagcatataaaaagcctgttgttacttcagaaaagggcaaaggcatttattgaaaaaacaataggcaaaagggaaaaggaacagacaacttgatataactatcttatacacattaagaacaaagaaagatcatatgaacctaaatgacactcaacaaggatattaacataaaggactttttcactgcaggtctaattaactattaacctttacaaaatcagtgtccttgggaaaactgaaatataagacagatacttatctctgagattgctgcagtgtctgctgatagaggaaattcataagaagcagaaactattatgtaaatctcagtaaaacacttatttataatggtcaaaa

SEQ ID NO: 64381 - DNA, 1047 bp, Homo sapiens
tgcatttgcagttaaagaaacatttgatacattgagttaaggtcatttttatcctgctgcctcagataattgattacaatagaaacatagttcagagaaaactaatctttaactctgaaaagtgtttattatataaagctaaatgtaggtagattctatgtagtgacttaactcattaaaacaaaatttatgcctcataaaatatttagaaatttggagaataaattaattggtggtattatgtacgtctattttaaagagaccaggctagatgtatcttttctagtttgcagaagctggagcctcttggtaataaatgtctatgtgtactttgcacataggtgggttacgatgggaatatatgaaacatttacaaccactattccttttcagattcaaatctctggatcagtgctgtctaatagaaatttttgcaatgatggaaatagtttatatctgcactgtctaatatggtactccctagctacatgtgactgttaatcatttgaaatgtgtctagcatgactaaggaactgacttttaaatgtgatttaattcttattaatttcattcagatataaagagccatatgtgactgttttgtagacatatgtgacatccatattagtgcagctctagatctttaatgcgtagtgatgttttgttcaggaatctttagactttagtagcacaaaactcatagacttatgactctgaaatcatcttgactttatattatagtactccagaatcgagatctcatatccttgattttgagtcttgagctttggattctgatcacagtttgcctgactgatttcagcatgattccggtgttgaacctctcatttcctgagcctatgcctgataccaggtttctcatcattccagctgcttttttgtctgttactattgttctgcccttatttccccgcacaatgctgctatcctctagtggagtggttgcttacaaaattgatttacttagagacttggtgttatctttgcatcctgttaccttattctacagataacagttgtcagata

SEQ ID NO: 64382 - DNA, 1042 bp, Homo sapiens
accaacatggcacatgtatacatatgtaacaaacctgcacattgtgcacatgtaccttagaacttaaagtataattaaaaaagaaaaaaaaagaattttagttctttggccagatgcagtggcttaagcttgtaatcccagcattttgggaggctgaggcaggaggatgacttgagcccaggtgtttgagaccagcctgggcaacatcttgaaaccctgtctctacagaaaaataggtaaattagctgggcacggtggcctgtgcctgtagtctccaaggccagaggatcaattgaacccaggaggttgagtctgcagtgagccatgattgtgccactggaatccagcctgggcaatgaaatgagaccccatctcacagacaaaaaaagagaatttaaataaaatttaattttattgaattgaaaataattcaataaaatttggtagagatgctttgctcttgtggataatcaatctgatagggacacataggtgaaagttaaagaccaataggaattaggaaaatttctgccatacagtatgtatgttttagtcatactgttcacatttacctattataaatgtagatatttacccaacaaggggtgtttacccaacagccattgatcatgacaaatatggcaaatattgcataagtttctagaatattgtgaggccccatgcaggaatttataatttatttgtaaataatctgctttttttaaataaggaaaaaatccataaaaacacaaatatatttaataaacatacacacataaatacattcttatttatctatctcctttcttttaatttttaaaggtgttttgtccagtctgagtcctgtgaattcttccaaccatggaccagtgtctactggctctctaactaatcgatcacccatagaatttcctgatactgctgattttcttaataagccaagcgttatcttgcagagatctctgggcaatgcacctaatactccagatttttatcagcaacttagaaattctgatagcaatctgtgtaacaggtaagtttc

SEQ ID NO: 64383 - DNA, 2017 bp, Homo sapiens
tgctcttcttttccatgtgatttgagaaaagaaattattacattggtagagatataactcaccattaataatattatggtttaaggtttacatgtgatttaatcttattgatttgtaattatgattttagaatttttatctaaaactcagagatgttggaaattgtttatatcaaattggtaagaaaatttctattgataggaactttttctttttctcacttttataaagaatatccacttagcatccatgagtagatatgaaaggtgagtccaatacaggaagtgtctttgttgcctgagcataaggtatctaggcaaaatagcacaggaagatacaacttaatggtatcgtgaaataatttagattgaactccattatgattcattttatctaaatatttttaacaattatttttcatgtaaagctgtacatatagggcacattttactcctatatattactatatatattttttgaaaggtgaagaagaaaacattttctcgaaagaatcattcaaacttatggaaactcaacaagaagaggaaacagagaagaaagacagcagaaaattatttcaggaaggtgataagtggctaacagaagaggcacagagtgaacagcaaacaaatgtaaaagataaactttcaatatgattatgttaaggtgaaatataatactgttagtactggtttcattacttttgcccagaacaagatttttaatatagtagtattttttaatttttttacttataagtcactataactgaaatattgcttgggttacaaataatacagtaacttgttctaattctatcatcctaaagcaacaaactgcattcagttttaaatgaacatattttatttagttttatataaaatatattattttctattctgatattttcttttgcgtatgtgaaggtatagagaatatgtgcatgttactaaaaacaatgaaaacaatgtatttataatggcaatatagttttgttcttaaatttcaaaatttaggcttttaaggaaaagaaacacctatttcttttgaaaaattatcctggtaataaatgccaatataaggatatggttttttttcctcttaccctttgatacctgtaactactaaaatgaaaataatagactttggatttgtgtagtaatttggaaatataatacttttattcataaaagtaatataagaagattaataagtcttacacccaggagttatgtttttagtttttgaagataacattctagaaagagaaattagaagggcagataagactatatttaagaataaccattatagaaaatagtactgacttttttaaatgtttaatcctaagtgttctcattgtaatatatattttacagtatttataaaagataaaataaagttgttgtttccctgtatgtacagattgaacaggaagtatcactggacctgattttagtagaagagtatgactcattaatagaaaagatgagcaactggaattttccaatttttgaacttgtagaaaagatgggagagaaatcaggaaggattctcagtcaggtttgctttcaaatatctactttttaactgtaaattaatttttcttaaatctttataaaaagcaaaatctaatatgtaatggtttaagcactagttcaacaatgacattgttcattatttttttcagaaaaaaataaatatatacataaaacaattatatataagatgtagatcatactattatatatatgacaagtagtttatttgaccatattaatgggatttaatttatgccaaagaaataataaagatttacattttcttgaatgtggaggttgaaaaggatatgaaaatatcatctagttctaaccattgcaatttaagcttcatttttttcacctgcactccctatactttacccaaggccggatgattcatttcatgctagaaccatgggaaagtactttgattttaccacccagactcagggttatacctgatgggtccgcataac

SEQ ID NO: 64384 - DNA, 1099 bp, Homo sapiens
aaggcatttttaaaacttgttgttttgtttgcttttaccaaattatcttaaaactgtttcctgtctaaatgacagaaagaaatttcagcaaatagttctttttaaaatcagcttattccataatatggacctctattggttaaatttcctttctaaaaaatgctttctagcaaaacatataactaaccatgggtttcaatatttgtgattaccacaaagaatcatgaattatatgtgtgtgtgtgtgtgtatatatatatatatgtatttattaagtatagtacatacacaatatcaaaaaatcatataagaattataactacttatttctacctcaaaaaagaacacttaagaagctagagaagtttgcccttgctgtgaaaggcaacatgatatagtgaactgaacacaagtctgagaagctggccctatagttttaaatcctgactcagaatgtcatgaatcagcaagttgtattctgaatcaaaaattcagtgtgtaacagtgaaaaaactgcttaacctattcgaatctaactttcttcatctatgaagtaggaaaagtagtaccaatctagccatgctgctatgaggattaataaatgaaaaaatgccttgttcacggaaaatgttaaatattgttatttaaataaatgataattattagctgaaaaaaagcctttcaagaactaaaatttcattttgtaaaaaatgaaaagaatgagccacatcatagcttttgaacttcagtgtgatggttgctttttggcaccaaactctttcagaaaaaaaaaaatatatatgtagaacaccaccatagaaaacacttgagagaagagctcttttgattgaaacttaataggaagtctagagccccattcatatggcatttttttgagagacttcaaaatagaagtctttaaggaatacacattcaaagtattgtattagataatcttttacctataaaaggtgacttaagcacttaaatgaattttatttaaaaattaaagtgaataagactatacaactatgaaataattttaaaggtacccttacttctcactgatttttataagcatttcattaatgtcatgaca

SEQ ID NO: 64385 - DNA, 1050 bp, Homo sapiens
cttctctagcttcttaagtgttcttttttgaggtagaaataagtagttataattcttatatgattttttgatattgtgtatgtactatacttaataaatacatatatatatatatacacacacacacacacatataattcatgattctttgtggtaatcacaaatattgaaacccatggttagttatatgttttgctagaaagcattttttagaaaggaaatttaaccaatagaggtccatattatggaataagctgattttaaaaagaactatttgctgaaatttctttctgtcatttagacaggaaacagttttaagataatttggtaaaagcaaacaaaacaacaagttttaaaaatgccttcagaacctaaaatgatgttgtttttccaaaataggcaaatgatgtaaatagtaatggcatagaatggagtaatgaaaatgatcgcctcttggtatgccaggtgtgcatcaaactggcagatataaatggcccagcaaaagttcgagacttgcatttgaaatggacagaaggcattgtcaatgaattttatgagcaggtaagttgaaacctgagcttggtgggatttttaagagctgtcatgagaagacactactctttgggttttggatagctttattaagtgtttgaaatctgagttgctttgactgggaagggttaaaaattgttgcatttgctttggttcttagtattttctgtgttctgtttgcctttgctgttaaaattttaaaaaataacttattccctatcttgactgagctgaatatactcatgagtctacaggtaaggctgttagcagccgcaaatccgagtttgcagcaacctcaattcttgccccctcagaagaaagaattcaactgaggggcataaggcagagggagagactgaaccaagttttagatcagaagtgaaagtttatttaaaagctttagagcaagaatgaaaggaagtaaagtacacttggaagaaggccaggcgggcaacctaagagatcaagtgcatggtttgacctttgacttggagtctt

SEQ ID NO: 64386 - DNA, 1050 bp, Homo sapiens
aaaaagggggtggaggtagtgttattgaaaagcacttgcaaaattcagctctgtacatttgagatataactacaacaaaaatgtttctattatgcttttgcccctagataaagagaatccataattgacactatggaattttgcagtttgtcagtaaaatatctgatacttattttaatagatctgtatgtttcttattaactgagtatcagccatattggttgatgtgaacagaatgtgagaataaagttttgtttaggatttctcaatgttaaattcttacagttgaaatgatagattgatgcttattcataaaaaatattttgatatagattgtttattttaaaaaaactcaagataattttaacagcaaagctcagtggtggttctttcaccagttaaaaatgtacttttctttttaaaatatgcagggagatgaagaagcaaatcttggtctgcccatcagtccattcatggatcgttcttctcctcaactagcaaaactccaagaatcttttatcacccacatagtgggtcccctgtgtaactcctatgatgctgctggtttgctaccaggtcagtggttagaagcagaagaggataatgatactgaaagtggtgatgatgaagacggtgaagaattagatacagaagatgaagaaatggaaaacaatctaaatccaagtaagaatatagggacattataatttatttaatgttataggttgagtattccaagtctgaaaatctgaaatatgaaatgctccaaaatccaaaattttttgagtgccagcatggtgctcaaaggaaatattcattgggacacttggatttcagatttttcaattaggggtgctaaatataatgcaaatattccaaaatcagaaacccctctggtctcaagcattttgaatagggatattcaacctttaataactgcatatatccatttaacttagatttggaactttgtttctcagatacagattcagcagtcattacattgagtaaccactatctaaatgttcagattcaacagtcatgttttga

SEQ ID NO: 64387 - DNA, 1044 bp, Homo sapiens
ctatgcactttcacaggaactagaaaactattcttaaaccaaaaataccatccgtgttgacccatgttgcagagcccttacttaaatccttcactggtgtatgaatactttgtcataatgctgctttgctgggtagtgagctcttatttttcactgggggtcagctataactaaaaactcaagtgacatatttcagttaccaaagtggccaggaactttttgcttttatgaaaatagattcatattgtatttcccagtgtgtcttttatgtctttgaatgttttggagaaaagtctatgcctgtctaaaaatgaatccagtgttgcctttctgagggatttctgctcaatgcaatacactgttcagtgctattctcccagctaggtttatccatgaaggactgagtgacctttgttgtatttaacaaaatccaggtgcatcaatttctgatgctttttactattgtgtattatctactatgtgtgttttatttctgctgagagtattcaggtttgccatggacatcagaagtttgaattccagtcttatcttatgttccatggctgaattttaaagctgtttaggtttaacaatgaagggatttattctttagtcaaaattgttgtttttactctagctcaggattcgtatttttaaagatttagttaatatgaacacagcacagatttgttagaagaaaaaaaatttgctgtaataccaaaactaacctcatcaaagatacagaaaaaaagaaatatagtgagccctaaaggacacatacattgaataaataattggaacatgtggttatctttagatccacatcttagctgtcatttgttcactctaaaactgatgttcatctttctgttaatttccctctgcctaaagactacatgacagaaatgacctatcactacttattatttctgaagcctaactgcaagactgatttctgagaacaagtaaagaactggaatacttatttttcatataaaaatctaaatgtgttaataaatcatttcatacaaaagtacattatta

SEQ ID NO: 64388 - DNA, 1011 bp, Homo sapiens
cagacccttcatggagaattggctgtgactgagaccagacatctcaagcaaggatttggtattaattgccagaaatttaaaggaaatcactttttttttccactatgaagtccctagctgcactgaggtttgtatgagccatctcattagctaaatccatcctagatggttatctattataaagaatttgtctgatgctgagggataagtctctttaattatttggatcctcagatagctcttctcttggcaaaacgttttctggatattcctatagccactgctgcatgtaagtgatgagtagcatgaacaaacaactttcccttgtctctggtagggccctgagccaagcactataaatttgggcctcatctctcctattcagacttgccaggacaatgataagataaattatttccacaaacagggttgctttagaggcttcctggagagcttggcttatctgtaggtcttggacatttgtaggaatgcttccttgccttcataaaagtaaccaacaatgtgccaggctttgtataaaacctttaagatagtctacaaagctgtgtataatatgacacctgactactgctccaccttcattctcaccatgctcttcctcccactctgaagtccagttactctggcattcttttagtgagtcacattcagcctgttcttgctgccacagggcctttcaatgtggcatttctctgccctgaagtcatcttatcttctctattcccaggtatctcttatctttcagatctcagttaagtattacttccttagagaagtcttcccagattacaacccctcagtctaggttttatttctttcatatttgatttcaaatggcagaagtgcttccctttcagcttaccatttcagttttagtttatgcatttattagttcaattatttgattaacatctattctcagacattcacacaaggactgcattcctgttgctctctatcaaaacacttaatatagtatcaagtataagt

SEQ ID NO: 64389 - DNA, 1049 bp, Homo sapiens
aggagcaggtaagcacctctaggacttgatgctgcaaactccgctcctcttccaggtaagactgaggaattttttattttcctaagaaagggtatttggtgcccgtgactggggtgtagattttatagtcctttgtgaatggggctgggtgtgggaccataattcactccagtgtcataaacctccgctttgatttttagttaatttatacaggaaagattggctgttactgctccacattccatagccagtcatccagagtcaccttgggttttctgacacccctgggaatatctatggggagtgatcatggcattttccctaatggccttgtgattttctgctctgataattgtgtttaggagaaacacttaaagttaattggtgcctttcagcacagcaactttaccatgaaggtcccatggggctgacctctctcccagcctctcactcacagatcttctcttctttctccatcctgcaaatcagaatcattgcccagaagagagcctgtgacactgccacctgtgtgactcatcggctggcaggcttgctgagcagatcagggggtgtggtgaagaacaactttgtgcccaccaatgtgggttccaaagcctttggcaggcgccgcagggaccttcaagcctgagcagctgaatgactcaagaaggtgactgcccttgtatgatgggatgggaagatgaatgactggtttttacaggggtgtaaaaccactctgagcctctctgagaccatgtggttttaaaaaatccataagggaaggtacccacaccagtatctgagttccagtagctaagaccctagaatttggattcatctctgttttttcagtctctccttgtaaccctgagatcatcagaccaagaaatacagatcctgtttatttagaacactgctgtttgacatttataattttgattattctagcctttgagtttgaaagataatgacactatcattttagagtatacattactatgttgtgtacctctgaattaagtgtacagacttgagttcaagaactgtat

SEQ ID NO: 64390 - DNA, 1039 bp, Homo sapiens
attgattcttttatttctcagattccaattgcagagataatctctgtggatagatcccacccctcccaccaaggtgtatgcaaaagccccagaagaggaggacagctctgggtttccttatgggatcagcttctgtgacaggggcctgggagcatgtcctccacagagacctggctaacaggtttatatgtatctgtgtggctttggggagaagggtaggactgagacctcccccactcagctctccctctaggatcgctcctccagctctatcagactgtgcatgctacaggcccactgaacctcccagaagtccactgtgctgatgaggaaacaaaaaagaagagaaatataatgaccagtctgaagccacaaagccagagcgttagaagcaagacagaaaaccaggataggagccaaggtctgtgggctcctagaacttcgaactggcgcaggtggtttatctcattcttcccttgcagagaggtgtcatgggcttccaaaagttctcccccttcctggctctcagcatcttggtcctgttgcaggcaggcagcctccatgcagcaccattcaggtaagacagcctgaagccagaaccacactggtatcagacaattccatgcctcttaagtgtggtgtactgaatgcttaaaaaccgacagggggccggggtaaggtatgtactcatgcacatatataattttttgatataaaaatgtgtggtacacaatttataagtagtgataaatatttagacaatattcttcattataatttttttgagacagagtctcactctgtcatccatgctggagtgcaatggcaccgtgtcggctcactgcaacttccatctcctgggttcaagcaattctcctgcctcagcctcccaagtagccgggattacaggcgcccaccaccatgcccggctaatttttgtatttttagtagagatagggtttcaccatgttggccaggctggtctcaaactcctgacctcaggtgatccacctgcctcagcctcccaaagtgctgagat

SEQ ID NO: 64391 - DNA, 1018 bp, Homo sapiens
cctggcctctcattcttggaaaatgagagggcttaactgagatttttgtagagtggagctgactgttgcccagggaacaattcttcccaacctcagtggtactttatttgctgtaggcaccaggagaggttccttccaaggtccagaggctatttttatggtgacttcagctgccagggaaagagctgagtatagtggaaaagggccaggctggtcactgagaggtggatggacttggtgggtgacgtcaaggaattactcaggatggattcctttaacatgattaaaattctcccttggctcagactacccggatctagaatggctcttcactccctggccaggaacattgttccgtggaacaagagagatagagataggaagcttcccatggtaccagaaagctcattacagagatgactcttttatgggtattgccagggaataataagttacatataaggggatttcttatataaatagactctgactgagattatgaagagtggggctttgaggtcttatgcaactggatttgagtcttggctctaccactcgcttattgttcttaggcagataataatctccctaaactacagtttctgaacatgtaaaatggggatagtaagaactacctaggagggttaaagctattttatgctagaatacctgatgcattgcttggcatgaagcaaattcttaagagtggtggccattattattaaaacaagaacttattccttgaagtgccaaatgacatcagcttaatacagtaaattaaataaaatcattacacattcctctgtcttcttaagaggccaatctataagcctttaattctcagaataaaactaattgccaaggccacaacagaatggctctgcctttcccaaccctctcagattcatgcctggctgcattgcagcctcactgcccagcaggattaagcacctggcatattaccaggatatgtagagtaggcactgtagagtgatggctattattgtcgttatgacaa

SEQ ID NO: 64392 - DNA, 1044 bp, Homo sapiens
cctggtggaacgagaggagacagggattggggccaggccactccaccctctcctgcatttgttccaccacatacttcttgtggcttattggccacgtaggggagggcagaaaagtccttttccttttgggacaggcaatgaagtcctgagtccagagagttgagaggacagacatgcaggagagatccaaagagttcagtccgccaggagcttatccactgcttgaagttgccatgctatgctaggtatctccaaggggcaggatgtgtgctggcctcaggcctccttctaagcagccacaatagaaagtgcctaagaaggcctgttatagccagggtagtctctattgtctcttgtgatttcccctatccccaacccagaattccccaactgtttctgttgtcacaagctcatccaccctgtagtcagagaacatagcccagcatggcagtcccatggggcaccagcattggaagagttttttgagggaggagtgcttaatctccacaaatgaataaggaatcatggtgattcaggcaatagctctaagatggggagatattctgagctgaagaatttgcatttctaaaaagttcccaggtgatgttgatactactgatctggagatcatgctttgagaaccactactctctagaataagagaaagtcagggatgattccagttcaaaactaaatttccaacctaattacagcataaagatgatctcttctgaaagctccttaaatgtacaatcctgggccaggagcagcggctgacaccagtaatcccagtaccactttgggaggctgaggtgggaggataagtggaagctaaaagttcaagaccagcctaaacaacaaagctatacctcatctttgaaaaaaaataaaaataaaaaattagccaggaaaagtggtgtgcacctgtggtcccagctactcaggaggctgaggcaggaggataggaggaagactgcttgatcccagaagttcaaagttacagtgagctatgatcacaccactgcactccacccttgacaacag

SEQ ID NO: 64393 - DNA, 1035 bp, Homo sapiens
tgataaattcaataacatggagttctcaaggaactcaaattactgaaaaacactacttacgtaaactgacacaagaagaaatgaaaatttgaaaagcattttatttatttaaaaagtagaatttgtaattaaacagcaataacaacaaaaccttcctacaaagaaaactctaggccagatcagatcatacagactctccttcttttcccatctggccccacaactggaaatgcttgaaatggctattccataagcccagctccctaagagaatgtaatgggcagagcatcctccccctatcacccaccccaatggctttcttgaaatgaacatgcagcactgtgatttggggttgattatatagcatacctagcccatcctgactgatacaacatccatgcttaatttggtgagattatcttgattggtcaaaataaatcaggggctaagagaaactggattgaccctgctctagttaaaccaaaaaaaaaaaaaaagtcagagctgaaaggtcaattgtgttgtcttcatggcttaagtatagttcctagttggctttaagttttccatgactggtttaattgtggaaatggaatgttagagcccaaactcttaaaatgggtcacttcaaatcaggagatggatgcgtgtgaatcagagaagggaatatgactatagtaatttctttattttccatatggtgggccaatacataaggtttcatttttaagtttgccagatcaagcaatatgattttttttttattatactttaagttttagggtacatgtgcacattgtgcaggttagttacatatgtatacatgtgccatgctggtgcgctatgattttaaaatgcaatataaagttatatagataaccactagcgaataaggaagacttcatagaatcatcaaattgaaggtcatggaggaggaaagaacagaaagaagcataaccaaaaaacaaaaccatatgaaaaagattagaagaaggaaaagtagaagcagcagaaaagaaaggaggaatcaaccag

SEQ ID NO: 64394 - DNA, 1030 bp, Homo sapiens
ggctcaggagcaattctgctttgcactcaaggggctgggacttggtgaatgcaagacttgttttcttggagtgtttccagattggtgatctctgaatcttgtagaatctaggagaaaaatctatttgccccgtaagaggtggcacccatggggacagagcagaagttgaaggccagaggcaccataaaggatgtcctgaggctggaatgtctttggctctgctggctccaagaacaacacctgcacagctgtatggaggagagtgaggtgagggtggctcagaggctgattcacgcgattgttacgggtgtgcattgtgcaactccagggcgcgccatgcatatcctgtctttgttgatttgtatatgtattgtacttttctggcagatggcaggtagtaaatcatcttgatgaaggggtgcctttttctaatctgtacaaactgtctcagggactggtggtgctgatcagatgttgagctccttcacccacccaccgctgtagaatccactccatactccagaacaaccatgcctgaggcatggttgttcttccccttaaggcaatgcctgacttttgaggtacgaggctgagtggcctaggcctagactctacttggccatacagccaacctctgcctgtggggagagtagactcagagtccatacagcctgagttaaattcccagctacaagatttttgaaaacccctttctcccaaaacagcctagggagtaaatgctagctgatagcagcagctcacctacgaacttccccaggaaaagggatatttcactctgggccttctagaaatgtggagtgaaacattcattcctctgcctggagccaggacttcctctctggaactgtgtggaaagatccctgacccgggaaactgacaactggtttctaatccccactctgctcctaattgtggacaactcacttcattctctaggactcagtttttatatacatgcattgatggcagggtaaagtgtataatctcaaatcacccctttctgtattaa

SEQ ID NO: 64395 - DNA, 1007 bp, Homo sapiens
tagaggttgtatttgtgccacttgctgaattgagttttcatgttccttgagcttttgtttttattaatgagaagatctctccagtagtatttcccaattacctttcacagatgggctccctcctctttctctctgctctcctttcccccagcaacaatagttgagacttggctttttaaatatattctttccatcctgtttcttttttctcttatacctggggtttctaaaggggtacttttcttttgtttctgttttgctgcatggtttgagtaagaaaacattcttctaacacctttaaaacaattttcacatcaattactctgtcccagcctttttgggaggttgtacctcattttgatttggggcatagtgaaagataagcctagcatttatggatgagctctgaaagggattatatttggccagactgttggaccctggatcagaactggaatgatgtgctgtcctccatgcattaaaactttgcattgattcaaatggaaatagatatgtgtaccaagaataccctcttttgggactattgctctcacatttcttcagaagcattttatagatttatactgaatttgtgaactggaacacagccaagatgaccttacccttctgaagctttatttgtgtgtgtgtgtgtgtgtgtgtgtgtgtgtgtgtgtgtgtgtgtgtgtagctccaactgcttctaagttttatatctcaggatattttttttattttcggcttaagctctttgtttaagacaaatagcagagattgtaatagttcttcttttctttaaaacacaccgcttaatatgaatgccctctcttaaaaatcctgctcattctttgatccatatacttggaaattgttgaagctttcctcattcccctaccctccctagatccttattcctggtagaaaagattgactctatgatacacgactcattcaaggcagcagaggcaaactgtagcctaatctggggtgggatttaaatgctataa

SEQ ID NO: 64396 - DNA, 1055 bp, Homo sapiens
atgttgcgccatccttgcatcccagggataaatcccacttggtcatgatgaatgatattttttaatgtattgtcagacttggtttactagtattttgttgaggatttttgcatcaatattcatcagaggtaatatggcttcatatatatatatggcttcatatatatatatggcttcatatatatatatatatgtatggctttgtctggttttggtatcaaagtagtactggccttgtagaatgagtatggaagtattctgagagatgatttttatttctttctttccggggtggattctggtaggctacttaataaattaataaattgaaatgacagagcacagaagaatctattcctaaaagaatttggtgtgtaaggttgtgccttcttttttactgttagtttttgtatactggagcatactggtcccaatttaaagcccccctcaattcccattttatcaagctctgtctacttatactttgcatagttcttctttttatcttatcagtctattaatgtggggttaattttttaggggttttctaccatggcttgaagatttggagaaggacattttctagatctgattgtgacacttattccttcaaggtgactggtggtgctgttacctctttcttgtccatttgaagattgtgaaatgccattttagagagtaactgtaagacatttgaaaatacaattttctgtttgagagctcagaatagcagtcacatcataatctttcttctccttggacagtgatccttttctgatgactaggaacaagaaattggtttcattgtggttcactgtgtagcttatttaaaataatttaattttaaaagcagaaagaatacaggcttaaaagtaagattgactaaaatggataataatttctatcttatataataattgtgaagattaaatgaaataataaatgtaaaatatccagcccagtgcctcactgagtttagttctcaatgtatatttgttgaattaatgcattaatgaattggggtgattattggaaaactagatgactggttatgt

SEQ ID NO: 64397 - DNA, 1131 bp, Homo sapiens
agttgaggacagaaagagggtatgtttgtatttaagttttaccttaaaaaagagataaagatggacaggtggggtggctcatgcctgtaatcccagcactttgggaggccaaggtgggcagatcacctgaggtcgggagttcgagaccagcctgaccaacatggagaaaccccatctctactaaaaaaaaaaaaaaaaaaaaaatgccaggcatggcgttgcatgcctataatcccagctactcaggaggctgagacaggagaatcacttgaatctgggaggtggaggttgcggtgagccgagattgcgctattgcactcctgcctgggcaacaagagcgaaactctgtctaaaaataaataaataaataaaaaagataaagaaaactgggaaataaaaatgaaaattcctgaacttggaattcgcatatctagtcaccaggttatgtcaccatcggcaagtcacactatccctatgtgcctcaagtatttcctctgtcaaatgtagtagttaggcctaagctgtattctgggcagggaaggagaaggcatatatatatatttcagaaaaagctcactagagcttctttccaggttagagtcaccagattacatagtctctaaatcatttctgtccctgaaaatctgattttgtgagataagtaaactggatactaaagaccaactttagtttggtcgttcttaagttttgtgaccttggcaagtcacttctcttttggccttacttttattataagccatttatctggcatttatgtttaaaattaaggtattggaaaattggctttctaaaactattgcagttctaaaagtctgtgattctaaagctagctaaatacatgaatattatacatatgtgtatatgtcaaacatggcaaagaacttactgtagtgagacaaataatcattacatttttatgtgaatgtattcagcacccttaagcattatgaaaaatataaaccaaagtccacattgttaaacctagttctaatttttaatgggaaatgtatattttctcttgaacatatgttgaaatgctagatttgtatagtatttgctctcaacttgtaatacaaaaatctaagacttctatatgcttttctaggatgt

SEQ ID NO: 64398 - DNA, 1071 bp, Homo sapiens
taggccgtcaaagtgcaatatatctctctaggaaaatcagcaaataacttacctatggtttaacataaaataactgcccttgaaaattgcaataaagcttagaaaccttgaactttcagtgtaatttgtatattaaaaaatgtgtttgggctgaaatgatttggagtttcatttgtcattccatttgtgtagtatacttgcacacattgacaagaaggacacgtggtagttaactttgagaaggggcatttttgagagggagctgacaaactttaaccaacaaaatgactttcagaagtcttgaaggaagaagaaacaacgtggagacaaatgagtatgcttacatagtatttggtaaaactatgtaaaagtacagaagggattattgctgcagttaaaatctgtgccagaaacaagttttccactggagtaaaggttatctttttttttcttcttaatgttgggggaagggcaattaattgaggacaagagggaaattgtgggggactgatgttagataaactattttgtctttgtgttgacattatattggctacagcctacacgagggaatgcctggaaaaaagtaaggagagagaggcattaatattttttagtgtgcgtgggtgcgccagcagtagaggggcccatgttttcttagggctcagatggcaaagctaagcattcagcctacggcaggaaaaaagtgccttttttgttttctgactgcagagtccaggcattcccaggggaacacaatgaatggcccattttgtccaacacggtttcatagacatagatttcttgttttttcataattattcttgcccgtcattgggtgtgcacatgacatttgagcgtgttttaaagtcttaacacactcatgtgcctgcaataaagttactcataacaatcccggctttctccagacaacagagcagggtctgttgttttcacaagtcacagcagctgggaggcaattgtgaagacaacagcttaatctaactggaaaatacaggaagaagagagtatacactaaatttcctcccatattattcaaacaatgaagaa

SEQ ID NO: 64399 - DNA, 1045 bp, Homo sapiens
tgaatctggagattttttttatggatccaatataccacattctttggtttctatagcacatcaataggaacacatttaacgatggaattttgcaactagaactgagtctttgcaaaagaattcagctcattaaaatatctctgtgagaaacttccttttccagggatgaatagtattatccaattatttgtgtctcttcagactccaattttagagttattcaagtggcttatattgtgagctatataggcagtgtcctctcctcacataactaactaaacaacgatctcttaagaatggactggctggatggggttttatttaggcatttggctttctgggcaagggccaatgatttagtcaattcatacacatgtgtcttttttgggtaaaatcgtgagacttgaaatttttagtgccttgttttctttatgattaatgtgcaatattcattgccctcccctcatcatttaacatatgcattagatggcaaactttatttgtagaaggcctgaactaaatgccattgctgcgtctttgcaaatattctttgtcttatctgaaaactttttcttttaaatgttgaaatacatattgcttattttcttttacccaaaccagtgttcattacttcactgaagttgtactctgttcttaagcatatatgattatctttcatatacagtgtttttaattttgattataatatattcctgtgtgctatttatatattttgtgagtctgtatgtttcccacgtggtagagcatcattaaatgtgtgttatcctttcttcctttttggtaaccagaaagatgctaatattatcagcaaggaagtgattgtccttaaacaattaaacataataacttgagatgtcctctcaccttttaaggagatagaccttaccttttgtttccttcaatatgattaactacaggcatttcaggtatctgctgagcagaataaaggactacctttttatgtgaagtagttgtctaaagatcagaaataattgctttgtacattagccttcatgacctgctt

SEQ ID NO: 64400 - DNA, 1087 bp, Homo sapiens
catatttttgtgtctctttagagataattttgagttacatttacagaaagtggtagaagtaagtttggacttagactttctcggtcaggatcctacttctactatatattagctatctggacttgaggaagtttcccaacttctctgacctcattctacatacttgtatattttaatgcaattcatatatttaaagtacttagtttaatgtacatcatattatatcaagtgctatcatatcagatactcaaaaactgttatagtatttattccactataggtaaaaagagaagaaaagtctcccagataactacaaatattacaatatgaatctatttatatttttgatcctttgtaataaagtgtctaagatgatattcacttcctgatctgaggaaagctaagaagtacttgaaattattacatgtgataacaaaaagctagataagttttccaagaaaacaaatgcatatatggtttctatgtgtaagttgctactccaattccaactctattgctatctctgtctaccctttctgaaatgtcctattctctaaaatacctatgcttccttttcccttatcaaataggccctttgtataagtgatcttaggtgataggaggaaaaatatttgattaaggtattttaaattcgattaaaataattcacaataagatgttaataaccaattggcttaactccccaaaggaagaggtgtttttttgttttgttttgttttgttttttgttcttttttgagactgagtctcgctctttcgcccaggctggagtgcagtggcacgatctcggctcactgcaagctccgcctcccaggttcatgccattctctcctgcctcagcctccccagtagctgggactagaggcacccgccaccacacccggctattttttttttttttttttttgtatttttggtagagatgaagtttcaccatgttagccaggatggtctcagtctcctgacctcgtgatccgcccgcctcgggctcctaagaggtgttttgttttaaagatgagcttatgaaataattgcgaagaatccttactttgtgtaatatgtaaggg

SEQ ID NO: 64401 - DNA, 1030 bp, Homo sapiens
atttttggaaagaggaattaagatactttggagaaagtagtgcactgtgtgctgacattccagatggccaaactatagtagtaccaagcccaagtttttgagcctttcgtgccaatgatgacctcatgaggtccagcctggagaaatagagacatagttctccaacaatgatgaagaatggcttcttcctttcatatttctattgagtgatctccagtgtcctcctcttttcctgtctctgacaaaattagccttttataattaacaattgttagttttttggcttgtctttcagacttctcttagagtccctttcaccccatctacttattgtatcctctctaccaaacagaaaaacttgtgatatttttctctttggcattcctgtcttttcctagcaggcttttttaatggggactgtgggagattttacacttgatttgttgaatctgaactctttgctgtaaactctcaccacacagaagaaactatctttataaatgacagaatggacctggcctgaatggcgctttgtttactgttttcctaaaaggggcccctctatatttcatctgtcaaagttgcttttctttctttcaacaatgcttgattgttttcacaaaaattcaggttccatagacaggagaattctgtattatattttcctgccaaattccgatctctgttttccttcccctgtgctcacaaagggctcataacttactgtcaactgtgaggcaaaccacaaagctccactgttgctcagcaaataggctctattggatgatggcttgactagcttgtaaagtttgcttaactgtagcagcagtggcagaaggtatgtggggtactgtatctcccaacaggccaagagatttcacttctttcatttacttttatgtttttaactcctttaattgttgaacaaagttaacagtgttttgtttagcaaattagatgttgcttaaagttatggctacaattggtagcctgagacttggcagagattaattagctgtggggttgggtt

SEQ ID NO: 64402 - DNA, 1029 bp, Homo sapiens
tagaaagtattcgataaaagatggttactattgctgttcctcttcctgcttcctgttcatcagtgaagctttatcttatcaagcctcttatatgaagccttcctgaactacttatttcccaagtgattgcttattctttattctttgtacccatattacttttttgcatactttaaaataaatttttaatttttgtgggtacaaagtaggtgaatatactatgggttagcatacttttattgcaacatttacaaatctatgttacaaatatttttctgtgtcttgtggcagattgtaagctcttagagaaatatctgccttgtctacccatccctagtttccaacatatagtaagtgcttaaatatttgttacataaaagaaaaactgagtgtcttatgccttttatgaaatcttcaggaatagaatttttgattgggaaggaaagagaggtggtttggaaatctaagaacatttgagtaaatgaaagcagagaggaaagtaaggttttggggcaccagagagcaacatgagagcaaaaggtggttggttgaggtgtgtagtatatataacatcattatatgatatatattatcatcatcgtcatcatcattatcatcaccatcaagttcctgtgaaggtgagagtatagtggaagagatatattgtgatgtgtcaatgaaacaattttgtgataccttcagcacaatgctgtaatatacatgataacattggtaacattacaaaatgcaattgtgtgagtcagtataacttcaaccattgctgtaagggcttttaaacaaactgctaaaactcaacatactttttggagtaggtggaccttggaagaaagcggtggggatggataaactaagaagcaaaaaagaattctaaataatagaaaatagcataaatgcaaacatggtgtaggctttaagtaagcatagtatagcagcaagaacaaatggaccttggagttgaatacactagggcttcacttgatgcaactctgatcaaattacgtggcctga

SEQ ID NO: 64403 - DNA, 1890 bp, Homo sapiens
tatattggagacctttagaaagttctcattcattgtaactatgaccaagaagcatctttatatctgatagatcaaataatcaggtgaattaggtttctaatgtggtatatgatgtttttagttttgggggttgggaaactctttggaatcatttttctgacaagtgacttacagtgtaatgaatattctttctcctttttcccttccccttccttttcctttctcccctcccttctgtccttccttttttttttcatttagaaagagattgtttctaattagtctgtatgctatgtgctgagttgtgtgatagtacccaagacatgtatcttaaattgtatgcagggtcacctttttgattaagaactgaagagtactgattgggtttcttatataaactaaaggcactctagtccactttgggcaatcaaagaaactaaggaactgttggaattagttttactattttgggggtgatgaagataggataattagaaagaaattatagtctttattgggccagcagtttactaaacttgaattgggatttgtgaaattttaaggcttactgaatatttgctctctaagaacaggatagagaaataatcttgatcttaaaaggagaattttaaattttttagaaagatctcttacagtgagatatcctgtataaccataaagttataaccatcagggatgtccctagttgtgtttctctggcatttcttccacacagaatgagttcatctcaattgttgatgttggtcatttgttgagtgtaatttaacttagggataaaagggataaatatccaactgaaccaaaaaggtaaagtttataaattatctcaaggatactacacaaaagataaaactcaaatatgcctgaaagaaggttgtggattggttgaagttatgattatatataagactgttagaatggccagctgtgaagcaatttgaaatatctagagggaacagcctgcacctctcccacaatagtacctaacagtgctccaacacttccaagtttctgtggtggggaaagaatgggagagaatagacagtcgagggtctatacttggcatagagaagttaaccaaaaaacagttgctgcttgtgttaagaacctgtatgtgctagacattgtgctaagcacttacatgttgtttttaatcctttcaactctattgtaagatagcttcctcccctgcaatacccagttggtttctctaaattctgatttcttttttgccttcttagcacttaaaatgattggtatttatcacatatttgtatatttatttaatgtgtagtctctacactagtctaaaagctctgtcagggaagagaccatgactgttttgttcaaacttgtatatggagtttctagcacagtgcctgatgtatagtatgttcccaataaatgtttgttgaaagaatgagtaaatgaacaaaaaatatataaagacaaggaaggaatgaatgaaaggaagaaaaaggcagaactgggatttaaacagttgatctgagtttggaaccaatttgttcccattccggtacaccagcagggttttatttcatttagaatattctcaattacaaatttatctgataaaattttcacaggttgagctgtttcagagcacctcaaatatttggccctagaagtgttatatcttagtctgaggctgaatgccatgaaaaaggcctgcctagtccttttctcatcctattggaatattgcaaccatcttatggtgatagttctctctagaaatacagattccagggtcttgatttttaggtttctgtttctcctactcaaagagagtgcacttctctccctctttctctgcaactgacccttaatctggtccttgggctgctaa

SEQ ID NO: 64404 - DNA, 1037 bp, Homo sapiens
catgcttcagctgaaattttttgaattacatagatttttagggaagcaaacaaacaaaaatcacaaaatcatgtctttgtggcattttaaaatggaaagaaatctgtttaaaactgagcatagcccagaccaaagatccctcagtgagaatatctgtgattttaaggacaagtaggtctaagtgcgttatctttaaaaaatattattccaggctaatcttgacatagagcaggtaaataaaaaagatgagctgtgaaaatccacaaatagggcttgaatgccattttccatgacaacgggagctgccccatgaaagcattaatgctgggaatgtaaggaatttaaaattgtgccttctcagttttacagttgtgtgctcatgttaattagagatatactgacatttgaagtatctacattaatacacacagctactatacatttgtgaaatgtggccagaaatctactttaattgaaaggagtttgctaatctgaatgtgtatacccattacattttaagcttttaaattttatatactaggtcccttagatacttgttctttttgccctctctactttctgtttctaatttatacctgaaaggacagcctggcctatttttaatctcttagtggtgttttggagctgtattgatggaattttgagaaaaaaatatttttaatagtgctttttatttgctgtagttttgaatctttttttccctctctgactttctgaattactgttttttcttgcaaacctttaaaatggcctgccaccaaaataaggtaggatttaggtgtatgaaatttgcttcactgactgtgtttaaggacaaaaatgctactctttattgtcatactatggttttagtcagaaaagcccattgttggagaccttaatggaataaacagtgaagaggaattctggtttttccagtatagctgagttttatctttcagtcttcatgttaagccatgtgtcttaatttttgatttgcaaataggttcacaatagcttgatgactttttgaggtc

SEQ ID NO: 64405 - DNA, 1095 bp, Homo sapiens
ttgatgggaaaggccattattttttttaatttaaatttttgtgttcttactgtccagtgtgatctttaacccatggtcactcttcgctgaatgtataaatgagcaaatagagaactggaacaatccatgggtgattaggcgttctgaggattcattttaccaaacagattgagattttccagaacacgtaatgatttgctctggcatttccttctctatcttttcacatttgtgctgccatcaggaccatagtgactgcttttgtttttggaaatgtctttttaagactaaacttttctagttcttaaaaaggtacctatttcaagttgtgtatatattaattcttaactctttgcccctcataaaatgttgcttgtttagccttcagttaactgcatgcagaactatgcattaaagtcatttttaaaattatataatgatgaactctttgaccataggaacttattattttttaattctttgctgtaaatttcaccaatagtgcaaatccattgataatgagattcacagttgcttttaacatatgtagcacgactggactgatatgatgaataagatttattgactttgtattggtgtatgtgaaaatattatttgttctaaatgtctggaatctgacttgttccaaaattaaaaatatttctagagttagagatcttaattcaagatagttcattgattaaaaaattaaatctatgctaaccacaatattttctggtcacattttcttttagctccccattctttatgtggaagtgaaggaataggatgtatcatgtatcttgcataattccaattaatgcttttaaaaaagtagttgccagaaaaacaaggtgtggtattttaaaatgtataagtactaaaaactctttcggattcttctagaatttagacttttggatatacagcattttgctataaaatttattttgtgggtaacttctttataaggaaattataatttataactcagcgggggatagcacgtgaggatggtttgaatcagaaccagtactctttgatggttttggataatacacacagtgtgtccaggtaggcttgtctggtgtccca

SEQ ID NO: 64406 - DNA, 1052 bp, Homo sapiens
ctgatactccattttgcagccaaggaaattaccttagttttttcaagcatacaaataagaggcaattatacctagcacagcaagtataatatagtaaatgctgattaaaattagtttctctttcctccttcccaaagaaagaacaatacttgtgggtggaaattacaaagtggtaggttttagttcagtccaagataaatcttttttttttcaagttcacaaaagcactttttatttgaggcaaagagaagtcttgctgaaaggattacagttacaagcagttaaaactcaactgttagtggcactactttaacctggtagattttgcttccctttggtcagaaaagggtattcaggttgtactttccccagcagggcaaaaagaagggcaaagcaaactggaagagacctctattctactgacagggctcctcagatccaacatcaagctggacacaccctcgctggccactctacagtttgctgtcccactgctgagtgacacaggctatactacatttgcaatgaaaaaaatgaggcaggaaacacaggtataggtcacttagggacaagcaggcaaccacagcttcaaaactcttcatggaaggggtaatccttgtgggaggcacagctcaccaaggcacagaccctccagttcctgttgtagttgagtgaggtggtcatatcctggctgctcagttcaaagttaaagaccttaacgttctcagcaaatgcattctggtgtcacagacttggggatcaccaccaagttcctctgcatggggagccagatcaggacctgggctgtagttttattgtgcttggctgtgatcaccttgatcctgggatcctccaggaggcaaggtcctcgggcttggcccagggcctgtcgggagagccgagggggctgtaggcagtcaccacaatgcctttggacttaacttctcctgaatgaggtacaggtgacactcaatctggttaactgcaggcttatcctttaagccaggtttatttaagatcctctccacctggaaatggttgaagttggagat

SEQ ID NO: 64407 - DNA, 1048 bp, Homo sapiens
atcaaagctagttttctcatctatcttttatattctgcatctctactacctgagaccatgattattccctgtcctggtcctccagctttttttgcactgagattaagtttcaggtgtctacttctttatgacattctatgtccttcaaatctataatctaccctacacatgactcaaagggaatctttatttaggttttgtctgggggtcttttattaacataattttctacatctgacttaggcatttttatatgtcatcctgggtgactgaaactgttttcatcttcaacaacctttaaaccacccctcttgaaattgtttctccaaatcttttcctctacaaagttgaggtaatatacatatatcatccactcaatcccatacaatgaagacttatccatataacagtataacaattgtggaattgttttatttattgccgtgaaagtgtaataattttttggtgatttgtacatgtcctgttatttataataatttgaatccataaactatataatccatatggcctccagaacactgccacctacatatgttaggaatctcctgtgtgaattgctttttcttttttttttttcaacgcctcctcctccatcgtttaaaatgtttctcttcccccatttgctgagatcctactaagtggtgtgttttcatcatctctgcttccttcatctctttcttttctctcttttgactacttctttttttcgttttccttcatccttcttattgttcatcctaatatccacccttcttgtcttctccctggcctgcctgtccttccccttctccgtttgtctcgtgactcgcttttgtggtccagttctatctcttagtacttctcaacattcagcccatgcctccttctgtcacctaacttttccaaagcacaagctaccattcatacattttcctttaccatttgacttcctcactttctccagtttgctccttttttttctccccgagttgcctaccttttccacgctacagtttgcctttctcctgactcctcctcccagcagccc

SEQ ID NO: 64408 - DNA, 1039 bp, Homo sapiens
aaaaactattaaaaaacaacagtttttacatttgtttcaaaatgtagggaaaaaatacgctcactaggattccatcatatttcttagatttataagagttcagtggactcatttgataattgcaagatagcatgagttttagtctgttcttttaaaaaataagttttctctttgttctttggaagacttttaagaaagaataaaagtaatgacatctcaatcctaacaagtaactagaactgctaaaaaaaaaaaaaaaaaggcaactgaaaagttaaaattttctctcttaaaagttagctcactgataaaggcagaatttttaacttcaactaacaactgtggctgccatctaagttcagagtactaggtgctctaggaccctaccctgcgaggcagtgggtctcaaagtgtggtccccagataaatagcatcagcaatcatttaagaatttgttgaaattcaaatcctagagctccaccccagacccgctgaatctctggggctgtagccctgcagtctgttttaacaagccctctaggtgacgctgatagaggcaaacttttgagactcagctctggctgtaggagaactaaaggattctgctgtgaggtaatagaaaaggagtaaatttgaatgtgatgaatatgcttaacttcctaagcaagaaaaatgaacgctgtttatagttacaactgacaggggaaaaaaacttgagagttacaggtagactttagatttcgtaatacttatttttatgcaaaaaaaatttaatcaaccaattttttttctagctgggatctagcaattgggaggcagcagacttgggtaatgaagagagaaaacaaaagttcttgagacttatgggtgcaggaaaggtaagcatcagatggtgtgcatttttaccttttctgtgaaaatattgccatttttatgtatgctaagtaagaaggactgaatatacttggattccattttcctgttctgtgtgatttcttttggctttgggaaatacatgtggcctaaccaagcacataaa

SEQ ID NO: 64409 - DNA, 1045 bp, Homo sapiens
ttccacaaaaccggtgcctggtgccaaaaaggttggaaactgctgctttaaacttttaagttgctctgataaacttgataagcaaagaaaggcataaagaagagtcagtacatgaccattttatttagccatttgctgaacagaagtgcctagcttttttcactgtttttgttcaaagatagataattctgtttgttagagagtttttattaggtgactagaaaaaaatctttcaggataacatctacttattataagtaagctaaaacatttaatacccaaagtgcttagtaataaatatttatgctatctcaacatcaggcattttattttctattaggtaaccacctatggcataaattctcaaaagtcatagtaaaattagtcacaattagataaatcagccctgagtataatagcatctgtattatgggtttttgtgtaaattattaatttgactgaaacataactaaagtatcctggacatgcaggggaagaagacaagaaaattaatgaagaactggagtctcaatatcagcaaagtatggacagtaaattatcaggaagatatcggcgacattgtggacttggcttcagtgaggtagtaattaacttattttcattgggaagataattagttttcaatttggtaccatttattgctgttagattaccctagcaatcaagaatcccatgtagaaagctttctgtatgtagttatcttaaaaataattttgtatatgccctactggtcttgtagataatcaggagagatgtttctaaggattttgtgtggggttgttttttcctttttttttgagatgcagtctcactgtcaccaggctggagtgcagtggtgtgatgtcttccacctcgcgggttcaagtgattcttctgcctcagcctcctgagtagctgggattacaggcgcctgccatcacgcccagccaatttttgtagagatggggtttcaccatgtaaccaggctggcctcaaactcctgacctcaggtgatcccacccaccttgggctcccaaagtgctgg

SEQ ID NO: 64410 - DNA, 1118 bp, Homo sapiens
aggctggaatgtagtggcatgatcatagctcgctacagccttgaactcctaggctcaagcaatcctcccacctcagcctcccgagtagctagaactacaggcatgcaccaccatgcctggctaatttttttcttttttctttttttttttttagtttctctctctctctctcccttttttttttttttttttttttttttttttttttttttaagagacagggtctcactatgttgcccaggctggtctcaaactttgggcctcaagcaatccccctgcctctcagcctcttgagtagctggaatcccagccacaggtatgagccactgggcccagccagacagagctctttcttaaaattctactcaagtcttaaagctgttgttctaatggctacaaagtagagtgtttctaagaccgacagaacttacggtctttctcagattttgtatgggctaatgtttatttttaaaagagcctgttgattgatgttttaggtagaagaccatgatggagaaggtgatgtggctggagatgatgatgatgacgatgatgattcacctgatcctgaaagtccagatgattctgaaagcgattcagagtcagagaaagaagaatctgctgaagaactccaagctgctgagcaccctgatgaagtggaggatcccaaaaacaaaaaagatgcaaaaagcaattataaaatgatgtttgttaaatccagtggttcataactcccaaacgcttagtctttgtattaaaagtaagccttattgttacaatgcacagtggaggactgcttatagagcacagacctttgtattataatttttaaaaaggcccttttaaataattacaaagagtgtttgctttcaaatgccatgggttacacttttatgggcatgactataaccatttttgtaaagagtaagagttgtataaaataagaaataaatacagtactcaacttcctttcatattagcatcatcaaccctctaattcaccttatgggggaaatgcttctttttgtttgtgatagctattttatcatttccttcatatttttctcttataaaaatgtatttgatactgtgatatgttcacgaaaagtattctttaa

SEQ ID NO: 64411 - DNA, 2740 bp, Homo sapiens
atccgcttcagcatcccaaagtgttgggattacagccgtgagccaccacgcccagcctgctttcatttttaacagtacacattgaaatacagaaaaggtgagaggaagcaactttcattgtatcgtagcaataaactccacactgggtgacatctacctagaaatcccttccctctaaccaggccatgatgggaacctttgctgcctgcccttggagaaccccggattggcttccctgggactcaggtctggtggcaggagggcagcagtgtgcccccaccatccctcatggcctgccgccagcagggccataatggcaggactttgatttgacttccagccccacatgaggaggggggctaccaagccaggtgcagtgtttgtggccctttatttaagttgttttcttatattattctgcatataaacaatgacgtttaaatggaaaaaacaacaacaacgaaaacctccattgggtggagccacactttaaatgaaaatttctctttgactatgctcagaaaaaaaaatagaattttgaatatatctagcagttgttgtctatttttaactaactccatatgctgccagtatcgacttcatgacatttgccaaaataaaattttatttttgcctttataagattttcttggaaaaaatgaaatgaatattttgcaagaaaaagttaatttaaaaatgtaatggtttgcaaaaaaaatgtgatgtacagattaaaatattaacctgatacgtttcctgtttcttgctggctatagtctctggtgagtggcctgtgtacgtttgtttccatttctttggaaaatccccactgtcagctctcggccctgcttctatttacctatgaaaagtttcttctggtgacgattccttgacatttgattgactgtagaggcctggattgaggaggcctgtgcttctgggcccctggctaggcttccacagttgctcaaggcaaccccctaccccatcccagtcaaagagccaccaggctgtggactcccttgtggggctggtttgtcagacagactgcagtccaattcaagacagcgcagggaacgctgtgggcccccttccaacccacatgctgccggctcgctcctgggaggcagcttagtgacggaccattgcaaactggatttgtatttaattcattttgacttgtgatgtatgctcacaacagaaggcaagaagccagttccattgaggggtgtgtatatttctgagctgtggttacggcagtttttctctactgccaagaagagcatccgaggttcatggtgactttccaactatttaaactggggaaagtagattccaaggcattccgaacagggggtactgctgcttttttagctactgaactctttaattttaaaataaaatgtactctttggttttaaacattacttggagatgtcaccataacagatgaaggggggtggtggtggtggtgagaatgatttcataactgagtacaaagcccctcaaaccaaaaaagaaaccacacaggggataatacccaccccacagggtggccatctgcagacattttctcagtgaaaacatgccagtgggtttattttttatttatttatttatgtatttatttatttactgttggtctcactttctgtctcacacatgcaatcctgtgtaagagggaatgtggaacccactaccttgctgctctttttagattgtgctgtcagggaggaggggtagcctgttctataggaattgaggcccagatttcaatctacagagtgagtgagtgactgtgtgacaggccctcaactcggagtcgacggagactaccatggtcagaaaaggcacactccagctccatcctgcgtaggcaggtgacgtggcccagccttgagagcactctcattacctgaggtaagatggggccacctgtgatggtgctggctggctggtgacactacagggtggggaggactccagggaatgccatgtggccccgtgattccaacttcccttccaggagaccccagggccttaaacgagattgcagttgacgaaggggatgtgagcacacttctacatccgtttgctggtgtccactcctcaattctgactttaacgcaggtccaggttgagccccggatatctagttttagcaagaacgaacaagaacattttaggatctagtatgaaacgggttaggaataacatcttttcctaatgccttcttgaacctcctgaactgccaagattctcaacatgttcagaacgtcgttcagatgattacaatcatatgtaggatttgtgagtccatatgaagtagacatgcccagactagtgtagacgatgaaaacaagcattttgttttctccatcattcactttcctgcctgccttggtgtctgtgggagtgtaagctgcagctagcccctccctctctctctaacccctgggctgccttcaggtcagctgggttctctagaattttcctggttattttaggttgcagggcatggccagggaatcatctctctgcccacagtttcattccagggacctgaagggatgggggtggggtggagcagaacctggctcaggctcagccagacaggagcccattttgggctttgggaatttcccacaaggacagcggaggactccctggcaagtccttttgtgttcttaccaagggtgggaaagaagaatcaaattatttgtataatccccatatcaca

SEQ ID NO: 64412 - DNA, 1040 bp, Homo sapiens
tacccacattgaaagaatgaagggcagggccagactgcacctttattagagtctttgccctgtcgggatggggacccaatttaggggccagcatgtgtctagcagtggaataggggtgcagggagggtggggcaagagccccatgtgtcctggaagctgagggtcccccagcagcggccgcattgccagagccccctgctctgctgctctgcctgtccgcctatctgccattccatcatgtgtgtgcagacgtgcctgctccctggatgccagcctctcactgtctcctgtgctttttgccagcccaggcagtgactgacccgtgacccagcatgcaaagaagcctggagccaggggcccagtggaaccagcttcctccaaggagatgacctttctgcccccaaggaaaccccttccagctgagcagggaatccggccggaggaaggagcagcttaccgactgcgggtgttcaccacaggccaggccctaatatgcacccactagtttagctcagactcctctctacatatgaatggcaaaggcacttttgatatacactgtaaaatacactgtattttagaatcggaatctattttctaatgttcccctcaagggctgagtggcaggaaggttgaggatgcaggactttgcagctgcacgtacagattcaggtacttctgggtgacaggtgttgtgggggcaggaagggcggggcaagccgaggctagtccaacttccaatgacctcaggagaaagtgagatttaaagaggtgttcccagtagactccagcaagaggctggttggcgtgctgtctgggagaagaggggcccttggctgcagagatcagctgtccctgacctgatgaccagctctgtgtgaaactccacgaggatcacacgtggagcccaagtctgtgccttgccccttgggtttggcttaggggcaacagtgtgttcaagaggactggggcccacaacctgcccccaggcttcctccagcaaaaggctcttgtcagaaagaaaaaagcagtttgctatc

SEQ ID NO: 64413 - DNA, 1005 bp, Homo sapiens
gccaaagaaattgaagaactgtaagattgggaaaagtccagttctacagatgaggaaactgaggcccagtgaggggctggggctcactccaggtcacaaagaattggtgtcagcgcagagactgggactgcccttttggtcactgggcactttaagagggagagaaagggaagcccagggcaatgtgaaattggccctcagccaggcagaaagctctggcaccaaccctaccaagttctccccatgtgggcatctagtgatgagaggcagtgtgggatgaggagggagccctgaaacaggaggctggcatctggtccagtctcaagtgagttcttggcctgggcctgttgcttttgagcccagcggttcacctggacaggggaaggtcagactaccagtctgggcagtccttaccctgacatcccatcccactatcattttgcagggctttcccctctccttcctttacgtatacttgtggttaacattgttgagtgcctgctgtgtgccaggcattgtgctaagtatctctttcgatccacacaacaaccctatgaagatattcccccccccctccccgttttagagatgaaaaaacaaaagctcagaggccttgagggatatgcgcaaggaatcgcagcttgttaagtgctggggtttgaacccctttgatgtgagttcagagcctttgttccccatcaccactcatgggttcatctgggccgccccgagcagctctaggtgtttggagaaagaagtgaaaggagggagagagtatttgtgctgcagggagcgaagcatgattttttggcaggtgtctatcctgggtgctccccgtgcctcacagcagagtcagcaggtccccgccagcctgagcatgagaggaagaggtcagcctccttgggccaggctctgaggaggtgtggagtagaggccccgtggttgaggagccatagggaagtgctctagccacgcccattgtgaaggccacatttgagggtgtgg

SEQ ID NO: 64414 - DNA, 1099 bp, Homo sapiens
ttttcaaggtgctgagccaaggggccaaggtttctgacctcatgaagaagggggcaggaaagtggttgatgcttggatttcttgctggggcaaggcagaagggggcccctcctgccttccctggccccctgccttcgtctctaaactaaagccagtgttcacctcatcacagtgtactgtgccagaaagtacaggacttggaaagtgggactttgcagtccaattggaaaaaaataacaccatgggatgagaacgtgtgtgtgtgggtgtgtgtgtgtccgtgtgtctcaatgtgtgtctatgtgtgtgtgtatgtgtgtctgtgtgtctgtgtgtgtgtgactgtgtgtatgtgtgtgtgtctgtgtataaaagggctgctctttctctcagccaggaaggagaccgcaggctcctccttccactcacagctcacctgcttgtgtgtgccttgtgccttcacaattcacccagtaccatttctcccccagtgcagaggccactgtgtgtctgggtggtgctcctggccaggtgtgcttcttctggggagggaacagccatagagcctgaagtggtgtcatggcccctaccaattctccaaccctggccaaagtgtctagaagtagccaaggatgtggccggcagggtcctcagatgcctgggcctggggagtcttgtctggagatcagagctttgctgtggccccagagggccatgagagtgactggcaacaaggggaggggccatagtcttagtcaaaacctgttctctgtcccccacagcctgatcctgcacagagtccttgaaatcttggctgtcctctgtcccttcgagcacatgctgaatgggctgagaggtggccggtgtggtgttctgggattagggatgcaggagatggctcatccagacctctccttctcatgacccaggggttcatcttagcagcttttgagcttctcctggggagggttcgagcaggggcggctcccccaccataccatgccctcctctcgccttgcttgctctaaccctgagggggtctgccatcctcggcctccttattgccagcagatgagcgctcccagccctaacatgctgc

SEQ ID NO: 64415 - DNA, 1045 bp, Homo sapiens
tgaatggaaagtgagggggtggaggggatcagagaaggatcctcaaagtgaggttgaaaagatgagagtcaagggaacaaaaggaagagcttcccagacagaacagaggccccactgtgggcggggaactggagggactggttgatcagtggctggagaggtcatcaggggtcagatcacttagggccttgacggtggcattaaggatgatcattttttatcctgagagcttgtagtctagttatttcgcccttcccttcccccagcctgtaggaggttggctggtggagtggaaggaacatgagctttggagtcggactcaggttcaaacctggattccacaactgactaattttgtgatcttagcaagttacttagtctctgtggactctgcttgcttcccatggtgggaggggacagaggtggggaaagcgagtcctaaacccagacatctgagcctctccctctgccacctcctggcctctccccagctgtccaaaccagagaaggtgtcaatccctgagcgctacgtggagctagatcccgaagagccacccagccttgaggagctgcaggcgcggtaccgcaaagccgagaagatccgcaacatcctcgcccggtcaaggtcagccctcgcttgctcaagtgttggcaggtcaccctgaccccaggtggcgtctctaccatgtgggccctgggccgggctggctggggtgcgtgttttgccaggtcttcgtctcaggtaagccctactcattggagggggcaggctggtacatcgccagcagatcagcaagggagcctgcctgggtcatctggaaagacctgcaacattcgtagaggcttcttgtcctgggctgtcacccccaattctgtgtcccaagtgaccctagcaagtgtggagaatggagccaagcgtggccgtgaagtggaccccgttggagatcagctccagtgatggcctgccagcattcgggcctgtgcaccctcatgcagaccagcggatcagagccaagggtgccagccttgtccgtagggcaccaga

SEQ ID NO: 64416 - DNA, 1735 bp, Homo sapiens
ggcccaggacattcatatctttaaaagctgcaaacctggtaacctttaaacttttaaaacaaatgtcatatggggtaacactgaccttttataatttgatgtctcaaatgtagagattatctaaaaatcgtaacttgaataccttgtaatttttctcttaaaaaagaagacttgtgtaagtctctgcatcaacgccaataaacatgttgcttaataataatggattggcgtggttcttccccaggataccttatagagtctagtgaacttttcctgtttgtggaaacaatcaggctgggtttaaatgaggacttgtctctatttggagcatttgtgagcgtgtaaggaaatgagtgttttctttgtgaatcattaaattgattttttcatctttggaacttcagttgcctaatcctttccaacaatagttggaaaccatcacctaagagtgattacattgatttggagtcattgagagcttgtgcatgaatgggtgaaatgtgcgaatatggctctgggtttggggttctggagggacttgaggcatcaaagacaatcaggaccatttggggctttgaggtggatggatgggagagagaagatggcctgggatagataagcatctgctttggttttgctcaggggaagagaggctttgagcctgctctgttctcaacaacctgctcagcggtcaaaggcctgtgaggatgcaggtcctgggtcaacaggaagtcaccacggagctggacagtcatggttggatcttatcggttagattttccctcttgggaagcttgttacaaagttgatactgtgaaacagccttagaaacattccatttgatttagcatttcaattttatatgatttagtttttttttctaatttaaagaaaacatctatctcaaatagatgggtctcatacagcagtttttctgcctcattggctccaagctgcttttgcttgtacctccccagccctactgtaagtgcgagatcccccacctacgaatgttatcttgttgaaaattcccaatagaaagatccttggttattcttcttgcttagcagggccttgaagggcgtgtttttccattaattctgagcctgggacgtatgtctcctgaaccagctgtagagagtggaagggacaaatcccttctctagaactctgtcccaagttgtttggaggtcaccctctctgggagccttctatttccctggggaccactgtgagcctgaagtcatgagtcttagacctgtgccccaagggtgtatgtttgaaacctctgggaacccagatcagagagcacttagcagtctggaacagcccatatgaaggggacagcagcttcattctctattgcacatacagcttttccctaaggggatcacaggttcatcttccaaaggaccccatggaaaaaggtgaccagccgggctctttcagcaatcaggaagcgactacgtttaacctcttgttctgttgccagtggaagcgtgagcaggactttgacctgcagttgctggaacgggtcgtgcaaggggaaaaaaaggacaaggaggagaatggctggttgaaagtgcaggccatgcctgtcactgagttggacctggagcctcaagactatgacttggacatcagcagagaggtgagggcaggcacttccttcatgtcctccaggagacatggccttcaagttcccagcctgatccaccttcccactgtggggtat

SEQ ID NO: 64417 - DNA, 1080 bp, Homo sapiens
tgtctctcttgcctgcctcctcttcctcagagacctaagagtgccttggagcgcctgtactcaggggatcaccagcgaggcaagatgagtgcagaggagcagctggagcgcatgaagcgacaccagaaggccctggtccgagagcgcaagaggacactgggccaaggggagaggacgggcctgccctcatctcgctacctcagccggccgctccctggagatcttggctcagtatgttaggaggggccaggcagcggggcagggacagggagccgagtgcccctcagagtcccccaaacacaagcacatcacacctcccagtgagagagctgtccattgacctacatggttcagagaacaccccacggggctgtttgtccacgacccaggctggacgaatgcctggtcagagggtgacctgaaccagagctggagtgaggatcaaacaggcccaggagcctgaggaaatacccagtcagtcctcccagccgcgatggagaggggcctttgcaggcgttcggaatctcggctgaattcaggacctgggaatacagggttcagagaggagaggaggaagatggtgacatgatttggttagaagcacaagcaaactgatcagcctcccagacctgccagcagatgctgtgtgagggtgatggagcacggggtcacacccctgccccaagggccactggtctccctgggcttgcagtgcagaggcctcagggtgtctgggattgctggggaggcctgtgctgccccctggtggcgcttcctggcgctgcgccctgtccacagtcaccttaggtccctttggaaacattccatttgacttttccctgttgtttgaaatcccatgtttccctaaacctctagcctgattgttctttccctaattcattgcacaagctcctttgcttttagtgttaccgctcattgcctctctaatcctgcctgattgtgtttacagaagcttctgatttgcattgaacatgctctaactggcctgtgctacttattaccgggcttgtaatagcggttcttgtctccatagcctgttgagtgttcccagatgtgact

SEQ ID NO: 64418 - DNA, 1317 bp, Homo sapiens
gtgctgtgataagcatggaagtcagggcagggttagcagcctgcctgcgatgtgcactccagatgagcggagggagcagttcagcacagcaccgagggcatggacccaggagacctgagtcctgggtttcaggacacagttatacaggtaacacttggaggaatagaaactgtatacctctgaggggatagaggagcagagcatgtcccttcttcactgctccgccaggggaagtgtgagtgctccttggctgaggcagtcatgttctgtggctctgatgtggcctgttcctaccctttaaacctccactgtggcagtacctagcagtcctccctccagctccgtctcgctgaccactggtctggttctctttctcagcaggaagatgaagcacctcccaggcccccactccccgaactctacagcccagaggaccagcccccggctgtgccgcctctgccaagagaggccaccatcatccggcacacatctgtgcggggcctcaagcggcagtcagacgagaggaagcgagaccgggagctggggcagtgtgtgaatggggattccagggtgagcgggggaccctggggctgccactctacatgtggggagaggtaaaggggtgtgacactggcaggtcacatcacctgggactctgcccacaggtggagctgcggtcgtatgtcagtgagcctgagctggcgaccctcagcggggacatggcccagccctccctaggacttgtgggccctgagagcaggtaccagacgctgccaggcagaggtaaggcagggccctccctggagtttctctgggaatcccaccacactgcttccagccttcagctggtgcctcgtacccttctgcctgcagctctaggcctaggagtgagcagcagctgtcaggggggtctgggatgccaagagggaggacctggcctgtcttcctctggcccacatcctgattctcttcctcttttgttacatctgtccccaggaacaatgataatagcagttactagaaagcctggcactgtttaagcactttatatagacatgatattcacaacaatcctatgaggaaagtactgtcatccccattttagagacacagaaactaaggcccagagaaattaaataacttgccaattagctggtcattggtggaaccggaagacaatcccagtgctctggctccagagtcactgcaccctgtaggccggagtgctgggtggctgccaccaccttggccatctcagaccttccagagtgccactctaagactcagtgagccctttccttaaatgctttcttgcca

SEQ ID NO: 64419 - DNA, 1457 bp, Homo sapiens
cctgagcctcctcattttcccttttgtagatggtcacagaggctcctcctcagcttggtcatctgtggctctcaggcagggctttctcagcttgggtgagcatcaggatcaccaggagaggtcctctctcctaggaatatatgtgtgtttgccagttttaccatttgttttattacttacttgtttttaacacttataagatgggcgtggtgctgcttgcctgtcgtcccagctactgggaaggctaaggcaggaggatcatttgagcccaggagtttgaggctgcagtgacctgtgattacacaactgcactccagcctgggcaatacagcaagaccctgtctcaaaacaaaataaaacccatttatatttgtgaaacaataatatccatcctgaaaatgacataaaacaggattatataatttaacaaataacaataaagagaccacctgttttataccaacagctagactaagaaatagaacactgccagcaaccagaagcctgtgggttctttcccaggccaagctgcttcctgtctgccagaagtaaccacaatcttgactttttggataataatccccttgcctttttttttttttttaattttagtacctgtgttgactcctaaacactgtgattatgctggtatataattctatatactattttgtgtcttgcatcttttcttcaacattatgtttgtgagatttatatacattgttgcatgtggctatagttcttttatttttatttgacttattttcttgagtttaatgtctttttaaaaataaattagataatattctcaaaagatacaaaagcaaaagatataaaaaagtacataataacatgtctccttcccaccctctgcctccagacattccattcaatcaaaggcaatcaatgttttatgtttatctttctggggagctttttagaaattggtgattcggatatcttgtcaggattggaaactgtggatcctcagagaaccagtgcgtatcttaggcagatggcttaactttcacacatcagtgaagattgttgataaacctttgctttggagtgctctttcctgaactttccaagagcttggagtgccctttcctgaactctgcaaaattcttaaaaacaaaaccaaattagaccgagaaagagggaatttaggaggtggaaggcatgatggtcgttagtcctgcgagtgggtgttcatggcaaccaggggccggtctgttgatatgtagaggaaccacagccctcacagaacactgtggacagggagtttcaaggaaaatgttgcattcatcacattctagggaatgaactgcatggtaggcagtgagtcactcatcctgaccgcctgttctgtctgagtcaggaaggaggaaatattttgtaaccatgcacatttctgatagaaaggccaggaggatgtagactctgtccttgttcag

SEQ ID NO: 64420 - DNA, 1183 bp, Homo sapiens
ctctctccagcagctatcggtccacattgggacctctctgcatagcacacacacaccacctgtctctgccactgttagctccaccctccattttcctggtcagatctgcaaaatagagctcagtgaggtggtttcccctacattaggcaaaatagacttggttctccctggccttatcttggccatgggagggtgcatctgtgaaagtcactcccctcagcccctgcatgacttttggcaagaaagaaattgggggaaatggaaaaatgggataagtaagatttagattctcaggagtcagtgagagacaggcagcatattgcctactttgagtcaagtgagggatgggaaatgtaaaatcccattggcccgcaagtttgggtgacttttgtatattgctttatggtttcctttcttgtaacttacacaagtacagcctagcctcagttattcagggaacaattaaaaacccttgctgggaactagccaggttcctttttaccttggccaggtcttcttcccaaatggtaaagggtaaggaaggctggccttacccacggggaagtgggctgctcagagacttcattaaactaaggcttgacaatggtcaagggatttgtttgttcctctgggtctgcccatctcaccaccctgggcagggggtgatgggcttcgtaacttgtgtttgttcccacgttcagtagtacacctctgtcttatcggtggcaaatcttccaagattcatgctgatttttcacattcattttaggcaaatatatacttttaaaattgatgatcctttaacttgaacatctacattttctttaactcaaaggacttaccagcattactagaatcatcaaaaggttttggttttttcctaaaatgaaataggcatagaaatagcgaagtatggcccaagtttttgtccctctcatactatgaccctacctgccactgccaaggacttccacaccatccattataggatgaattttctttcctgagttctgatctcaaacaccatggttaaatctcttttaaattgttcgcctcccagatgacaggccgggaccttctcaaggatcgaagtctgaagcctgtgaagatcgctgagagcgacactgacgtgagtgagcagagtgacacgctgacccctcagctgcctcctgacccagacccc

SEQ ID NO: 64421 - DNA, 2419 bp, Homo sapiens
ctgtcctaggtaatgaggacaatgttgccaaaaaggagctataagcatttgggaccatgggtaagacataatcatgtagatgcaccacagttctggtggaacttaaggttgagtgggggtgagatgaatgcatggcacgactctaaactagtatcttacagaatgtgatgagggaggacaaaagaagaagcaagttcccttctatcatgttcctccttgccttctgccgcagaaccaggaaggaaatgaacactgaaattgcactcccacaaaaaccagcctgtgcaaaagtcccttcagacagcatataacattttataaaaaggagagagctgcagtctgggaaggtcccatggcccatgggaggagcatccacggtcccatggaagtagcatcaccaagattcaggcctggttgtttgaattgcatagcacacagcctccttaaagttttccctttgccagttccccaaattctggctgcttcaagtgtcatttgatgtctcacctgttacgttttgttgtatctgcctttttgtttggaacagattaaaaataatgaacctttgatcaacgtgctttacaaagtgctgaagaagtcagcacggggctgtcggcccaggagaagcgtaagatgatctgatccgtgtctccaagcggggtcattccattgcttctggctcggtgccgacttcatcacttgcttaaccagttgctctcctgaccgccccaggcttcccgcaagtcattttggtttattttctttcaactgaagctctcttcagcattttggctgatgcaccaggctgagcctctcatctgcagttttctgtgactccatgttttgtgctgccaagggtgggggagcttgcctggcttgccaccagcttgtgttgtgtttccatcatcacgtgtctgcctccatggcgagggctcacccagacagagttgagcatgagtttcttgggagggaacagcagttattggtcatcttccaagagccagggtatcctcagatgccacggtggccctgagattaaggtggcactttttgggggcaggcagttggtatttggataacagcctggagctggactagaataaaatgccaccccctgcccataccctctttgattgatgcagaagtagggactgcaatgtggccagctctcacagcattccaggggaggatgcagatcgagaagcaggtgttgtgtccaaccatcgtgagccctgagaaagtgggttgggatgtggtggaggggagggaagatgcctgggtggcctttgattcccctctgatggagagactctttcaaatggatgagcacccacagacttttactttttctgatgacagagatgctggggggacccagagttgatgttttaagtgtatttgaacatggctataacaaacacacttttaaaaggaaaattagatgtaatacgctacacgtggatataatatttcttagcagcctcggctgtctggagcagagctacattcagaagcttaacggtcctctgagctgtagaaacagctctcatcaagcccatgctctaaagcctgtgacctttcgtccataggagacagagtcagctcacattactttgatacattcatgaactcactgagcaaacattgcccgaatttcttcaatatgctaggccctggctgggctttgaggatacagaggaaaggcatccatctccacagtcacccctaattaggttactctctagtgaggagagacaaatgagcaaacggaacattgtactctaatgtgctgggtgctgtagtagcagcagatgcaacgtgtggaaagagcaccctgaagggcatcacccccagttaaagggagagaagagatgtaagtacctcgtgtcagtcgagcttatagtcctttgaattcctaacctacaacacctagtaagcagcagttttttttgtttttgtttttgttttttttttttttttttgacatggagtctcgctctgtcacccaggctggagtgcagtggcgcaatctcaactcactgcaacctctgcctcccaggttcaagagattctcctgcctcaacctcccgagtagctgggactacaggtgcgcggcactgtgcctggctaatttttgtatttttagtagagatggggtttcaccatgttggccagactgatcttgaactcctgacctcataattcacccgccttggcctcccaaagtgctgggattacaggtgtgagccaccgtgcctggcaagataagcagcactttaaaaagggacaagagaaatctacttcttagaaaaagaggtagtactaatatcctgagagagagaaaaaaaaggttgaatgtatattcagtattccatgaaggcagcaaagggcatacttttagaaagctttccatcaaaaa

SEQ ID NO: 64422 - DNA, 1223 bp, Homo sapiens
gaccattctgggcatggaaatggagataagcacagcccctctgggaccagctgcttatgagaggtcccccctggttccttggaggggggtgaggtaaggatataagcctctctggagaggagtctccctgcttggcatctgatctgctgacctctcccctccatgtgccacgttgacttggtgtcccccatgtccctgttcgagaggccaaggacttaaggatccagagcccatcttcccctgccccccaatcagctgatgctcagcttccagaatcaggggtgcttgtgggcccacgttgagaagctttaccttcctgaagtgagcgttcctgctggggtgccaagtaatcatacaacgggacactctgctcttgggacccacttacattagtgtgcttttttggaaatgtttactttgctggcattttacttgatggtgccagggtgaaaaggactcacattgattaagcatctgttcctgccttggcagtatttgggcacttgatgttcatttatctcattgaatcctctcagcaacttgagcaatatgaattattatcccttttttataaccaggaacccaggtgtcagagaaataaagtaacttctgcaaagttacactgctgggacatgtacgcagcaactgacttcacacctgccttctttcgtccatgcatcacacgctttgcccactctaaagtcgtgttcgttgaattgtattcttggcattgaagttctgctcttcagaaccctataccttagctgagtcagaagggtggggtgtggggttcactgttgttgacactttaagttgtctttatgctgcggtgaagcacagccaggaagatgagggtacctgctgtcactcgtggagcctttgtagatagaaaaggttgcagtcagccccaaaaaggcttttgtcttcagtgagggatgtgccgtcagtggcttcggggttactggaatctggactcttcctgactgtttgaacctgagatcaggacttttctgttcaggctgtttccaaaatcagcttctgggacagtttttaaagttgtaattggggatgccgcatacttcagaatcacctgggagcttgataaaagcacagacctggagggttctattgaattggacactctgctgcccagaattctgcatttttgtcaagctctggggtgattcttgtgcacactagggtttgaggtctattgttctgga

SEQ ID NO: 64423 - DNA, 1053 bp, Homo sapiens
tagtcagctgtgggtctgaaaaggtgggtgaggggccatgggacactcaggtgactgccacgaggggtggcgtgcctccctacagtctccagtgtacctggcttgggatatttttaacttggggatcttcatccagcctcatagaagcaggtgtatgaacatcaggtcctaaggaagaagatggaaagggggtctccccacaatgaaaggagatcagggcttttgattagaaatcaaccagtgcaattctgtgtctgttgaacacttgctgtgttacccagatgacatggggagatgcagaaaaaaatttgagtctgtctggtcttgagatacttccagatagtcttgggttggtgaaagaaattatccccaaataacagactcctctacaatgactagacaaagatctgtttggcctggttctcagagctgagatggtgagaatctctgtgggttacaacactggagaggcttctgggaggaggtggcatgtgtttgaagctttgaagagccaggggtgctggggctggttgagatttaaagggaaggatcagtgagagccaaggagagccagggcacagtggttgtggccagggcagcagaggggaggtggcactaggtcatgcaggctgttgactctatcctaggctttaggaaggaaggtggatgctatgagcaaaaagacctggctttagcatgtgaggagaacaaggagctttctctcaaggccaggactgtctaactcacttgacagtcaggtcacacagagcttgagtgactgctctaagtatggtggtaattcctcaggattcaaaatgctcaagcatagctgtatggaccaaatgtggcagcccagcccatcctcctgcagcctgtggggacagacagggttgttcccaccatgcctatggagagagatccagcagcccccagcctccacctgccctgcgcagcaccatatccccgttcctcagcctccctgacagccagtcagcagctgcctgcatagttcttgtcacccctgacccagggcccaacagtccactcagacat

SEQ ID NO: 64424 - DNA, 1020 bp, Homo sapiens
gtgacaaagcaagactgtctcaaagcagaagaaaaaaaaagcttgagtctgggtgaggttgcactgttggttgttgctttcctgaaaaaaacttcctgaagcccttttactgccagtgcctttatttgtcctaatgacagaattgacacagtaattgcttaacggtgtcacatcagtgctgtcctggcactgacaccggggtgaagagcgtaattctagcagtgtgctcctgcggtgctaacttccttgtgctgtgtctacacatctgcagctggaggagctctcgttgcttctcacccggttaaggcggcaccaggccaagttggccagtgtgcgaaatttcgccatcagccagttactgcagcaccagctgacctttcccacctgccaggtcagcactggtgggctcctctcagggccgggggcagggagtgacatgctggctcgcgttcgctcgtgcccatgctctggtctgtctgtgctttctggctctcgcgtgttcgctgcctgtttgcttctggatgctactgccagacactctgtggtggtggaagctgagcctacccttctggcactggggaggggggctgcatgtggtgtaggggccctaaactgtcgcttctctggctgtaagtagtgactgccaggctggtgtatggtcatgttcaaagggctgtgctggctgacagccttgttgcccccgtggccactgcttgggatgtggaaaggcacatatgcgtcagcctggagggagatgcagggcgccctctcttatctggatggtgccctgctgcctcacagagtgtcttctcatctcatatcttgctgaacctcacagtaagctggaagaggttaggtaggagaggagtaaggatcacacacaaggcaagtggaaccagaaggggaagtgacttgctcaggatccctcagctagaagcatgcaggctgcagccaaaatccaaggcctgcatgacacaatgttctaaactgttgcaagaacgttgggctttgcaggcaagc

SEQ ID NO: 64425 - DNA, 1051 bp, Homo sapiens
taataatagatgccaggcacagttcccaagggcttcgctttaaattctcaccacaaccctgtgaggtaggtgctatgtttatgcccatttcaaagatgagaactctgaggcgctgagagacaaagtaacttgcacagggtcacacaactacaagtcagcttccttgcatcttgaaaggcaggaaaagacatctgtgtccagtcagttaaattataacaatccagcttaagttttcactttccaagaggctttcacagtttagtgttctaaccctgagagtaagatgtgtgtgctcatttcatagatgagaagtctggggctcagaggggacatggcatggggcggcttccctgggagtgagtggcagaggtttgggctccagtgtgacttcttgtctccccacttgcagaactcatctcatgtggaccgacgctccatgccctccatgggttacatgacccacaccgtcagcgctcccagtttacatggaaaatcggtagggtgaatgacaagacatagcctgcaaagccctatctcatcaacattttccttcctctgagttagtacaatgcagtccagagggcagctattaacccccatattagagatgaggaaactgaggctcagagaagttgaatgacttgcttagggtcacctggctgtcactgggtccccagtgaaggggaagagcgtatcagggaaatgtaggggaatattaggcttatctcctctttcaagatgaattttgccagaaacatttttcagctacccacctttttccacaggcagtgcctctcctttcttccctgatctttgattagttaactagttaactcaatcttcaaagctcgagtctgagaccaggtgtggttgttcatacttgtaatcctaccactttgggaggccgaggtgggtggatcatttgaggccaggagttcaagaccagcctagcaaacatggcgaaaccccgtctctactaaaaatacaaaaactatctgggtgtggtggtacactcctgtgatcccagctattcggaaggctgagatacgag

SEQ ID NO: 64426 - DNA, 1026 bp, Homo sapiens
cctgtctttcaagaatttttcaccttggcctgggaaaacatgtcttggaagtatgaaaagatcacatcaatataggaccttggaaaagttacaggcagtgtgatgacgaggtcaaacagagttggatcactgagggctgtggcactacagaaggtccacgtgggggaaggcatgagccagcatcctagagaatgagtaagacttgggtaaatagagcaaggggagaccatccaggcagggggagggaagaacagtgttataagagtaagaagggcaggaagggtacacacgttagtgaaggaccttctgtgtatcagatgtgggggttgcatttcctaacctgtctcattgattcctcagaagagccttatgaggcaggtaatactatcctcctgttacaagtaaggaaacggaaggtcagagcagtcaggtgagctgcctagggtcacaaagccagcaagtgtcaagcttggcttcaaacccaggttagactcctttttcctttttccgttgcaagatgttgctaaggtgtggaggaggctgggacgggactagggtgaggctgtcaggcaccagcaggtgtaggggtgaccctgagatggagtacttccttcagttttgggccctaggcatttggcgtggcccgtaggaagagcagtgagaaaacagcaggcctgcaaggtgggtgttgaggtcagctgctagcgagctgtgagtaccaggctgaggagtttagactttatttcagaagggacaaggagccatggaagtttttgcagcaaggaactgatatgatcagagcacttgactgtggacaaagtggaaacccattaggagcatctcagagttgtctggagggagataattaatcagtatctggactagaagagtccagaaaaaagagaactgatgccaaccacttcctttatgaacctctggaacttggtgctaaggataccaggcagagagaaaatcttggtaacttggagaattgtgaggcctttcctataaatatgcatagccatt

SEQ ID NO: 64427 - DNA, 1060 bp, Homo sapiens
tccaggggatattttccaagaatttctgctgattttcagtaagacatgcacaggttccttcttatcctgtttttttgtttgtttgtttgtttttgaggcagagtctcacactgtcacccaggctggagtgcaatggttcaatctcaactcattgcaacctccacctcctgggtccaagcaattttcatgcctcagcctcccgagtagctgagattacaggcatgtgccaccatgcccagctattttttttatttttagtagagatggggtttcaacatgttgcccaggctggtcttgaactaacttcaggtgatctacccgccttggcttcccaaagtgctgggattacaggtgtgagcccctgtgcctggccttattctgttcttattggcacatttccaccttgcttaaaatagaaggaatccttcctgtgatagtgaatgatagctgatacatgcaaaggaaggatatcaggtttgcttcagccactatagggatccttggctgcaggccaagtttgcctagactcccttggcactgagccagatggactcagatatgtaaatgtcagaagcaggcccatatttactatgcattttggatctggattttaagagggcagggaggagaagtaaatgctgaaggttcatttgagaggttttcatctatgaccattagtgattccagaagcatgtcattgtctagtttttcattggttctcattttgttttctctgcctggtccttgcatggggtctgcctttcatgctggattcagagtattgaaccagttatctgtgtaatcaccctcacttctggatagaacctgggagcaatatacagagaagcctggacttggagtcagacctgggctctaactcttcgttctttcaacaaatgtttattgagcatctactatgtgctaggcactcttcctggggatatagtagtgaacaaaatagcaaagttcccactctcgtgtagcttacatttatagaggaaggagacagatgataagcaggtaataaacaaatgtgtaaaataaatagcatcaggtaatg

SEQ ID NO: 64428 - DNA, 1920 bp, Homo sapiens
aacacaacagcagaatacatcctatatggcacagaactgagcatagtctaatgaaaactttgcctcacttaattcattaggtaacttaaactcttttcaatagttcagtgtaaattcagttttccagtcagcataaatgaaggtattttatagcatagccacctaaataagaaacaaacaaacaaaaactttttgttaagaactgattcctttcttaatttactttctagaagaaagtgacttataatattatatattaatttgcttctaggagacaaaaataaaaaccctgctttcttaggataaaccatcatttaatccaagttctaatgtcctattcaaagaatggctgttcagtaaaatggtaatttattaaaacaaagagtgaatatgggcaaatatttggttctggaatcaggttgtgcatgcttggaaagggacaacagtatgctcagatattaccctgactagttttctttgctttgcaggacagttctgggatgaggctgtggaaaaggaggtggtttgtgcttgctgattactgcttattttactataaaggtgagctaacaagtagcctattaccctgccgaagtgttcagttttacatatgtggatggttggtgacttcaggtttaccagtcctaacacaggaagttcaatctgttgggttaaaataaatagaatccagtttgcctgctactaagggtctcaggattcagagtcatttccgtttctgtcccatttgggacataggtccacctttgaggtactctggagaggtgagaagtgtggatcattgattgtgttttgtaacctgtcatctggatttattgaatgttggatgagcaactggtgaattgaattggccatctgagcttctgtggagccccagaacataaagttagggactatgtgttgttaagagggagtctcaaaatgtggagaaagagcttacttttaagataaggctagactgctactggtgctttcaaagcagttcagggggcctgagaagtgaattccatcattggagaatctgaggaggcttcttagaaggagagaagagataggcttttaagaatgggtagagctggctgggcactgtggctcacacctgtaatcccaacactttgggaggccgaggcaggtggatcacctgaggtcaggcattcgagaccagcctagctaacatggtgaaaccctgactccactaaaaatacaaaaattagccaggcatggtggcgcatgcctgtaatcccagctactcaggaggctaaggcaggagaatcgcttgaatctgggaggcagaggttgcagtgagccgagatcatgctcttgactccagcttgggcaacaagagcgaaactccgtctcaaaaaaaaaataaataaataaaaagaatgggtagagctttgcctgtgtgtgggttgtgggaggatggacattacaaggggaggaaacaacttggctgaagttctggaagcagtgggacagatgagcccagggaaactgcccagaaggttgttctgatgcatttttccattcaaagacagccgagaagaagcggtcctcgggagcatccccttgcccagctacgtgatctctcctgtggcccctgaggatcgcataagccgcaaatattcctttaaggtactgcccctgcacctctaatgcagccattctgtctaagaaactgtgttctcaaaatgtcttcataaaagcagttgcttttgtcgggagggggaagaagctagagagtttcagattccggttaacaaagttgtaagttatttaaacaagaataatatcacatgaccggtactgtcatttgactctaagctttggagtcgcccagccatgttcaagtattcagacccctccttcctgtcactgccagtcttgtggttacctgtcgaa

SEQ ID NO: 64429 - DNA, 1010 bp, Homo sapiens
cgtttgttcttatgagtggactgtctgctcaatggttacagcttctctcccaaaacccacttgaccactttggcccctggtgctattggctgtcctggggcccaggccgcagtgtgggtgggtcagcttgaatccagccttcctaccagttctctaccagcacttgccttcctggtgtcaaagagtctttgttattatttggctgaaaattttcatcttttcctctcccccttgtctagcatgcatatccacctaacgtctcaaattccaaatcagccaaactcagctcattatctcctcaccaccttggcctgccatttccccaagactgctttttccggatcttagtaatggtaccaccattctcccaggcactcaggttagaaacctcagcactatcaccagattctccttccccgacatgcattcagtcagaaagccctgtcagctctgtcggctgaggccattcttcattggaatccccactgccagttgacctgcctggggttctctgttcatggctgggttgtgagttcccagagctagagaccctgtctcttttgctctccttctctccttgccagtcattcattcattcatccattctgcaaagtgcctgccatgtcctaagttgctaagagcaagtatcaagagaaagtaacgtggttcctgccctcgaggaactcatcagctaccaggagaagcagatagcatatctctcacttgtcacattgtcacccagccctgtctctcacctagcatagcatctaaaaatatcagagcagcaatgtaagttttggtgaagctttgtgggaagacagaggagggcattacattgaacagcacacaggagaaatcccaaaagtccccttaaaatcttcttctgcagctctggccccatggcagctgcaacagctcccggcctcttctgttggacactcctggtaccaccgtctcttgtgcccacttgcccctcacagccctgtcgtccctctcttttcttacatttg

SEQ ID NO: 64430 - DNA, 1058 bp, Homo sapiens
aagcaagacagaaaccaaagaccgtccagcatggtcagtgaaacatccacggctgggaccgcctccaccctggaggccaagcctggacccaaggtgagctcctggccacttgttccttccttcccttcttttatattttgccaagcccctttgtaaccagaagtccatttgatcttcactatagttttgtgagagagacccataagaagtgttctccccaaatgacagatcaggaaactgaggccaagagggatatgtcccttgtccagcagaacaggtgattgctgacagacccagcactggtgtctataggtccttgagcatgttcttcactttcctcgcatggttgggagggccacgtttctatttacatgtagctgtgtgttaaagcaagcctggagagatttggtgacatgaggccctgagaaagggtgcccttgggaaggacccagaagtttctgtgctccaggtgtagaaacactaaggatcagggtaaagaaccagcattgaggagaggaggagagtgctgagggttgaacccagataggaggggtaaatatctggaaattggcaaaaagctgtgaccaaaaattagctttgctccagaaagccatggaacatattacagccaacagctgctgctgaaagttgattgaaaaattccttttaattttttttttcagtgacccagctgggaggtttgccaggtcttgggcttgccttttaattagaatgctgtggccatgtgcacgcccgttccctgtcttctggctgttcatttgatcaaagggtgctgccatttagagtgaggcagagagagccgacggtcctcctaacatacaagtgcttttttgtgtcaccttaaattccctgttgctaaagttcagtctgctttttcatagatcataaagtccagcagtaaagtccacagctttgggaagagagaccaggccattcggaggaaccccaatgttcccgtggtggtgaggggctggctgcacaagcaggtgaggaagccgaggagtgagaatcctggaggaaatggctctggctgagtt

SEQ ID NO: 64431 - DNA, 4064 bp, Homo sapiens
tgccatgattcaattaccttccactgggtccctcccatgacatgtgggagttatggcagctacaaattcaagatgaaatttgggtgggaacacagccaaactgtatcagacagtttatagcatcccttgtttcaagatctagaatttcctctttaacattaaatgaagtattttacctcctagaataagagttgggagcttttaaaataaataatattaatagtattgctagtattattattatttttatagctaacacttagcacccttactattagcaggtacttttctaagtgctttacatatatttaattttcacagcaatcctgtgaggaagataccattattatcatgaatactaaggcacagagaggttaagagtcttgccaaaggtcacacagagagtaagtggtggagtcaggatttgaatccagatagtctggtcctagatgccatgcttctaaacactatgctatactgcttctcatttcagaggtcttctggggacaatcttcttccttgtccatactcagtgcgctgagtgagtaggctactgctgcagagagattgtaattgtatttgtagcaatgaaatttcatctgtaataactttgcacttgtttgaaagatgccaagcctcctcagtagtcttttctccagaaaatgttctcaaaccttttatcttggggcctaatttccagttattggatcattttgctcccttctaagcctctttcctgattctcagtgactttcttgaattgtgagcttgaagccagaccctttctggctaaaagagccacatgcagggcccctcctaaaggggtagtccttgacacagaacttccaggactgtggttttgatgtttggtgcccgtgtacaggagtgttttctcctcagtgctgggctgcccagggagccactgacgaatgcctctgcagctctcggggaagaggagagaagcgttcccgagcagtgacgctagcatttgactgacagcaggctgtgtacaccgatccccaggctctgccaagcatttgatgttgaggtggggcctaaggttgagagaagacagtatgcgcttaggaagttcaggggcccgcttgtgtgctgagacgccagctgcaaggcatgcaagatcactttggaggctccaaacctggagggtgcccttgcttgacctgcctttcccagcatcccagtgagtttagcttgttgtttccattggggtctgagcagccttcagttttctcattggattatttggaaaagaaacacaagttggaatttcctggaatgttgtgagcggtgtttggaggatagcacttaaagaagatactgtctttccaaaggtaagaattatcttccagatctttgacctctttgctaaaggcggttcattttgcaggttgcagggtgagactcatctatggcatgtgctgattatgggttcgggggcggggtatcacttgctgctaggagatggctgtctcctattccttctgcagctacaagttggtaaagctggcgtgagatttagagcactggagaggggagttgctcctaaactcccacaggagtctgtcctgttgctcatctgctgagccctgggctgtgaggctgatgctttgctgtctgcagctgacatagccagcaccttgtctctagatgctggcagtcttgggctagctttgcctgttgtatttggttgccatggtagcagaaaaatgaggaaaaatggaaacacctggcaagcagatgcagaaacttgactgttcagttttcttccctggactaggagacagtgtctatgatagtcgcacgtaggggaagagatggtgatggggtctttagttcattcaaacacctgggtgttggctgggcctttggtattgctgttttgaagggcatcagcactggggatgcagtcattgccacacagcaaccatgtctttggctctgtctttggctctgtctgtgctgggcaaaaatgctgcagtggtggctttgctgtgtgaggaagggaagctgcttcctgtaagtagtaattttgtttcttcctgtgacttcccttcttgtcctcttcttttacctcctgctagtcttggatgtgctcagatctccagtaaaaaatatcattatgtaatgagagaagtagctgcttgttaagctaggaggagcagataggctagaagagggctcaccaaaggcactggttagaagagactggtccagggtcatacaacagaaaaggacttgtgccaggttcggggcaatactccgatttggggaacaggcatggggaggtggggatggcggcacacagtgcttatgggttattttcatgccaagtgagaggctgctgtttgggctggtttctagctcctggggtagagtggggtgaggaactgcagcctgtgttcaagaaaggacttgagggggaaggagaaggaacacaataagccatagttgagtagtgagaccacagttgctgaatgaaaacccgtgtcagacagcctcccccaggctgttgggagtttacagtgagcgttggcggtctgtctgtgtgtgtctctttctctgagaagagggggtgtggagggaggtgtctgcctgtttgggataagagctttcttttgtttcctagttttcattgtgcattgctttccccaaacccttagctgatgggtgtaagctactaaaaaaaaggtgctggtgtttgtgaatgtgtcctcttctcatttacttttcctctataccagtagttttagccgagctctctgtgtgtagattccttgaggacagagcatgactttgggggccagctttcccaggaattaatgggataaaggtgtcatttaataaggtgttctcagtaaaagatttgtgtttccttatagctttctaacctcccatcatagtgttgatgacttatttatttaatgaatgagagcaagccttgctctgtgccaaggctggagtgaagtgacgtgatctcggctcactacagcctctgcctcccaggttcaagcagttcttgtgcctcagcctccctagtaggtgggactacaggcgtgcaccaccactctcggctaatttttgtatttttcatagagacggggtctcattatgttgcccaggtcttgagctccttagctcaagcgatccgcttgccttggcctgagattactggtgtaagccactgcgcctagctgattttttttttttttttaattttaatagagacagagtctcaagaccagactggtcttgaactcctggcctcagatgatcctcctgcctcagcctcccaaagtgctaggtttatagttatggagcctctgttcctagcccttgatgattcttgacattactgttctcctggggaaagaatgggaactcagtcctccagacacagaattactgtgctttaaacaatttatttttataagatgctattgggatgtttgtaggagatgactgttgtttagaagttaattgtttggcaccttgagctttctggagacatatgccttggaaataaagtgtagctgggatttaaattctggggtcttcactggtaacagttccaaataatgctttgtatgtcatgggtgctttatggttttcagtgtcatttcaatccacacaactgctttgtgagatgagaggtggtttccacttaatttgcaaaactggacaccaaggtccagagaactgatgtgacttgtggaggagtcagtaagctgcaggacttggctgagatccagttattctgggctcttgctctttccaccaccacaagatttccttgacctgggggttggtcttagggctgaaaagagcaaaagcctgcttctctcagaccttgggacctgccatagggtctttctgtggcaaagcccaggttttggagtccaatttctatctcgaataagttatttgtctctgtgagccttagtttcctcctctataaatagagataccaaaactgacttggcagggttaagtgagataatgcaggccaagtgcctggcatgcatgcagtaggtgctcaacaagta

SEQ ID NO: 64432 - DNA, 1008 bp, Homo sapiens
ttgggaggctgaggtgggcggatcacctgaggtcaggagtttaagaccagcctggccaacatggtgaaaccctgcctctactaaaaatacaaaagttagtcaaatgtggtggcaggtgcctataatcccagctacttgggaggctaaggcaggagaatcacttgaaccctggaggcagaggttgcagtgagccgagatcacgccattgcactccagcctgggcgacagagcgacactccatctcaaaagaaaaaaggaaaagctgggtgtaaataaagcctaacccttgaacgtggtgcaaggatttttaaaacatgtgttaagaatgcctgcttctgcttcttgtccttatcttagatgctcagacttaactctgcttttttgggaagactagtctgctgtctgccaaatgaggtcatagaattccacgggcttgcctgggaccaggagcagggaattcagaggctggctatggttgggaagggtgacagtatggtgaggtggtacacagttgcaggactaaggaacagcctggcctcatggctggcttcacatttggcttgttagggttcaggctgctctaaccttcagtgcccagtttaccccagacacctggacatcagaggttctgaccaggcattagggcagagtaaaaaaagactttgtaggcctagagagtttttcttttataacctttgtgctatgctgatttagacatagtaatctctagggaggcttagtctcaatttggagatggggctaatattttaacaataccaactgagatgatctattgattatgaaagcattttaactctctgtactaggaaccttaaaaaatgaccatgctctttgattcagtaattttacctttgagactttaacccaaggaaaaatttgaattggaaaattcaaattacattgaaagagatatagattataatagtgggggggaggcacctaaaatatctagcattagaagagtataaatctttctagaatgtaaat

SEQ ID NO: 64433 - DNA, 1046 bp, Homo sapiens
agccattactctggttcatctcttttctcaatgtatgagtctttttgaaaaaaaaaaaaaatttagtattctagtaacatcccataacctggaacctcagtttccttatgtttaacatggggataaaaatatctgccctgcttacatcattgggtagtttggaggggcaaataagatgatgaatgtaagcatagttaaagctgcttagttaaagctccttgtaaattgcagtagttggtggtggtgatgatgctgtgactgacaactcttttggcaaagaaggcagcatccatattagggaaaaaagtttgaagaactgtctctaggtctgatcaaatgacagctattttgtgttggctttttaaaaattacctttcttctaatgttagaatgtaaaattcatcttagtgcctaaactctgcagctcaagattcatttacttagaaccctgggtttatttaagctggtacaggttgggacggggagcccaggagttgctattaagattgtgcagtgtatatgaagtggtggtcactggctgctggatctgccccaggcacatagaagatttgctctttaacctcatctgccagagatccatcagctgatcttatggtagaactgaaggctgtttggggactactgagtgccacacaagtgctgtcactcagaactttggccctggacaaaagaggaaagggggagataaagaatgagagggagtggcagctgggctgtgcttctgatgccttgtgtctttagggctttctcatcatggccaggaagctgccccaattcagactcctaagagaaagggaaagcaggttatcatacagagaacatataatttagaaatagaagacctggagtcatgttccagtcttatcacttttttgtttgtttgtttttgggacagagcctcactctgtcacctaggttggagtgcagtggtgcaatcatggctcactgcagccttgactcctgggctcgggtgatcctcccaactcagcctcccaagtagctgggactacaggtgcgtgacagca

SEQ ID NO: 64434 - DNA, 1021 bp, Homo sapiens
tgccagaacttcttgccatgccaaaaaaaattgctgtgccaagtaattggaacctttatgtttaaccaacaggagtcactgctcatattacaatcaaaatacatacgaatagaaaattaatatggaaaaatgctgcaagaaaccataggatgcatttacattttgactagccttgtctgtcattgtaggttgactgtcttacattgaacttaaatcagtctccagttctctatggtcctcactttattctcttatcaagtcttttgtatttgctgtcagacttctttagggcttaacccaagtacttcctggcccagggcttgtgaagacatgcttatttatgtggatggttacccacagcctgctttcacgggaatcatccttccctgccatcttctgtccatgttccctggtcctttcctaagtgagactggctgccattcaacttcaaggggctgcttctgggaggaagagcgggatttgaaaatggaggctagcttgtgtttacctcatttgccaaattactttctcagtagcctgaagagaaacagaagcccttgtgtggaacagagagagtttttgttctcccctgaaaccagccacttggctctcagccgggccatctctatactaccatagagcaaggtagcaattcaggtctaagaacaggtatttcaggggatgtgtctgtgcctgctaaatacttcttgagacacagtgataggacatgagactcttcatgggtgttagaatcaggaaatggagctgactgagggcttttgtggcgggggagccagggacagcgagtaaagccagaggactttgcaatctccaaatgggtttggggagccagcgtttaataggcagcctttgtttggcaaggatgagcctggagtagtggaaagagatcaaaagggtggtggtgtgcggggaacacaggagctgactgaggttataggtaaatcaccgttctttagggaccttactttcttcatttggagcctggtgtggtgatacctaa

SEQ ID NO: 64435 - DNA, 1941 bp, Homo sapiens
cctggttgattacctctagccactgctccccttggccacagtggggcagtgactcagagctggaactgtgttcctgcctggttgccagattttgtgtggggggtggagaggaacgagaatgaatgagcaggaacaagtggctgctggatttgtaacaccttgggaggcagctgctcaagaaccgaaattgagagacagcaggcaggctgggagtctccctccctgtctgacctgaacctaagatttaataaggtggtgcagctggggaagacactatccgaacgtggagcccaaagggagggtgagtgtgtcccctgccttttccggtaagaacaagaaagcaggttagtcctgtactggtttcatagggattcagtttgctgtggtatattctgattcatgaaagtcaagtaatgactgagagaaagggagttttcgatggttgggagcacctacagttaaataaaaacaaccaccatccaatgtaattgggcataaataagacataagtatcattaactacacctccctgatgttattacagagtattttgttggcaagtgaggttggggaggacaactggtctgcctctgtctctgtgtttgcagttgtgtgtagtgttgttacatttcagtctgtagctctgtggatgacagtctgagatgaaccgcagcatcttaaaatgctacagctggagggaacatcctggaaacatctcctgctccagccttctcattttacagttggggaaactgacttatttaagtgtactaaatggaagcataaaactgggtgttctaagattaaaaatgtttcacaggacaggtttgaaaacttctatagaatgcggcttttctcgggccgcagtttctgaacctgtcggggatggaagtgtggctggtggaaggtgcctcttgatcttaaaccactttgcctgccaggtgagttctttaaatagaaatttaaacaggaggctgggtgctgtgccttaactcaaagggaagaaaagaaagcgtgttcttgagcctctgtcctagagcaggctgaacatgctggagtctgcaatgtggaaaaaggcaaaacaactctattggagtgcagttttagagttagcagaagataaatatagcaggcactgaaggttgaagtgtctactgtgggctgggatgttatcagtgttctttataacaacaatgcagagtcggaattaatcttttctttacagataaactcagaaaagccactaactcgctcaaggtcatgcactaccagtgtgtggcagagctgggatttgaattccagtttgtgtggctctgatctgcctgggcttcctgcaggcctgtgtggcctttctagatggagaacctacctgcaccccccattttacagatgaggaaactgaggcccagggaggttgagtagttgcctgggctgtagagctagctggtagtgacaaagctggtactcagctcctgtcacattgcccctctgccaacttccttaaaaaagaaaattaggaaagggctctctgagtttgatttgctcattctatcagaatcttggctttaatgttctcatggctgctgggatcctgtgaaatcaaaattaaaactttctattcaccaagtagcaaccccaagtcatggggctccatgtgggaactcaggggccagacagtcttgcggtgttggtgactcagtcagaagagtactttgcaaaatgaattggccattgagtggatctgcagaactctggagaacttaagagaacctaatgaaatgtagaggtttgcaaatcatgccagaagactgttaaatctagagcttggaaaagacggacttccctctttgcaagttgtgagggctttaagtttgctcagttaattttgtgactccctcatgcccagctctgcctgtgccaggctctgttccctttggcaca

SEQ ID NO: 64436 - DNA, 1054 bp, Homo sapiens
agtccagcttcgactcggcatcggagggagaccgtggaaagagagggagagggagaccgtggggagagggagaggcagaccgtggggagagggagaggcagaccgtggggagagggagagggagaccgtggggagagggagagggagagggagaggttgaggtttatatttttagtagagatggggttttgccatattgcccatgctggtcttgaactcctgggcttaagcaatctaaaattctttcttctgcttggcctagcctattgttgaagctctttgactgtattttgtgattccttcaatgaaattttcatttccagaagttctgtctgatttttaaaaataatattgctcttctttcatatcctgaattgtttttctgatttgtgttgtttttcaattttctcaacttggcttaataaactgataaactgagaagttatagctcctaagacaggttatcatttgctaatctgaatcagaaaaactgttattttgttcatcttttggcaggatatatagaaactaagctgttacacacccttaacgcccctaatccctcttattgattacttgcctttcatgtgtaagacactaggggattggcatctagttggctctcaaatatttgttaaatgaatgaagaaatacactgttgtcacatgttattgttgggggcaagtaaatcaatatcattctggtctgaccatgtagtaattgtgggctttttttttttttttttttgagacagagtctcgctgtgtcacccaggctggagtgcagtggcgtgatctccactcactgcaacctccgcctcctgggttcaagcaattctcctgcctcagcctcctgagtagatgagattacaggtgcctgctaccatgccctgctaatttttgtatttttagtagagatggggtttcaccatgttggccaggctggtcttgaactcctgacctcaggtgatccacttgcctcagcctcccaaagtgctgggattacaggcatgagccactgcgcccagcaattgtgtgccttttaagatttcttt

SEQ ID NO: 64437 - DNA, 1041 bp, Homo sapiens
gtccatgcctgattgctgggacttctagacacaaatgaggagggccagtgatttattttcagaggatggaggcccctaataagatagcttcttatattaaacccttaccctgtactggagttttcttcttgccttagaaatgtaaggaatcggtttggccgtgttgtcttcatggggaatagttcaacctttgactccacctctggagtcaaaaagcctggatttgaatcctggctctgttcctactagctgtgtaaacttatataaatcccttaatttttctgatcctcagtttcttcatctgtaaaatggaaataataataactacctcctaggatggtaatacgatatgagataatgcctgcagagtgcctggagtgtaatatgttatgatgtgatttgtatataatatgctcactgaagttatcattatggatctctctcttttaccttgtgtggttctttatctactcccctcccctgcccccagttttggatatctgcaggagaagtctcgtgcactgggatggcgggctctctgttagggttatggggagtcagtaggttttctgtggggagaaggggccccaacaagaacatgtacccttaccattcaccttcttcattttgggcactatttaggagatattttacaaagcttacactacgagtgtggagctatgattggaacctagttcaggctccaaagccacactctttccactgactatttgatacctctctcctgctcaccctgccatcttgccttgcatcctgcaaaaccaaaaagaaaaagaaagaataaaaccagaaacatctgctgggatattccatttgggcacagtggtgtgctcactggaaactccaggtacgtgggatcctgtgggtcaggagccttcttcctgctctgttcctctaactgggactcccttcctgaatgggcatcattaggaaattgaagaggaaactggtttgggtggagaatttccgaaatcatcccattttgccctttcctagaagtgagatagtgagagcccctcc

SEQ ID NO: 64438 - DNA, 1132 bp, Homo sapiens
taggactgtgagaaggtagaggagccaacacatgccagaaacacttcctaggaagtgtggacaaggccttcttaattctttcagggcaaaataaggaagaataataatacttgctgctattattagtagctcactatggactgggcagagtgctaacttgttacattcagccttgcttcttcttgaaatgctccaaagtaggcactattacttctgtcctccagataaggaaactaaatctcagagaggttaagtaactaactcaaagtcacacaggattacaaagcaggtattcaagtccagatctgctcctttccaaaggccactgaacactcaaatctaatcttgggctgtctcagtttattgaaaatactttatgaaaatataccagaccttttgaattttatgactgaaagaaaaatgactaaaatcctgttctcaatcatagtcagaaaattgaattggaatgtttccctagtttcataatgtttgataaaagatccagacagatctgaatttatgagatctataaaaattcgagttgttgaaagagtgggagaatgtgggctttggggatgccgggatggatcatgtgacttcatggaaagcagcaaaaatatttttgaattctgaaagtgttcctggtcatgtatttctgggtaacgttttgtggatgtttttcttccatcagtcagaaaaaaaaaggaatggccttaattaaaatttctattgtctttgccatagaggaaggaagccttttggtggttgtcatggtgatatctgaatgacactgtggaagtgggtagtgattgccacccagagccctgaaatgagcgtttgtcattttccttgtcccctgagaggcttgcagcaccgaactgcacatttccttaatcgccttttacattcacatttgagccaaatgtgtgtgtgcaggcaaatgctctccgctgcagctagttagagtcataaagtctgaaaccttatttctaattgctttgtgttcctgaagcaaaatggcatatgtgaggtgttcatgaaaactctcagaaagtaattaggaactaccagcctttcacgtggcacagcgggatagcttgcaggcctcctccccctcactgcctaatacacc

SEQ ID NO: 64439 - DNA, 1057 bp, Homo sapiens
tttatgaagcctaaattggcttgttccagctctgttgtactgatttctgtggaggtgattaccgtaaaccccacctgcctgctcctcttctccagccaaatttgaagcatttgatgtccctgtgttagtctgctagggctggcgttacaaaataacacaggctgggtagcattaatgatagaagtttattttcttggctgggcgcggtggctcatgcctgtaatcccagcacttcgggaggctgagccgggtggatcacctgaggtcaggagtttgagaccattctggccaacgtggtgaaacaccatctctactaaaaatacaaaaattacctgggcatggtggcacatgcctgtaatcccagctacttgggaggctgaggcaggagaatcgcttgaaccccagaagcagaggtttcagtgagccgagtttgcgccactgcactccagcctgggctacagagcaagactctgtcttgaaaaaaaaaaagaaaaaaaaattattttctcagtctgggagctcgaaacctgagatcaaggggtcggcaggtttggttccttctgagacttctctctttggcttgaaggctgccaccttctcactgtatcctcacatagtcatctctgtgtccaatttccccctcttatgagaacaccagtcatattggatgaggatccactctaaatacctcattttaacttttttttttttccaattttcttttttttttttttattgatcattcttgggtgtttctcgcagagggggatttggcagggtcacaggacagtagtggagggaaggtcagcagataagtgaacaaaggtctctggttttcctaggcagaggaccctgcggccctctgcagtgtttgtgtccctgggtacttgagattagggagtggtgatgactcttaacgagcatgctgccttcaagcatctgtttaacaaagcacatcttgcaccacccttaatccatttaaccctgagtggacacagcacatgtttcagagagcacagggttgggggtaaggtcacagatcaacaggatcccaagg

SEQ ID NO: 64440 - DNA, 1300 bp, Homo sapiens
tgcttcttattagacttagagcaggtcaacctacttaccaatctgttttcctgtctgtaaaaggagataagaggccagcctgcctcagagatgttgtgagttcagggcaatgttgcctgaaggcaacgtgtctcagacacctctggagagggccttgatagtgaaccccatccccttaagggtcattgaggtgggttggggaattcggccacaggggatcattgaggtgtccacatggggctattatatttgcatctgtgggtagtggtggagatagaaagtgggcaagaaacagcagagtggcctgtctcagggcactgggagtggggtataagtctaggagagagaggtgtggcctgcatcatgttttctccaaagacatgaatgctggaggctgctgaggagaaaaacctttcttgtcttggggtcaagtgacaagcatttagtcccagccctgccacttaaccatctgtgtgatttgaggcaagttggctggagttccgtaacctccattttctcatatgtaaaacagggctaatgattcccatgttgcagagcatgtgaaagcatcctgtccctttcctggtatgcagtggacattgataaatagtggtgaactctagatcactttagtatttcccggggttaatccaataagtcccaattctttgcaggattccacatttctcccttgcctttcagactcacttaggcacattgtagttggatgtgaaggaaggtctggccatagaatgagacccccatgaattattgagggggaagaccctgtgcttcctggaaggagatgctgatcagtgtttttctggtggctgcagtgggtacgcagggccattttggaagcgagaatgtttgtcttgccaagtacgagattgagtgtcaccggtttgctttctgggaataatggctgtgccgatgaaatagatttatggcgctgaggtacgtcacagatgagactgatttttttttcccactttaaatgtcgatgttttctaattattcaaataatgtgcttattttagaatattgggaaagtatcaagaaagaaaaaaatgtctacttctaagtccaggggtgattactgctaacgttttggtaaatttccctttcttcttttttcaaatgcacataagctttttttttaaatatgctttatgcacttacgatatcatgtgtatttcccagatcattacatattccttaagaacatttttatttggtacataacagtctgtggtgcacacatgccataatattcttaatcattccctgttccatagtt

SEQ ID NO: 64441 - DNA, 1010 bp, Homo sapiens
cagctggtcagtatcaacgggctcattgtactgatgtgtatatattgagaaagctcagagaagttgattaacaagctcaaggttacagaggataggttggagagtgaaggttcagatcccagcttgggctgcttcagttgccccttatagccacctgctgccttccacaaggtgagtgagcctaggacctttctcctcctaggtctgactcctgttgggatttgaaggtaccaggctcaagtggaaatgaacgtggttgggttgctaggttgttgctgtagcctgctaatttaaggcttgattttgatagaattttaaagaatgtgcagtatttatcaaatctgactcatgctattcagtgacagaacccttatcctgcttctgtccgtgttgtgatgacgccatgtgaattgtgagccccaggaagatgtagattgtgaatgactcttgagattgagtcatctatccatactttcagagttcagagaatcaactagtaggcatttacctagagtggagctgtggaggtgagatgtgggctgcttccacgttagctgaagaaacctggagctgtaggttatagagagaagaatgactttcagggccccttgtgggacattttgtctagaacaatgggatccaagctttgggtccctcctaaaccaaccaagaaggttcaacttcttagtgctttaggactacatggagcatggcctcttgcacaaggcaaacagtcactgtgcatctgccatgtggtaagtgctatgatagtggagtgggccagatgatgggctcctccaaaagatgtccatgtgctaatacccagaacctgtgaatatgttaccttatatgggaaaagggactttcggatatgatgaagggaaggactttgggatgggaagatcattctggattatctgggtgggcccatgtaatcagaagggtccttataagatcagagtaagggaaggaaatatgaggagggtagtagaggttggagcattgtgccc

SEQ ID NO: 64442 - DNA, 1370 bp, Homo sapiens
tcacttgcatgggattgtaaccctttttgcactcaccctagctagtagttccttttaagaaagaggttgctagtttgatttgagtttaggcaggggaaatgtttggtctagagatgactgttaggctcagagttttcaaggtcccatctttctttctgacgcatctggtaagctgttttgctctgttccagatgatctgccagtgaacagaggtctgaagttctcaatgtgttagaaaaaaaatgtaaaaggaacaacaacaacaaaaaaacgccctgcgaaaataagggctcccagctggtggtgtttcagacacaggcattgctcattaacggagttatgattacagccccgaattcattctcattacttttgtagcatgtttataagattacaaaaaggctgtcactttgtgggttattttctctttttattacatgaacaacatttatgcaggtgtgacaccaataaagcaatacaggtctggtttggaataaaaagtgagataccacgggtgaggctctaggtgtgcttaagagattctagggctctggttagcaaagaaagagtttccacggcatggagctgtgcactctgctcctgtagcagcctgctggtgtcgtcagagtgggcatagttcctgtcactttactggaacttggagtgacacgtctgaagtcaggtagtcagatatgtaatggcagagactggactccaggtccctgacttttcggactcagaggcaagtggtcttatttgtcctgacaataatttaaataatttttcctattatgtacactttgtgggaaatttagaatattatactacaaagaagatggaggaaattaaggaccaagcaccaaagacaaccactgtccatattttgatggattttgaaaaaccttttctctttgttttgtttgtttagaaatggggacatttgtttttgtcaggggagatttgctatttgcttgttatttatacatctctgggcatatctaatttcctcccttggaacaggcattctttctgtaagctttgattctctacaaattcaggtgaagctctttattttatgtaaagcactgtgctaggcactgtaggggaaagagatgagcaagccattcctctcttcggaatttacaattaagtgggagaggcagatgtgtactcaaccaattagtacaggtagagtagtaataacaaacatttctgatagccagccctttccatgtgctttatacaagttactcacatttaatcccccatcaaccttgtgaaggaggcattgcccattttataattgtagaaactcagaggttagtttgcctaaggtgataaaactagcagccacccaagctgtgatccaa

SEQ ID NO: 64443 - DNA, 1076 bp, Homo sapiens
gaggtacttggttgatggtggttactgagttcctcagtagcagctgtggcagggagcctttacctgggatgggtggcaggagaagctccctaggctaagagaagggtgctctgatggtttgttctgactcaggcaagatcgggaggagaaatagactaaagaccctggcagcacttgcagtcttggtttgcaaaagcacaaagttccaacctagggtttgtactatatctggtgaagggaaaagaagccagtgttccaggcctataccctgtgagtacccaggaatgaggggagagagaatgaggggttaattgaagcagtgtggcaatttctttggaggcttgggctcaaattcagtctctgctacttactagctttgtgtccttcagcttctctgagtctcagtttctttgcctatttgttaagtagggacaaggccactcccccatcctcaggacaattgtgagaattgtatgagatgattgtaaaggatttaatgcagtacttaccaattgatagctattatttttcattaattaaggcagctagagagtccttggatcattagctgagaggtttttttgttttgttttttaaatgtagaaaataagaatgtattttgtgctgctaccagaggccatacctgggctcctaggttcagatgagacaactgtcctagaagggtttcatctgacttccatatcaaacctgtttccagcctccagatattcaaagaggccttggagaaccctgaatctctgacgcaggcatacagcatagctgaactggaaaggtcacctgctcaaactcctgctgaagcagccttctctggtccagccaggattagggaatattagtcctaagagcaactggatacctgtcacattttagctgcgtgactctagacgagtccttttatctctttgagccagtgtcctttgagaataataaaacctgcctcacacagttgttcttatgctcaaacaggacaacgtatgctcaactgtaatgcagcattgcatattattgatagctaactagataccagacagtgatctcagtatgttcatatatta

SEQ ID NO: 64444 - DNA, 3052 bp, Homo sapiens
gaagaatgggaatggcatttgtatatttatccaaaaggaagtatggtttaaaaaaatatatggagaaacaatgtcctaatccaacctctcattttatttttattttgttttgagacaagatctcgctttgtcacccaggatggagtgcatcacagatcaccgcagtctcaaattcctgggctcaagccattccctccctgcccccacccccgcctcagcctcctgactagctatggctgcgggctagcgctaccacgcctgacccaacctcttattttagatagagacactgataccagagagtggaagggatttctgtatggccacacagcaaattgatgactgagttggagcctcaagtgaaggttcccaaattcctgtacagcgctcttttgcagaggtaggacagccatggatcagggagagatgagaaaacagacataagggcctctttggacagatagccaggctctcttctagggcctgggagccaccctatgccccacctggataaaagcccagatgtgcctagcatggcatttccacttctgcctaatcatctccacctgtgaatggaagcaagcttacactttaatacccagtggttttgcctgaactttcccactcactgggtaacgtctcagctttgtcaagtatcacttcgtcagggatcctttcttgactgccaagacttaaggctccctggtgcattcttataacacctctgtaatcccctcgcaacaatggtaattaccttgttctgtatttaatataggtctccctgactagagtagaagcactgtgagtgtaggaagattatctgttgctcctggcatatactaacccttaaatgtttgcatgtgtgaatatttggacgggtgctaatgaatgaattagaagtgtgtgtgggctgctgagaggtgctgtagttctgattgcctgcaggaccaggagagtgatcccttattgccaagggcattgagaaaagagagaaagaaaagagacatagttgaggttgcgagggcagagacaagccagagggtatggtctccttcgctgggtgcctgatagcggcctcctgggcgatgaggtcgcagtcacatccaaccaagtcttcattcctggcttgtcagaatccgttcccgcaatttaccagggattgttagaagactccttgaatcattgtggggaagagcattcaaggtcaggactcttggaggggagacgacagcaacccgggtctcctgcagcctggtcttcccagccgatgggcacttgcggcaacggatgacaggtctgctggtgtctggctagacgccagaacagcgcagttctgaggccgcaggtcctgcccctccgcccttttccctccccctcctcagcctctctacccctcccacttgcagcatcctctacgaggaaaggaatgtgctgggctcggacgcgccgtcctggccgaacggcagcacctggggcgcgctctggaccgctggggtccgctgtctggcgctgcgccacgtgctttgatcggtgctgatgtcaagtgggtgtgggctcctcggaaaggccccggcgaggaggaggagggcgcgcgatgcgccgcgggcgagctgaggccccggcgcgctccgtagcccagcgccgctgaccggtggcccgcccgggctcgcgaagcagtcgcatggagccgcggagctgtcctccctgggacgcgtgccccgccacgctgggggtctggcaggagcgaccaaggggggcctgcaggtgtgtgtgcgcgctgtaactttcggggggtctgcgggttgtcgagccgacagggcgcagggtgcacgggctccttttgggggtgctttgtgtctgggcgcgggcgtgactggagccggctagtccccggccagccatgagcgagggagccgtagctggccgctggagtttctgcaagagaattcattgagccggcgcccggctttgggttactcctcgggaaggacgccaagggagccgttgttgtttttaaaaatcgggtctccaagtacagactgcgttcttgttaacaggattacctcagcagcagagagcgccgcttcccaaaatcggctgtggttggggaccccacggccccgcaggcgtgcgggctgcggggacagcaactggccagcagtggagagggtggggaccgggaggtgggcaaaggcgaccccgccaagcgttccgccaagtgtgcaggggcgcctgcccttcctctacacccacacttgccaggagccggctacggaggaggtaaggggtcagcttctcgcctgtgacagctctggtttcagacacaccttcccggaggaatgcagaggctttgttccaggcgcccgtcccagccccgagccctgaagcccgcgggcatagggctgggactccggtgccattactcatcttttatggcaacgccggcaagctcctaggtaggcaagttaattattaatgtgtctaagctggagagaggaaatctgaaaatgagattggtgggttgcaggcctccccctttcttttttggctttggcaaggcaaggtttaagcccaaggtgttgcagtctatttccctagaaggataagggcattcccccaaggcaccagcactgcccccgaagggttcccctttcgttgtcggtgggacagccccatctcctcccagagggcagaaagggtgcatccctcagtttttaatctactttagaacccgtctgtacccctcctcctttgccttcctaaatgcatctcactcccatccccttcctcaaggcagcttccagaccaggtgtaggagacctgagtcctctcagcaggtagagtctgaaacattctgaaaaatagaaaaatgttgccctgtcccagccatggtgcctgaaaacctccttgcgtgctccgccagtgccctcgggtgtattttcaggcctgggggctgtgggcagaggaagaggtgtctgtcaggtgtcacctgacttgtctctcccaggcccctcagtaggaggggagcagaaaggtccaggtgggaaataga

SEQ ID NO: 64445 - DNA, 2023 bp, Homo sapiens
aacagttttgggttcttaggaccaagagtatatgcagtatatgctctcggcttattaagaacccagaatatttggtagagagttttgggagtaggggacagactcattagctgatggtcatggctgcttcatgttggaacctttagtttaagcttctgagcattattataagcatagcccaggaggtaaatgtaaaaataattttcttgccagtttttcctgcatggtatcctagcgacgatgtactttctgtccttgggtgttggggcaccaactggggccgtatcaaagcttgcagagggaaggaatatgaagggcatggtcagtcacccctttaaaagtcaaggcatagtttctttttagtttatcttttggagagttttttaaatgcagttgtttttaagcagcattttatgttgtgattaccaaagtactatatgtttattgtctgacaacttcagaaacacagaaaattccaaaggaggaagtaaaaatcaactgtaattctgacattgttaacattttggtaaatatccctctagtagtcttttatttatttatttatttattaactgaactttcaaacaatgattaggttctaaaattatagtgtatggtaaaaaaaaatctcataaagtcaaatgtaccctaaactaccatggacagtaatttttatgcacactaaaattaggcttaagagcaacaaaaatctacatgagggccaggtgctgtggctcatgcctgtaatcccagcactttgagagggcagggcgggaggatcacttgagcccaggatttgaaaccagcctggacaacatagtgagtccccatctctaaaaaaatttaaaaaaaaattagctgggcatggtggcacatgcttgtagtgtcagctactcagaagactgaggtgggagaaccacttgagctctgggaggtcgaggctgcagtgagctgtgattgtaccactgcactaacatgatggagcaagaatactgtgtctcaaaataaaaatacaaaaaaaaaaaaaaaatctgggggcaaaaccaatctacctttaagattactatcaaacccctaatggtgagtagatggtagtagaaaattgaattctgttccagcttgcctgtaaggttgatttcattctgtttttttgtttttgtttttgagacaaagtctcactccgtcacccaggctggagtgcagtggtgcaatcatagctcgctgcaacctcaagctcctgggctcaagagatcctcccacctcagcaatgcccaaagtgctaggattacaggcgtgaaccgtcacattctgttttaatgttaaggttcttctatactttaatatgggttgataaatttacttgttgtgaggatgacatgccatagtggcatcacattttacctcagatagtaggttctgagtcaaccagtaagaaaaataaacacaggtgcttaccacctccctccccaacagacccccccttccccctccacacacaattgggatgatttgttttgtaacattttgttttattcaacagtaagtatttaaaatatcattttaaaagttgtatgtattccatcgtaagcatgtaccacagtttattaaccaatttcctgtcgtacaattagatcatttccaattacttgctcttataaaaatgatgagatgaacatccttgcggataaatctttgtgctcatccacaatgaagtattctggataaattcttggttgcggaattgatggttcacaggatatgagcattttaaagccttttaattcatattgccaaattgtccccaaggtcattgcatgcttccttcaaagtgtcttcttgccaacattactggaagttattattcaaaggagtcttgcatagcatgccttttttgtttttttggatgacccagggcttctattcattgtctggccaatttatcctggaaagagtacatgaaacgaggctagagatgataagtgctggtggctgggttgtgggggagggtggggaaagataacag

SEQ ID NO: 64446 - DNA, 1290 bp, Homo sapiens
agcttttggtctctggccatggagcaagtaggcttttttcccaccttaatggcccctaggtgccaggtgctaggcccaagttgtcttccttggtggtgtgctccatgtttccagcttaggtgcggcagggagcctcatttctgtccctgagctgttgcctggttctaaggcactggccagctctccagtgggtggaccttctgatgcatttggtcccgttaaaattatttttaaaattcaggtttgtttctgttactttcctcccagaagcaattctggaatgatcaaaattcccagcgtttaatgtttgtattttcctcccctctgttcactctctaaataaaggcctcatgttttaatagacagaataacagtaaaattagcttgattagactctaggtggatttaaaatgtaacctaatggcagctctgtctggcttggaaatcatgcgttttattttgagcagagaatgttggtatttgcaatgactggtaagggattaaatgattattgaattaaagtggtcaaataatacaagcatcccttatctttagatcctgtcctggtggttttgcctattgtatttttattttttatttatttgattttgagacaaggtctttctctgttgctcaggctggagtgaagtggcacaatcatagctcattgtaatctgtagctcctgggttcaagagatcctccttcctcagcctcccaagtagctggggctgtaggcaggtgccaccatgcccatctacctatactgttttgagaaacttgggccctcagcttggagttttaatcctatctgccttcagtccttggattaagagttcctgggtaatgccacaagagaaagtcaacagagttgtctttcttacctctgttccttcctctggtctatgagccctctaggttcttggaaagctcaaaatgtgaagcaaattgtagtttaacagccttgcgccaaagcatccacaactggccagctccctgctccccaaaatatcccagcacatactttatttttatttttatttttatttttttttgagacggagtctcactctgttgccaggctggagtgcagtggcgcaatctcagctcactgcaacctccacctcccgggttcgagtgattctcctgcctcagcctcccgagtagctgggattacaggcacacgccaccacgcccagctaattttttgtatttttactagggactgggtttcaccatgttggccaggatggtctcgatctcttgaccttgtgatccacccacctcggcct

SEQ ID NO: 64447 - DNA, 1051 bp, Homo sapiens
agttgacaggtggggtgtggcagctcatgcctgtaatcccaacactttgggaggcccaggcaaaaggattgcttgagtccaggaattcaagaccagcctgggcaacatagcaaggtcctgtctctaccaaaaaaaattgaaaaattagccaggtgaggtggtgtgcacctgtagtcctggctactgggtggggaggctgaggtgagaggatcacctgagcccaggagttggaggctgcagtgacctatggtcatgccaccacaatccagcctaggtgacaaagcaagactttgtctcagaaaaaaaaaaaaaaaggaatgaataatgatagccatcatttatttagtactattgtgtcccatgctattataccattctgttatttaatcttcataataatactacagaggtaggtatttttaatcccacattagagttgaggaatagtggctcagggaagaaaaaaaattatccagggtcccccagctggtaagtgggtgagcctagattttaactcacatctatgagagttcatggagtttataggtgataacactggtgagttgagagcattcatacctggcttatgagtacaagatgagactgtgcaggtgtcaaaggtataccatcttcatccttttaaaatttaacagttttatagaccttcctgtgtggccaatgctttctttacttgtattttcctctttctggcacctttcatcgtgccctagttttgtaattttggagaactaagaatccaaaagatatcccaagaggttccagttggattctgttcagcttcttcttcttcccttttttttttttggggggggggggatggaatctcattcactctgtgccccaggctggagtgcagttgtacaatctcggctcactgcagtctttgcctcctgggttcaaggcattctcagcctcccaagtagctgggattacaggcgcgccaccatgcccagctaagttttttttgttttgttttgttttgtgttgtgtttgtttgttttgtatatttttagtagagacaggattttgc

SEQ ID NO: 64448 - DNA, 1987 bp, Homo sapiens
gcccagcctcacattcgatatttatttgtggatagatttaggttctttttcccaatttccccacagtagctttgacaagtcttatttggaagaagtaacacagttactgaactggcgtcttgttcctagtttgaatggtaagagccagaaaatcgcccattcacatgtagtacattaagatttcacctactttccccagaaattattgtttaggcaattagggacagaaaagtatgaaaaatacaggtgctaattataaccagactcttttttttactgtaagagataaaaatttcaaagtattttacatattaattaggatatttcctccccttaacctctaattaatatccacagtaaacaacctttattaattacatgaatctgaacatttaatatccaggaatatgaagaccatacactgagtattcatttattgcttatcctgttccacagtggatttgaggtaacttatgggaaaagggtgaaatatggataacaaaataaaacaatcaggatcaataggaatataaattatattaggagattaagcctaaggagacaaggagaatggcaatagcctggtactgtttctgtttaggtaaaaagccagttcattggacaagttgatgtagccattttttaaaaagcgacttggaagctactctgggttttggaaagctctgtgtaaacatgggctgcttcatgttcctgacatttcagctgaactttgaaaattgctttttttttcccctccaaacctctacctgacccccagcacacacccacttcatctgagccaaggaggtgtcaattctaaaagtattttatcaagcgaggttggcatttttctggaaatgctgtagcctgagtgccagcagggcatttgggaagcttattttggaaaccctttcattatcatggcactcaggcccttataagtggttccaggacctcataccctgatgggctgcagtgataggaggaccaaaaaagggagtgttgaagtggaaggggacggtgaagtcctcttctcccaagccggcaggaggcacgataacttatctttcttccacgtctcctgtctccagcctctcctccaggaccagagggcttcctgttgctttctggaggcctggtttgctggaggtcatcctgaaagaatgctgctcagataggctcccaggaagctgatgcagaggatggggctgggaggcagactttgctggatcacagagggttgcctgggcagcgtgctctcagccttgaacaagttacaatcttgtgctgcgatttggctctgctcttgcttgttacaagccactgaaggtctctagctgggagagccactttctccctatacccaggaaggattcacaagaccatgagatgccactgattacatcttctgccccctccctgaatggagaccaccatagctcactggctttgtgacttttcctcttggacgtttaatcaacatgtcaaactaacatgtccaaaatagagttcttgatcaattttaacacctctcctcccctttgacttgtacttctcccaggcttattcatttcaggaaacagtgctggcatccactcagttgctcaaaccaaaacgctggaagtcttgtttttctctttccttctctccagtcataaatcccatcagtgagtcctgttggcactaccactaacacacttggcaaagctgaatccctcccaggagtttcactgttgccattttggccagccactgtcctctcctgcctgtactgctgcagcagtctctttagctcatctccctgcttttccccacttcttttcagaggcattggcatggaactgtagtcagactggctttgcatactggatcctccacttactgtgataggcaagttacctgacctctttatgcctgggttttgtcatctgtaaaactgggactataatagtactcatttcaaaaagttttcatgaggattaaagga

SEQ ID NO: 64449 - DNA, 1789 bp, Homo sapiens
acaacgactccaggttattaacctgctataaatccaatcctgtaattggtacttgatacatgttgctggtagtcctcaaagatgagggagactgaggctcagggggagggaaacagcttgcccaaggtcacattgctggaaggcatgctctttcctttctgcctgctgtttctgagccagagctacaagtgtctgtgtgagttatgggttcttatctcttggcaattagagcagctcagcaaaggtatttctggcacaggccattgctgctttctgacagctgctacattccaatatcgcctgagtttagggaaaagaaagcccacacctggggttggcaaagatagtctcagaactcattttccctggtttctgcacatggtgaatgtgtttattgttcttgtcacactgtctcctgaagtgcagatgcattaaagttgaatattattttcataaaagccactggagagaaagggagagaagaggcatgattcgggtgtctccaggaatataattggatttgcccaatgattgggagagtggaggtgggaaatgacaacatgccaggaagtacatttgatggtgcttttgattccaaatttgttaggcatgtgtttttaattgctttgtccctgttgtcattattctaatagagacctgatttttttttttttttttttttttttgagacagagtctcacgctatttcccaggctggagtacaatagcataagctcggctccctgcaacctccgcctcccgggttcaagcaattctcctgcctcagcctcccgagtagctgggattacaggcacctgccaccacgcctggctcattttttgtattttttagtagagacagggtttcactatgttggccaggctggtcttgaactcctgaccctgtgatccgcccacctcggcctcccaaggtgctgggattacaggcatgagccactgtgccctgcagagacctgatttttcaaaaggggttcattatcatattaaactttctctattcagcaaggttggcaaatgggatgttctcctggctcagtgttgccacctaccgtgtgctgcatagattgtcagtcttcaaaatattagaaggcagtaaaacacatttcaaactgcaacaaggcataatttgatccgtctgttcttccacaaggttgcaagtcttcagggtgaacattataagcatctgtcatcactgtgtgctcttggagtgccaagatactggttatagtgaattctggtgataaaaaaaatgctagacaaaaataccactttttctttggtcccttgagaatgagcctcaaaaacatgtgctgcttgcacatggggatctgaataattgcaacattcaggattatgtagagagagtatccctgaagaaggcacttagggtggtgtttgcaaatgtcacaaggctttcagttctatctttggccccctagtctcagtaaggattttggctcatatcagtgatttggaaaacctaataacttttatgtctccaaagttgtgtttccagactgctggctatttcatattttaaagcatgtttctacctttaaaaggacaccagagaatagcagtgggcactgacatgcctttacccctccccacactagaaaaggaccgacacatttaatcttttttttgagacggagtctcactctgtcacccaggctggagtgcaatggcacgatcttggctcactgcaacgggttcaagcgattcttctgcctcaacctcccgagtagctgggattacaggcatatgcc

SEQ ID NO: 64450 - DNA, 3403 bp, Homo sapiens
ggttcaagtgattctcctgcctcagcctcctgagtagctgggattacaggtgcctctcaccatgcctggctaattttcgtatttttagtagagacggagttttgtcatgttggccaggctggtctcgaactcctgacctcaggtgatctgcccgccttgccctcccaaagtatgaggattgcaggtgtgagccaccacacccagcctctatttttaattttttgaggagcctctataccattttcaataatggctgtacgaatttacattcccaccaacagtgtacaaggttcccttttctccacatcctcaccaatacttatctttcatctttttgataatggcctcctaacatgtgtgaggtgatactttcaggtgtgattgtacaacccagtagctgagaaaacagtagcctagtcagtggtcatgaaaggtgtttaaaaatgccaggtcctgtggggcccaggcctctgtattctttataggttcccagggggtgctggcgcagctgcgttttggaaccagcagcccagatgacccaatcactttaccctttcacctggggattaggggcctgcaaactccaaagttggaatgagagtttttaaacttgaaaatttctccttcttcttccactttgatcagtggagaggaaaataccttaccgagcagaatggtggccgagggagtgtttcccctaggttgtctctgtgggggagggggtgttgctggagcccgagtctaacagagtctaacagaaagctcattaagacccacagcaagttgaggcctgtcagtaatgagtacttttatgctgttttctacagaaatttcacttcaaaacctagagccttcagatatcctgatttgccattctaattaggtactgaaggagggctttgtgggcaggtttgtggcatcctctgtgcatactgattttgcaaacctcttgggaaacacttaaagtgaaattctttgaacacatcaaaaaagtcagcataaacaaactaaaatccctgtgattcccaaaccctaaaaatattctgtgaccaatttcaaagtccccccctcccctccactttaaggttggtataatcctgcctggtcatagggagtgagaaaggagggtttcacacgttcgttcggggagaggtcccagggttgagggttctggtgggtggggtgtccagtcctctttagggcaggttatccagtgtctagattgtttgggagaaggtgctgggagaaaggccagaagcctcagcctggctggacatgggctggcatggacgccatctctcctggccagcattgcccacctttaggtctctagcaggaagagcccaggagctagaagcagaagcacccagacggggaaagatcatgggtggcgccacagcaggctcctgctgcccccatgaggagaggttgggaaagtgagtggcttcccactaagtgaggaggaaacgacagtggagggcatcttgcctgtttgtgtctgtggctccctcatgagcaggctgggattttgaggctgggaatgtgttataccttaaaagcaaagcaaagagcaccggttacctagatgggaaggcagagcagcagtgtcctttgaggccagagagtgaaagtatgagactttgtaggacttttgttcttaatcaggtccctagcgggcccacttcttgggcccagatccctgatgcctttgaaactgccatttaatatggcattactgcctcccagcattgggactccttcccttcagatctgctaaggacctcctaactactcccttcccctcatgtcccctcaccacccctcacctccacagagtgccagatattcctggatcaaagtttttatcctgcccctgcttagaaactttatggagcttctatttgcctggctgataaaatccagtgatctagccctccttctctgcccttcaggctttcatccatctgtccatctgtccatctatccatcatcccttaccaagcactacaggactttgtgaagaggtattgtccttaaggaactctcagtcttttggggaaggcagacaacagtcaattacaggggttgtgaaatcacagaggagagacacctgtgtgaagggtaggccaacacagtaaacacactattactggctagtagaatacactagatgccagaaagaaaccagtattagtattaggaggaataatgataatgaagcttttgcattatatagacctacttcaaattaaccttgattaaaatattaactcttttggggccgggcatggtggctcacacttgttattccagcactttgggaagctgaggttggtgaatcacttaaggtcaggagtttgaggccagcctggccaacatggtgaaaccccaactctactaaaaatacaaaaattagctgggcatggtggcacatgcttgtaacgcagctactcgggaggctgaggcaggagaattgcttgaacccgggaggcagaagttgcagtgagtagagatggtgccactgcacttgagcctgggtgaagggggaaaaaaaagtgaactcctctgatccttaaagttcttatctgtgagttggttaaggcttaacaataacatgaacttcataagattgttgttaaggattaacaatcattaatgagataatgtatatttgtgaaacatagtaaatgcttaataaatattggttattaacgttattatcagacagagaagaaattttctccaggattcttggagcaaagtcactgaaattacagagaaaaacatctccaacaatttgctcagcatgaattcaacaagtcttactaacctgtctgttatgatgtacctcacatacatagaaagaatgataccagcagtccaattcagtgaatgaggtctcctgggtgagaatagtgccctgttttgtcaaatatgggtttttgcacattgaatttttttttttttttttaaggagaagaactttaatttttttttttttttgagacagggtttcacactgttacccaggctggagtgcagtggtgcaatctcagctcactgcaacctccgcctcctgggttcaagtgattctcctgtctcagcctcctgagtagctgggattacaggtctgtgccaccgcgcccggcttattttttgggagacggagttttgctcttgttgcctaggttggagtgcaatggcatggtttcagctcactgcaacctccgcctcctgggttcaagcaattctcctgcctcagcctactaagtagctgggattacaggcgcccgccaccacacctggctaacttttgtatttttagtagagacagggtatcaccatgttggccaggctagtctcgaactcctgacctcaggtgatccacccaccttggcctccg

SEQ ID NO: 64451 - DNA, 1061 bp, Homo sapiens
ttgtttttgtctttgcaatatggatgataaacttcataaaattatgaaggattaaatgagataatacagataaattctgtctgacacgtagcaagcactcagtaaatgttatgattaaaagaatagaaggatgttggggactggttcctggcccttggggagctaacagttttgaaggtgaggcaggcctgcgatggatgctttctacacagtgcaatgaatgccaaggtagaaggattcctgagtgtcgtgaaaatgcagtgcagagaaagatgtagctggggaaacatgaacgaggaagtgaggtggggaggaaacactttatctatagcataaaggcctgggagttaggcaagggtatctgaatgaggggaaaatgtttgggaaaatgtttggaaaaagctgttccatgcagggcagccctatgtgcattggcttggagatgtgaatggctcaggctgagggaatgggcaggtggagggaatgtggctaagggtaggcatgtgaggctaagatatctgtggggccacaatggcgagcagatcaggctggatagtacttgagcattagattgtggaaggcctgcggaccatgcttaggagtcaggactctattctgtatccagcagagatttccttttatgaaaaaaaaaaaaaaagtcttatctcttcccaaaggagaggaagtagggacatacataccctcttctttgtgggtatgcacagccttcttatccctttgtttccagctccctggaacatcaggggacagctttgcaccaggaagaactgggatccctgaaacttcctgattgggatctctttccatcattgctctgggtgttcttctttcatttctttgaaggctagtatgccttaatttgagacttcacccgtaatgatattcatgtccatgcccattggttctattttcttgcctcacagattctagggcgtggtatatagcaaaggataaaatccttctcagctcttggaaaatggttctcagcgctctgttctcccactgactcctctccctgctccctcccttctctgtgctcc

SEQ ID NO: 64452 - DNA, 3127 bp, Homo sapiens
cactgtgataatgcccattcagagtgagaaaacataggctaattagccccctcatggccacacagccagcgagaggcaaagatgggattggaatccaggcagtctgtctctagcactttgccaccatgtacatcagtcatttctgccaaagccacagggctgcctcctcatctgaagcacagggcactgttttaggaaaaagaatcgattaaaggttgacttgcttccccccatttcctcccttctgaagtgggagtgggatcagcttgattttgcaacgtaggctcctgctttatacctggtgtgttgtggtcaggccccacaggacatattcgtcatgcacttactatgtgccagacccttccataggtgttttactcatgttatctcacagcagccaatgaggcaggtggtactgatcctaatttacaggtgagaaaactgaagcacggagaagtgaaagacttgcctaagttaaatcacgaattaatggcataacctgaatttcatctcaggaccatctgactcaaaagtccatggccttctcaccccctctctggaagatgccatgggtctgctgtgaccttccacacaccgggccctgccagaatcctgtctctcactttgatgatgccagggtgtgtctgaggaccaaggttgaaacaactctgtccccttctggggatgatgctgcccaggggagaataacagctcaggatgtcaccctccaggcacagccaggggtgggtgcagggttggagggcctcttttctgggccacttctccggttgcctgtagcccgtaattgtaaactctctggagctcttggctgcctggctggaagctgaggaaggctcatagcctttgagaggccagggctggtgtgagaagcaggtacttttcccatctttgagtcttactctccgatgagctgagcatagcctggcgttaggaccacctcaaggcgcttgggcggcctttccacagccctgcctggctgagtcgccaagattctgtcctttcttctggagccttggtcatcctagtgagtggcagagaaaccagctgggactggggatggggacagggtggtttggggacctcactgaggaaacttcgctgaatgacccgatttttctaaaacttgagggttttgtgttttggatttggaaaaaagctgataatgaggaggaatgtttcagagaatcaagctttttagacagagaccccctcttgggcacggggcagtggccttccttgagtggggtggagggggacttgctggctgggtctcttgttgtggaggaaagacaggcaggggctgacgtggtgaaacgaagctggaagtttcaggatgagcttgggttcaaggagttgtgggtaactggagtgagagctgctttcccagcctaggccagccccctgtgtgcctcggtgtccccatctgtctgttaggggtgaaggtagggtccctcatggcagtgttcccaccctaaggcattgggaggcctcagccatggggtgtagctgttacacagtcgttgttgtttgttatttattatttaagcacctctcctgtggctgagcagggacccaggggttgagtatcaccttgggctgtggctcccctttctcctctttgccctgcagtcacctgtttatagttagcacctactgttgcaggggactctgtgctggatacttcacatgggaaggtcacagatgagggaagggccttcctagaacccctagggcgacgcttgcctcatctgtgaccttctgcagtgcttgtttctgcccatggcggtggaggtgggtggggtgtgtatgtctccttcttcccctgccccccaactcagagctcaggcaacgtttgagtaaatacagggagaatttggaatctagatggcttatctcattcccacttcctggcccagctcaggcttctggggcccatgcctcctgctctgggtgccaggcacttgggaacagtagcatgtttctccagggcgggtgggacttgagtcctggacttgggtcctggctgtggaagcaggggagctggtgggggtgctatgcattctggacaaaagggaacagggtcagcgtccgggagtgaagggggcccctgaaaggaacgtggcctaaagtggagagtgaagccggagcagagcagggcgtgagaacctgtgtggatgtggaggcgtgtgtgcacacacacagcctgggccagcgaaaggagggcacaggagtgaggttggggggcaggacctgccactgcacatcttctggtctgtcagtagatcccttggggggcagtaggttttagctctgacaatcctgcagccttacctgggctccttcagttgggcttggcccggggaggcaggccctgcctcctggtacctggggggaagtaggtacagtcctccagggctgctgaggggagcccgcaaccccctccagaagcaggttttatgggagagctttagccaggaaccacacactgataaagaagtgttttcattctcaggggcgttaattaacacagattagatttcaactgagtaggccttttgttgctccagcctttctatcaaggtggtttcaataccactgtggtttcacggagccaattcaggttcattattctcatctgttactatcctgggtgttcagacctgatgttacttcttatggctctccttagtccactttttcaaacttgattcactatgggcctggcctctcacacatcaccctcattgggtgctgaacctgaaaaaagataatccaagcatgtaggcacatttcttggctctgtgaattttattaaacgtttacaaacatgttttctgcagtttcctgaggtaatctggcacacacaagacaggatttgaattttctttccagttgtcatgtttttttaacagttccatccattcccactgactggatggagagagattgaaagtggatagacatgggagctcaatgatgggaactcatgagagcaaagaaggaaacaacagacactggggtctacctgagggggagagaggggagcagaaagataactgttgggtcctgggcctaatacctgggtgatgaaataatctgtacgaca

SEQ ID NO: 64453 - DNA, 1800 bp, Homo sapiens
atgtatgctcatttataaattatatacatacctgctgtgctaatgaaaacacacacaattgtaaaaggatggcataaaaataaacctgaataggtgttctactgttttcttctagaactccgtgggtcatcttgagcacctcaggattgagtgctgtgcactttggagacccctggtgtcccccagtatctaaggaatgctctattactgcagcgcagtgccctgtaagagagcgcacagctggctggacctccaatttcaggtgctctgattttcagaagcaggaaaggccctgcccagccagccctcatgctttttgtctggagttttaccaaactgaaggaatcccagagtgaaacactcctagttgcttctctggttgcagtcctttgctgttaccccaaggcccctcaggaagttccaagagtgtgcagacatcctggggtatgagggaaaggctgtttcctaggcttgggtacagctcaaggattggtgaggatgtggagaaattggaactcttgtgtgttgtgcattgctggtgggaaagtaaaatagtgcagctgccctgctttggtggttcctcaaaaatctaaatagcattaccctgtgatccagccatttcatgtctaggtatatacccaaaggaattgaaagcaggagctcaaacagatatttgtacacttaggtgcattgcagcattattcatggtagccaacaggtgaaaagaactcaagtttccatcaacagatgaatggatcaacaaaatgtgatatatacatataattgaatattactgagccctgaagaggaaggaaattttgacacatgccacaacacagaggaacttcaaagacatcatgctgagtaaaataagccaattaccaaaggacaaattctatgattccacttttatgagatacctagaatagccaaatacatagaaacagaaagtagattagaggtttctagggcctgagggaagggagaaatcgggggttgttgataactaagagtgcttctgtttgaggtagtaacaaagttttaggaacatagtggcgttggttgcacaacattgcgaatataataaagtaagaataagaccttaaacataaaagcaatgagaggtggctgggggcagggttggagaaacaggtagttaattcttttgtccaaatgcagtgcacctactgatcagatgccagggtgtccctgtccttttggatacctgctgccagattagggctactcgaatgggacacttgtggccacaccctggtcattctgactggctgtacaaatagctctcctggctccccaggggacatgttcatcaagatttaggccacaaagtagggccgtttgttccccctcttgcccctctccccagtcagctgacgacagctccagtgttgcagcccagcaccccaggatggatgacacacctccctggtgctccattgtcagggctctctgatttgcagaaacaggtaatagtttctgtctatggtttggaatcatgaagtagggcaagacaagtttctttggagttaaatttagggcttagaatccagggggtggctgagtaaagctgtatttaactcctactccaccctcaaaaaagaaaaaaaaaagtcctaaattaagcaaggtacaaggagcctgcagctacctcaaccaaattggaacacatacctctaaaaataaaagatgctgaagtctagaaaataccaaatatggttataggtcaggcacttgcttctctgcttttctaatgtcaccatccctgtcccagtcctggag

SEQ ID NO: 64454 - DNA, 1131 bp, Homo sapiens
ttcgccacttcatgaagccacaaggctggggcagctcttcttgctgtgagatagcccagtgaaggtggtggcagtagaaacggtggcctgaattcaggcaggctccaggtggacgacagcaataaaaccttcatggccagagcaggggtggggctgactgaaggaataaagcagggagtggagtttctgctctgatatctgagatgacaaagtcctgcagagtttgctctggaaaagagaaaaggttaaaaaaaaaaaaatccgaatggaaaatttaaggaaacggaacccaaggctccacttggattctgagtggtgtgtgttactgcagattggtaccttttgttagaggccctggatctcagttacgccccttctgcttaagctcccagttttacttgtgcaccctggctagtgactccagatgcccctgagccttgcttgctcttcccagtaccctagtgggcttctggttcacagtgtggcccttggaaatgggctccacagggtggactttctgcctgactcatatcttcatccctcaaggtgtgtcacactagtggttgcctggtagatgtttgtgagatacctggggtgtttcttataactgtgagcagcctagacacacacacacacacacacacacacacacacacacatacatgcacaaccatgcctccagtcccatttctgcatctgtcctcactctctccacctctatccagagttttccttctcctgtgtcttgtgcatgtgtttgtttgttttagatggagtcttgctctgtcgcccaggctggagtgcaatggtgcgatctcagctcactgcaacccccacctcctgagttcaagtgattctcctgcctcagcctcccgagtaactgggactataggcacgcgccaccactcctgggtaatttttgtatttttggtagagatgggattttaccatgttggccaggctggtctcgaactcctgacctcaggtgatccacctgccttggcctcccaaagtgctgggattacaggtgtgagccaccacccctggccctttctacctgttttattaaaagagctggaatgtgctgggcaggcagtgcactgagtgcttttatctggactctctcattta

SEQ ID NO: 64455 - DNA, 1727 bp, Homo sapiens
ggagctatacatctcttcttaggggagattatgatcccctgcttggaacatgggcctgtcctaggggtagagcgtggtggctgaacagttgcagcatgacgatatgggaggtgtgacttctgccagtgaagggatgcatatgagcaatgcatgtccatcatattgcaatatgtagaattggtgactggccagctcagaatagcatgggatcatcatctgtcttttcctcaatatcatacttgaatcaattcaacctaaaatcaaaataggttccctattaagatgtaatcatattacatcaagcactgctgctcagcttctctctctcctcttaaactgctggtctcaaatttaggtctttaagcttatctctgttagattccatatggctgtattaggtccagagaatcagcttgttaagatcttttagctctaattctgtcatctggcttcctgcttctccctcacagctcaagcactctgcagtcaggtgatatgatgcaactgacatttgggagtggcggggatgggagatgggaaagtgagacagcaccaggcagtcagttgcatcaaaagagccagaatcttctctcacctcctcccacacaccctaaaaccccttcagtttcctttgcatggcccataagctcggccttctgggttcatgatatattaaaggtcaccaggaaggacatcacacattctgcttttttactgaggccctaaatggacttaagtaggaaggacctaggttagacattaagaacttcttggcataggtgggtatggggggcatattagagaaagcagtagtagatccgtttctggaggctgtcaggtactagcgtgttcctgagaagtctgcagtgtatagagtgttaagtgggggatgtgaaatccctatgaggcttgttgagtttgcaggcctatcatgccagccattgcatgcaagcgctgttggtggtgggggagtcatgggtgtactggatggctttggcctccattgctctattgaagactccaaactgtgttgttccgctgcaaaaattgtttttttccattgtaagcaagaaacacaaagcagcccttcaaggagggtgtgcaggcatgcaattctggcagtatgttgcattaatctgatgtggcatggggtgaaccaccccagatggcctggcagaaacagttggacaacagcatccagaggacccctggaggacagagggcagtgcagagagccttgccctggaaggacctgagcccacagacatggccaggaggaggcctgatctcagcgctggcttgcccatgagttgagcaggagtagagctggagagcagccttttccatgtggcccactgtggagcctcgtgtgtgctgtgcatgagtctctgtgcccagagctgagtctggaacagtttcccttgtggttgtttgggaggagagggaggcagatctctactgatgagtgtcagcaggtgtgtgaggcctcctcacttcaaggtacgtttgccaaacccctcaggatcttggcaactgtcctttgacacctagatgacttcctgtgggtaaagcccattagcagtctattccctctgcctgctctagatctcagttggggttttgacttgggctaagtggggttctatctattcttctcccttcttctttccctccgtctctccaggcctcctcctcactttcctatatgccctgagcccctctttcca

SEQ ID NO: 64456 - DNA, 1170 bp, Homo sapiens
gctgaagagattaaatatctgtatttcagaaatcaaaccaaacaaaaaacttttgccacttgttggctaaattagtcatgacacctctgtacagtggattattatgcatctattaaaaatggtgctgtgaaatattaactaaggaaatggaaactgttccctgtacattagtagataaaagaaaattacagaacaggctggcatttggaggttctcagtgagtgtttaaatccacttacatacaaagctatattgtcactctcctccttttattggtgaagaaattgacttgtgtaaaggtcatgcagaattttagatctgggtcttttgaattaagactgaagtgctttctttgtgatactcgtctgtttctgtctattaaaaacacagtaagatattctctaatcaaggactcattgctatgctcagatcagaaaagtccgggagacctgtttgacacccacattattttgtttgcatagctctttacagttgataaagcactttaaaggatatataactttttctgattttaaaagatgacctatttattgtataattaggaaggcagagaaaagccccaagaaggaaaaaatatttataatcctgtaggtttaactactattaacatttttttcttcctgtcttttctcattgcaaatacaaattttataaaattgggatcatgttgtacatatagttttgattcttgcttccttaactaatctgttatagacaattcctcgttaattgttcttctacaatgtgatttcatgcacagtatctagtttttgtttttgtttttgtttttttttgagatggagtctcgatttgttgcccaggctagagtgcagtggtgcgattacggctcactgcagcctcgacctcctgggctcaagcgatcttcctgcctcaacctccgtagtatctgggactacaggcacacaccaccacatctggctattttttttattttttattttttacagagacaaggtctcactttgttgcacaggctggtcttaaactcctggactgaagcaattctccctgcctcagccttccaaagtgctgggattacaggagtgagccactgtgcccagcctacattttctcttttgatccttaaaataacaccttgaagctggtaggggaggattattatcccca

SEQ ID NO: 64457 - DNA, 1024 bp, Homo sapiens
ggtttgaactattttaaaatttttaagtgagtcttaaattttctttcagagtgaaaagtttaaaacaaataaaaatgaaaaatgtgcttgttgaataacattgacactgtaaaaggtatgtgatgataaagaagaaccctttggtagaaggtgggagaggggtcatgcaggctcaagacaatggcaggaatgtcctgggggtgtccaagactgtccaggactgggctggtccacagggaggaagtgggtgatgtggcaggagtggatagtcacccgactgaacagggcctttcatgtttgatactcacagtggatggggaggaacactccagagggagactcaggttggagggcagagtggtgacaggggagggcatggactttggaggcagacagggtgggctcaaggcatagggcccatcataggaagcagctgctcagtctaagttcctgtccctcactgatccccaggcctcacctgcaattgaatgagaatctctgaggttgggtccctggcagtattttcctttaagcccccaagtgattttaatgtgcagcgagggttgagaaccatgtggttagactctttcacatcatgattcagcacagtgcatggcttttaaaaggggcaccaagagaaacttctcttttcacctctgctgccatcaggggagagtttgaggcagttgcatggtggtgtgaagggggtcgatctgggagccctgtgtggtggtccctgccaagtctgatgtctttgtgttggtggccctttacttgggattctggcccccacatcacctctttaccttgtgtggggcatgatttgaacactgcaggtgatggctttctagtggcctgtgttcttgcccatctggagggaagaaggggctggaaggccctgtgagagagctgatctggggcttggcaagtgcctggtgggatcagagggagaccataaagtacataaaagtacacatccaggcactttttgggtcatatggtgctttccaacatgggcccaccc

SEQ ID NO: 64458 - DNA, 4458 bp, Homo sapiens
ctccgtccttccagggtagtaagtagacaagttgcaaaggtatgcatacagggatgttcattgcaacttgcttataatgctaagaaattgcaaacaacctaactggccatccattaggaactggttaatgaaatttcggtaccatccaactattaaatgatgctgcagatctgtttttctaaatacagcaagatacacatgtacatcaaatgaaagaatggaaaaccacacgtgcagcatctagcctgctaccactttgccattattctctgtgattctaaagcccatcatggttgggtttgctcaggcctgctacacctctttccctgtgattgactttctctctcttgttactcatgtaactgttttgcatcaggtctctgtgaacaaggaccatgccttgcttttgtttcccgtgtttccttcaagcaataggagtaggtggccactaattactgcagaatttaattgagggacgtgaacaaaaggccttgttatcagcattaagtgatattaagctgtaggctgattctccctctcttacaaaatagaaactgtgtctggcccataaagaggcttttaaactaaagttgtgttaacaaagacctctttccagagacctccctgcttgaggggagctggagtaaattcaggctttgtttcctctgtcttagggagccagctggaggtgaggggacaggaggtgtgcctgctgtccaaccgattttaatgcacaagatctcagtcagtgggtttttgttggagtggcaaagggggagggaaagccttgcctcaagtctgctgggtgctgggcccctgatgttgtcttgtttcatcctcacagcagaccgaggatgagggaaatactctacctcatcttacagacaaggataccaaggctcagagaggttgaataacttacttaagttgcccagctaggaactgacaaagcgaggatttgaccatactgtgtgccttgatctagttaccaaagatcctagagcagctactgggccacagtctgggcacttaggcatagttgctgagcaggtttggcactgggatgatgggaaaggggtgggaggctctgagttggggcaggatgggcgttaaccagctaggtatttatttcatatctgctgtgtaaacagcatggtgctgggcactgaggggatatggagaagagggtgacaccgtccttgtctatttaaccatttggttgaagtcattcattcttacctaaagaaatacaccaggggatcgggagggataaataggggcatagaaaacaagaggtagaggaagtctgaaaaggcacagttagcaggactgacatgggtggggaaggtttcattgaggagggagacgtgtgagcaatgtgtaacagtggaaggtctgggctgaagtgggggctcttgaagttgagaagtgggagcctgtttggaaagggaaggagggaggtggtcaggaggccttgggcactggatccaggagttctctctgattctctgagtaattaggagctgtcgtaagcttttgaacaaggagttgacatggtgggaaacagtttgaaggtgattcttctggccatggtttgtttaaagtgcagagtggtggagggagagaggaggaggttacctcatttttctagaaagtttacccatctgcaagattagtagtgagagggatggggatgctctggctgaggtgcactgggggatctcaggtcttgacttggacagtgtggtggtaggaagaaacagatagctgtgtgttctgtgtcctggagtgtaactgcacactgccaggtgctcagcttgaatggctggcatgcaagcatacgtgtatgcatccattcagcaattatttattgagtgcctagcatggcacatgagctaggcttatggtagtgagctaagcaggcatgatcccctgccttgggtctggctttaaaagtaaatgtcctatgagaccaaaaaaatgacaggaagacatccgaaccgctctaagaaaacagtttgttccatagcttggttgtgccaatagagggaaagcattacttctctttgcagaagtgtggcttacagaggagggtctgggacagatcttgcctagagggctggggattttagatagcagctagtccaaccaccttcataagagggaagttaaatagggcctcacagaagttggggaaattccttcaagttgtacagcacattgctacgtctctgtgcttgtcagcattctggccccgtaccacaccgtctctgctctatggctgagccagcctttctagcctgttttctccccttgagtgagggaagaggggtgctggaggaaacaaggggaatagggtagactattagaaattgaataagaaaaccattttaaatagggcaaaccacagaggagcactctcccttcttctgtgggctagggagcccccatcagaatttcaaagagacattgcatggcctctgatctttgccaatttcccaaagttcatagcttactcccaggccttatttcttaaggcctaggtggtggggaccaagatgtcactcactctagaatgccaaataccctgagaaattccaggggctttctttttgagccttggggctctggccaaatagctcctggtatggttgcagcctcagatccattgatgagtacctatgcctggcaagggctgagccaaaaggggccagagggatgcagaccattcatgagtacagccccttcctgaggtgggggccggctagcccacaagcagctatgctgagcctctgaatgatgtgagtcctagaatggggacccacacacaatactttgctagctgagagaataacgtgattgtggctggaagagttacagatggcaaaattggagctttacttcaagcatttaaaaaagtcataaagttacttatattcactgttgtaaatttagacaatgcagacaagcaacaagaaaataaaaatcccttgtaatcctatcacccagagataatccctgttaacatcttgttgtctatctctgtgtatctatgtatttatatgtgtgttttaacaaaaatgggataatatatagttttgtattttctcacttaactatatagttttctctctcggcatccattggggattggttccaggagcccccacagatagcaaaatcagtggatgctcaagtttcttacagttggcctccatatccatgggttctctgacatggaacccatggatatggagagctgactgtgtatttgaaaaaatatacatgtccttaatttatgtttatctcatcagttttaatggctgcatacgatttcattatacagttgaattacgatttacttagccagtaatcgataaaattttttggagttgtcttccaaaagggagtatctttattgtggtagctgatcacaaaataaatacatgcttatgttgaatttttaaaaaagctagtctcaaaaggttgtatagtatattatttcattgataaaaaattcttgaaatgacaaaattatagtaatggagaacagatcagcggaagacttagaagagggtacatttctttgaagtggtggaactgtcctgtgtcctgattgtggtggggcacacatgaatgtatgcatgtgatgaaatctcatagaactgtacatatatacatagtatatataaaaacctggcttctttccgcgccgatagcgctcacgcaagcatggttaacgtccctaaaacccgccggactttctgtaagaagtgtggcaagcaccaaccccataaagtgacacagtacaagaagggcaaggattctctgtacgcccagggaaagcggcgttatgacaggaagcagagtggctatggtgggcaaactaagccgattttccggaaaaaggctaaaactacaaagaagattgtgctaaggcttgagtgcgttgagcccaactgcagatctaagagaatgctggctattaaaagatgcaagcattttgaactgggaggagataagaagagaaagggccaagtgatccagttctaagtgtcatcttttattatgaagacaataaaatcttgagtttatgttcaaaaaaaaaaaaaaaaaaaacctgtgaaatctctgtgaggtctgtagtttagttaatagtattaccatgtcagtttttctgtttttgacaattgcactattgtaatataacatgttatcactgagggaagctggctgatcggtacacaagaattctctgaacaagaagattagcatggcccctgcgcaaggatgacacgcaaatttgtgaagcgttccatattttgcgcagtctgtcaagatcatttcagtatctgctaattagcactaaggaactagtgtgaatctaagcaaaaacgggtggcacccaatgacgaaattgtggttttcattaccaaaaaaaaaaaaaaagaattctct

SEQ ID NO: 64459 - DNA, 1794 bp, Homo sapiens
attctcctgcctcagcctcctgctaatttttttgtatttttagtagagacggggtttcttcatgttggccaggctggtctcaactcttgacctcaggtgatccatccactttggcctcccaaagtgcagggattataggtgtgagccactgtacctggccatcttgctggttttttattcccctatcccccccaaaccaaaccaaacaaaaacataactacctcaaagaacagcatgttcttctctgatgtctcatctgctttcatccgccatgccttactgagcattctgccttctgccaggattgccctgtgggaggcggctgtggatccaggaaaacagactggactggggagtgtctggggatttccttaccattctcccccatggggcagcctgtggagagcccacttgccaggctctctctgtgggaccagctctggtttgaatcctggctccaccactaactgtgtggccctagacatgacctcagactagtgcccgtctcatacgcttgttgatgagataatccacacaaagccttgagtacagtgtctgacatgctgcgagggctcagcagatgctagctgttcttgctattgtgattcttcccgttttctgtttggaatgtctgtctttctaggctcaatgctggactgagtttctttgaaggaaacaagcattgaagaggttccatggatcagggaggtctaagtaggggttcctttgttctgccttgcacttcctgtggctgttggtcattactgtgggtcgtacccatttttgcctccctctagtctgcctgtggcaggaccccttgcttctcagccactgagtgtacctgccagtgtggccactccttgtgggatagctgggggtagacacaggttagccttacaagatgtggagaccctgcctgtgtacacagacctgcttgcttatgatggacttgcctgtgagttaatcagtcactagatagccaaatgaggagaaatattggtagaccaaagagaattgctgcgactcaagattagccagagaaaccaatctctgtgaaagaaggaggaaatatgtcttttttttttttaatcttgctgactttgtagggccaggttctcaaagtttgagtattttgcaagtatatctccattgaaaacaacaaaaatggtaaaaggctttagaaagggttggaggaaaaaagaatggaaaattttagtttcagggagctatggtgatgtatggtttatgccacctcagttcccctattattgggtttaatattcaggagagctagggcatcatcctggttctgtcactaactgactgtgtgaccttgagcaaggtgggcctcagatcccatgtctgtaaaatgggaatgtcttaccctgaaggtggggctggagctttgctctgaaggtggtgggggtggaggtggaatgacttgaggcactcgagtaaagaatcaggttgggaggctggatgcggtggctcatgcctgtaatcccagcactctgggaggccgaggcaggtgggtcgtgaggttaggagttcgagaccagcctggccaacatggtgaaatcccgtctctactaaaaatacaaaaattagccaggcgtggtagcgcgcctgtaatcccagctactcgtgaggcaggagaattgcttgaacccgggaggcggaggttgcaatgagccaagatcgtgccactgcgctccagcctgggcagcacaacaagactgcgtctcaaaaacaaaacaacaacaacaacaacaaaagaatcaggttggaacttta

SEQ ID NO: 64460 - DNA, 1052 bp, Homo sapiens
agaggtggctggacacacaggtctgtctctgccctgcaaggtttctgatttatgcagggagcctgcatttgcccttggccaaattctttgggcataaagcttttgtaaaggggcttggggcccttccagggcattaacagtttctttatgccccattcagatatctatttgtatctgatttttatatatttccaaagtactttcccagcttcctgggggagacttgttccccccagcctggccagatcattgggaaccttctggcagacctgcctcacgctgctggcatatggagtgtcctctcaccaccgtctgtccttcctggtgtcttgcatgccgaagggccgagggtggagtggggttttttgttttgtttttaaataagggcaacgtgggtaaacagagcagtgtttctggtgccttcggggagggccaggaccctgcattccggctccatgacgacagcctgtttggttgccacttgctgggctgtgggcagcagcagttcagacggagacaatggtggctctgttgaaatgctgctgctgggctctggcagaatgcattttaattggacattctccaccctggaatctgtggggatctggtggcccactcctcctcattccttcatttttctctttgcaactcaagagccaagttattgcagctccttccccgccccgccccccaaccccgtctactattagcagcctcttgggggaaaatggtgtttctagccagggcatggtttgcactgggctgactggaaatagtgagagaaagggagagggtagggggctggaggggctgggagatatcctgtggcctgttctggagcatcactgaggggtgaagagcagcaggtgttccaggaagctcttctcttccgtggaccagggtggtcaggaacactggctctgaagtcaggccaactgggttggaatcctggtggtagcactgccagctgaacctctctgtgcctcagttttcttatgtgtaaattggggataatactagtgtctactcgtagaatcattgtgagaattaaa

SEQ ID NO: 64461 - DNA, 1950 bp, Homo sapiens
ttcttagatgaatgaggcagaggcatctgcctcaagggcttctgaaggcttccttccttgaggaagaagaacatgcagacagggtgaggaggtgcccagcccgctggcacccaagacacttatggtataggatatccggatccttccttttgatgaaagaagatgccatcacagagttaagggggctgtcaggcctcaattttaatcccacttctgttgcttgccagctgtgtgaccttggacaagtgagtcaacttttctgagcttcagtttccacatctatagtcagtagctagtaagaacatctaccttgtagggtcattcattcctttattaaatgaatatttattgagtgcctacttggagccaggcattgttctaaatgctgggatgggatagtgaacaaaatcaataaaggtctctgccctcatggagcttacgtattagcaggagagaaagagagcaaacgaaatggttaaaatatatagtatcagaggatggtaagtgctatggagaaaaatgagcaggaaaaggagacaggaggcctgggtgtgagagtggaatggtcagaagaggcctctttgtggagatgacatttgggtagagatctgatcaagccatgtaggggcaggacatgccatgacgaggaaacagcaaggaggccagagtggatggagctcagggagtaggagttgagactggagaggtgcaggcccttgacttgagctttcaccctgagtcagcagagaattcactggacggctttgaacaatggaaggctttgaacagaggagtggcatgatctgacttttgctttagaataaggataattattctaaatatttattctaaatattctaattattctaagtacttattctaaatattttaattatttaggataatattctaaaatatacttattctaaagaaaagtcagatcatgccattcctctgttaaattatggttgttgtacgtagaatagactgattaaagataatgtaggtagcatgtttaacacagtacctggtatgaaataagccctcattaaatggtagttttgttcttcatgataatattattttaaaattctttttattttttattattttttgagatagggtctcactctgttgcccaggctgcagcctcgacctcctgggctcaagtgaccctctcacctaagcctcctgagtagctggggccacaggtgtatgccaccatgcctggctaattgttaatttttttttgtagagaccgggtcttgccatgttgcccaagctggggtaatattattaaagatggacctgggtgccttctagtcttggcctgggccctcattccacctatcttctgcccttttgggagctacggcatccagggagccttctccctgaggaggacagtgatgagtattggacttgggaatgagcagggagaaggtgactgattctttggctgttcctgcctggatcttctgtttagtagtcatggtgaggcgtggtggtgcggcagtggagacaggagaagaatcttggcctccacaaatctagactggggagctcaacctgcaggccagaagctgccagtaaacgagaaatgccacatcagcagccctatgaattctgcttttcctatctggttgttagggttcccaggaggggctacagctgtaccccagagctgccctcctcctcccagacttcatggtgggcatccctcctcactacctccatccctggaatctcaggcctttatggaaaggtctcaagcctctcacatggtctgatgtggtttgcctattcacctgatatagagactccttcggcagcagtgctgaccaaactgcttctgctcaatgactttgtataacagggagagttcactacctcacaaggaagcccctcctgtaattgtcacattctcattgataggaagttccatttcag

SEQ ID NO: 64462 - DNA, 1529 bp, Homo sapiens
tttgagttgggcctagacagaggcttcattatgcaggaaaaggagcaggcaaaggttacagcagaagcaaagaagcaacttgtttaaaggggtggggtaaggagttcctgggaggctgttttacattcccttcatttctcaaatgaagatgaggtccagagatgggaagtgggtttcctagcagggatagggtaagcaaaggttagaaccaatgcccagcacctcacctggggctgttttcaccacgcctcaagggtgcgtctctactcggaagccatttctcctggttctgcctcctgccaggctgttctgtcttaaggaggaaaaggagggagcaaaagttgtatttaccaaaggagctggttgggcaggtctcctttccgaggtcaaagtcaaggccaaggttggcctagctggcttctggggggcggagccaggccttggctggccaccaggtcagtggggggtgtgggggatgggaggtcggggaggcttttggttgggagggagtgatcactggtggggactgaggtttttccaaggcattgcccctgtgaacagtgggctgaaaagattacagcccacacattctttctcagcagattagggccatgggagattatggaatacacaggaggctgtaggaggcctgcaaatttcccatttggggcaattaatttgatggattgtaaaacagctcactgcttcctctccgccttccctgggctgggttgggctgggcagtaagactggctggagaatgtggctggaaatgcccttgccggtgttctgcagtacctgcttggaccaccttgttaaaaccttctctgggcaggggctcggcctgcccctttcctgcctcccttcctggtacaaggaagatcatatagtaggtgctacataaagctatgcagagctgatacttatctgattggggcctttccaggatgttggtagaggtggggctcatggtggaagctctggtttatagatggggaagctgagccccagcggtgaagtcacctgcccaaggttactcaggttgttggtgacagctgggactccagccaggtttctctactcctgggccagggcgtcttctccccacttgtgtgctcaaagtgaaagtgaaataaatagtgagcaatttttatggtttctctcccctgacttcctccttgcctccagccagtcagtagggtccccactttggtgactgtgggcaaggtgtgacatggttctgctggcatctccccagcagctttgcagcattcccaggagggctctggtggggctgcacttttcttatgtactcaaaatgtgtctgggctcattcgatgcctcccttctccatggggtcttgcacctgtgatttgtaacagattcttgtgattagtcctttctctggtgcctcctaaagaccccactgtcaccaactcatatctgcagcggtgcagatggttccgactggttttcttgcctccatcctgttctccctacaggggcccaaatacctcatcctgatatgc

SEQ ID NO: 64463 - DNA, 1675 bp, Homo sapiens
gggaccacccccctgagagtctactgtctccatgttgagggcctttgaccagacttggcctccctcacagttcagctgttctcactcctgacttgaaatagggcagctatggggtcatgggtgagcacacaggcttggagccagacttcatggctatggaactctgccaggttatgtaacctctgtaaaatgaggtaaatgccggtatctgccccttaggtcttttgcagagattaaatgagaataatacacgtaaactacttagtctccagaacatagtatggttcaacagattttataatttatttccatgaacagcagatattttgtcttttctctataatggctatggtgggccaaatgtatttaggtaatttcttgacttctgcagggactctgatatacacagagcgtacctgtgtatactgtccagttagctcagattctcagttttgggcattttctaagggagggcaatgaacatcctgataggtttaactaaggttttaaaatgtccaattttacgtgtggtttttaaccacacctgcatcctaattacgaccttggctgttatagcttataggtttaggcaatctggatatagttgtagcaaaggttatttttgattcgagacatgccttgcttcctctgggcagaggaagaaaaagctccagtgatgatggaggactggagaggggaggtcagattcagttttgaattttaagtccatttacctgacatcatatttgttatactctgggggatatcagggagccggcaaagcaaatgtccacatgcttcaggcgataggatggtcaggtggcatgtgactaactgtcaggataatagtgcaggtgctacatggagagtaacactcaggagggagcagttcaggggctggatgagtctcagaagacttggtgtgtgtgcaggggtcttgtgaactgggattgggcggggacgagagacagtgtgggtgttgtaggcaggggaccggcactcattgttcaggggtcccttcatttagcagacattcactgagcactggatgtgtgccaagcactggcctgggcacagtagataccaacaagagtgaagcagagtagagaaaagagcattgaaagccagagtggcccagtgctcaggagcatggtctgctatgtggttgcctcggcttgaatcccagccctgccactgactagcttgtggtgtgatcctgagcaggttgtgtactctggagcctgtttcctcatctgaaaaatggggatggtaataattgtggcagggattaaatgagttaataggaagtactcagaatagtcttgaatatagaaagtactactgtgtgtaggatatttattgtcactggaatattagctccatgacaggcattttgtctgttgtgttcactgctgtagaatacatcttgtacatagtaggcactcagttaatgaatcaaagcaacactggtgtcctcaaggagcccaggagcctgtgctctggtggggacacagccatgtcaatgaccagaggatactgtgcaaatgctttgagaagggaagcatggggcctggtggggcacagaggagggctggccaggggaggcttggggttggagagcccgagctggatcttgagaaacaagcagggatttgttggttgacagaagggagtc

SEQ ID NO: 64464 - DNA, 1764 bp, Homo sapiens
ttaccctcctgaaattgcagatatacgaggatagagggctggttggagttgggagtgagtgggggattgtatggtgaggctgggaggagggggataagtcagtggtcagagtcccagggaagagaaatgatttcctacccaccaaagaaagtgtttggcaagatttttttttttcaacacattttgacctggggatttaaaaaaatatggttgaatgctatgaagctaaatatctataataactgtaccccttaatgcatttctagatgtaattggtggtacttgaaattatatccacttatggaggttttgaatattttttttagctttggtgtgtagatgggagctgaagagagctcagtcggtttttgcttcaacttttccagcccttctcacctgaaaatgtgtagacgtgtttgtgtgtttggcactggatggttttgaaaattcagaggggatattaattcttttggggaaaggaaagtaattggcttcctgttctgtgaatacatagatatttaaattagaaccccaagtacactctttactccaaaagccgcatgtgtctgaggagcctagtgacatacgatgtaagaattgtggggtaatcttgccaggcctttccaggttgctccttggggagggaggtcttggttggtgctgattgcctccttgagtcagtggaaaggtttgagagtttgtttgtttgtttttttcctgaaggttcgtgttgggttttgctcagttcaagggtgctagtgagctgaggggtggggctgtgaggctctcacactgagaagccaatggcttctacttatttgtttattttacaaatgtttatctggtactgacactgttcacacgtacactgttctaagggcttcacagacacagcctcctttaatcctcatgccaaccttataaggtaggtacggttatcatcctcattttacagatggggaaactgaggctcagggaggttgagtccagtaattggatgcacaggtgtaaggcggcagagctggggtcacccagcgttccctatctggggttctcatagtctctctctgtccagcttggcctgtctccaccatgttctgtgacaggctgtgccgtggagactgctccagtttatttcaggaagacactcgagcttcgcacaggtcagagtccatgggcatggtgagggaagagagggtgtagccagggctgttagtctgggactcactggaagcaaactgcatgcggccttctgtcgagtcagcaaccccttttgggtttagtaggaattgtcacctctccccccagcacatgcacctgtagagaagcccccaggtgttgcagagagcccctgagggagggtataggctgtgctggggctcagagacctggagctcagaggctagctgaggcaggctttggggtcttgctatcttgcctcctgcccatcgagtgccaggtgagtgaaggaagtcactgtctggttagctgcattctccctcctgtttctggggtctgagagaggagacagattgccggtctttgttttggacttgactccctctagagatggaacccccaccctagccccactcagacaaagttaagagaatattgggaaaatgggctcttcttcacagtggaagggtttggcattttgagactcagcatgaaaacctcactctaatgctttcctgaagactctggggtcattgctcacctccttgtccatggacatttctgatgggaggaggaggaggtaga

SEQ ID NO: 64465 - DNA, 1088 bp, Homo sapiens
cttgaggagtgtcatggctcatgcctgtaatccgagcactttgggaggctgaggcaggtggatcacttgaggtcaagagttcaagaccagcctggccaatatggtgaaaccccatctctactaaaaatacaaaaacaaaaaaaattagttgggtatggtgatgcatgcctgttaattccagccactcgggaggctgaggcacgagaattgcatgaacctgggagacagaggttacagtgagccgagattccaccactgcacttcagtctgggtgacagagtgagactctgtctcaaaaaaacaaaaacaaagacaggtttcttgtacttaccattgattgacacatttgatttatactccctgtccatatcccccctccagtggagaggattcccacatgtgagtattagggtttgcatctggttcttttgtggggaggcagtaaccctggtgtctgtattagaggattggtaaggggcagtgagggtagacatgaattagagcttctgtggggtggggctgggagtcagcatttatcacaagctccacaggtgattcttatggacactgaaagtagaagcatctctgagcttcagcttctctgtctctagaataatgatatatttttctccctagtgttatttaagaatgaaatgcgatagcctgtctgaagctcctaccatgctattcagcacatgataggtgctcaggcattgtgagtctctttccttgtagaagaacatctgtctaaagtcattgggttaagctgtgcaaaaggctttgagagagtatcagtggggtacagctgtctgaatgtacaccccgttacccaggagggagcctgggaagccaggttcctggggagcctctggttttctcagtgtgggttgggaatgtgctgccttcacctctgctgagatgatgctgtcagtcccagttagaaatggtgggactgagcttgtgagtgaccactgaatgaggcctatgtctgcctgggggtaggtgtgcagctccacatcttggaaccccgtgaccacttagagatcctgcaggcagaggagggcctggggtgacaagttgttctgagt

SEQ ID NO: 64466 - DNA, 1238 bp, Homo sapiens
agagcctcgccctcttgaggtctcacagcttggagttagtgtgcagtctcttcctggggctgctggctacctcttgtagcttggagttagtgtgcagtctcttcctggggctgctggctacctcttgtagcttggagttagtgtgcagtctcttcctggggctgctggctacctcttgtagcttggagttagtgtgcagtctcttcctggggctgctggctacctctcgtgacttcctacatcacactctatggtgcagggaaggggagcagcatgcttgggggatggaggggccagagatcccattccagccctgtaccaaggccactggctgcacagcttcctgtgttctctcccgctgggtgaggcgggagatgagcttgtcctcgtctcggaagaggggagccagagcaatggtttaggttcgttcactcacctttgcaacaatcatatcttctccacttgcaaattgagctgtctgtgcctgtccacagatggaatgagttggccatcttgaggggtggtgggcagcttattagaggagcagtttaattggaggctggttggcttttgatcaaggaattatctgttcagtcaccagactccaattaagcagctactctatgccagacactcggtgctggggagagaaatgaagctcactgtttctgccctccagcagtgcccagtccaagacaggagaggaatgctggacagttccaatatgggtgcctggggctggggagcttcggagggtgaccaaggaaggccaggcagccatggagcagagcagtgagcagcccaaggcaggagagaccaatgcagaaaatgtgaaggagctggggattaggggtgagggccatggtacctgtgtgcctgtttgggtctcagagaggttagtgctgagttgaggagtagggacagaccttagataaaatccttcactagtagcttggctgcaggagtgtggtgtatgggagctatgccctagagggctccctgaattcctttgtctatagggtggtgccacatggtgtttacaaaacatggattctgggatcagagtgcctgggttgaaatcctcactctgcttttagctttggcaggtcacttgaacctctctgtgtctttagatgtttcttcatctgtaagatggggacaatgactgtacctatcaacttagaatggtatctggcaacttgtacatgctatataggaattagccattatcactacta

SEQ ID NO: 64467 - DNA, 1898 bp, Homo sapiens
gagttgtgagttgtgccggatcacttctctgtctcatccagccctcttcaggatactggcctgggcagcagggttggtttttgttgaagcccaaagcacagctaggcaacttcatcatgcagaaaaatgtatgaaaagggcttttgatgtgggtgacagcatgtgtaaagagacggtatccaagtgtgtggactttggagtcagactacctagactctaattcacctccaccacatacagctccctgaccttggcaggttacctgctctctttaagcctcacttcctcaccagtaaaatggggttaaatgtgaggattatgtgagttaattgatggatggaaagggtttagcaagtagtagtgccacgtttactggcacattgtaaatgcccaataaatgtgagctcctcttctgtacatccacacagctatggggcagggtgaagacatgacttctgagtcctaattgcattcattggctgcagaagtctggtgcccttgaactaggattgccggagtcaggggcatgcaaactgtagaactcaactcagaaattggtttggaccaataaaaactgcacaaccttgggctgggtgtggtggctcacatgtgtaatcccagcactttgggatgccaaagtgggcggatcacctgaggtcaggagttcgagaccagcctgaccaacatggagaaaccccatctctactaaaaatatcaaaattagccgggcactgtggcgcatgcctgtaatcccagttactcaggagactgaggcaggagaatcgcttgaacgggaggcagaggttgcagtgagccgaaattgcgccattgcatgccagcctaggcaacaagagcgaaactccatcacaaaaaaaaaaaaaaaaaaaaggcacaactattctggtacttaaaggatgtccttattcttggaaatacacactgaggttatttgctcttaagtagttaagtggtgtgggggaaaattgtgttggggggaaggagtggatgacagagcaaatgggacaaaatattaacagtgggtgagtctgagttaggagtggcccctggtttacctctttactgggcagttagaagtctgcacagatgtctgcttcttaatctgtgcagccacctggttatcggctctgaccactaaaggacaaatgcattgtctggcacgtctcacgtcacaggtgtcaacaataataatcttcgtggtgctttctagttgaaaaatgcatttgttgtagaggcagatattttgattgtcctcattttacagatcaggcatttgaggctgatgggggcagggagtggtggttaatagatcttcccaaggccccagcatcaccgaggggtttaagacttgaaccgaagtcttcttggctccaaattctatgcagtttctacgtggtacatggtgccttgtggctctcatcatcactctttctgttccttttttttttttctttaagtgttgaggttttgttctgttgcccaggctggggtgcagtggtaccatctcagctcactgtaacttcaaactcctgggctcaagcaatgcccccgcctcagcctcctgagtagctgcgactacaggcgtgcactgccatgcccagctaactccctctctactgattcctccctctagggttatccctcagaagcagttctctgcctgcaccttccctgatgactgtgaggcagaagcccccttgggcctccctcagaaaggcagggtagaagagtgatggatggtgcatagtccccacacagaactgtgagccagtcgctggtgctctgggaagtggacctcctcaagctggagaggcaccctctcccgccacagatgtcagctgaccttagcttaggggcctatgagcttcttaagcctgctt

SEQ ID NO: 64468 - DNA, 1049 bp, Homo sapiens
caattctcttgcctcagcctcctgggtagctgggattacagacacccaccaccacgcctggctaatttttgtatctttagtagagacggggtttcaccatgttggccaggctggtctcaaactcctgacctcaagtaatctgcccaccttggcctcctggaagtgctgggattacaggcgtgggccaccgggcccagcctccattctcttttgatgtctatgggagtaaatttggtgcttcctaaattgagaactttggaaaaaaattaagacagcactttaaacagaaacgtgtgcaggggcagggagatgccagtttaccccccccgttaagtctgaggtgacagagggctgtaggaagactgcttgttggcttttcagcctcaatatgtggaatatttggcaattcagtgaggtacctgctcttgttttctatcttcagaggacagcacaggtttgaatctctttgctcagtgtaagacagcatcatctcagcaaactggcaggtatcttaagtaaatattggcagagggaaaaacacggaggaatatggttgtatttgcctgttgtttttaaatggctgtcaaaacatttgcttttcaattttctgaaatgagaaatattttgagttaatgttttatcatttacagagtatttcacgaacattctctggtttgtcccataattattgcatttttttagtgcgggaatttgggctcagaggggtaaagtgacttctctaaagttgtatactgggctgggcatggtgactcatgcttgtaatcccagcactttgggaggccgaggtgggcagatcacctgaggtcagaagtttaagacaagcttggccaatgtggtgaaacctcatctctactaaaaatacaaaaattagctgggtatggtggtgcgtgcctgtaatcccagctactcgggaggctgaggtaggagaatcacttgaacccaggaggcagaggttacagtgaactgagattgcgccattgcactccagcctgggcgacaagagtgaaacagtgtcttaaaaaaaaaaa

SEQ ID NO: 64469 - DNA, 1045 bp, Homo sapiens
atagtcccagctattagggaggctgaggtgggaggatcacttgagcttgggaagcggaggttgccgtgaactgagctcacgccactgcactccagcctgggcgacagaatgagactctgtctcaaaaaaaaaaaaaaaaagcatctttagagatcctaaaatgtaaaattttgttcttctgtagtttttcccttgacttgtcatttaaaaaaaaataaaattgctatttatgggcatggtggcgagtgcctgtaatcccagctacttgggaggctgagccaggaggaacgcttgaacccaggaggtgaaggttgcggtgagccaagattgcaccattgcactccagcctaggcaacaagagtaaaactctgtctcaaaaaaaaaatttttttttctatttaatgtaattctacataaagaaaaattaagtttaaattattagcataaattttatagttatttctatattgtagaatataatgttttaaatgtgaatatcagtgcatttacctcatatgctaggagttgccaccaccatgccccactccaagacaccatagagcacaagcacctgtatccatgcccccctgggcagcagggaggagcagggagcccaggcagggcttagggctccaggaggctgggagtgggcagttaagaacctggtcctccgaggcagggagtggggaccaggcatgagtccttcagaaggttacctctggagataatgccaagtatcaagggtgtgtgttttgtattcagcaacccattttttagtctgaaatcaaagggagttggagagtgaaggatgaaccaaatgtgacagatgttcagttggggattttgtagacaccaggcctagaaggcccttaggaaagccagtgaatactggacagcccaggaggctgcccttaattatgacctcacccaaccgacagtcttctgggccacccctaggaaggagtctgtcctgtcttctatattttcctccctagataaatgttgaacttcatggcagtgaaatttatcttgtagaatgtcaaac

SEQ ID NO: 64470 - DNA, 1100 bp, Homo sapiens
gggctgctcttcaggggtttcatggaaccttgtgaattccgttccccctacagcaggcattaaataggtcatgaggcaatgaggagatggcagagaagaggggctcagccaccttgcctgtgccaaggctgttccttgaaggcaggcatcttattccccacttctgtgacttaggcacccagcccagggctgggagctgagtaggcacttggcatctcttgaggaatcagtgttttaaagagacccaatgagttttctaggtattccaggtcttggaaaactccttactgggaaggagattggggtggaggagaataagcaaggtgagagaagctcaacagccaggaacaggcctgtcaaggctggtgcctagacccaggcttcttggatacagtcgcttgctgttgagaacaatgctcaaagcaggaagctggctggtggaggctcaaacggcctcctctgcgtcttcatttcatatccttattgctctgcatctgggactgggatacctgttggctactggactaggctgtcttccttccctggctgctgggcccttggcatcatctgtgacttggcacaagggtgctggcaggaaccagctgattgcacaagaccctttctagcttcaggtttctcagttttagctttggggttgtgtggagccaccctgtgtaggtactttcttcttgtgggtgcctgtccccaagtgaggacagctagactctgggaaagacatttctgaggcttggagtaaggctaactttcccctcccctaggacctgaagcaggtcctaggggcaggactggctacataatttgcagagcctcagtgtaaaatgaaaatgcaaggctccttattgaaaaagaaggaaaaagtattagcttggtgcaaatgtaattgcggttagtgctattacttttaatggtaaaaactgcaattacttttgcaccaactgaatatctttaggccgggcgtggtggttcacacccagtaatcccagcactttgaatggccaaagcaggaggattgcttgggctcaggaatttgagactagcctgggcaacatggtaaaaccctatctttacaaaaaatacaa

SEQ ID NO: 64471 - DNA, 1351 bp, Homo sapiens
cagcaaatgttttaatactctccagagtccatttcttttctttcttttctttttctttctttttttttttaaagacagctttgctctgtcgcccaggctggagtgcagtggcacgatctcagctcactgcaacctctgcctcttgggttcaagtgattctcatgcctcggccaccccctaagtagctgggactacaggtgtgcacaaccatgactggctaatttttgcatttttagtagagacagggtttcaccatgttggccaggctggtctcaaactcctgacctgaagtgatccgcctgcctcagcctcccaaagtgctcggattacaggcatgagccactgtgcctggcctcggagtccatttcttgaagcagaaaagcttgaggttaggcaggtgaatttttgttttgatttctgcactttttgttcaattttgcattaatgagggacaaaatgtataagaaatctactgttggttctcccagttctagactaagtgatgttgataacccctttaaaaagattttttggctgggtatagtggctcatgcctgcaattccacactttgggaggcggaggcgaggggatcacttgaggccaggagttcaagatcagcctgggcaacacggagaggcctcatctgtacaaaaaatgaaaaaattaatggtggtatgctcctgtaatcctagcaacttgagaggcttaagtgtgaggattgcttgagcccaggagtctgagtttaccatgagctatgattgtgatactgtactccagcctggatgacagagtgagaccctgtctgtaaataaataaataaataaataaataaaacgaagactttttgtactctagcacttctctactatgaatcccttagctgggtagcaaggtataatagtaattgtgataatagtgtcattaacagaagtagcaataatagtagtaataattatataacagcctaatctttttgggtctttgaaaaatgctaggaactgttctgtaactgtcattgatttaattctcacaatagtttgatgaggtaggaactactactagtttcgttttacagacatagaatcttgccgtaatcctggacattcctatagcagatggttttttttcttgtgtcttttcttatttgatccttatagcagcccctggaggcaggaggggaagaatcatccccattcttcagatgatgaaactcaggtccatgaaggttcaatgattttgctgaagtgttagagctgggactggaacataggtctttggtccctcatgtgatagccacagtagtagtggtagctcctaccccaggccatgcatcttgaaggagatgaatgc

SEQ ID NO: 64472 - DNA, 3376 bp, Homo sapiens
cccgggctcgttggcgcgcgctgcgccgcggccacactcaacgttttgtgtgcccaagttgtttggcggcctccgagaggaaggcggtgggggccgcacctacgctggggacctgggccgggggggaagaggccgcagactctgcgccctggaccttgcaatccggctggattcgggtgctggtgtgcgggctgggcacgcctcccctctagggtctggggctgcgccccgccgggagaggcgagtgccgggacctggatgggctcgggtgggaggagtagaacgagaagttctgtcctggtgtgggcctgcggggttggagtggggagagggagagactaggggaatctcgcttaggaggacgccccctctcccgccgcaggctctgggatggtcttggagagtcggaacctcgcccccggcctccatccactgcgcgggcctgcggggagggagggggtggggaagggaactggtcaaccaatgactttcctcgagcgctccgcgtctcttcggccggagctgaaccgggggattgctggtgcttccgttagtccacgggcgacttttccgcaaaagccccggagtgttggcgcaccagccaggttaccctgggtctgtaggatcagtccatgtcagattggggcgcagtaagtgaaggcgcgggtcaggctcctatgccagtacaggctttgctttcccactccggcgggagtctgtgttgcagcgtgtttccctctgcctgctgagctccgggaggccagacactgcctttgaccccttgccccagtgccggacagcaagtaggcactcggtaaatgtttgttcactgaatgaatcagctcgccaaaggtctggacggtggtctgactagtactgactgggtgtacctcggcgactgtgagtcagaactactactgttaggaataaagcagcctatttcaagaaaaccccggaacctccttttctggtttgggttcttgcataatagttgaaaatactgatgggtgagatttacagacctaaggactagggccttgctgcggttctattgccctgcctcatatgtgtgtatgtgaagttggggagttggctggggccatcagagtcttgctgtcagtgggcctctctggctcataactgcatcagttgatgttattacaattttcctgtgtgccacacgttcacacgttgttctaggcattgggaacaaaaaacagaaaagttctaggtgctcatggagcttgcaatctaataggagagggaagggagtagaaaataagtaaaaaacacaaataataatatcagatcgtggttactactgtgcagaaagttaaaataaggtgatgtgacatggagtgactgggtggcttggttgtactgggagatcgggatggtgtttctgaataggcaacatttaaagtaaaatttgaatgacaagaaggagacatcatgtgatgatgagttggcaaagcatttcgggaagagcgaacagccagggcaagggcttaaggcagaaaagagcttggagtttaaggagcaggaaggctggaatgtggtgcacaagggagaaagtggcatgaggagaggtcacaggtaggagaaaggtaaatgccgcaaagctttgtgagccggggtgaggaattttcatactttattctaagcccagtgaaacgtcattggagggttttaagcagggaaatggcatgatttggtgtgtgtttttagaacgatcactgtgaggagattggattgtaggtggccactgcagggggaggcaggagagcagctgaggctgttgccctcttccaggcaggagttagaagtggcttgcctgagggtggtagcacagtagacagggagtagtggtcacattcaggctgtgtttaggaaataggctcttcacaccttcatgatggactgaatagtctgtgggagaaagagaagaggcaaagatgactcctcagggcttgggcacctgagtggatagcattcatatcgttgagatgggaagagccggtttggggtggaggagaatcatgagatcttgttttgccatcttacatttgagatatgagtatgtcagatagtgtgatctgaagcttggtggggagagaggacagaagagacccattgggtataatagatgttattcaaggccatgggattagatgaaatcccctaggaagagagtacagacagaagagagatgttctgaggctttggatggtcaaagcagtgtttagaggggtgagaggtgaagccagcaaggagactgagaaggactgagaaggtaggagaaaccccaggagaatgcatggtcacagaagccttaaaggacaaaatctgactggagtaggtggaagataaaacacggggtgaagacagggagtcagttaggcaaatcttccaggtagttttgttgcaaagtggagttgagacattagccggtaattggagaggatgtgggtttgagggagggttcttttttttggtgggagattgtacagcatgtttgttttgatgggaatgatcccactgagaggaagaagtcgatgctgcagtaaagagacggggcagttgctggagcagtgtttctaagaaggtgagagggatgggatccatggcctgcatctcactagcgtcacccaggggcagggcccatcattcatttggcgggaggaagggctgcaagtgtcccaaagtaccaggtgcagccttgggctgggtgtgtgaggccgcgtgtgggactctggaggctggagcacagccttccacacctttgctgactcttccatggtaacttgtctgtgaggtccctaatgattttcctacagtgagctcctgtgcccccagggccttggctgactcctcccaggcctagaaaaagcaatgtgtgacagtgttccctaccctcaaaggcagggccctgtggcaggtgattgtacttctgacgtccttctgtgacaattttttgagagacttaagggttttgggagtaattgttctctccctcatcccccgccccccacatgaaaaatgttttactgttgtctgatttcttagctttgccgtgagcatttctgaatgtttgatttttgtgttgagggcaggagcctcctctaatctggctcataaagtgagagcgacaaagcattgacatggctgattttatttttcctaatggctccttgcacaggaaagttgtgtgaggttttacaggatgtattcagttgctcctcatatttagcagattaaaacattttaatttttgaaaaaattttaagaaacagaatcttcctctgtctcctagtctggagtgcagtggtgcaatcatagctcactgcagccttgaactcctggggccaagtgatcc

SEQ ID NO: 64473 - DNA, 2661 bp, Homo sapiens
cgtagctccgcctcctgcgtgagaggaagcggggacgtgtgaggtcacttcctgcgtgttgggtggcttcctgcggcgtttccactctcgctctcctttcgttgcctgatcgccgccatcatgggtcgcatgcatgctcccgggtgagctcggggcatcaagccggattgctgggcggggggtgggaggaagacagggagtgtgggcagcgggccgaggggatgatgttctgggctgctctggcactagccgccacctcacctcgagactgcttctctccccaggaagggcctgtcccagtcggctttaccctatcgacgcagcgtccccactgtaagtagcgcgctgggaccggggagaatccggggagggggttggcatttgtctcgggtgaagcgacgccagggtgaggaacttgcgtgtatgaggagcgcggttttgcggaaggagagaccgctgttctgcggcgccattcctgggttctcatcctaaggctgctttctattccataacagtggttgaagttgacatctgacgacgtgaaggagcagatttacaaactggccaagaagggccttactccttcacagatcggtgagtgtttgtgtctaacatagcctatttcgcctgtcctcgtgtgacttgtaggatctagtaggtggtaaagttattttaaaaatagccaaaactctggtctcgccaccgtgctagaggcatcattgtaagcacttcacatgtactgatttcgtttaattctgaccacaatactttgaaataaatcttcatggctttcaccccagtttacagttgaggaagcagaggcacactgccgctggatactaaccagccccaaatcacacagctgtcaagtggaggagttggaattggctaagcagagtgcctgacacagttcctcacagttaggtgtggtttgaatctcagctgcgtgtgacttcgtgcaagtggcttcattcagcaaatgtttaccttctatgtgctgaacatggttctggggcctgagaacatactactctccgactcccccgcccaaaaaagccagccgcaatgtgcctgtagtcccagatacttgggatgcagaggtgagaggatcaccagagcctagaagtcccaggctgcagtgagctatgatgaagccactgcactcctgggtgacagagagaccccacctctttttttttttttttttgagacagtcttgctcttgtcgcccagtctggagtgcagtggcgcgatctcagctcactgcaacctccacctcctggattcaagcgattctcctgcctcagcctcccgaataggtgggattacaggcgcccgccagcaggcccagctaatttgtgtgtttttgtttgagaccgattctcactttgtcacccaggctggagtgcagtggtatgatctcggctcactgcaacctccgcctcctgggttcaagcaagcaattctcctgcctctgcctctggagtagctgagactacaggccgcaccaccacgcccggctaatttttgtatttttagtagagacgaggtttcaccatgttggccaggctggtctcagactcctgacctcagatgatccactgcctcggcctcccaaagtgctgggattacaggcgtgagccacaccacctgatcccacctcttaaaagggggaggggggtgcaaaatatctgtactcctggagcttgtagtctaattggaggtatgacacatcaaaagaaaatatgtcatagattgtaagtagtcagagctcattagaggtttaaaagaaataacgtgtaaagtttttagaagaatatctgaccagagttctcagtaaatgttagctgtggaatctcattaatccctttggtcatctgtattccagcaagctcactgtgatgatggttttccaacattcgcagtttccaccagaaaggttttccttagtgttgggtaaaccttccttggatgtctgagtgagctttatgtgcattctcacgttggtttctgtgatgtataaaagtatacccccatcttacagataggaaactatgccctgatttctgagccttgacatcatcacattctccagtttgtgtttcgtgttgaaagttaaaacgtgattcccttttcaggtgtaatcctgagagattcacatggtgttgcacaagtacgttttgtgacaggcaataaaattttaagaattcttaagtctaagggacttgctcctgatcttcctgaagatctctaccatttaattaagaaagcagttgctgttcgaaagcatcttgagaggaacagaaaggtaagctaataaataaaacctggtgctaagtaggactgcttgtactaaattttttcggtaaaatgtaatgcatctggtttgaattatccaaggcttagtacacaaaccagtgtagtgctgctttgaagttcaaattctatccaaagagattttcattatagaaagtgcatggtagctctacattctcttattaatgtttgataatgttaggtcattttgggtggttttcttgaattgcaccaaattttatttttaggataaggatgctaaattccgtctgattctaatagagagccggattcaccgtttggctcgatattataagaccaagcgagtcctccctcccaattgga

SEQ ID NO: 64474 - DNA, 1057 bp, Homo sapiens
atgctaatcttcagcccgtaccaaaaagtagagtggagcctctttgcactactactatcaataaattttaaatcagttggatttttaagcattttttaaaagctgacattaaagtaaatctaaaaaaagtttaacaaactggccaagacactaatttttatgtataatcacaatattttatactcacctttattgactaaaaataattatgctacatgttgtcctgcatcagaagaattatttcttcttgccagtgttttgggatttgaagataatggttcactcaaagaacctattattttctctactgaggaacccaatgtagaacttgcactgatatttttattactgcctttatatgaatctataggtatctaaatgttaaggcatgtatgatctttgatcatttcttttttcaaattaaagttgtataaaagtttcaatatcttgccttaaattagttgcctattctttctaggattcaaatattgtgacatttaaaaaagaaaacattcacttttgaaacttagacttcagatcaaaaaggactgaacccccactatcataatccatacattcatttccatgttgtttgactagcagtgcatatatgaatgaatatggtaattaatcttacctataagaaccaaatactttaattatattaagatagtgaataaagatgtataatatttttattaataccttgaatatattcagtggattgaatgtgacttcataactgtactacgattgtattaaaatatttctggaataaaagaactctgctatcatttctttccttgttgacatactaacatttttggttccagactttgcaatgagctcactcttgatgttctttgcatctcacccaggagtctattaggtttaataatcctgaatttcagaactaacctgttagttgcccctaaaaatgttcaaatagagattctgacttctgagtgttaactcttttttttttttgagacagagtcttactttgtctcccaggcctggagtgcagtggcgacatctcggctcactgcaacctcca

SEQ ID NO: 64475 - DNA, 1095 bp, Homo sapiens
cagaatctctatttgaacatttttaggggcaactaacaggttagttctgaaattcaggattattaaacctaatagactcctgggtgagatgcaaagaacatcaagagtgagctcattgcaaagtctggaaccaaaaatgttagtatgtcaacaaggaaagaaatgatagcagagttcttttattccagaaatattttaatacaatcgtagtacagttatgaagtcacattcaatccactgaatatattcaaggtattaataaaaatattatacatctttattcactatcttaatataattaaagtatttggttcttataggtaagattaattaccatattcattcatatatgcactgctagtcaaacaacatggaaatgaatgtatggattatgatagtgggggttcagtcctttttgatctgaagtctaagtttcaaaagtgaatgttttcttttttaaatgtcacaatatttgaatcctagaaagaataggcaactaatttaaggcaagatattgaaacttttatacaactttaatttgaaaaaagaaatgatcaaagatcatacatgccttaacatttagatacctatagattcatataaaggcagtaataaaaatatcagtgcaagttctacattgggttcctcagtagagaaaataataggttctttgagtgaaccattatcttcaaatcccaaaacactggcaagaagaaataattcttctgatgcaggacaacatgtagcataattatttttagtcaataaaggtgagtataaaatattgtgattatacataaaaattagtgtcttggccagtttgttaaactttttttagatttactttaatgtcagcttttaaaaaatgcttaaaaatccaactgatttaaaatttattgatagtagtagtgcaaagaggctccactctactttttggtacgggctgaagattagcatttcataaagaaataaactatatgtaaaatgtatgtgtgtttgaatgagtaaagaaggcacaaaatgagttaaattaagagaaaacattaccacttgttctgaactcttaactgtacagtattataatatacacttaga

SEQ ID NO: 64476 - DNA, 1037 bp, Homo sapiens
cctcagcctcccaaagtgctgggattacaggcgtgagccaccatgcctggcctctagtttttattttttagctaatgattagtcttgctttgtatctctctatgtcagacatcacaggaatgatagtacaatccaagactcctgaaacacaaaatgtccttctaaagtattcagacaaaacctaccggatgtgtcataatcagtgtcactcattgtggtcactctttggctaatattctcacgttttcacttgaaatgttccaagaaaccaaacaaactttaatttgtgatttactgttcttttttcctttgttgtagcttgtatacagtggatatagcaaagaaaccctaagacagcgagaacttcaactaagtgtactcagtgcagaatctctgcgggagaattttttcttgggtggagtaaccctgcctttgaaagatttcaacttgagcaaagagacggttaaatggtatcagctgactgcggcaacatacttgtaaactagtgaatgtttgagctttggaagcatgaacagttataaacgtgcatgcatacatgcacacacacacagacacacacacacacacttgttaattttgtatagtatttttatacttggacagaacttataaagttaaatatacttgctgcatttcaacacatctgttggaccaacagtcacataactaacctttttgaatttttggaagccattgctgttttaaagtcattatgtagaatgctacaaaccctaaacttaatatatactaattcctgaaaaagactttgagacagtactatgtcagttcagccacctattttgcattgttttctataaggaggcaaagcatatgtgttttcctgttatgcaccttttatagcctttaccactgtgtaatgttcacaaacaccaaagtaaaggaaaaatgcaggatgttaccgtaaaatccagctgctattcatggagctgaaaaacaaagcacaaataatagatagctaagttaagaactactaagtagtttatagaagtagggaa

SEQ ID NO: 64477 - DNA, 1037 bp, Homo sapiens
tctgagaatgggaggagagtattctttctaagccagtctatttctgaataaatataactttcctaatagatgtgattactaaagaagtataaatcaatgacctatcaggttgtttactcctttttcccctcccttctgtccgcaccacatgtgacagtcttgaaaataaagcaaaatccttttattgcagcttgaaccactacaaccagtaaataaagatgaaaatatttgtattttcagatgcaggttccttcagtcctactccaggccaaataggaggagctgtgaaattatccatctcttaccgaaatggtactcttttcatcatggtgatgcatatcaaagatcttgtgagtgattacaaagaatgatggttgtagaggaaacccttaccttggtaggaagcattactattaagggactgcttttctttttaggttactgaagatggagctgacccaaatccatatgtcaaaacatacctacttccagataaccacaaaacatccaaacgtaaaaccaaaatttcacgaaaaacgaggaatccgacattcaatgaaatggtaagttaaaatcatttctagaagtttccttggtttattatttttttaattttcatttttaagttctgacgtgcgtaagcaggatgtgcaagtttgttacatagctaaacgtaccattgtggtctgcatacctatcaacctatcacctaggtattaagcccagcatgcattagctatttttcctaatgctctccctcccaccatcccatcccccaacaggccccagtgtgtgttgtccccttctctgtgtccattgttttgagattttaaattttaaaacattttaaggccaggcgcagtggctcatgcctgtaatcctagcaatttgggaggccgaggtggatacatcccttgagctcaggagtttgagaccagcctgggcaacatgatgaaattccatctctacaaaaaaaaaaaaagaaaaaaattagctaggcatggtggcacgcacctgtaatcccagctcctcgggag

SEQ ID NO: 64478 - DNA, 1048 bp, Homo sapiens
aagtagctgggattacaggcacgcaccactatgcccagctaatttttgtttgtttagtagagacgtgcttttactatgttgcccaggctggtctcaaactcctgacctcagctgatccacccacctcggcctcccaaagtgctgggattacaggcatgagccactgcacccggcctggaaagaaggttttaaatataaattttatgtgtttgtggtgtgatttcttttcagatttatgtagtccgaattttgagggaaggacagattgaaccatcatttgtcttccgaacatttgacgaatttcaggaacttcacaataagctcagtattatttttccactttggaagttaccagggtatgtattcatccttgtacattaatcctttttgtaggaaacaacttgttatcaaatgtaggtagaaagctttgtgttaacacttagtaagatattatcggccatgtgtggcttattttcctttgtgtcataaagacctaatacaaaagcagacataaacaaggaactggaagtttttgttgaatgaataaatgatcgggatgttaaaatatgagattttcagacttctaactcttattgaagctttaactttgctgtctctaccatagtaagcaacacaagataataatttggcatcttggttttgaaaaaagtcatatcctgccaggtgtggtggctcacaagcttataatcccagcactttgggaggccgaggcagggagataccttgagtccaggagttggagactagcctgggcaccatggcgaaaccccatctctataaaaaatacaaaaattagctgggctggtggcacatgtctgaagtcccagctactcaggaggctgaagtgagaggattgattgataccaggatgtggaggttgcagtgagcgaagatcacatcactgcattacagcctgggtgacagaatgagaccctgtcccccccccccaaaaaaaaagtcatatgctaaatcagtgtagaaataatctatcatgggccatactgagctcctctgctaaaaaaactga

SEQ ID NO: 64479 - DNA, 1086 bp, Homo sapiens
tagcctggatgaaacagcaagactcagtctcaaaataaaaaattaaaaaagattttaaaatggcacatggcactgtagaaaaatatgtttttatcattgaaattacatattaaataaaccttgagatattttgaggcaaataagtatattttaaaaaatattattgcaaatcctttgtatttattagtaaatcaacttttgacagcctactatgtgcaattactatgaatcagaatttgttcctataaattagaattttgataaatagcatttgtttaaactaaggtaaaacaaatcaaagcaatattttatgttccttctgcaatatacttaaatatgctttacctagtaaagaaaattgtagcttctgcgtctgtagtttggggttgaagtgcatctctaacgtatttcaaatcttgaatacttgtaagttctggtaaccctgaaggaatcatctgtagaagaaaacaaaaagttctgtgagttaaattttttaaaacatttgttcctcactccttcctgtgggctgctcaagtaatcagaactaaagcaaacaaaaataatcagtcttgaggggttcattagtgtattggggacctaggtgattatctaacaaataaggaaatggacaccaaggaagtcaagcaatttgttggtggtggtcaaaaacccagtttatagaattaaacctgtgagatccagatctccttttgtctaggctctttttttgggggcggggggggggggcagggagccgggtgcgatcttggctcactgcatcctctgcctccagggttcaagcaattctcctgcctcagcctcctgagtagttgggattacagatacgtaccactatgcctggcgaacttttttttttttgtatttttgatagagatggggttttgccatgttggccaggctggtctcgaactcctgacctcaagcaatccgcctgccttagcctcccaaagtgctgggattacaggcatgagccaccgcgcctggcctaggccactgtttttacttttatagatttagggggtacaagtacaattttggtacatgtatgtatcacatagtgataaa

SEQ ID NO: 64480 - DNA, 1050 bp, Homo sapiens
gtcatgaacccaggaggcggagcttgcagtgagcctagatcgcgccactgcactccagcctgggcgacagagcaggactctgtctcaaaaaaaaaaaaaagaaaaaaaaagaaaaatgttattttaaaattatggaaattcaaaagtgtgtggtattaagtttcctagttggaaatggctgtacctcagatagcttagtttaataatcatgtaatagcactattggagtatcttctgtaaataatattttgtatgtactttcattttaaatagggatcgggctccttttgtgctgacctctgatatggcatatgtcattaatgggggtgaaaagcccaccattcgttttcagttgtttgtggacctctgctgtcaggcctacaacttgataagaaagcagacaaacctttttcttaacctcctttcactggtaactattctttataagcacttaattagttttatattaatgcatctatgtttcaatacttaaaaaagattattttgtgattttggaataaaatttgctttagtcacaaatgtcagatacattattgctcagatattttaaacttactgccgtgtgaaataagccagacacaagagtacctactgtctgactccatttgtataaaatacaaaaaataagtcagtagagtggctccccttgggatgggaagtattagtagctggaccccaaggcaggcatctgatatgctaatgaatgttttgtgtattaatatgggtgtgaattgtcaacattcactcagctgtacaatgaagatttctgtactttcctgggtatatattatcgttaagtaaaaagtaaaaaacacgaacccactatgattattatgagtaaattgatatggtaataaacagaaggctacaattgtcttaagtgaaataactcagaaatagaaagttaaatattgtgtgttctcacttataagtaggagttaaataatatgtatacatggacataaagagtagaataatagacattggagacttgggagggtaggaagggggatggtggatgggagatga

SEQ ID NO: 64481 - DNA, 1057 bp, Homo sapiens
gtggcaggcacctataatcccagctactcaggaggctgaggcaggagaatcagttgaacctaggaggcggagattgcagtgagccgagatgacccctctgcactccagcctgggtgatagagcaagactcagtctcaaaaaataaataaataaataaataaataattgaatataattcacataccataaaactgaaccttttaaagtgtacagttcagggaactgagatatgaagaggttaagtacctttccctagaatgctgcagaaaaataaaaaggcagttcattttataggtgtgtgcaaccatgcccagctaatttttgtgtttttagtagaggcggggtttccaccatgttggccaggctgatctcgaactcctgacctcaggtgttctgcccactttggcctcccaaagtgctgggattacagctttcatagtatgtaatctgttaagtcttttggagatgtacaagtttcattttgtttccttgatttcaaggttggtgaagatcttcggcaagatatgttagctttacagatgataaagattatggataagatctggcttaaagaaggactagatctgaggatggtaattttcaaatgtctctcaactggcagagatcgaggtaagtttattagctgtgtcttgatgtcttatttttttccttgaacttagcttaaagtgtacctgccgtaaacatcctgatgcagataccctggtatcacagttgtttcttattttaatccagtgttactttattgattcagttgctcataattaagtctctttgaaaaataacttagtggccgggcatagtggctcatgcctgtaatcccagcactttgggaggccaaggtgggtggatcacatgaggtcaggagtttgagtccaacctgggcaacatggtgaaaccctgtttctactaaaaatgcaaaaattagccaggtgtggtggcgtgcccctgtaatcccagctgcttaggaggctgagatgggagaatagcttgaacttgggaggcggaggctgcagtgagccgagattgcatcactgta

SEQ ID NO: 64482 - DNA, 1024 bp, Homo sapiens
gattgcagtgagctgagattgcaccattgcagtccagcctgggcaacaagagcaaaactctatctcaaaaaaataaataaataaaatgaaaaagcaattctcatgtgttatttcatttgctgtaattcaaaggaacaggtgtttagctgggcatgttggtgcatgcctgtagtcccagctactcaggaggctgaggcaggaggatcacttgagcccaggagttagaggttgtgggaagctatggttgcatcactgcattccagcctgggtaacaaagcaagacgctgtctctaacagaaataaaaataaaaaataaatctaaaaacaagacacaaaggaagaagtgaaaggggaaatgcgtaggacaaaaaaaaattctaaatccattttcatttatctttctaatgcttaacatgttgtatttgcagtcgtgttccttcttcagttctaatgctgtccccctaaaagtcacaatggtgaatgctgaccctatgggagaagaaattaatgtcatgtttaaggtgagtaaataatgttactgttttttaatggcaatttagaaatttttttatcaaattactttcccaaaattgcaaaggtgattttgtttaatattttttttattatttatttatttatttttacacagggtcttgttctgacgctcaggctggagtgcagtggcaccatctcggcttactgcaacctccacatcctgggttcaagtgattctcctgcctcagcctcccaagtagctgagattacaggcacctgccaccatgcccggctaatttttgtattttttagtagagacggggtttcgccatgttggccaggctggtcttgaactcctgacctcaggtgatccacccacctcggcctcccagagtgctgggattacaggtgtgagccatcgcgcccagccaaaaattttacgtgttttgatcatgatttgtacattttgaagacaggatgaagaattttagtttaattcaatgagttggacacgtggaggttcataaag

SEQ ID NO: 64483 - DNA, 1050 bp, Homo sapiens
cagaaaattcctacaggtgaaatagctgagtcaagagcgacatgtatttttagttataatagttgttacattgctctacaaaagaagctacacctgtgtacacctctctccctaccaataagttatgaaatcgtttcctaacacaggatgttgttttaaattttcatctgataggtgaaaaactgcattcatttttgtttggcttctatttctttgactattagtgagctttaacattttcgtatacattggttggccaaatgtacctttgcccactatatttatagcctttggccattctagttttatagtaaaaattaactctctttagtaacaacctttttttcaccgtttgacaactgggcattttataaattgtatccacagcataacttgtctgaaaaatagatcttcattttcattatgtacttacagtatcacatctctttctataggttgttctccaaagaagtatggaacgagtacagtccttttttcagaaaaataaatgccgtctccctctcaagccaagtctagtggcaaaagaattaaatattaaggtgacacataaaatacttataagttcatattacatttgaaaataataggaagaaggcaaatgggcaggtatgcttaaggcaaatgaaggtaaaacctgcacaggttggttataagcatggatggttgtgattaggatccatatttatcttagcatatttttttacctaaccaccattcctgggaaaaaaaaagtataaaattatttactgccttgggcttcatttttttaaattggtctcacctttttatttatttatttatttatttatttatttattttttgagacaaagtctcactcttgcccaagctggagtgcagtggtgcgatcttggctcactgcaacctccacctcccaagttcaagcgattctcctgcctcatcctcctgagtagctgggactacaggcacacgccaccatgcccagctaatttttgtatttttagtagagatggggtttcactttgttgaccaggctggtcttgaactcc

SEQ ID NO: 64484 - DNA, 1075 bp, Homo sapiens
gggcaacatggcgaaaccccttctctacaaaaaaaaaaaaaaaaaacaagaattagctgagcatggtgccacgtgcctatagtcctagctacttgggaggctgcaatggaacaatcatctgagcccagggaggtcaaggctgcacttagccatagttgtgctactacactccagtctgggtgacagcaagaccctgtctcaaaacaaaacaaaacaaaaaaacgtgttttgttttctttggcttgtatttttgatctaatgattaaagtcaggaagcagttctgtaatccaaaccaccaccttgagatatatttctttgtagaaaatcttcaaagactattcttaaacttcctatttctagaagttgttttctgagtccttaccttttttgtgttctgtcctcaacaccattttccccaagataatgtcctttaattctccctctctttgttcccaccctacatttcaatacatttaccctacacctgaaaagtttcagtacaatgtggagagtgaatccttctgatatgttcttaaagatatcctttttatttagttgatctcatactaacttttcaaattcattacatgtgttgtaaattttgaattgatttttaaaatgaaaatcacattattatttttacatccgtgaaggtttttaacatgtggaactaaacttctatatctttggacttcatcacatacaaattctgttcctggaacagttaccaaaaaaggatatgtcatggaaagaatagtgctacaggtaatggtacttcttgacatgtagagaggtgtacatttaaatttcttcataaaatgtgtgtgtgtataccatgatttgggttgttaaagaaacctaactgatcttgttttagtctcaggatctatcttctattttaatatcaatatttctgagaagcagtaaaacatgcactgtacttatcccaagaaatatgtatgtgctgttgagaattaccaacaatggtaatcaattgcaacaagaagcattaatttaatattcaatgtaaatatgccccgattgctaagaaaaatctgttttcttaaagacaaa

SEQ ID NO: 64485 - DNA, 2639 bp, Homo sapiens
taatttagtgacttaaaagtgatgttttaatttattcaataaatatttattgagcaccatctgtgggcagtattcttagtaccggggattcagtagtacaaggcggcaaaaaacctgtactcttctggaacttggatttaaatggatattgatggtatctgaaggtatttcattacagggataataatcttcacattctccataggcacacacacacacacacacgtttgtacatagacacacacaaatatacatagggacactaatgaggtgaacaaatacccagtagaagacaatacagaaaacggtgataaaaatagaaagtaagtgaataaaatgctgacataaataggagtaaatggaataaagttgagaaaaataaccaaatagtttgcttaggggtattgtgtgaaccaacgaaatttgatttgaattaaatttagaatgataaataaattgtatatatgaacagagtggttaacatgtaaggctagcagtaagttagattaagtagaatacaattttattgaatctaagactcctgctttacaagattacctgactgtatccaaccagctgtgtacttggcaattagtggctgagtcactgcaatctaatgagagaattcaatagcatctgtccccataaatggaagactcccaatagactaggaagattggcttgatgcaagtcaggcacatgcttagctgactctatttcagtagcttagcaaaggaaaatgcacctagggaaggtaatgtttgtactctttctacctagaaatgaataaatacattattcagtgttgttcaactaaaatctgaagctaataactaactgagcacaaaattaaagtaaattggccgggcgcggtggctcacgcctgtaatcccagcactttgggaggccgaggcgggtggatcatgaggtcaggagatcaagaccatcctggctaacaaggtgaaaccccgtctctactaaaaatacaaaaaattagccgggcgcggtggcgggcgcctgtagtcccagctactcgggaggctgaggcaggagaatggcgtgaacccgggaagcagagcttgcagtgagccgagattgcgccactgcagtccgcagtccgtcctgggcgacagagcgagactccgtctcaaaaaaaaaaaaaaaaaaaaaaaaattaaagttaattattcagctggtgttattatgaccatgctttaaactgggacctaggaacttacattcccctttttatcccctttaccaaacctcttttctattttcatagaatttgcagtggttaaatttcagatggacttctaaaaactcaaatgaaaggtgaccagattatttcagatattagtctctttggaggaagaactgctaatgtatttgtattagttaactaatttgtattatcatgatagaaatcaagttaaactttcttttctcagttatgaaaaatactacttgatatgttcactgtctcacaatggaaaggatctttttaaacctattcaatcaaagaaggttggcacttacaagaatttcttctatcttattaaatgggatgaactgtaagtgaaatttctggctttttattctttcagtgtgtcctgttgtttactttttccaatgtatgcatcctagctttaatttttattgcaattttcattgaaattcattaacttctgacttatgtcttaagatctctcttctagatatgattttatagaacagactgaaattctcattaaaaaatattaaataccgaccgggcgcagtggctcacacctgtaatcccagcactttgggaggccaaggcgggcggatcatgaggtcaggagatcgagaccatcctggttaacacggtgaaaccccgtctctactaaaaatacaaaaaattagccgggcgtggtggcgggcgcctgtggtcccagctactcgggaggctgaggcaggagaatgtcatgaatccgggaggcagagctttcagtgagctgagattgagccaccgcactccagcctaggcaacagagcaagactccatctcaaaaaaaaaaaaaaaaaaaatgaaatacccttttaagcctttatattatgaaattacaaaaacataccattctttttagactttgtcaagttaaagatataaatttatagttatagaaaggaatgaaagttatagaaagacggtattttatagcattgcttgcttcagtatttattctgtaacactatataacaattctggctcttagattaatcaacacttaacgaaaaaagttatctttttacttttttgaggcggagttttgcccttgttgcccaggctagagtgcagtggcatgatctcagctcactgcaagctccacctctcgagttcaagcaattctcctgtctcagcctcctgagtaactgggattacaggcatgcgccaccacgcctggctaattttttgtatgtttagtagagttggggtttcaccatgttggccaggctggtcttgaactcctgacctcaggtgatccgcccacctcggcctcccaaagtgctgggattacaggcgtgagccaccgcgtctagccgaaaaaaacattatcttaaatccatgtacaagatgatattttgtactattcata

SEQ ID NO: 64486 - DNA, 1127 bp, Homo sapiens
tctgaggcttctatttattttacccatttgatggataaaggagcagacaatagatgggagaggagtcagtttagataattataagcacttttttgagtcaccaaccaagtggtaataaatacagttctagatttttttctttaaggatattcttatgttgttttagagcaactaatggaaaaatactgtacttgtcacttctagatttcaaattagtattaaccaagcagattttgttgtgtttctgtgatatttcacagtagtttttagttattctgattttcttaatactaaaaataatcttggtttgtggttttccctttctttttgcattatttatttatcgttttattaattctgtagatacttgggaggtttcccctggaaagagtttcttggacatagtatttgacattttatattatgtcataggcagttttctgactattgtgtgtgtgtgtgcatgtgtaggtgacttctttgtttggaggagaagacactagcaggagttcaactaggggtatgtgtttaaatctttaaattttagcaataatcatcgccttttcagagaatctattaactttttttttctttaatctaggctcacttaatcctgaaaatcctgttcaagtaagcataaaccaattaactgcagcaatttatgatcttctcagactccatgcaaattctggtaggagtcctacagactgtgcccaaagtagcaagagtgtcaaggaagcatggactacaacagagcagctccagtttactatttttgctgctcatggaatttcaagtaattgggtatcaaagtaagtaactgtttaagcagccaggcatggtggcttgcacctgtaatcccaaggctttgtgaggccacagtgggaggattgcttgaccccaggagttggagaccagccttggcaatgagacctcatctctactaaaaagaattttaaaaaaattagccagtcaggcacggtggctcatgcctgtaatcccagcactttgggaggctgaagcgggtggatcacctgaggtcaggagttcgagaccagcctgacaaacatggagagaacctgtctctactaaaaatacaaaattagctgggtgtggtggcacatgcc

SEQ ID NO: 64487 - DNA, 1018 bp, Homo sapiens
accttctgctttccttatttccattagctgctctgtctcactcttacttgtggcttcttccttatcttcctgactaccaaacattagcatatccccagggctcagttctaggacctcttctctctgtattcacatcctaggtgatcttggtatatccctatactgattgactctgaaatttatatgtctaaccttaaccttttccacatctccagactcaaatatctattacttgacatctttatgtgaatatctaattaattgacatctcaaatttaagatgtacaaaactgaattttttatagtacccatcatatctattcatccatcgacctttcctttctctttttaagagtttattttttgagagcaatgttaggttcagagcaaactgagaggaaggtacagagatacctcatatacccccttccctacacatgcataacttgacctcattatttccctttttaataaatggcaactttgtcttccatttgctcagaccaaaaccctggagtcatccttgatgtctcaagaaaaagatcttatacatttcacattcagtctaattctggtcagctccaccttgaaaatacatttagaatgtgagcactttcatcattaccaaagctatactctagtcaactgcagtagtttcttactaatttcccagtgtctacccctgccctctacagtatgtcttccacaggcaaccaaaatgatcttttgaaaataagtcactaaatgtaatgtgatatcctggattatattctggaagataaaaagctcattagtggaaaagttggtgaaatctgaataaagtttgaaatttacttaatagcaatataccagtgttaatgtctagcttagacaaatgtaacgtggtttatgtaagatttacttagtctagttttccaacattatatgggaactttgtatttttttataactgtctataaatttaaaattattaaaaggtaaagattttaaaaatgaaaataggaaaattagccgggta

SEQ ID NO: 64488 - DNA, 1045 bp, Homo sapiens
aaaaaccattgtctatattttgttcattatctagcagccaaaaacaatgtttgtacgaaaaaggtccttagaagaaaaatattttttaagacaaccaacttgttatccttttggccattatagttttaggactacattgcctatagaataatttaaaaggtaccattttgtgtaattgtactgtgtggcaaaagatttttaagcagaggacctcatttaaaatgccatttatccaagcatgtgcttgggtagtgttgataatgttaccaaagatatcctggcagtagttcatctcttccttttccttgggtttcttttatttaaaaggaaaatgctggtatttggagtttcaacaggagctcattcattgcagtttcatgagctgcttgagttggacaaagacacagaactgagtggctgtaaacatgtaaagccttgttcagagccctcaaatgaagtttttttaaaaaagaatttaatttcttctttcttgtgaacagattgaagaccaaatttccatataccaatcaccgcacaaacccaggctatttgttaagtccagtcacagcacaaagaaacatatgcggagaaaatgctagtgtgaaggtctccattgacattgaaggatttcagctaccagttacttttacgtgtgatggtaggtttatggttcctcaagcctctcgttttgctctgttagggggaaatgtttaaaatatcaatattatcattcttttaataaaccaattttgttatgtgtctttttggcattcatatggatagttttctcgttagaactagtggggaatcaggttacctttataaatagataattatctgaaaagtgctaagtaacttttgttaatcagtggctcttggccaaggctgaaaagcattagatagaaaagctaattataatttaattctttatttttctccttcattttatgacaggaagcatgcttgcttataaagagctgtcagtgaaattgaaattccagatatcttgctaagttcttctgtggagaagataattctcttttat

SEQ ID NO: 64489 - DNA, 1068 bp, Homo sapiens
ttacgagtgctagaaacccatcttgaacttaaaaagggtcatgtattggttcacaacccaaatagcagatagaggaaggatgggatagagttcattaacagcaagattcaggaattcattactataaatcatccccccttccttcaattctccttgtccactccatttcctttccttcaccttcctcacttttcttcctctgcctttcctccatgcaatttaatggtctcagtagcagagaagaaaaaggagtccccttagctagccagataggaaacacccataggaggaaagagtggaacaacagtccttgtggccaagaggatgagagatctgttatctaaaaaagggaagtagatcaccactgggagatttttttctgaatccagcattgtcttcagtgtggtctgctttaagcatagcaggatttggggttcccagaacatttttgagtatgtacattattttaatgttaaagaacttaatatttaatgagattttctggaccattggtgatattttattaaaactctgtcttcctttatgttaccttttaaccagcatttcttttcttcagaataccttaggaaaaaaatattatcagtagagtcactttttcttggcaaaggttactctccccagacaggccttgtattttcctgttaggccatgttaagtaactactacatttaagctttgcaagttgagaagttaggctctctgagacctaccttttttctcccatttgaatcttagagctatttatacaaactctgccactaattgaaaatgattgtttttgtttacacacacacacacacgcacacacttaaatgtgatacgaaactgcaaatggactaaagagagaatgagttctctttgtaattttattttcattagtagactatgactgcaacaaatactagagcagtaagaagtactggtgtttttgaaggcatgttctaggaacttcccctgtggtgaccatggagattgagatgaggagatgtactttgaaattagtggctctgttttttccattgtgctcattttgcagtggatttttaa

SEQ ID NO: 64490 - DNA, 1088 bp, Homo sapiens
ccactggttaatggcagccattttgactgctaaaatgaaagcgtctaaagttcatttactgtgccagctttccagttgtgtcaggaaatggggttaaagtaatgtgtatctgaacatcttctgtaacccaacagtgtataaggtgttaagtgttccttcacccagattttatctgttttattttgtttattttgtagtatatttttctaagtggcttaaagtccaaagtcatatggggtaggttgcaaacaaaatatatttatgtttagaaatctaattgagtgttatgtttatttttatgtataggccttgctattttggaagctacaagaaaaaaatagaggaaggaaggtttggtctttttagtggacatggctcagatatctagcaacagcggatttaaagaatgtccatcttcacatccggaaccaacaagagcaaaagatgtggacaaagaagaagcattacagatggaagcagaggctttagcaaaactgcaaaaggatagacaagtgactgacaatcagagaggctttgagttgtcaagcagcaccagaaaaaaagcacaggtttataacaagcaggattatgatctcatggtgtttcctgaatcagattcccaaaaaagagcattagatattgatgtagaaaagctcacccaagctgaacttgagaaactattgctggatgacagtttcgagactaaaaaaacacctgtattaccagttactcctattctgagcccttccttttcagcacagctctattttagacctactattcagagaggacagtggccacctggattacctgggccttccacttatgctttaccttctatttatccttctacttacagtaaacaggctgcattccaaaatggcttcaatccaagaatgcccacttttccatctacagaacctatatatttaagtcttccgggacaatctccatatttctcatatcctttgacacctgccacaccctttcatccacaaggaagcttacctatctatcgtccagtagtcagtactgacatggcaaaactatttgacaaaatagctagtacatcagaatttttaaaaaat

SEQ ID NO: 64491 - DNA, 1051 bp, Homo sapiens
tgtaattttaccagaggctctgatgcctttggggtcagtgcctcccattctgtcttgagatgactacataatttagaatttcacaccatcctactttagagagtaaattatcagcctgtcctggtttggatgagtctactgtttcagcctggttcagcccagtgtctcctctttaggtccgtatctctcttatgaaagaagagggtgataaaggaaaggagaaggccattcttactgacctgatagtggaagaaaagtaggttagttctccttcttcctattgcctgtccttatcactcatctctttcttctatatggatatttgtatattttctcattcatgaaaatctgtaaacctagtaaatttgctgttattcctttaatgcagacacatttgacatcttggcatttaaagagacttttgtgtcattatttttctgcctaatgtgctggaatacttaccattttttttttaaatacagttgatgtttatggaggccttattaagaattagagtcagtgtttaaattaattgtcctagttatgtctagaataagcactaacagattagaaactagtagaaaacattctccatcaatcaaaaataaatttaaaaggcaagaaaggagaggaaataaatgttaaagaggtaggataaatagaaagccctaccagcctgagcaacataatgaaaccacaactctaccaaaaaaaaatatatatatatatcaccacgcatggtggcttgcttgtggtcccagctacttgagaagctgaggcaagaggatctcttgagcccaggaaatcaaatttgcagtgagctgtgagctcaccactgcacttcagcctgggtggcagaatgagaacctgtctcaaaaaacaaaaaagccctatagaaggtggtagatttaaaaatcaagatatggtattaaggccgggcgtggtggctcacacctgtaatctcggcactttgggaggctgaggtgggcagattggttgaggttaggaatttgagaccagcctggccaacatgacaaaaccctgtctctac

SEQ ID NO: 64492 - DNA, 1125 bp, Homo sapiens
aatgatgactaaaattgctgggcatggtggctcatgcctgtaatcccagcactttgggaggccaaggagggtggatcacccaaggtcagcagttcaagaccagcctggccaacatggtgaaaccctgtctgtacttaaaatacaaatattagccgggagtggtggtgagcgcctgtaatcccagctactcgagaggcctcaggaggctgaggtgggataatcgcttgaaccaagaggtggaggtggcagtgagccgaaatcgtgccactgcactccagcctgggtgacgggtgaaactccgtctcaaaaaaaaagaagaaaaaacttgactaaaatgaaatggtagaatttaaaaagaggagtccagtatgtttttgccctcccgtaccacttctgttcaagagtatgctatattcaagaatggctttatttacatttttcaagtgaatgtttttatttaacttaaatgcattattgcatttcaggcaacaagtgatctggaacactatgacaagactcgtcatgaagaatttaaaaaatatgaaatgatgaaggaacatgaaaggagagaatatttaaaaacattgaatgaagaaaagagaaaagaagaagagtctaaatttgaagaaatgaagaaaaagcatgaaaatcaccctaaagttaatcacccagtaaggattgtgactttatgaaaccatttttagataaagatacttcttcgtatcagcggatttttattgtgttattagtacttaaatcttgattcttctgccaagttcctcaaatttatattttgagtctgtacagatagattatattttgttttgagcaattttttaaaattggttcacagggaagcaaagatcaactaaaagaggtatgggaagagactgatggattggatcctaatgactttgaccccaagacatttttcaaattacatggtaacgatttgatacaaatattaatatttatatctgctgcttgaaaaagtatttgctttcctcttaattgatttctgccaaggtctgctattgagttctagtgagagtaaatggttagagtttttctagggtaatatgatagtctttattgctcacctgcagtataaaatgttttagatta

SEQ ID NO: 64493 - DNA, 1029 bp, Homo sapiens
atgagatttgattctcaggactccacttgggaaggccaaggacacgttctctctcaagctgcctcaggtcccaaggcccaagggatatccaccagcagggacaggccaggtgggctcccactgaatgttctagagaggaaaattccagctctgtagacaagcccaggacctctgtgaggcagagcatgaaaagagacaaagctgggacaagtcttcatgtatcaacgctagaaagggccttaggtgcgggccaccctaagcccttcttttattaaggagcccctgtgtgccaaacactatgctgagtactgtacaggccaatcccactcattctgcactgcaaccctcggtgctgagaatggtcatttccattgcacagacaaggaaactgaggcacagagacgttctataacctctctgtgtaaggtgccacaaagcccagacttgaacctatttgttcatgcaacaaacatttactaagccccgactatgtgctaagccccatgccaggcactaaaaagatgagtcaaataagccgctgccctgcaggcgtttacagcccagactttgagcaggccaggataaatccacgtgacaagtattctgaaaaaagcggattcaagggctgtgggagcatagaagagagacagtccgggaaggtttttgtaccagaggtgtcatcagaactaggactcaaaggaggggcaggagttcaccaggctgaggaattcctgaaaacttcagtgcccctgccatcgtctcactaccctgagtggtgatgttggggtggacaggagcatctgaggttgcctggggaatgagggaagctgttgtttcccactccccaagagtctgtctgatctccagaggcatctctcttccagtcaggcaggccagagacccctgacacacaaagttgggctcttttctcatcttcatccagagagtgataataggttatttttagggtggcacagctgcacgaagtatgacagtaaccatgagacaccaagcactgtgtccaggagt

SEQ ID NO: 64494 - DNA, 1528 bp, Homo sapiens
cctgccccagttccgggcccctccatcgatcacccacacccagccatctcactccccaggtgcttacctgcactccagcctctccatatggtgcacctggagaggggccaggtgtgcctgagcattggggcaatccagctcccataggggagagggcaggaatggagggaagggagagagccccgctgccttttctctagctggtgggagggctagctagctctctctgtgagtctccattcgcctggctcctgcactattttccctccaatgataatagttagggctagcatcgactgcgctcttactacataccaggcacagtgccgagctctttgtacacggaatttcctctcatgcttacaacaacctcagtaggtagatattattgttattcccactctacagatgaagaaccaagtttcagaaaggtcccaaggccacccagccagtaagtgaccaagatgggtctcaaatccaaagctgcctaacacctaagtacatgtttgtcaccaacatactctgatgcctccatgaactctggctggcacctgcccaggctaagggctggctggggaagtatgagaggaacaggctgggcaaatatttgaccagccatcatcattactgcctaaaccaaccagcagtggttttccctgcagtgccccaagcacgggttccggctgcagcttttcccactgcacagagatcatgagcgccctttcatcacttactctgcatatttgttcccaaccaattccatccttctagtatttaacctgcccaaacgctgtgtgaagtgctgacctcagctcttttcaagctcacacggtgtttgcttgcacccaagcgggaggcctattaaagccattgctcaccctgggcatagctacccagagactaatgaccctctgcaagtgctcgggccaactctgaccaggctgaccagctgcatcccctgcctctacccacgccaggtacaagatggtcattgaagcctgctctctgcagccagacatcgacatcctgccccatggagaccagacccagattggggaacgggttagtagcagcctctgaggggttttttcaaagccaggacccccaacctaccatgccctgagacactactcaggacaatgggtaactaggaaataggagacattgaaggctgaagagttgcctgcagtaaggtcaaacatgttgttcttgatgatgtcctttgacaggttttcagtcctgcttggagggcaaggtcagcttagtgccctcccaggctggggatcttcttcatttgcaccccaggtatacactgagagcccacacagcactgtgctcagcctggggttgtattgttcctgttcatcctccagatggggtcccctccacaagcttagacgaacaggattctcctgtgactgtcctccttttgtgtgattttaatccctgctgcctctgtctttgtttgtactggtcagatggtccctagcgcctacacaatgaatctttaaagacttggggctcatgc

SEQ ID NO: 64495 - DNA, 1035 bp, Homo sapiens
ccctgattcaggttgccacacatatgccagctcctagtgggctggagggaaggacatgcggttggggaactggaagactcatgctttcagctgtgtgcttcctccctagagtgcaggcagaggaggaatcgaatcccctcagcactcttgtaaagaccacagcaatgagtgagagatggtgcctgccagacataccattctttacttttcagcttaaaacagatacaaagtttggggaggctcactggaggaggcttggggctacactggaaagagaagaacttggattcacaccccagcttcccctcttcccagctctgtcacatttgcaaactctgagtctcagtatcctcatgtgtaaaatggggatagggtttatagggttgtaaggatgagatgatgagttgtttgcaaacaacttctcacagtgcacagtgaaggtcagcaatgagagccagccccgccctttcttctttccaaatgattaatatatctgttaccagcctccattcattatatagctctgtcatgtgctaagcaccatgggggctgaaaaagatgttcttcctgccttaaaattccactggggatgaacaaattacacgggagctgatcagagaggaaggcagtccattatgagggctaattgagcagtgcagaccatgttgcaaactgagttagggcctggagagcttactgtgtgctggggtcctcaggaatgccacagatgcatcaataaccacctctgctactctggaagtagtcacatcaggaagactccagagataagcttatctgggctgtggccacagagctggaatttgtaagctttaggtttctatgtctcatgttaccagcttgtctataaattgtaaattacagccatctgatggttagggaatatgaagtttggttaagagaatgaaatgagaccacgaagattagagaacaggaaaagaggggactggggactacatacccatcagaatcttcattcagtcctgaccctcagcaggagggggatttcatcaggct

SEQ ID NO: 64496 - DNA, 1048 bp, Homo sapiens
tgggctccagcgtcaggccagcccagctctgccagttaatgggtgtgtggccttggatctgttacctaacctttctgagcctcatttcctttgtctgagaaattgggggtgacggcagtgtactttctttgaaaagttatggtgaggaatagataagatcatgtgtttaaagtgcttacttggcacagtgcctgtaacttagttaaattcaataaataaatttcccattcttcccatgatcatttatttttaagggacatttgtctgaccagtttgatttatgagattattggtgtttttcatgaatgttaagacgtacgtgcgtcatcttagagtcatgtactctgatatattcacacgtgcacatccacttactcggaaatgtacacacccaggcacgcttattctgtctccttctctgccacatacttgcacacattatgtgagtgtacacacatgatgcacacacgtctctgcgatcttccatctctcctcggcagccctgctggtgtattggaccctggccttcatcaccaagaccatcaagtttgtcaagttcttggaccacgccatcggcttctcgcagctacgcttctgcctcacagggctgctggtgatcctctatgggatgctgctcctcgtggaggtcaatgtcatcagggtgagggtaagcaggccacctgggccagggtggggtgggaagcagaggctctggcctctgtcctgccctgggttcaggcccccaccctgcttctcagccaaactgagaagggatcagcttgttttacccgcccgtgtaaaggggagtggggccgtggcggaaatttcaggatagacactgcatctggcccacgtgtgctctaccccagggtcccagagggagaggggggtgatgggtgtgttcgctgaggttggcggatgactttccgtagaaagggaagataagcatcaggcactggcctctcctactttctttcttcgggggtgggggactttgctttaatgtattcatatcgtcacgctggtaaatgaatgagtaagtgttttg

SEQ ID NO: 64497 - DNA, 1025 bp, Homo sapiens
acagagtaaatgctccataaatactgactctcatcagtttgttatcacagcctctggggagggcgccagtgctgacttatgctgttcgtgttaaatggggctgtcactgggtgagttgtggcatacaggcccctgcactgttcaagagaccccagcaacccttgtgcttagggctcagcacatagtaaggcctccagatcatatacccagctctactccatgtactggcagctctgcccagcccataccccaaatacgcccattaactaaagggccctgcagcctataaagtgatgctataaaggttcagtgttcagcctttgaaattcaaggcctgggctgctctattgcagtacttagcatgtccccatcctgtctgtttctctctcccatctcagggtgaccgaatcccaccatctgcacctgtacatgccagccgggatggcgttcatggctgctgtcacctccgtggtctactatcacaacatcgagacttccaacttccccaagctgctaattggtaggtgaggtgtaggagggaggggcagtaccttcattcatttcttcagataatgtttactgaggactcattatgtgccagctattgctctaaacagtagagatttggaatagaaaaagaaaaaaatccctgccttcatggagcttacagtctggtgaaggaggatagacaggcaaagacagtgaataaacaagcaaacaaataggtggtggggatgctatgaagaaaatcaagctgagtaaggggtaggggcaatgacaatgttgctatctacacaggatggtcagggaagggctgtggtaactgtgggcatgcagatatttgggggaaggtattccctgcaaggggagtgacaagtgcaaagtcctctgatagggatagatttggcaaagatgtcactgtgggcaaagccaaatgagcaaggggaagagtgggaggtgagggcaggcgtcaggagaggagcgagcaagagtcccaggctctgggcctgagagcctgggtgaac

SEQ ID NO: 64498 - DNA, 1107 bp, Homo sapiens
atcagtgctgcagcaggaagtgtgagtgaccacacgcccacacagtcagcccagccaccagcaggccccaagtcatggaaacaaacacctgtgttggcttgacacttgtgcctgccacaccagcaccggccataggggggttttcagggccagatctatccacaggcactgtcccatgttctcaccatactatttagtcattcatttattcattcaacacatgcttattgagcacctactatatgccaaggcactatgcagggcactgggaatccctgctggatagacagctgcagtctcccttctcaagacagtctggtggggaacaaagaaaagtaggcacccgccacaccatcagcgtggagacggaggaagcacaggtgctataataaggaagagggctggagtagaggaaaagctcaagggaggcttccagaaggcagtgacgcccaacttaagacctaggaggcaaagcggaagaaggaagagcacgtgcaaaggcctcaaggcaagaaagcctggcattttttgaggctaaagctaggcagtgtgaggagcgtggcgaggagtgagagataaggctgaaaaggaagctagagaagctcatgaaaggccttgggagtcaagccaatgagctcagtagtcaatgcggacactggggagggtttgggggcagggctgtgaactgatttgatacatcttgcccaaaaagatcaagtgggttagagccaagcagacaggttgcgtcagctcccctggatgcctctcttactggtcttcaccccatggcccctagagactatgtgcctaccaactaggaacagcagatgcttcacactgtggtccagggactggaactgtggccaaagagacagcccttaaagacaagggacactggatagcacccatggccactgagagaagggtctgaaagtgtgtctcctgggtgacactggctgctggcacccccaagccaggctctagctcaagcgtccaatttcttagagccgctcagtagtttctgtgatctcagcccacactgtggccaatgggcttctcatctctctgctgaggatcacaaccccaggacctcgagcagttgaatga

SEQ ID NO: 64499 - DNA, 1304 bp, Homo sapiens
cccagaggtgaccatttccagagcacattagcagtacacagaggtgtgtgtctttaggagaggagctaggaagagtccctcagaggtccataatggcccaccaagtccctccagctgtggatgaatgttgtgtgtccattgctagggagctcaattccttattcctggccttggatactaagatgattcagaaaattcaagagcagatccccagaaggcttgttgggggcgggggtgagctcagtgaacagggggtttcctccttgccccagaaattgcccagggtgtgggctgtctctgctgcccctctcctgaatgctcgctctgtcctccacgctgtgtgtgataggggctgaccctccctcctgccgtgtttcccttgcccccagctcatcagggcaccatagaaaaactaggacctcgaagactcaggtccaaatcctggtactatcagttacaagatgtctgacattgaacaagggactttacctctctgagcctcagctccttcatcaaagaatgaggataaacctacataggagatcattggtataaatcccttggcacataggcagttcataaatgatcattctcttcctgccttagcccctggcttccctgcaaccccatgagagaagcagccaggaatgcaggctcggtgggtctaattcctacaggaaaaataaggagtctatttgcctttcatgtccctccccaaatcctctagaaccctgatggtgagtgtaaagcagttaagccattctctccatgccctgcctcccagtcctgcagtttccagctagccctcggtagaggggcacaattcagaggaaactgtgggtctagactctccagggtgaaatggtccagagcttaagcatgcgggtaaaatctgatgtccctgggtctgagcccccaggtctcagtgtgactcctatcacttctagcttaggacgggacctctacagatgaagcttgccagccctcccagattttctctggaatctcccaggatgcatctctgaatctgaacatgagatgatgcagaaggcatgtgccagatactggaaaatcagcacaatgccctttatttatatggcacttatttatttttttattttattttttatttatacagaacttttacaaagttctttcatggatgttatttcattggcactgggtggcaagcctgtgggggaggtatttttaccattttggagatgaggcaaatcaggcccagagaggttaaggaacttagccaaggccacacagctagttagtgaactaataagccagtcttt

SEQ ID NO: 64500 - DNA, 1019 bp, Homo sapiens
ttgctccctggcctggctgctctgctttaccctgcccgcctcctcctgaccgcagtgcagacacccagcttcaggggcccagcatgtgtgggggccaatagagtctgtaaagctcctccaagccccagcttggcccaagcactgtacacaaagcctagacgacaggactcaatgcccaggctggtagatcagctgttgcacactggtaccactgaaccgctggctcgaatatttagatattgccaaattccccctctgctgctctggcccctcccccaggaccccctagaccactctcaaatccagcaactgaggaggtagtgtctggtccagcaggaggctttcagcatcctgttccagcactcaggctggtccggggtgggtaattcagccatcgctcttggccccagggagcttcagattgggggtattactctgtggagctgcggcctggggaaggaagggggctggtgcactggctatctggcctggatgaggatctgttttctgggggcacatctcctgcccgctcctgctggagctgtccttccaagagctgtcccagccactgccttctctttgaatgttgaaagcggaggacttgacctgcactatgagacaagccagttttgttctgtcgaacaacagttctaggcagacacccaggctcccttttgtctcgagccattttttgtatggagggaccagacatgggttagaaaaggccttgttctctttcaacaaggctttgtatgtgaagactgtgatttggaaaagctcatccttccacaaggggttttctctttgatgttctggccctgacttctgaaaccagtgttctggggagaggcatttgagagtgacccagggcctgggaaccggggcttttctcggtggtcttaggcctgttctgcaaccaaggcaaggccaggtaagccgagttggacagagggtgcagttttgctgtcggatctgccaatgctgtttatctcacaaagtcatgcattccttgggaaccc

SEQ ID NO: 64501 - DNA, 1049 bp, Homo sapiens
cttgaggacagaaactttgtcttatcactgaatccataaagtctgatacagtatgccttgcacatagttggtgctcagttaagtgtttaaatgaatgattgtgtggatgttttcctgtggagggaggtataaaaggggcccagtgtgtgaccatttgagagatagagaacctgaggcccagagaatattacctcatttcctgcctgcctgtcagtggagtgcaggatgtgaacatgaaatgaattataaaaacacccacaaagggatgaaattaaagttctgggttgtgatgaggtgggggaggccagtgtttctcaggctggactctgggccatctgggttccatctctgctctgtgtctttagataacctgagagttgactaccatttttattagtgttatcgcattctgctactaaccttctccaacctgagcctctgcctgcccattcccagacgagggtatttggttggatgatccctgatatctttggggctctgtctgtcattctgaggaaactgtctctcaagctgggctggggtctctgtccctagagggctctgttgtatccagcaggagggtcagaccaacactgccccattgacctttctatctctccagaaccaagatggagcctgtgtccagtcagtgtcagtgattctgcaccaggaccctcggaggcaggtgaccctgacccaggcaggggatgtccttctgtttgaccagtacaagatcatcccgccatacacagatggtacggtttggggtggacaacagacctagttgggaactgagggtttggacctctcttcccaggatcctctggctaaaagcactgctaccctggcaaaaactcatattctagtactgggtagatcaggataggggacactttggttgcaaaaatgtggactccaaaaatgtgtctttgtcccacctcaacaggacagtggacttcctagtagcatgatggcttctcctaacatgaacatatacatgggtgtttcccatcctgactctcataacttgtttattaactacttgttat

SEQ ID NO: 64502 - DNA, 1020 bp, Homo sapiens
cctccctccgctcaacacctacacctgggtttggtgactcttggagacttgtgatgcctaggaaacatgctcatcccccttcctcccttcactgccccttgtatgacggtttcctactgagagagccaaagggcgagccaaggagttttcaggaattgcccatggagaaagggggaggaaaagtcttacccccatggtgtttgatactcttcatgatgtccctgtttctttttctgacctgaagagctgggggtggggaatgaagccatattcattccccgccccaagtggacaatcctagcccattttgagcccttttgggacctgttaaatgttgtgtgtctgcgtgtgtgtgtgtgtgtgcgtgcgcgcacgcatgcatgtgtacatccatgattctatgtgtttgaatgtggctgtgtggaccactttggctatatgcatgtctggcatatatttgtgctctgtgtgtgtgttgagagtgtgtgcgtatacatgttacatatttgggtgagtacacgtgctcctctgagtgtgtgtatatggatgtgtagattatgactatgtgtgtgtatatgagcaagtaggtgttacctggatctatgctatttgtgccccctgagtccacaggggcaagtgtgtgaatatggctgtgacatggctgcaggtctccagtgggtgtacctgagagcaccccacaactttttggcaattcctggaaaacactttctgcttgctccccgctggtctctggctcccctctggacccctgcgatgtgcacctgcaagccggtgagttggtgggggaagaggagaggcatggttgagtggggtggggaggactgctttgagagagatgaaaagggaactccgggcaggagagtgctggccaaatttgtaggagtgataagagaaggaggagcagcagggaggggaaaggagagacagtgagggccaggcaggcaggaagcctcatattcttccactatcagatatacacacacacctttatactggctt

SEQ ID NO: 64503 - DNA, 1030 bp, Homo sapiens
aacatcaataataaaaataacatgtaataataacaatgacaaaaccttttatggaaggaatcctacctatagggcaggcactgtactggggtctttcacataattgcagtaactctacaagatgaagataattgacctcattttatttaaaaagttttaaaggttaatgcagtgtatattaaaaacagatattccccttcccaattcttctgttcctatctcctgttaaataaccactccagtcagggatgaatcctgcaagaacttttttctgtgagacatggacacacacacacacacactttgtttagtttatgtgaataagattctacaatgtgctttttttacttaagaggatacctcggacttgatttcatatagttggtacacacttttttcttttgaacagctgtgtagaattctacagaaataatgccctcgagtttgctttattttttccccatcgatggacatttaggttgtctccaatatttaaatgcagcagtgaatacctgtgtggatgtatccccaggttcttagaagtagaattgctgtataaaaagctacatacatttaaaatattcaatgccagcaaattcccctgcaaaaagcttacactagcatcaaggatgtatgtgagacagtgcctcttccccataccctatcaacacaatcatccctattatatatttattaatacattcattcatcagatattttggggagtcactacatgttaaacaccgcactaggcatccaaaaccagaacagcttcagagaacagaagtcgcccaaagtcacacagctcagctaacacaaagtagaagtggactgaaagccactccagagagcgtgttcctccacctctgtacctcttggcaggatctcctttctcccttgttttattggactcacttattctctcctcagagcacatcagatgtcagcttctctgtgattgtagagaatgtgaactgctacagctctggcatgatctgcaggaaatttatttccatcaacgttgggaact

SEQ ID NO: 64504 - DNA, 1102 bp, Homo sapiens
ctaactaacccccaggagtttggcagcagttgggctgcagttgaggtaaagcctctcttccaggctggcttatgcccctcactcagatgggcgctgccagcactgaacccggcccaaggtcagggaagagggatgctggtgtgaggtttctcctgcaatgttctctcagcctctgactgcatccctagccctagactctgtcctatggcccaaagatcatgcatagtcttgtctcacaaatccagctgcccaccctaccctggaccaagccctggtagggtggtggagggttgggaaggtgacaaagtctgtcccaggagagatggtcactcatgatgatgcttcccagtgcctggcactaggtctggcacagagaagagaccaagagagactgaggtgggttgaggcaatcagggaaggcttcctgaaggagatgagagtggtgctggcacttaaaggctgggccatgcttaaatagatgaatatatcagagataaggtctctgagaggaagggcaacactagcagagatagaaatgagggggtctgcccaaaggacagtctgcgagatgtctaactgaggctgccaatctgtgagctgtgggggaaacagcactgagttgagagcagtagacctgggttcttgtcttgggtcatccattgactttctgggtgaccttgagtaagtcccattcctctgcagagaggggactgggccaagagagggctgatgaatagatttcacttcatgtgacaactctgattggtcaaaacagactgcttgggagctatgttgagaaacatccaagatctgtgtcaagctcagctggaaggaggactgtgatcgattatttatgtctgccataggagcagcagtggagagtggtgatatgagcgttacatatttgcctctcctggacttagtgatcttaatgccctgctgggaagtacacggagatgagcctatgtagactggggtaagggaagcagtcgtgcatggcctggagttcaactgctccaggtggggcagggctgttcccacagcctctgaaatcctgaggtgggacaagggttcccacagcctctgaaaagtgcgccctaac

SEQ ID NO: 64505 - DNA, 1130 bp, Homo sapiens
atggtattattgacctcaaagaactgtgaggaatacaaaaagtgagagctgacgacatgggagtggtagtgatgatcgtggctgttgggattgtttggcccctttcaggtatctgtgatggagatgcagccaatgaccttaccctgaaggatggctcagtggtgggtggggctgaggaccctgctccctttctggacagctggcaggtgcccagctccctgacctcagtgggccagacccgcttccgcccagacagctgcgccacaactgactgctcgccctgccttcgcatggtgtccaaccgcaccttcagtgcctgccaccgctttgtatgtgccaactgggtccagcactggggacacctcctgggctggctggggatggcagcacctacctgcagaggctcattgttccttttgggcagggaggggaggagctgggcactgggatatgtgccatccgagtaaccagcactgcctgatgcatatgtccaggtgcctccggagtcattctgtgagctgtggatccgggacaccaagtacgtgcagcagccctgcgtggccctgactgtgtacgtggccatgtgccacaaatttcatgtgtgcatcgagtggcggcgctctgactactgccgtgagtttgcggggcagggggaccctccattgtgactattgttcccatcccctgttaaagtgggaaaaggctcccggccccaagttcatgtatgctttcccagctttaatcattcatggatttatgtacattagtaaatttataaatatttcatatgtttaatttatatttaatttttatattatataaaagtacattttatactaatgaacacatttattatgattcatatgaacatattaacacatagtaattgtattgttattttagtatttgctttctttgcgtctcttctctgtaagtggagactgtaaccatcgcccccgcccagggtggttttgaggatgtgggggaatgtgttccgagtgctcacatagacctgccccacggacaccgtccagcacaccttaattccctctgcttcctttttgctcacgtttctcttcttccagagtttcccttccttcctgcaggaaggaaatgagatctgcctcctc

SEQ ID NO: 64506 - DNA, 1025 bp, Homo sapiens
tcaatttcggcatgtatataagctcctagggctggcatttggatacgcctcctttccatggttttgaatttccgcttgtattttatttactgtattataggaataccctttcaaaggagatgagcttagagtaagtaaatcaataaaaactataagcccctagaggtcaaggaccattttcatttactttagtgtccccagcacataactcagtatctggcgtatagtagatgctcagtaaatgtttgtcagttgaatggatgaaagtgattaatgaatcagcattcaaaatgacttaagaatgccatctctggtaccttcctttggactttcagataacaaggccatcaaggtggaagctttagaaggtgttccttggattttggaggtctatcattaagaaagtgtgtgcacattgctagacatcggaaataatattggcttagacaagacagaagcattttctctcactgttatggactgaattgtttctccccaaaattcgtagattaaatccctaacccccaatgtgactgtatttggagataaggtatttaaggaggtaatgaaggttaagtgaggtcttaaggatggagccctaatctaatatgacatatcattatgagatgcagaagagacactaggaattgctctccctttacatgcagaggaaaggccatgtgaggacacagcaagaaggcagccatctgcaggccagggagagacttgctagaaaccaactctgatggcaccttgattgtagacgtctagcttctagaactgtgagaaaattaatttctgttgtttcagctacccagtctgtggtattttttgttatggcagcccaagcagactaatacattcacgcatgacaggtctgatgatatccccccacaagattgctataatagttctacagatatcaagggccctaattatttctatctctctgtttcactatccttaacataggcctttgtcttcaagattttctcaaggtccaagatggctgctagcaatattca

SEQ ID NO: 64507 - DNA, 1100 bp, Homo sapiens
ggtaaagtcctgacatatatgatatgcttcataagtagtaagtaccattgtcctgtaaaccagagctttcaaactttttccttcagaacacttaaattctttcacatattctctatcatatatgatgtttagattcctcacagccctggttactttatttgttattattattactattgttacttttattgtaaaatatatatgacataaatttattattttaaccattttaagcatgcagtctagtggcattaaatacattcacattgttgtgaaaccattattaccatccatctccagaacatttttattctcccatactgaaatgttgtacctattaaacagtaactcccactccccatccgtgcagcctgggcactctattttgaatagcatgctccaaattcctcagtgtctttcttcccattgcaaatggaggttaaaaagagcctcttggaagggtttgagttcttcaaactcccactggggagcccgagaattaaaagtctataccagttgcggcaaacttttgggattgcagatggttacaaaattagtgtcaatatagctgctttgcatggagtggatctggcaaagaggcttctaagcactgatacattcctttcagaaatatcaaaggatatggcttggcatagctttggggagaaaccaacagttttcgaattcttgaatagcatctaccttatggtgaagattaaatgatataattcatgtcaagtgtataatacagtgcttggcacagatcaggcccttatatgtaggcttttgttaccataattgcactatggcagagattacatatatgttttggtagttaattcccatgataggtagacaccattttcatcttatctgaggaaactgagtctctgggctgctaaagcccccaaaattacagagctagtaagttatagagtagcagagctgggattcaaacccatactctttctcttataagatgctgcctgttgtgatacaccaagaaaggaaccctgtgagtgaggtgtactgacttcatcttgatgtttcatctttctgtataccctggcccttttctagggtcataccatcttgctgtt

SEQ ID NO: 64508 - DNA, 1019 bp, Homo sapiens
ccagaacccatctggctttgctgttcttgtgattttagagaatactaaatctctaggatgctgagctgctgacttttcatcaagggaacctgtccttgagttcagggggttggcttgtcaggggcttcttctgcagctgcaactcttcaatctgtctttgggggcctctcttctgcagtctccctagacagtaactacatcagttctccactttgaacagggctcagctgggcactctgagccaccccaccttaccactgctatgtgttctggtttgttgcctgaaagcaactctttgtgtccaggttagcaggtgagggtgagagaagtgtcagaggaggtttcgtgtccttctgtagaacagcagaggagagctggactggcgggcaggaagggggtggtgggcagaggtgtgactcatccagccctggcaccatgtgataggatctgtgaatacccatgtgaaatagatacatgctttaagaacatttgccttgtgaaaatctaaactcacaagccacatgaatttggaaccgcgattaccatcacaaaagggagctggtatcctttaaaatatcctgtagtgtatctaaaatacagtgcagtgagtgatgaaatatttatgccagtttaggcactcaggggaagctggcattctctatgtcagtggaacaaagaacttcttataactggagcagatggtgagcccctgtcagggcagatgttcctgcagaggccaggtgaccacatgtcaggtgggacagagggactgcttcccatggtggactgagaatcgcagctttaagattctctgattcttggctttgctttctgtcttgaaaagtaagtctgccttaggcaaatctgccaaggacagatgtgtccttgaagtcagaaggacctaggctaaatctcagctccacctcttctagctatgtaaattaggcaggtggctctctgaacctccctcttctagtctataaaattaggtttataataccttgcagagttttgtgtgt

SEQ ID NO: 64509 - DNA, 1026 bp, Homo sapiens
cctctgttctcatatctataaagtgaaaggtctggatcagtggttttagtcacctggactattctatcaaatcacttgggataattattaaacatatacattcctgggcccacttccagatcaatagatttgggaattgggtgcttagaaatttttagttctgatagtcctccaggtaattaattccaggtgatgtagccaggttttgagtagttgtcttccctgaacccctctggttctgatgttttaggatcctttgccttctttctctcttgctcagtttcccattgttctcttttccttttttccctagagtgctcctctcactagactgtgaacctctgaggaggaggggctgtatcttacccatctctttatccccgtcctccagtgcaatgtctgacacactggtagtgctcagtgaacagtgggtgcaatgaagggaaggagggaatgaatgggctctcatggctttataccacctatacacatccaagtaatgtccttaatgtttcctgcatcctcagtcattatagatttcttcagaacagtaagtggaaagaccacagactttggaatctaagaaaactggatttgaatctcaactctttctcttactgtgtagtgatttctcctaagtcatttaatctctttaaactacagtttccttgattgtaaaataaggagaatggcacctgttgcttgagattgttgttaggattgacttactacatgaaaatatggatgcagagtgcttgacatatagtaggaactcaagtatctcagcttcttttcttcctttacatgcccagtgatgagtgacagtaaaaggagggaggaagactcagaagaatagatcaaccccaagccaggccgcagaggatgacaatatagttcattgtcatctcctggcttcctgtgacactgaggttctcactgaggcccaggcatcttggtggatccccacttgctcaaccctgggcatatcagaattcagacttagaatctcctgactttaagtgtggc

SEQ ID NO: 64510 - DNA, 1050 bp, Homo sapiens
catagaaggggaccatttcactttttctgaaaactgggaatttattacacaaaggatgatgaattcaggatctaaagggtggaatatgaaaagaagtcaacaaagtaatgtgtaattgggaatcaatataagagagggcctagtggtagaaatggtaagtcttgggtattgactgagtcagcttgcactagggaggccagagcacaggggagccagccatgggcagcagagatattgacagagggtaaaggatgagcttgttagttatattgcctttaaattgtcagtgggataggcagtggggtagtctgaagacattcctataaaagaggcctagagaggaaatttgtgggttaggggtggggatgtggttttcagtatcttgcattacaggaccacatctgtgcccacactgcagaataacctttgtccattctagagagagcctgcaaagtacagatgaccatggtatacttgggaatgttgggtttatagaattaaagtgggttggtgctggaaaggatctcagaagccaactgttcccaatcttcatctgtaagtgaaatattcaagtcttagaaggggcagtgatatgtttcagttgtgagccagccagaggacctgcccaggcagactaagaaagcagatctcccaccactcagcccaggcccctttgcttcaaatcgtgtctcagagggagaacagtagttccccttatctgcagttgcactttctacagtttctgttacctgcagtcagccacagtccgaaaatactcaatggaaaattccagaaataatgcaaaagtttcacattttgagtagcgtgatgaaatctcatgccatgtcactccatcccacccagaacatgaatcatctctttgtccagtgtgtccatgatgtatatactatccgcctgttactgtataggaaaaaatagcaaatatatatagtttggtactatctgagatttcaggcatcccttgggggtcttggaacatgtcccctgaagataagggggcactactgtatttaaaactgtgacagtttc

SEQ ID NO: 64511 - DNA, 1037 bp, Homo sapiens
aggagttgctagtctgagctgaagtctagaaaggttactttgggcatccaatgaattggagagaagaagaaacagcagagagaggaaacacttaagaaactattgccattgtccagtacaggtgttttgagggcctgaactagtagagtggcagtagagatggaaaagaggggcaacatgagagcagaaccaggaaggcagaattacaggatttggtggttggccacacttggggagtgggaggaggaggtgattctgaggtaactacaatgatggtgatggcagcacctaacagaaataggaggatcagtaagggaaacagatttgggggtgggaagggatgaggtgggggtagacggtgtgttctgttttgtgcagcttgaattttaggtgcaggtgaattgcctatttcacatctatgttcagtgttcttcaccacgactgccaccattcctggtccccttctctcctccctctttattaagcaaacttttggctccttttacaatgtggctgagtgaaactctcaagtagtctttgtttatctttgaatttctgatgtaccatccatgtcacttggtatttcctaaggccagtctccccattgtatgcttccacacacataaatatacttacaggtatgagcacctggtggttataactggcatagtaacaccagtggttcatgtttgtatgaacgtttatggttggcaaagcagttagaattgtcagaagtatgttgtacttctccgctaatcccctaggtagggtcactgaaccattgactcaataagctaaaaaggttattagagaataaacagtagattttagtttaataataaatgcaattggagccattagcatatatcaaataggaaagttagatgacttttagctgctataagtacatagattttgttggaagagatgatcaaattttaaaatatattcaggatgatagcaatgccgagattgatgttttgtgggtattaagaatagctgtcatgtatagggtactttgtacaatactgctctaa

SEQ ID NO: 64512 - DNA, 1026 bp, Homo sapiens
ttagggcaaggtttggtacaaagtaagtaataatagaattgtgctgaaaaaagtgtgagagctcatgttggttggcttaaatcttcgtggttagattggaaggaaaattatctgctggagtgatgagattagggcagggaggctacctgggagggactagttcactttactctgtaatgggttcttccagcactgtcaggtgactgcctggaaatgggagaaggaagacaccattattggctctgacccctgagtggcgggaagggcagatgctgctgtcctcattctgggggtgaggaaactgaagttgagaaagaaagctgtcactgctcaaagtcacagtacatggcagaacagggacttgaacccggctctcagacccctcatttttctcattgctagccctgaacaccaacagcttcttctctggacagttctcatcagggtgtgaccctgggctctggctttgggtatcactggatggtagtcaggtctaatggagacttggtggccctttacaggctctgcctcagtgtcatatcaggaaaagcaacaaggaaaggaatagcctcagtaagtattgggacagtaagttaattcatgcttctagtaaactcgtgctggctggagttggaggtctgatggacagagtcttaaacgtagagcgtgacttgggttggactttctgttctgtttgtacaatctgtatgattttgggtcattcaaaacctttccaagccttagctttctcattcacaaagtgcacataataatatctgctttatcttgcccatagagttatagaaaaatgcagatagtatatataagggcgtttgtagactgtaatgtgctgtacatgtacaaaaaaagttgttttttaggttcatgacatatgagctgcttcgggtacaggttttgttaaaagtatgggtcagagctgctgttttgtcttaatcgcttgagatcttaggagctacctagaaccaccatggatcttgtaaacacttcttagaactagaaccagtg

SEQ ID NO: 64513 - DNA, 1029 bp, Homo sapiens
tgggaataggcatttccatgttttcaggcatttggtcatcagatgccctgcagagccagcacagataggctgtgagcctatatggtgctcagaacagccctgaagtttcttacaaaggctattgatgatgagtctcatagtcctttagcacttcacagtttaccaagtactttcgtgcctattcacctttggcttttcttctttaatccaatagatgcttgagtatgcctatctgtctgaacacagcattagggtaggggaagcagagaagagtggaacagtttctgccttaggagcttgtgagttagtagcagggctaagttccctgtaggacaaacagaatgtgacaaaggctttaagagagtctggcaatgaaaatatgttgatcctgtcccttcccgtgtcttggtgaccctttctttctggcattttcaatccctgtggttttgctgggttctgctgggtgggggtgggggctagggtgggaggttgtgactggaaagccttcctgaattggaaggcttgatgtcaaattagtgctcaagggagcaaaagtaaagtaacaggggaatcttggcaagaacttgaggaggaaagcagaggaagagcagccagatagagactgagtattgacaggagagggagaagggaagccaggtactgctgagtcacagaagccaaggaaacgctaacagggaggtcacggaggttggagatggagtaaagactactggatttggtgactgggaggctgtggcacttgagagagcagcttcagtgggaaggtagaagctaaagcaggagcacagcaaatgagtgagcgggtgatgagaaatagaggctgtgggtgtgagtagcccttccaggagattctggtcaaagagcatgaaaacaagcccagtaccttgaatagagagattggttactgtttgttttgtaagcatggagaaaccagagcacgtcagaaggctgaaagagagatttagagagaggaagaaaactgagtgagtaaagttgcaagaggaaagg

SEQ ID NO: 64514 - DNA, 1053 bp, Homo sapiens
ggacttcgaagatcatccagtaaaaccctagtatgctgcagatgtgcgatgatagaggcctggaaaagcaagcgacctagttaaagtcacacaatgtgctttttcagggtctacactgtaaaggaaggctgcagacagagccaagggtatgatcagttgagtccacaaagaatagacaggtcccatgttgtgcagaaacctaaaggatctacttgtatacttgcattcactgagcgcctctggccaggtgttaagaggcctggagatagagaagaaaagatataaccctgcccggaggagctgctgtctggcagggggaagctcacacaaacacacaatgctaccccaggtgtcttccccactatttggtggtctgcctagtctaggatccaggctgtggtggtggcttggagcctggtttatggaagaccctgcaggtgttcttatgaatgatcacctccaagattagggagatacattggataccccaagtttgtatttccagttaatttctgcaagcagtgctcagcctgttcacgtgccatgccttactatttcttgaggtttgcgaggaatcctggcagttttttccccaccttcaaacagctttgttccttggctctaggctgactttatttttggtttgcaggtacccaccagccctaagcattgtggcaaagtgaaaccgtgtactggcctgggaaccaggcagctctgtgatcttatgcaggttaccttctgtctttgagaagggaggtcatgttctcagctgcagctgtgtcatctctgctagagagatgaagcgttatcattatatttggattttgtgtttggctgtgaatacccattgatctgtggtctagagaagtgtagcatgtgtgcacctgaagcagaagcaggagtcaccctctgaagtgggtgtattcgacaaggggctgggcctgcagggccaccagatggcagcagtaggcagccagctagccttgggatgaggctggtagagtcatcattcggaattagtaaggtcagagctgaaagggcccctggaggtca

SEQ ID NO: 64515 - DNA, 1049 bp, Homo sapiens
ttttaaagacacattagctcccactactcttttggaaactcttgagctctctagagatcacatgctccatttcttctctttatatctctgtggggctggatgtgaatgtctctggatgggtgacaagttgattcagaactctcctgaagagtgcagaaagatcagtgcttacaaatgctggttacaagtgctggttgctgacggtgtgttagaatttcaaagggaattatttacacaagatctaaaccttaatgtggagttggtcagaatgtctagaatccagttgcttttggggtgctggaagctttccctgaatcatgcagtatcccaaagtagccttgtggtcttacaaggaatatggattgaaaaagtgagaacaaatacagggagttctttgacattctttactttcttcagtgttaccttaaagagccaaagagtcttagaagttttagagaatcaatgatggaagaagcaacttcctcactttgcaaatgaaaaaactgaaaccaagcagagagaaagtgactttatggcaactttaagctagaaatctagttctactttccagtgaaattttctcccttccatcggtgtcctcttgatttgtggttatatccttttgattgaggttttttattatttgttttcctaaagaggggaattgtatggtacatatgaaagggactggctgttagctactctttcaagtgtcacagcccaagaaatattttattgcatttgatgtctaagcattagtgaaattcaagcccagccattgattcacactaaactgagtttataaatatacctaatgctgatttttctgttttggggccaagatccttttcagaatagggtgacagtatacattactccatcttctttgggaccatatatcatgaaacttcaaccaagcctggggagattctgacctcatgggctctatttaaagcaggtgctttggaattaatgatgcttgtgctttagaattttgaaaaccccatgagtgaaagtcaaactgagcccaaaggcttgttttgaaatgg

SEQ ID NO: 64516 - DNA, 1010 bp, Homo sapiens
caagggtacctgtgtctcaggctcatggtgctgcattctagaaacctttcccaagctgcttaatgttcccgatcattgttctcaggaacttcatgggactcctgggtgactttatccaggctcagtgacctgcaggtgtctcatctgagattcatggtttcctggctggaggtgcttttaatgagagttggatggcagatctgggtgccttcctagtttgttgaccttgattaagtcactttacctgtttaggcctcagtttcctcaactctgaagtctggtattaaaacctgcctgcattctacatagggctgctatgatgttcaaatgaacgaatctgtgaaagatcccaactattgtaaaatgcatacataagtgatggctgcctggggtatgtaagtaaattaaagacttagtagttgcttttagaaagacttctgtttccacagggataatgccaccttgagactactagcctgaaagctcatgagctggccagggatgccatactcaatatcaaactctgacagcaaagttttctaaagtcttttacttgcatgcagtaggcaagtggctctttcatattatcaacaacttggaagattttcgtggcctaatttgtaatattacctattaaaattcaggatactcatcccaatttgtaattgtgtacatctctttgtattcttatttgtttaatgtctagactgtaaattacatgagagcagtgtctgttttgttcatggccatatccccagcatctggcacaggcctgatacataacagatgatcagtaactaagtgctgaatgaataagtaaatggcaaggtagagaaaaacctgggctttgaagtcagatagaccaaggcttgaatcttagctctcttaacctactgattgtgtgactgtgggcagctccacctctctctgtctccattgtcaccaccctagttcagcccactgtcacctcttaactaaatcctgcagtagcctttaactggtgttctggt

SEQ ID NO: 64517 - DNA, 1008 bp, Homo sapiens
atggaatacttgaggtcaggagttcaagaccagcctggccactggtctactaaaaaatggagtttttttgtagaaaccccatttctaccaaaaaattcaaaattagctgggtgtggtggcacgtgcctgtaatcccagctacttgggaggctgaggcaggagaattgcatgaacccgggtgacggaggttgcagtgagccgagatcacaccactgtactccagcctgggtgacagagcaagactccgtctcaaaaaaaaaaaagattaatagccctctctttcttcatctagttcaagctgttacacattggattttgttcaatgctctttagacactttctctggagtggttgtagattatataactatttggcattgcagcagaatttaattttacctgctgaggcaacagcataatgatcctcatctggaagacagtttgactttcaaaaagatggtttagagctactaagataagtgaagttgtttacacaggcttcatcgtcagtggcatctttgtagctcagcagtccacttaatggattgatactttgctgagggggcttctttgctatcttgtaagagatcttcatactttgcacaccctgatgaagtccaggaggttgacctctctctgggaatggaatacaccaaattcacttcatagaactgcagaatgtcaatgttgcagggtcaccccagtgacaaaaaggtttcactgatttatactccctcattttggagttgaggaaacagacctagaatgtgaagtgatgtgcccagtgtcaaacagtgatcgggtaacagatggaacttgaactggagacttctgaaccttagtctgaagccccttaatgatactgtttgactttctgtcagttttttggaatatactagactgccctagggcaagcaatactatcaagttttattgggaagctacaaaatgcagtgaaagcagaagacctggcttctagtccctatttgactccttattagccatgtga

SEQ ID NO: 64518 - DNA, 1064 bp, Homo sapiens
ggcttcagactaaggttcagaagtctccagttcaagttccatctgttacccgatcactgtttgacactgggcacatcacttcacattctaggtctgtttcctcaactccaaaatgagggagtataaatcagtgaaacctttttgtcactggggtgaccctgcaacattgacattctgcagttctatgaagtgaatttggtgtattccattcccagagagaggtcaacctcctggacttcatcagggtgtgcaaagtatgaagatctcttacaagatagcaaagaagccccctcagcaaagtatcaatccattaagtggactgctgagctacaaagatgccactgacgatgaagcctgtgtaaacaacttcacttatcttagtagctctaaaccatctttttgaaagtcaaactgtcttccagatgaggatcattatgctgttgcctcagcaggtaaaattaaattctgctgcaatgccaaatagttatataatctacaaccactccagagaaagtgtctaaagagcattgaacaaaatccaatgtgtaacagcttgaactagatgaagaaagagagggctattaatcttttttttttttgagacggagtcttgctctgtcacccaggctggagtacagtggtgtgatctcggctcactgcaacctccgtcacccgggttcatgcaattctcctgcctcagcctcccaagtagctgggattacaggcacgtgccaccacacccagctaattttgaattttttggtagaaatggggtttctacaaaaaaactccattttttagtagaccagtggccaggctggtcttgaactcctgacctcaagtattccatctgcctcagcctccaaagtgctgggattacaggtgtgagccacagtgtccagcagggctattaatctccataatctttagctcattttcaaaatatcaaaaaccatttcactttgtgaatatattaaaaattactaaattgtatactttaaatgaaacttaagttctttgtatactttaaaagaaatttaatttcttatatttaaaatacatct

SEQ ID NO: 64519 - DNA, 1052 bp, Homo sapiens
gttattatatatttgaataaacagtgctgtgagtatttgccgtgaaggagctaaaaatttttttttaaaaaagaatgagcctaataaatctcatctgttacagggtctgagagatacgtcagggtgagagagacagagacaggtaaatagacattgacagttgtggttcccacactttttcatccttggcttattcatccctagggtgcaaatagctatgggcaacttggcctcggccataaggaagatgtgctgttgccccagcaactgaatgacttctgtaaacccaggagtgtcaggaggatcacaggaggagggggccactctgcagttgtcacaggtaatttccttcaaaagtagatagtcactcattttcttatttagacgttttcccctggatatgatattgccatctttcagccttttgtattttgcagaggaaaataatgtatttttgtgaaacatttttgtgaaagagccaaattaccatcagaagatcctagattttcagggctagaaggacttcagagatcttctaggccacccctttcccccaccccctccattatacaaatgaaactcagaaaggaacactgattgcttaacatcacaaggcaaagtagtggcagagttacaatgtatattttacaccataggaattagaagtctttgtaattagattggatattccttgagagcaaaaactgtgtgttccccttaatcttcccttactgtatctaggatagcacttaacaagtagtacaagtgctacaatgttgtaaaggggggcatattgcatctggttgagaacatgagctctggaatcaaatctctgggttcagatcctggttctgtgacttattatctatgtggccttgggcaaatagccacagtttctgaatctgttacatgaggataataatggtgggtgaagagaaccagtgagttagcagggctccattccgactgtcatgggtcgttggtgcttttccctttatggacctcttcctttgtaaagaaaaaaattatattttacaactgtgttggtataa

SEQ ID NO: 64520 - DNA, 1056 bp, Homo sapiens
accatagatgcatgccaccacacctggctagtttttgtattttttgcacagactgggtctctccatgttgcccaggatggtcctgaactcctggactcaagtgagtctgcctcggcttgccaaagtgcggggattacaggcatgagccaccacacccagctgtttcttatactcaagattttctttttcatttctcttacacttgatcaaatgttgctttataatttttctttggtatctggagcaactatattttgtgttcccttcactatcagactgtaagcaatttggagagcttgtgttttattattttaatgtcttcaagataaatataaggctggacacacattaggtgtttcatcttctaagtagtattttcacattttgaacttaccatcttccttcaaagtaaaattatctggtagattcacagagagaacattggtatgagacttcagcagatgaaaaatatcattcaattgttctctgttgatgtcacagtcaacaaaaatctcaaattctgagtttcttctttttgattttcgggactcgatatgtaacagattcacatgcttctcctgtgtaaagcacagggaaaagatttcatgtaactgcctcaaatgttaatagtctttgagcaggctactttaattaccactaaaaatcagattcacacttctcagaacagcaaagggaaaaagactgtttttagtgctgccaacaacaaaataattccttcttaaaaattatgtattagaaaacttttcaaaattcatcccatcctccagaaaccaataaaataacacacactagaggtccttcagatgtcagaattaatcagaattcaaatcaaaatattattaagtttcctgggtaagaggaatcttttgaaaattctcataaataaaagctagttttcaaaaagtgataccaatgttagtcctggagaaagaagagtttccctttcaaaaatccatttaattaaattagatgaacagcttgagcacagagtatttaatacctcaaatctcttaagctacaatcttagtaacagct

SEQ ID NO: 64521 - DNA, 1007 bp, Homo sapiens
ctggattcaacattataaatgtgaagatggctaagtcatgatggccatattttgtcaaaatgctatttatatgtgaaaatgttggttttacttgacgcttattattgggtattataatttttatgtcaaagttcaggtaataaattgtgtcttactttgatttgcatttttaaattaatgagattgaaatatttggatgtcgtatgttaatttgtttcctaccttttaataatttatccattttgattatttgtatgaatttcttgggtaataatgtatcttttccatatttatcgcatgtatttttttcccattctttgctgttgtttctgttttttggagcaagggacatcgatatttcttaacttttaagtggtgggaacatcaaagaaaggtgggctgagaatacacgagtgctatgtcatgcaaattcttatgtcatatttaggggatttagacttcatcttgaaaaagctgaggaactactaaagattttttacttttaagcaccaagtgatacgatcagtttagaaagattactccaaaagcaatagagaggaaggagtagagagagttgaggctggagggcaggagatcaactaacaggctcttgtggttggtaatcttcaagaataatctgaaaaatgatggcagcctaaacaatggaagtttgaatggagaggagggatgggggtaagagagatttggtagaatagaattgagcacttgccgggaggagtcagcaggaggggagaaggaaaagtcttggctgtgttccaagtttgtagtctgtgtagcagggtggatggtggtgcccttcactaaagtaaagacgacagtggagaacatgtttgggttacataagcctccttgatgttggtgggttcaggtgggacatttgaaatgcctatgaagtcaggagggaattgaatatcctgatttgtttttattcactagttaaagcttgaaaaattttccttttttgacattaaatcttgttgttgttt

SEQ ID NO: 64522 - DNA, 1043 bp, Homo sapiens
atccagccttgggctcccaaaagtgttgggagtataggtgtaagccaccatgtccagctttttgtttgtttttttgagaaagttttttgattgaagatacaaaatttcttaaactcctgggacactgataaattcctcatttaaaaatgaggaaagataagcaaatttaaacataaaagataagtaaatcaccctttagaataagtactgctttggcaagatttggttttcttagaatagctttaggaattttgcttaaccctattgcttttagcagtttgtttttcatttcaatatctgttttattctctgcagttgacttgctggtgaaggtgggggaggttgtggacaagctctttgatttggatgagaaactaatgttagaatgggtcagaaatggggctgctcagcctctggaccaaccccaggaagagtctgaagagcagccagtgtttcggcttgtgccctgtatacttgaagctgccaaacaagtacggtaggtgagctcttttgtgtaaaatgttctgggaaaatgcaattgctagaagtattctcagatataaaagtcttcttatattccttacaacagaataaagtacatagtcactccttgttacgttaattcactactactatttgtgatgcaacctgtatagtggttacaaagttcctgttatattatcatttagctataggctgttactcaacattaactgtggtttctgtcttaccatattttatgtaatttaaatcaaagagaaaacattttcttgtgctttattttacattgaacatttaacaacttcattaacgttgcacatcatttgcttttttttgctccttgtgtttatatgccagtcttcaataagtgaccgatgttgggactctgatgtcttgccaagagtgattactaagccttacaggtcattaaaactgtttattgctaatcactagaaaattaatttttaaattgatctgcttagtgtttttcttagtgcattcttagtgctgagtaagccacatcaaaacctattaattttgtg

SEQ ID NO: 64523 - DNA, 1655 bp, Homo sapiens
atgattcacatcctgggtgagacggtgcaagatttcatcgtgctgctcagaaaggcatgcaatttaaaacatgaattgtttatttctagaattttctatttagtacttttataccaaggttgaccatgggtaactgaaaccatggataaagagggactacactaatacattatgcatttcgccaccagagtaatcttcctaagatactgtttcagtatgttgtctcccctccttgagcatcttcatgattccaaataacttcccagattaagtctaattcttcagcacggcattcagagcccttaatctcagtcctttatacctgcagtatttacctcatgctgttcacccactttgtgccacaaccagagtactttattgtctacagtattcgccatgtacatgattcccttcctgcctttgctgatactttccccttatttgaatgtctgtctttttgtttgcatatctcattcctatcaatcatttaaaactcattttatcgatagaagttcttctcgcatagctcctgcctttgccctttcttgttcttacgtttttcatcccttctcaaatactgtaagcttgtcaaggttagggtacaggcagtatatgtatttctttatcctgcctcccctccgccttgccccaaaacttggctcagcgaaagtttttgttcaagttgatatttttgtttacgtctttcgtctcagagccattgtgacttgtaaaatttgatttggcaggaaatctgtgtgggaattttaggtaatatggcctgtttccaggagatatgtgtgtccatcagcagtgataaaaatcttgggtaagtcttactatataattatgttttttaatatattcatttatatccttaaggaaattctaatacataggaaaagtagcaaatctgaaagacagtcctttctttgtcttgatgaacactctgtgggaacttcattgtgtgttgatgatagctaggggcttcttcaggagatactgaaatgattcaggatttaagcctgttttcttcagtagcaaaggaacctgaattgtcagctggtggcaataagccagataggggaagaaccagtgggccaaaacttggagatggggcagccaactggaatccaaaacagtttaggggcagggaatccaatgactcagctggagtctacagaaactagatttgttgaataatgtcatcctgagagctctgacttagagtgtaagacttgccaacaactggaagataaagggttgcctctctgatgaaaagactttcagatatctgcttcgaggctcgttctcttctccatgtgtaaagttctgggcagaaggtgttttaatggaggaaaccccagtggttactgtgttcggagaacaccccgaaattatatgctgaattttgtgagtgtattagttttctaggcaaagggttcatggcttttaatcagaatctcaaagaaatttgtacccaaaataggttaagaaaactgttctaggcagtttttgtcagagctggggccatgagggttttatcacaggattcaagtacctgggtttctcagaaagagagaactcctagttgtggagggactttaagatcctagttcagagtatttattcctcagtaatttaccatcatccatgga

SEQ ID NO: 64524 - DNA, 1061 bp, Homo sapiens
aggcaggcttactgagcactttcctaccacataattattgtcacgcatctctatggttattgtcttctttacagatttttgttttataataatttgtattcatccatttcccaacccacttgctctggttcagggttgagggtggctggagcctgtaccagcagttcaaggtgcaaggcagaaaccagccctggacaggatgccatcccatcacaggtacacacacacccacactcactcagattgggaccatttagatacccgttgtgctaatgtgcaaatttgggggatgtaggaggaaactaaagtacctggaacagactcatgcactcttggggagaacatgcaaactccacacagacagtggccctggccaggaatcaaatttttttctcatcagcgttacgaggaaatgttatttgatcacctgctgtatttgggtacctggttagtattgtagacaacttttattcatgttttctttctttgtgtttctgaagattgttagccctgaaaacaccaaatctagctcagatgatgaggagcagctgacggagcttgatgaagaaatggagaatgaaatttgcagagtatgggatatgtcaatggatgaggtatgaggctggaaacaaaactctgaagactgttgggtgaggagatggtgaatgaatgttttaaaaacggttcagtccttcactctggggaaaggctttatctcctgtctgtaatcacacccatatatgatatagggaatgagatcccaggggctataaatgctaaacttctgtctttgaggctggaggatttgagctctcaacagattcggactaaatacgtagctcttatgaatgtattcctatacacatgtaggccgggaaagttctgatacttacctacctaaagagagctctggccatatatttgacagcaggttaggagttagaagaccactgatataccatgataatattagaaggaaaggacaataaataattatatgtctgtaattgcagtattaatcatagtgttttaatatctgtattttattctatagctcaaaa

SEQ ID NO: 64525 - DNA, 1027 bp, Homo sapiens
gcttgagccagaagttcgagaccagcctgggcaacatagatcagaaggcgaatagaataagtccgctagctttgagattcacatctgttcctgaggcttcctcactgctccccacccttccttcttcaatcagtctaagagctcctggagaaatggaacacctgattcagtgagggtgacaaataattatgagtatgttcgtgccagggtcctcgataggatggggtgggggaggtcaagccgccttggcagctggccaggctccgaacagcagatggcgctgtagggggagtcccaccgggtacgccgggcgctctggcactagggcgccggtcgtctcctccgcagcttccggcacggccttcaagcgcgggacgcgacaaagtcatggaccgcaacccctcgccgccgccgccgggtcgcgacaaggaggaggaggaggaggtggccggtggagactgcatagggagcacggtctacagcaaacactggctcttcggcgtcctcagcggactcatccaggtgtggaaactcgcgccacgcgtggggtgtccctacatcccccaggcaccggggctccgcctctggcgaatcctcctgccccgggagccgccatccccacaaagacccctccccaggcgtgcgctgcgggaccttgctccttgcgtttcgccggccgctgcggaccccaaaactatctgggccccctcggggtctctcgacacaaagggaagtataatggtagggatgctgaaatacttgccgttctattttgctttcccaagttctccaaaaatacatgatcgtgtaactgcattcctcgggttttgctccccatccccactgtcatttctgaagcccaggtccttaatttatgtatttcatggactatcgttgtaatagaataaatggtgactttagggttatacaacttttatattaaaaacgtggcttctgaccaggcgcggtggctcacctctgtaatcccaacactttgggaggccgaggcggaaggatcgcttgagcc

SEQ ID NO: 64526 - DNA, 1049 bp, Homo sapiens
cctgccaagtttcattaatacctcaatggagttcttatatgtcagttttggcttgaaggacccagtaaactatttgccatccaatgtcagtcttgtgaggggcccaatctcaaatttataccttctcatattctgtactcttagaagttaatgctgctctcagttaataattctttatattaaaatttcccttttcaaattactgcctggtttctgtctcccaaagggaccctgactgataaaacagttcttctctatctggctctctctccactgccaccacttccacaactttgatctagttaagctccagaaactcagaaaacattcataaaaggagtcgcattacatatttagacttgaaagaaggcaatgaaaatagagtggaagagaactgcattggaggtattttttagatggagtgggtagaaattcattaatgcctggatttgtaggtgttgctgagaaatgaaaggaagactcgggtggcagtcgctgaggcaggacttcacaattcaattgtctgtagcccctgcctccagaaacagagatcactgaggaatgaagaactgagggacagagaaggtaacaggaaataattcacaggagatgagaagcctgggcaaggaagggactggaaatagcaacaatgtaaccacaaaggtctggaaaaaaggaggtctaatttgtggaagggttgatgcaggtgtctgcactgtgactactaagaatgtctcctcacatccaaacacataggcctacctaggctcacccttcatgtgggtgtgcattgatttcccttttgtaccaaacaggcagtcagcaccaaaagaagaacacactgtttcaacaaattccacctcttaagcatttattagatgcctattatatgccatatctcagcttctctggacatagacctcactaactttgtatccctgccccgagggcctcatagccaggtctcctgagagcagagtgaagaggaagctcagtatttctcaggcaggccagcaggtcggaagtgattggggtctctgccactcctg

SEQ ID NO: 64527 - DNA, 1034 bp, Homo sapiens
cagaatggggctgatgatcacatggctttgcctaagttgacagaaatattacagatacagctggagttaaagaccttttctttagcgctgaaacactgatttcttagggcagtttagtaaataatgtgaatcattatattgtaagtttatatacgtgaaatactattatttgaacagagaagttgctataaacagtctttactaagtccaagttgcctccctaggacttattagggagaaaactgaagaatgaaaacctgagttttctcagtaataagtttttattcatgttagttttttgttatttgacttctagtgtttctagctttgtgcgtaaaactactgagaagattggcacccttcacacgagccctgatctgaaagtgagaccagagctcaggggtgatgagcaatcatgtgaagaggatgtgagttcagatacctgcccaaaggaggaagacactgagtaagcccttacacataaatctctatacattctagggaatccagctgtcagttttaagaaagccatagaccaaccttgtgcagcctgtggcccgtgggcctcatgtgttccaggacggctttgaacgtggcccaacacaaatttgtaaagtttctgaaaacatgagtttttttgtgatttttttttttaatagctcatcagctattgttaatgttagtgtattttatgtgtggcccaagacaattcttcccatgtggcccggggaagccaaaaattggacacctgtgccatagactatgtccttttcaagaaggcacatgtatgtctgcattcattgaagattgtttgtgtagcttataaaaattgtgaaattccacaaagtgttgaaaaattacatcaccccgaagcagatctattgagcagagttttaatttagtacttcttccatctttcccctgcataactcccctccttcccccataatctcttcaaacttctgggatctcacaggagtattatattaagagtaggatgaccaaggatctagacctcatcctggctctgcgta

SEQ ID NO: 64528 - DNA, 1940 bp, Homo sapiens
attcctaagaaaattctcattaaatctttctccagcttgctaagcctttttaaagcaccattgaagttttatgttctatattagacttatttcttttttcttttttttttttttgagatgaagtctcactcttgtcccccaggctggagtggagtgcaatggcgtgatctcagctcactgcaacctctgcctcccaggttcaaatgattctcctgcctcagcctcccgagtagctgggattacagatgcctgcccccatgcccagctaatttttgtatttttagtagagacggggtttcaccatgttggccaggcttgtcttgaactcctgacctcgggggatctgcccgcctcggcctcccagagtgctgggattacaggcgtgagccaccgtgcccggcctagacctctttcaatatattggccatttgaatatagatttacctacaaatagctattccattgcgctgttgttttattaggcaagaaaaactttgactgcagataaattggagcatttgaaatctcagctggaccatggcacctacaatgatctaatttctcaactggaagaattgatcttaaaatttgaacctttggattcagcttgtagcagtagaagaagctccatttcatcacatgtaagtattctcacctttaaaggattttgtagggtaagatttttccatcttcggttgttcttatttacctctaggatccccaaatttgttgtcctttccatttatgttttttggtgggaaggggtgaacttttgttcagctagtggctcagctctgtgaagcctccatttaggtgtgtcttggagccacattttgttttgtcattgtttattattttttgttccctgatatactcatatagctcccagcataagttacgttgctctaatatgtgattttaggtgcttcatgctaatttgagcctgaatgcaggtctggattatctcatttaatccccattctcactaccaagctttatgaagacaagctagagaaatatggcagctgatgccactagcacacggagtgacccagctgccaggcacctaagccttgctcatcagtttgttctaataagccataatggttgttattaactttctatttgagtgttggtatttctctgcagaagttatattaacgttataaaggaaatttttacctttttttttttttgaattcttttaatttttaggaaagtttcagcatcttggactctggtatttatcgtatcattagtagtagaagaggcagtcagtcagatgaagactcttgctcccttcacagccaaaccctctcagaagatgagagatttaaagaattcacctcacagcaggaagaggacctgccagatcagtgttgtggctcacacggaaatgaaggtgatgaatgtgtctgttgttggttcctgatgtgaagccattattttccacgagctcctgttaccaggattatcttgtgcacggaatttctctgaagtgttaataatttttaacatgttgatagaactttccatccagatctacagatctgccccctactagaagagttggtttatgtttagtattttttcccctcacgtttggactaacattagggcctgtttttgatcatgcatcaaaatgctggaaaggttatgaaagaaaggtcattaaccaaaagagtgggaagattttattctgactaaccaaattatttttcatcaggattgaaaaattactgcagtttttgggggtcattgccttcctttttcgatgtgcgagtattcctgtggctgaactagtgagaagagaataatagagatcctaaactccctttttgacttatggggactcagggttagtaggcaaatgaaggtacctgcctcggtgttttatgtggaccatcccatgcattttgtaaacctgtgttccactcatt

SEQ ID NO: 64529 - DNA, 1048 bp, Homo sapiens
gacagatattttcttgaaggcagatattttctcatgaactgtatattgatttacatactatgttaaaatccattcattgaggaccaggttgtaacactcgaaccttatagtctggcctctaatgtagattatcctcttttaatgtcccaattccttttcacagaaaacagcatttttaaacataagactttaggtcagagagatatagttctttcttcacatcttttattcttgatctttttagaatagtttctaaaatatgatttcttcattgaactgcaagtagaaaaatagagatgaaattcagtcaagccaaaccctacgtaagaaatgaatttattagaataattgcatcccttttaaaattgtaaggggtatttggttaacattttgtatgttcacacctgtggttttcgtagatattcaggatgtggctgtctgtaggaatgaattgttctgtttgcacctaaatgggaaagtctcacatctctccctgatatctgtggagcgctgtgtggaacgcctgctaagaagaggcctatggaacttggctgctcgtacatgctgtcttttccaaaattctgtcattgccagcagagtgagtcagagcttacctagacatctttaccatggattggtgaaactctcctaccttgcaagattgtgttacaaagttgcttgattttattaaccctgtctgtgtgacctacagatacagcaatacatgcccagagaaagcatgatagatatatctaggggtggatagagggtaagaaagagggtacaattttcatttaaaacatcaaatttacatacaaatttgtttcagaacttgtttttaagggggataattgcgtatatggtaaattttaattaaattattattattattattttgagacagtctcgctctgtcacccaggctggagtgcagtggcgcaatctcggcccactgcaacctctgcctcctgggttcaagcaattcgcgtgtctcagcctcctgagtagctgcgactacaggcgctcgccaccacacctagctgatttt

SEQ ID NO: 64530 - DNA, 1026 bp, Homo sapiens
cagtggcacaatcttggctcactgcaacctccgcctccctgtaagtgattctcctgcctcagcctcccgagtagctgggattacaagcgcatgtcaccatgcccggctaatttttctatttttaatagagacagggtttcaccatgttggtctggctagtctcaaactcctgacctcaagtgatccacccaccttggcctcccaaagtgctgggactacaggcgtgagccactgcacccagctgacccttttctttttctggaaaatatctagtatatgtgtctgaattttcccaatttggcatcattttatgctatttattagtgggctgttgttacagacagaaaggagttgttaggactcgattagctggatcactcttgtgttttctttgtacagtttgattttactttaatagctaatgcaaggatctgaattcggggaattataaacttttgtatcctagcacacttgaattctcttcacttcttctcttgcagtgagcattgtgtgctgacttggacagaaagaggaatttatattttcattcctcagaatgttcaagttcttctttggagtgaagtcaaaggtaattatatttttctttgtaatttttaatctcatgcttatgaaaatttgattattgtaggagcattctcttgtaatttaagaagttgaaaaataggatgggatgacttttttttttttttttttttttttgagactaagtcttgctctgtcacccaggctggagtgcactggtgcgatcttggctcacggaaacctccacctcctgggttcaagtgattctcctgcctcagcctcctgagtagctgggattacaggcacgcaccaccacacctggctaatttttgtatttttagtagagatggagtttcgccatgttggccaggctggtctcgaattcctgacctcaggtgatctgccggcctcagcctcccaaagttctgggattacaaacatgtatgattacaggtgtgagccaccgtgcccagttacgtttct

SEQ ID NO: 64531 - DNA, 1024 bp, Homo sapiens
ctgactaacgcggtgaaaccccgtctctaccaaaaatacaaacaaaatttagctgggtgtggtggcgcatgcctgtagtcccagctactcgggaggctgaggcaggagaatggtgtgaagggaggcggagcttgcagtgagccaagattgtgccactgcactccagcgtgggtgacagagcgagactccgtctcaaaaaaaaaaaaaaaaaagattttattctatcttttcagagtgaagttggatttttatttttattaaaagattcagaaaaaccaaagaagtctttgataattacctctcctatgattagtgtcaggcgaataagggcagatgcagttaggctcttgaatttgttttggaggcaaaaatttccctatattgggaaaagtgtaattttatgttatacttttaacagataaactcattaacagatgtgtttactttctagatcagaacctcagtatgatcatacagctggatcctcccagtctttgtctttccccaaactcttacatcttaggtaagtttctactttccttagttctgggggggaaaaagaatacttagatttttatctctgtttcttgttcagaagtagttttttaaggttatttttgcactaaattacttatagaaagttaggaaataattatgttacatgaagtgttctgtatctaaaaggaatggaaagatcctagaaatacacttctctttccaagccaattggagagtttataattgccaagaaacttctaacaattggagctaagatagctctactaaccgcctcataacctctcctacctaatgggatgctataatgaaagcaagtcccagatcaaaatctgccacacagatgtatgtgtttttagcaagcaggcacaaaaatagttgtagaacttgttcttgtaagcttggtgaaatttcagctctctatcctataggtactctgacaaatgcttgcatgaaagatctgctggaggcagtttcagccatattctaatgtcagagttcagccagc

SEQ ID NO: 64532 - DNA, 1128 bp, Homo sapiens
ttgctggtgagacatattctaagtgccatgagagaaggctaaaggcctgtttttagatgggaaagcaggaagtcttctttgagttttgttgttttcaagatttgttttattttaatagaattttactaaagggtaaaattggatgaaaaataattaagagctttatgaagataagtatttcatcaaaatctcaagggtagatagagccagaggtacaatgaatggcaaaggagtgcattagaggtagctgtgaaataccagagcagaatagcagacagctggaaatgaatattatgcatcactatgccaaagttctcagccattctcactgcaaggaaattttcactggccatttctttttttcactgggcctggcagctatcatatttctcaggaccatctccttttaaaaatttatcatggagagttttgagcctacacaaaagaagggagaattgtgtaatcaacacctgtgtacctatttcataactaaagttggatgacagtatcatagaacctcctgtaaaaataacatgtttagacgtgctttctgttagctagaattcagcttttggggacatgtgtaatataataaaatatatacttatgttaaaaaatctttttgtttcaacctgttttccctcccaacaaacagttttttggttttttttgtttctttgtttttttttttaaagctgagactcctagtgactagccaaagtgatagatatgactttgcttcatgtaaatttagtgttaaggattaactaaggtagcatatgtgaaaatactcaactttgtgcctgtgacgtattgtttgaaaaataatagaaagtaagattaatgagtatacaaatgataatgaattgattacatttttcactcagcaaacatttattatgttcctccagctccttagcactgtattaggtaccatagaaaatataaaatgaagaaatatattttatttcccaaataaggagtataagtaataaaaccactacttcctgtacagctctgtatacatttcaaagcactcttacacctatgttcttaaagtaaagcaaatgttatattttattcataaagcaattaagtacagaagtagttattgaattatctgaggtt

SEQ ID NO: 64533 - DNA, 1028 bp, Homo sapiens
tctgttccaaaactatctgtcctttttcaaatgcattttaaattgacacatgtgtttgttagggtgaccaaccatcctggtttgcctaggattgtcccggttttaacagtgaaactcctgtgtctcaggaaatctctcagtacccagcaaaccagaatggacagctggtcatcctagtatttgtagaaaatgctaatttaaggttacaacatttcaaaggccttaaaagataaagggaacagagataatttagatcatttaacttctcctattaaactggtttggtgactaaaacaaggaaattaataccttgactttttataatacttcctcttttctgaagaacaagagttgcatatgtatttgatatagttgatactgtgatgcaacaaaattgtaccttgttcactgttgccacgtttgcctctgtgactcaattcttgcagtcaaggtcttgtggttgtttgggaattaaatcaagagcgtcgtgggaaaccggaacaaatgtatgtgtcttcagaacacaaaggccgaagagtcacagctctctgctgggatacagctattcttagagtttttgtaggtgatcatgctgggaaggtttctgctatcaaactcaatacttctaaacaagcaaaggtgagaagcagtcccattctttgtgtatgtagtgagatacaaggtgttgtcttataaaacttccaattaaaggatgtgattttatctactgtatttcttgggagactaatccggagtccaaacctggagattttgaggagacctgtttttatatagtacacacggtggcctgttagctcaataccgttacagaatggcttttgtgaactaacttcagtactttgcacattatctattgcagtccttcctgattcacctgcatggctcatttaaagcattctttagtataaggctattaagaaagaaaagatatctatttattattggtgtgaataaagtgacaaacatagaaatgacaccaattgcccaggcttctggtcttctctgct

SEQ ID NO: 64534 - DNA, 1030 bp, Homo sapiens
gagactgaagttcacgttccgctcttagtgcgcggtgagttccccggcgctaagccgggagacaagatccgatctactgagagctgcgaggtactgccctggatgtggtggagctgggctgggacctccgggctgctggtctgtgagcctggctttgaaaattggttactgggtctcctctcaagaaatctcaagatattaaagttactgctgttaaaaaggtagtagttccactaggcaaggagctttttgtgggtagggattgtgttttgttcatccctgtgtctctagcggtgtgttcaggtcctggaacatagtaggcactcagaatgttgaatgaatgaatgtataaatgagtcagtcgccatttgtctgaggcagagagttgttttctgatcatttcttcttggatagaaagatcccattgtgaaaatgaggcagtctgcaacttccccttctcatttcttcaatttttgctatctttcttacttctttctcctcttcctccacgcacctactggggcaaaagagaaacatgtttgcatttgatgtgtgagcaacaaacactgaactattttacgataatggaaagatgagatttggattcaggagacgcgtattctaatctcagctctaccatttatgaactctgtgatccttgggcaagccagtctcccaaaagttgtttcatttactttggttaagcatttgtcgccaacttctatgttcttagtttttggtagagtgccttcacagaagtaacatttaaactcagctttgcagaaaggtagggttttggtaaatgggggaagattccataaacatcatatattaaaccatggaggcacagcaagtttatggaatgaaaaagaaaaaaagagtcgagtccaatgtagttggagaatagagaggttaagatgggaaataaggctggaaaaagaagcagggaggagataacagattttcaagaaatagagctgttgaaggcttgtacaatattatgtatatattttttaaattttattgtgga

SEQ ID NO: 64535 - DNA, 1017 bp, Homo sapiens
tcctctcctccatttatctcttgcacattggaaaaggggatgtaggtaatggaaatgcagaggtgcagtaatgtaaagatttgtattcaaccagttcatattcttccttatcactgttgccttttaagagcaagatccagttattagaatctgtatgagaaatggtacattgatctgtgaattgaaaactatagtggttcccggagtttaggcaaagatgtatatgcaaagattccttattatgtcttagcaagagattgtattcttttaacagcaagatcttaaatgatgtcattgatacttcttggactcttcttataggccaaacactatattactgggtgctatattacagagaacccgacatatatggcctctgccctcccttatgaagcttgcaatctgtcaggagacgtgtacattaaaagaatcacattaaaaattatgttgttgtaagtgccatgaagaaaataataggagactttagctggtaactttgaagcttaacatagactgaaaaaaaaaatgagtgaaagttagccagttgatgggaaaggaagagaatgtacaaaggctcagagcaaggtatatgaatttagattcggacaaatacatttttaactgcaaataaattaatgcctttaatatagatcttgctatttaaggaagtcttagaccatttcataagtaaatagtcttttagtaaagcgagatcttcattgacctgatctgtttaaatgtagcctacaccaataactttcataaatttctatggctcttatagagttctcctgggaagaagtgtttgccactcaaggaatacactcaagaaaaacctggaaatcacagaaggcattgtaagatagctacagtgattctgttaaacctcctgaaattggtccttgaacaattaagaggtgctacagatgaccaggaaaatttaccaggcaaattagctgtgagacaattgaccatttgtgcccaatgttcggtaatttatctcagatttatttttta

SEQ ID NO: 64536 - DNA, 1022 bp, Homo sapiens
ctcagttttatttatacagaagaaacagaccagaaatcaggaaactttggtgtggtttcagctctgggagtggttctgggaagtccccacatatcttgcagactttagtttcaattgaaacaaatttgaactaaataataaatatgactgtaattctacagttttacaattgtaaatatagactatatgaaagactacacattttcaaattgtgtgtgtataagaatataactgaggaaaataaattaataatactcattagcatataagtattgtataaatttacacctgtggtatgagcaaaatgaaatttaattgtagaggaatgatgccgtgcaactttatcttcaactttgaatgagaaaagagactttcttcttccccgttaatttcctacagtttagattttatatttgaaagggactctagaagtcaacaaattcaaccctaattgatgtgtggaatagtttttttcttcatcttttttttctctcttagcaccttctagccaccatggcaacctcatctgaagaagttttgctgattgtaaagaaagtgcgtcaaaagaagcaggatggagctctgtacctcatggcagaaagaattgcttgggcacctgaaggcaaagatagatttacaatcagccatatgtatgcagatattaaatgtaagtcagctatactaagttctgatgtatttgtatgtcatagttgctagtaattttgtaaagagattatataaatctttattttatatcaaaaaatcaactatgtagaaataattacaaaatggggtcactgaatatatactgttttataacctgaccttttcacttaataacagaacaggtacaggtttacatataatatgtaaatctacctgacatatagatctccacacactttaagagttgcataatactccactaaatgaatatacaatcatgtatttaaccagccctctgtggttggacacttaggaagtttccagaatttttttattgcagtgtttgcactaatatc

SEQ ID NO: 64537 - DNA, 1028 bp, Homo sapiens
gtatttgatattacaaatagttattattataagatttataatataagatttaagtatatgggaggatatgtataggttgtatgtaaatacaccattttatctaacggacttgagcattttcagataccaacagacagtacactgcagacatggtgatctttgaatcactgggatacggagatgaataagatcaaacccatgtcctcaaagggtttaatctttcctttacacctacctccatttatcaccacttcatttgttcctccaaaaatgtggggtattttgctcttaattactgaaaagtgaactgaaggacctctgctgctcaaacatcacaaaataaaagttgtgtgtttcaatgttttgtgttgccaaaatctttttaaaatgtacctacatggtgttttattctagaagttcagttatattcagtatattctgctttacagaatgctgcaagaagatcctgttttgtttcagctttataaagaccttgttgtgagtcaagtgatcagtgctgaggaattctgggccaatcgtttaaatgtgaatgcaacagatagttcttccacatccaatcataagcaggatgttggcatttctgctgcatttctggtatgtgagccttctagatttctgaagaaaataaaaattcaaaccccaatatgtgtcttaagaccattattccttttgtaaaacttagcatttccttaaaggaaagtaatggaaaattgagtatccatggtattcttcactattattgaactattattattatgtttgtttgtttgtttgtttttaaaagacagggtctcactctgtcacccagactggagtgcagtggcacagtgatagctccctgcagcctcaaactcctgggcttaagcgatcctcctgcttcagcctctcaagtagctgggactagaggtgtgcaccaccttgcctggctaaattttcttatttttatagggcggggggcagctctttttgtatttcccaggctggtctcaaatccctggcctcaagag

SEQ ID NO: 64538 - DNA, 1171 bp, Homo sapiens
atttgaaaatgactctttcagagtttggactaatacttactttttcaaatattttcaaatgtagggctttctgctgcctttttaaacctttgccatattttacttacaatacaaggttaaatgtatcatgaccatattatagaaaatgtaagatttgtaaactatattagaacaattgggaataccttatctgtggaattatggaatggaattcagtcagttggtattctagtggaaccagaatagtattaacacattcaacaaaattttgaatactatttgtatgtttggtatcttttttggatgtttattagtgaagtgaattaataaggcctttcccaaagaagtcagtcagttaatgttaatttaattatttactaaccaaggtttgtagtgatttttatgactatacaagttttatcttaaagctccactgcctctctgccttcatacttaaacatgcctatttgaccatattagacttccaaaggagcagattttataggtcacttaagaccgtgagaaaccagtcaggcttttttgagtcctgcctctgtgcaaaaagtgaaggtgagggactttctctgtctatgcagttagttcagaaatttttttttccacctttgtccagtgtccactgggacctgagccatctttccctgatgctctaacgtgtatgtgtgtatgggctttgttttaggctgatgtccggccccaaactgatggctgtaacggtctaagatataatttaacttctgatatcattgagtccatatttaggacctatccagcaggtaagaagaatcagttctttcagatggttaaaatatatggatatattctatagtatatcagtgaaaaacaaaaagcttcagattcctgatcaagtgcaataaattatgtaaagtactttttacccagtgcctgacatatggtagatactaggggctcagtaaataatgtgttgtcatcagttcactaatatgactgccattcgagtctgtctgtactactaactcagatcattcttcattctgcatccagagtgaccttcctaacccacaaattacttcccgtgcagatgccatcctaaaagtatagattccttgaccccagcctcagtgatttattatgtgtagacaaggatgagagccagtgtgtcagtcattct

SEQ ID NO: 64539 - DNA, 1562 bp, Homo sapiens
ccgctggagtgctgagctgacagtccagtggatattgagatcattattaccccacaagctaacacagtgccttggattgagagtgcacatatataaatgagcaaacaagcagactcagctctgactcctgagattcttggtatttctactaaaacttcaaaaccttattcttttggtgcaaataaggttttgtttgtaatttgtaagatttatagaggtcatacctcacctaatctctcaagttacccttcatatttataattagattataacttatagtatgtagagttgagagctttatggtctagattttgctatttgtatttcagttacctaatttgagaggttttaaaaatggaaattcagtatataatatttgtgggtttttttccacagtaaaaatgaaatatgcagaaaatgttccccacaacatgacagagaaggaattctggacacgttttttccagtcccattattttcacagggatcggctgaatacagggtcaaaggatctctttgcagaatgtgccaaaatagatgaaaaaggtaactgtttatctctgatagacactggtatttaacttgccaccctctagacattataagtgttaatttctgagacagataagacatgctgaactttttattttgttgattttctaggcctaaaaacaatggtttcattaggagtgaaaaacccactactagatttaacagctttggaagataaaccattagatgaggtaagaagcaataaaagaagttttgagagaaaagagtcttttcctagtcttcaacattgtcttaagcgtagtagacctattccacttgtgagaatgtcaaataagcaaaatactgttacttgaagtgatttatcggaagtgctttgaaatagcgttgtttgccattaaaattgcctagaagaaatgaaattcctgtgtgagttgctaaaaccttttaaaaataaatttctagctccctcatccgcagttctctagtaataataaaggcttaatgtgatgagttcagctttatgctctagctaacatttaatctaaagaaatatggataaattaataaataaggaagataacaaacatttgttgattgcttactatctgccaaaccttaagcactctcatgacccttataccatgccaaccccaatgtttcagcaagtaggccatcatgtatgacctacctacctcagcatcatgaccccagacctacagatttatctacttgcagagaaagagatggttcctgttgtgatcaaggataattttatcactgcctctgtcttctaggccagaacttgtcttcctcagttattccctttactctgagttttcattttcttgctcttatttttcttctttttctgtctctttttttttttttttttttttttttttgagaaagagtttcactctgttgcccaggctggagtgcagtggcgcaatcttggctcactgcaacctctgcctcccaagttaaagccattctcctgcctcagcctcccaagtagctggaattacaggcacgtgccaccacacccagtt

SEQ ID NO: 64540 - DNA, 1376 bp, Homo sapiens
ttagccgggcgtggtggcaggcgcctgtaatcccagcttctcaggaggctgaggcaagagaatcacttgaatgcaggaggcgaaggttgcactccagcctgagcaacagagcgggactccatctcaaaaacagagagaaattcagtttaagatgtattttgtaatgctaaaacgagttagtgctatttgttaatcttttatgtgcataatgtcacttgtttttaaatgtttgttcataaatatttaatgttcgtgagaagtaataaaagtcccatcatccagcaaattttttcagctaagcgtgtcttataataagaaaagcagaacctttttaaaaaatttttaatctattatttctcacagggctatggcatttcctctgtgccatctgcttccaattctaaatccataaaagagaatagtaatgctgccatcatcaagagatttaaccatcacagtgccatggtcctggcagctggactcagaaaacagttaagtataaatgcagaggtgcagtaactgggcttttcaggatatccagatggagttgtggtgttgttttgcttgtggtttttaacgttaacttttttttcccctttattttaagagaagcacaaaatgaacaaactagtgagcccagcaacatggatggaaattccggagatgcagactgctttcagccagcagtcaaaagggtatgggcaaaaaaatatgaaccatttggggctcaagtttctccaaatactttatgtgactgcaagtactgtatacgcttatttcctgtgactcagttcttctaactaagatgttaagcatttggcttaaagtgtatagcattacaaagagtatttccccagctttggcttgccagccaactttccattgactctagcctgttagccatttttattgttttttgtttgtttgtttgtttgttttcctcacatgtacacatacatacagattgttcttatatgtgattttgttctctgggaataaaatcttcattcaacagaggcaatatgacagaaaaaccgaagtttcatgtatatgatttttcaaagaaagtgaattggccctcatgttaaacctagcatttcagagctgaaagtgtcttctcattaaatattgaagaaatcatttgagggtgtggagaaggatggacagaattagctgcttgtgtatttattcttctcctgcaactttgccacgctattttgtacctcccttcctaattatgataaagctttcttagagagcagtcaggcaatgtgtattaaatgtttaaagctttacacccttagttctacttgtggacatttatttcttaagaaagatgtatactaagatttagatagaaatattcattacagtat

SEQ ID NO: 64541 - DNA, 1481 bp, Homo sapiens
caagtagctgggattacaggcacctgccgaggagaggatttttttataattaaaacaaaacaaaacaaaaaaacaccaaactggaagataaagtatttacaacatgtaaaagactgtttccttaatatttaaaagtcttattttttaaaaagtacccaatataaaaatagtggagagcataacagatcattcatttggggaaaaaataataaaatgtaaactttcacctaccagattggcaaaagtaaaaagttcaataatacttcatgtggtcagagtgtaagaaaactagtattcttaagtagttgttgagaaaattggttcagccatttgtaggacagtcatctctaggaagagaagctcatggtgggaagacttcattttttaccctctgtacagttttgttttttcagtcatgtttattgtgtaagagaaagttgtgacaaaataaaaagtactgtgttaataattataggcgaaattacaagagtccattgaatatgaagacttggggaaaaataattctgtaaaaacgattgcactaaacctcaagaagtcagataggtaagtttggtcaatattaagcagaatagctatgtaacaattcagtccaaaatatatcctacaagtatagcactcatgttttaatcagttcgtcaccatcaaagtacaatatccttttctgtttaaaatttaggcttctcaggaagcaaaaatgatcaaacccatgacaataaatgtggatctttctgctgttgctttcttattgcccttatgggaattaaattattttattgaaatctctttacttatcgtttcttgccttgaggggaacttagtactgactgctaaaatgttgcaaagacaaatgttgagcatctttactgtgtgtgattagtaatttcttctgtgctaacctgcaggtattatcatggtccaactccaatccagtcactacagtatgcaacaagtcaggacattattaattcttttcaaagtattagacaagaaatggaagcttatacacccaagttaactcaggtaggtgacttctactgtttgaaggccagaattcccatagttccttcctcagtttatgagcacaagcagattgaaccatacaactaatattttaattgggcttaaagacatagttctgctaaataaattgaaaaaatcaagaggtagcaagaaaaggtgtttggcatattcaagaggcatctgaagataagatgataatgaaaaaaaataagttgatgaattttgtgatttttacttccatatacttttattgggaaaatctcccaggtttccaaattctgtctggacattattctctgaatattctgcatgactcaggcttaaaatatgtaaaacagctcatcattgttctttgtttctcttcgtacttcagttgatcagcaatttgtcagttctgccttcaataatacttcttgattctatcacccttatttaggcaa

SEQ ID NO: 64542 - DNA, 1007 bp, Homo sapiens
agcaagctgggaggagtgctgaacttttattggtttttccttggaataatcctgggatttctattttgtagatttgtttttatacattcagattctgaaacacatctagacaagatcttaggtttcagaaccgtcttactattacaaatagtggtacattgctagtttctctaatatcatagtaaaagctcctttcttctcccctacctcttagaataaaggggaaacctgaaagtttctttgaaatcccaagagcttttaaattttatgatctctcagccacaaaattactaacttatctgaaaatagcacatcctggtttggcattgacaaagagtacacattcaaatttattctctgagtggtcatttttttcgagactgtatatgttaaaatagctcttaacctatgggccttgttcttcttttgcagagatggtgccaaatgatattcaatctgaattgaaacacttatatgtagctgttggagaacttctacgacatttctggtcctgctttcctgttaatacgccattcctagaagaaaaggttagaaccagttctgaagacagccagataattgtggtagtgacttacaagaagttttgaaattggaaagttttattgagtcttaccatgtgacagacactgggataactcttttgcatacatcgtttcatgtaaacctcacagcatctttatggagtagctattggtacccattttatagatttggaaactgagatccagacgagttccataactaataatcatacaacttaaaacttgtatctacctccaagccactgtgaatagagacccaaaacaaattacatcaataaagttatttatatttgatacgtttttcagggataacaaaatccaaaataagaactgacaacaaatatagcactagctttttaacactaaaaccgctttaaccaattaaaggacagttgacaaatgaaaaatgtaacattaatagtaatactataaattgctttcata

SEQ ID NO: 64543 - DNA, 1318 bp, Homo sapiens
ggaactcccttccccctgccaggctagaaaccttacaaggctgtctagaaatagcagtgatttgtaaggagagacccggctccagcttggtgactctgggctgactgcctgcctagaggtcctctcggatttttgccctttggagtggtgtcaaaactagacgtgatactttggggatgcagcctgtgatatttcctccagcgaatgcagtgcagggttggattaacaaggtggaaagaattcgagggttccaccaagtagctattaactctagggctgcaggcctcaggccttctgcagctatttctacactccctgtactgaaactatttcttcatactgggcctgacaggcctttgcaacaaggatcacggccgaagccacaccgtgcgcctccctcccggttggttaacaggccctggtttctagtattgcgatttaaagtctggcgctggctgcgcgccagacctgggaggctgccagctaggcttcacgttgctggcgtctgcttcggggcattcattaggtctgaagtctgaatcccagctccctccctctcacccactgagctgcatagctccagattgcctctgcttacgggcggggcttctcagccttctgccttctggcccgatgcccgcttcccaacggccggaggccgctagactaatcggcttcgccctgcgcgctgtaatgcgcatgcgcacgcgcacaagttcctgggcccgcccatcttccggacttgggcggggcgtaaaagccgggcgttcggaggacccagcaattagtctgatttccgcccacctttccgagcgggaaggagagccacaaagcgcgcatgcgcgcggatcaccgcaggctcctgtgccttgggcttgagctttgtggcagttaatggcttttctgcacgtatctctggtgtttacttgagaagcctggctgtgtccttgctgtaggagccggagtagctcagagtgatcttgtctgaggaaaggccagccccacttggggttaataaaccgcgatgggtgaaccctcaggaggctatacttacacccaaacgtcgatattccttttccacgctaaggtatgggccttcactcttcacagaccctgtcattaggcctttcaactctcttttggcaaccattaggttttttcccctccctttttagtcatctctagtgatttatagtggcaaatacccccaaaggaagtaaaatagcttaaaaaaatctcttggttaataaacattaaagaagctgtagtgacactaaatgtttttcctcctatagattccttttggttccaagtccaa

SEQ ID NO: 64544 - DNA, 1108 bp, Homo sapiens
tttaactctcttgtgccatagggtatctagaagcaaaatatgtttgttaagtgtaaagctgtctctgcttaaaaacaagtccccctaccaccaccaccacacacacacacacacacacacacacacacacacacacacacacacacacacgaaattgcctgttcctgggctgataggacaccagttaagtagaaacaggagtatggaagagtgtgaacgttgagcttggggatcaaaaatttgaggatatgtaagaaattaataggagaatcaaataataaacttgatttcctccagctctccctaattgtagttacataaagttacaacttgactaaaactacaaggaagatgttgacatgctcttcctccatttaagaagccataatgataaaactctaagaacaagaaaggtttgtggagcatttatggaacaaatttttgctgcctaggtaaaatttattctaaaggccttaatctggtcattattccccttttctctagactataatgtaactgcaaactccaagctggtcattatcacggctggggcacgtcagcaagagggagaaagccgtcttaatttggtccagcgtaacgtgaacatctttaaattcatcattcctaatgttgtaaaatacagcccgaactgcaagttgcttattgtttcaaatccaggtgaggcttttgactgcataaaaattgacaagctatagtaaaactgatagtatatgatatatatattatatatattttaaatattttgaaatattttaaaaaatacatttttaaaaatattttcgaatattattttaaaatatatatatatattttgaggcggagttttgctcttgtcgcccaggttggagtgcagtggcgcaatctgggctcactgcaacctctgcctcatgggttcaagcgattcttttgcctcagcctctcaagtagctgggattataagcgcctgccaccacacatggctaattttttatatttttagtagagacagggtttcaccatgttggccaggctggttttgaactcctggcctcaagcagtccatctgcctcccaaagtgctaggattacaggcgtgagccaccgtgccc

SEQ ID NO: 64545 - DNA, 1901 bp, Homo sapiens
ctcaggtgatccttcttcctcagcctcttaagtagctaggactacaggcgtgcaccaatatgcctggctagtttgttaaaagtttttttgtagagatggggttttgctatgttgcccaggctggtcttgaactgctggcctcaggcagtcctcccacctcagcctcccaaagtgttgggataacaggtgtgagttgtcatgcccagccaaaactactttttgaataattaatggacttgatatacatagtgtagaggcttaaaaatattaacaaaattattggttagccatgatcaatatcaagatcctgaaaagccatatatctggagtagcctattattatctaatgatcacctagtatctggttaagtgttttcttcatagtaggtatatcttttttgtgtgtagggagaggataatgggtgatttttattttctcctttttcatagtggatatcttgacctacgtggcttggaagataagtggttttcccaaaaaccgtgttattggaagcggttgcaatctggattcagcccgattccgttacctaatgggggaaaggctgggagttcacccattaagctgtcatgggtgggtccttggggaacatggagattccagtggtaagcataagttattttctttttgtttttgaaaagattatataaaaagtcgatgggcattatattattcaattagagcctaatcaaatatccattcagtaggatggaatggtttcccgaaatctagcattttgtataattatatgttaagaattgttaagattgttgccattttatatggcattttatggcgagggggacgggaaatgaaatttctcttcttaccatggatatcttaagactgtagttcttaggatgtcttcagtcatttaatatcacagctgtttatacctgacttgtactgcctggccctgaaaagatgagcaaatccaaatgcacaaaagttatattatcacagttgaaaaatgttatgattaggttctgtatgctaagaaaaccccccttatgttctcatactatctttatatttcaaatatacatgggttaaacatttcaattggctagagaaacaggttagaatacagttaaaattcttagttttacataatgtaagtaaatgaaaatctaatctaaaagtgagtaatgactacattagtagtcttgaccatctaccaaaattgagtattcttcctccgaagataagagaattaggaaaatgaatcacaattactaatctgttggtacatgaaaataaatgtagtctgtactatttcttttagtgcctgtatggagtggaatgaatgttgctggtgtctctctgaagactctgcacccagatttagggactgataaagataaggaacagtggaaagaggttcacaagcaggtggttgagaggtaataaatctttcaatttggcaacacagaatattaacatttactatttttatttaaaaggttaaaattgtaatagtatttgcatttgagaactttttgttagaaaacttgtgtggtttttttgttttgttttgtttgagacagaatcttgccctttcgcacaggctgcagtgcagtggcgcaatcttggctcactgcaacctctgcctcccgggttcaggcgattctcctgcctcagcctcctgggtacctgggactacaggcatatgccatgacgcccggctaattttttgtatttttagtagagatggggtttcaccatgttagccaaaaaaaaaagaatgtgcctcaccttgcaaggcccaggccctaggatcacttgagctcaggagttcaaggccagcctgggcaacagggcaaaaccctgtctctacaataaatacacaaattagccaggcatggtggtgagcacctgtggt

SEQ ID NO: 64546 - DNA, 1284 bp, Homo sapiens
tgctctttcccccagctatccctctgtccccctcacgctcccacttgagataatcctgagttaaggatgctatgttatcttggatttctttttaaaattcaatattatatttttaagaattatccaattttttttacaagtagctatagtttattttttgatagctgtgtaatattccattgtatcagtataccatgatttatccattcttctgttggaggacattggaaagattgtcatgtttttgctgttactaacagtactgttaatgaatatccctgtacataatatcctagcatacatgtgtgcaagggttattcttggtataatgcaacattgtggcattatttactgtaaaatgtgtattaatgaaaactttgtttttctttctttctcccaccctgctttttctgcctttacctatggtttcctatcatacagtgcttatgaggtgatcaaactcaaaggctacacatcctgggctattggactctctgtagcagatttggcagagagtataatgaagaatcttaggcgggtgcacccagtttccaccatgattaaggtaggtctatgtagtgatacgctgcatttgaatgctttttgctggctttttaaaaaagattcttctgagaaagattaatacaagtcttccattactgacttaagtgaaataaattaatgtacccacagcttaccttttttgaaagaaatggttgagctttaggattaatgtccattaggcctgttcaacacatagatacttgataatttgactacaaaaaagtcttgttcaattatgctgaggtaggtggaagactataaaagaaataaactatttctccattggggaaaatagaaattatattcaagttagcattatgttactatttttaatgactttcttttatactattaattaaatcataactgaacacctggaaaggaatttctacttatcaaagttttttatttttttgagacagtctccctctgtcacccaggctgcagtgcagtggccgatctcggctcaccgcaacctctgcctcccaggtttaagcgattcttctgcctcagcctcctaagtagctgggactacaggtgcgtgccaccacgcccggctactttttgtatttttagtagagatggagtttcaccatattggctaggctggtctcgaactcctgaccttgtgatccacccgcctcggcctccccgaatgctgggattgcaggtgtgagccaccgcacctggcctcaagttgtattttaaaatcttcataat

SEQ ID NO: 64547 - DNA, 1241 bp, Homo sapiens
cgacagagcgagactctgcctcaaaaaaaaattaaaaaaaaaaagctttataattatagagactgtaagtcttgggaaacctgggaatgcatagacaaaatgtgagattttttttttttcatttcatcttcagggtctttacggaataaaggatgatgtcttccttagtgttccttgcattttgggacagaatggaatctcagaccttgtgaaggtgactctgacttctgaggaagaggcccgtttgaagaagagtgcagatacactttgggggatccaaaaggagctgcaattttaaagtcttctgatgtcatatcatttcactgtctaggctacaacaggattctaggtggaggttgtgcatgttgtcctttttatctgatctgtgattaaagcagtaatattttaagatggactgggaaaaacatcaactcctgaagttagaaataagaatggtttgtaaaatccacagctatatcctgatgctggatggtattaatcttgtgtagtcttcaactggttagtgtgaaatagttctgccacctctgacgcaccactgccaatgctgtacgtactgcatttgccccttgagccaggtggatgtttaccgtgtgttatataacttcctggctccttcactgaacatgcctagtccaacattttttcccagtgagtcacatcctgggatccagtgtataaatccaatatcatgtcttgtgcataattcttccaaaggatcttattttgtgaactatatcagtagtgtacattaccatataatgtaaaaagatctacatacaaacaatgcaaccaactatccaagtgttataccaactaaaacccccaataaaccttgaacagtgactactttggttaattcattatattaagatataaagtcataaagctgctagttattatattaatttggaaatattaggctattcttgggcaaccctgcaacgattttttctaacagggatattattgactaatagcagaggatgtaatagtcaactgagttgtattggtaccacttccattgtaagtcccaaagtattatatatttgataataatgctaatcataattggaaagtaacattctatatgtaaatgtaaaatttatttgccaactgaatataggcaatgatagtgtgtcactatagggaacacagatttttgagatcttgtcctctggaagctggtaacaattaaaaacaatcttaaggcagggtgcagt

SEQ ID NO: 64548 - DNA, 1089 bp, Homo sapiens
tttttggaaacggagtctcgctctgtcacccaggttggagtgtcgtggtgtgatcttggctcactgcctccatgttcaagtgattctcctgcctcagtctcccttgtagctgggactacaggcatccgccactgtgcctggctaatttttgtatttttagtagagatggggttttgccatgttggccagtctggtcctgaactcctaacctcatttgatggacccacctcgacctcccaaagtgctgggattacaggggtgagccactgcacatgacttacgtttttttttttttttttattattaaaaaaaatgtacaagggaaacttagtgctaatttcctgaaattaaaaagtagtctaggcatactagaagatttaagggaacccactctttggtaaacatagtgtggtgattgaagtgaacaggaagtatacttaaatgccagatgttttctttcataatcgattgtttattctaatctttcctcagattacctggtcactgcaaactccaatctagtgattatcacagcaggtgcacgccagaaaaaaggagaaacacgccttgatttagtccagcgaaatgtatccatctttaaattaatgattcccaatattacccagtacagtcctcactgcaaactgcttattgttactaatccaggtcagctttgttgttttaaattttcaacttttagattcgggggtacactgtgtaggttcattacatgagtatactgtgtgatgctgaggtttggggtaggattgatcctgccacccaggtactgagcaaagtacctaatagtttttcagcccttgctgctctcactccctccctctctagtagtctccagtgtcatttgttcccatctttatgtccatgtgcacccacatgtttagctcccacttatagtgagaacatgtatttggttttctgttcctgcattaattagcttggaataatgatctccagctgcatccatgttgctgcaaaggacatgattttgttttttatggctgcataggacagctttattttcactgttcagtgaaggagtttttgggggtgggtttagtaactttgagg

SEQ ID NO: 64549 - DNA, 3624 bp, Homo sapiens
ttggtagggacatagcctctgtctcattgagaaaataactaattgtagctaattgtttgggctatgaatagggaaactgggtttaacatggattaatagtaatctcttgtagggcaagtatttctgaatcaactcagatttttacattatttctcatgaaactggtaacataatttttttctttcctcacattttgaaagtgtcggttcatattgcccccttttctgaaggttcctgtgagacaaatagaaggaacttgggaagtaagcaagtgttttttgcctctgtttcctgcaggtcccagtagggatggcacaatcagcgaggacaccatccgagcctctctcatctctgcggtcagtgacaaactgagatggcggatgaaggaggaaatggatcgtgcccaggcagagctcaatgccttgaaacgaacagaagaagacctgaaaaagggtcaccagaaactggaagagatggttacccgtttagatcaagaagtagtaagtgactcattaaagacttaaaatttttggattgaattgtagccatggcagagtgttctatatgttccctggatgttgtgggcatagtaggagttcagaaaattataggcatctttaaacatttgaatgtaattttttatacctttgtttacagtggagcctatgtttggcatttggtcttagattgggaggggtataatatttagaccattttgtttgcaccttgtattagttcgttttcacactgctgataaagacatatccgagacttgagagaaaaagaggtttaattggacttacagttccacatggctggggagacctcagaatcatggtgggaggcaaaaggcactccttttttttttttttttttttgagagtttcactcttgcgctcaggctggagtgaagtggtgcaatcttggctcactgcaacctccaccctccaggttcaagcgattctcctgactcagcctcctgagtagctgggattacaggtgcctgccaccatgcttggctaatttttgtattttttagtagagacggggtatcaccatgttggccaggctcgtcccgaactcctgatctcaggtgatccacccaccttggcctcccaaagtgttgggattacaggagtgagccactgtgcccagccaaaaggcacttcttacatggtggtggcaagaggaaatgaggaggaagcaaaagctggaacccctgataaacccatcagatcttgtgagacttactatcacgagaatagaaagaccggctcccatgattcaattaccacccctgcgtgccatccctccccaccccctgctacacacacacacacacgcacacaggtccctttctgtgagatacaattcaagttgagatttgggtggggacacagccaaaccttatcacacctttgccctaggaaatgttttaggcaaaggatgttttaacccaaaggaggactgtttgagtgcttgatgttgccagttactaggaaataagtttagagagttctaagccatgataaagatctgcacatcttaggagcagacttaaaaggacagtactattttattgtttccaaaggttgtgtgagccattttttaaaagtatgttcagggaactttctcaataatccagagatacttggttggctaaagagctacatataaacatagcatatgcaaccttcagctctttaagctttctcataacagacagctatgccttggacagtccgtgtgtaagtcagccctatggctttgcttaatgatgataaagtggaagcatcagcataattgaagtgccaatttcacgctccattttcatccccatgagggagaatttattccagtaaatgtgtgtttttgatggaatagtaaagaattcttagaaggttgagggctttgtggaaagtgatttgtatgtacccattagccttacaaagtggttctagattgtaaaatgagcctcgaagtagccaatttttagaattcaggaaagtgacaccaatacaactcagagcctacaaccagcacctgcgtgtgatactttgtgattagaatgcagacatttgggcctctatgcattgaatcctcttcatagactgaggaaagttactctcctatggcaggtgcccatttgttgggaagaaaaacctcttatgattttctatgtaaaggaaccttctgctggaaagtatcttgtctgatggcttagtttgcagtatcatttgtcgctgacaggtgacaagcttgttactgtcactgaaagtgctgtcacctcaggatatctccatcattactctatttcactcagcatagtagatcacatcttttcctctacctttgaccagggtgttatttgaaacattattctcatccatgagttgtttaaacatggttgttagcctgtcttttcctgtgaagtgttgtaggtgtctgacaagtggataattatgtacagttattaatgcttggactgttctgttttcaggccgaggttgataaaaacatagaacttttgaaaaagaaggatgaagaactcagttctgctctggaaaaaatggaaaatcagtctgaaaacaatgatatcgatgaagttatcattcccacagctcccttatacaaacagatcctgaatctgtatgcagaagaaaacgctattgaagacactatcttttacttgggagaagccttgagaaggggcgtgatagacctggatgtcttcctgaaggtatttcttcattttacgttccaagattttttaacttgggttgtagaggcactgaccttgcaaaccacaaaccaagagagtttctttgtagtatggattaagattctttatcttcccaaaaaacactaaatgagatgtagggttttgcaccatctttttacctacagagtactgaggattggtctgagcaggggaagagaagtgggctggtggctgcagttctctgcccacaggcagcattaagatgagtgtaactcttctgtgcctgggtggatcaggaggtacgatcagatttccattggttctttgaggtcataccacctaaattgagatcactgattgtgccacctccattttttatctgttaattttcttagagttatataactttagaccagttttcccacatcaaagtatcaggctgccctttcaagccctcttgtatgaaagttgtctcaagcttaatgctgttgtacagaggaaaatctagtaagcgaagtttggctactgctgtctcttgggtcatggagaacatggttttagggataatagcagccacccttgggatatctgatccagctgtagctggagcctggtcaggtcatgtgctgatcttgcctatctcctctcactgtgggggaatggccaaaccatgtgcctcagaagtggtacaaccacatgaatggctggatataaaccagagacccaagagaggactctttttctgtacaatctcttgcttgagtggcatggcttaggaaaagaaagtgtaggtcaaactcctgagccagatcctgcaatgtaatgctttccctgttgagtaagcctttataatatgcagcttaaaagccacatataatgaggtattcattccaaaggttggc

SEQ ID NO: 64550 - DNA, 1033 bp, Homo sapiens
gcaaagtctaactccctgttgtgaaaagcacatttcacttgtgaattttggactactctttcttcttagaggaaaacctataataatgtactataatcttaaacttgaagtaaatgacttaacatataaatgaaccttctaccagggcatgaaaataaatctgattaactcatcaatctttcttttgatcacatagttttatttgtgagccaaacatgtgttgaactattagcagatacatagattttcctagcttggttatatgtgaaaacagatcaccatcattaagagaagaaagtaaaatgggttaatatgagcaggtcaaatcagacaaatgattgaagaccagtagtttttgctttttgtgtttgcttattagcgttacctgaaatataattttcttcaactaaaaaaactaaggcagtgagagaatttctttagactccagccttcacctatgcctatctcccactacctgcaccaccatatctgccttctccctgttaccataagttggttatctttgcttctatctaaagctgatttctccactagaccttatcccctctaatgtactcaggggcatcacttcagcagttccttcctctcaagttttgttctctactggatgactcatcagcacagagaaccatgccctaaaaaagccttaaagagtccaattgagacaaacaaatggaaagacatttcatgcccatgaagaattaatattgtaaaaatgactatattacccaaagcagtctgtagattcagtgcagtctgtgtcgaaataccaatgtcagtttccatagaaatagaaaaagctatcataaaatgtatatggaaccaaaaaagaagccaaatagccaaagtgatcttgaactaaaagaacaaagctggaagcatcatactacctgacttcaaaatatattacaaggttatagtaaccgaaacagcatggtattggtataaaaacagaaacagaccaatggaacagaataaagaacctagaaataaatctacatatttacagcca

SEQ ID NO: 64551 - DNA, 1002 bp, Homo sapiens
ctagtttttaacagtctggataatgtaagttttgtataggacttctcatagtagtttgaagtctcttgaagtctttaaaccaacaaaatcagctgtgctaattggccaacatagttataaaagaaatatcaaaagatttattagatataataaagaagttactttctaagaagttaaccttggaccgaagaaggccagaattaccttcctctaaatttgaaattgaacttgctcttaggtaatagacttcttgagaactttaaaagctgaccaggttgacctgtttgccagttcttttggtagggattgtcataagtattgtaattcatgtttaatgatttcaggattatgaaagggagaggtatttgttttgttttggtgctgagatttggattttttaactgtgaaattttgctgtgtattgacagtgtgatgtatatcttattcagtagcctacatattcaggccttgtatattatttttacaatgtgaaaaaaattgtttttagcttcctacatgccaggcatgccaggtggaatctctccatacccatccggataccctcccaatcccaggtaatgaaaaacgttcttttgaataattgtattacaaattcttctattagatctagaatcaaaataatttgctaattagggcattaaaataaatttaattgcaatttagtggaagataaaacttggtttattcctggaatttatttatttatttatttattttttttgagatggagtcttgctctgtcacccaggctggagtacagtggcgcaatctcggctcactgcaacctctacttccccagttcaagtgattctcctgcctcagcctccctagcagttgggactacaggctgtgccaccattcccggctaatttttgtatttttagtagagacaggatttcaccatgttggccaggctggtctcaaactcctgaccttgtgatctgcctgcctcagactcccaaagcgctgggattacaggtg

SEQ ID NO: 64552 - DNA, 1047 bp, Homo sapiens
aaaaccacttaactctattaaaataaattaattaaatgaaattttcatgattggggtcctacaaagaaaattatcaagctgagttgaaaaccgatgagaaatggctaacctttttctttttactgaaaagcaactctgtagctgacttgaattttttttcattttgtagccacagtcagacttgttggggcttattcaggtcatgattgtggtatttggagatgaacctccagtcttctctcgtcctatttcggcatcctatccgccataccaggcaacggggccaccaaatagtaagtagaattgagattttactttaaaactcatataaacaaaagagaacagaaacctttgtaaaaaaataaagaaaaataatgacttctttgctttttagtttatcaagctagtggattttttggaagtattctgaggccccacatctgcatgtacagattcccaccaaagactggcatttgggcttccatttgtaggtagaaatctaagaatggttgtgctggattccaaaatggaggagaaagtgtagaatagagctagaatttttaaaattatgcatgctgcagaatagccttatttgatcagcttggaagcacatataacttgaaaggtagtctgacctctcctttctctttgcaactacaaaatcagtgttgtagataaggattaaggtcaactgaagcgttcacattcagctattctgggtatacacaattggacatctagctcttagctttcttctctttcgtacagccaattcatgattttaccttgtgtggagtggtgggagcatggagagagtgttgcttctcccctaattggaatatattatctctgttatctctattttcttgaataattcttactgatacttaaaaatcactctgaataattgtgagttggttgtacttattttgaatttactaaatctgcattgatttcactgtgttttgagctgtgacttttttttttttggtaaattttctttaagattataattaaccaaacttgtttatcttacaagacaaatta

SEQ ID NO: 64553 - DNA, 1109 bp, Homo sapiens
gctggggacaagtagaatggggggtgattgctaaagggtatggatttctttttagggatggtgaaaatgttctgaagttgattatggtggtggttacacaactccaaatgtactaaaaaccattgaactatactctttaaatgtgtgaattatatggtatgtgaattatatctttaaaaagctattaatggtgagttaaataatataaattattgagacgttttaaccaatgcaatgtgtggactttatttggatcctgattcaaactgagaacataaaaaacatgacttgagactatagatatttactgatgttaagaaaatagtgattattttagtgtgataatagtattatgggttttttaggttctttcaggctttcattaatgttaacaattagtggaagagattttaagaaaattcatccagctgtaaaatatatgcattggttttaaactaaattcttatgcgattttgcttttcagtacaaatacagagacctaactgtacgtgaaactgtcaatgttattactctatacaaagatctcaaacctgttttggattcatatggtgagtttatgcagtaaaaatagcaatttctatactttgagtttactctctttgttaatgattgtaattttttccatttgaggtttgtggatttttcaattgtgggattgcaccaccgcctaataaaactgttggagggtagcaaattagaagatctaataaaaacatttcatatttctttagttttagttttttatgttaaaaaaaaatactgtacctggatgtggtggctcatttctgtaatcccagcactttgggaggctgaggtgggtggaccactgagcccaggaggttgagaccagcctgggcaatatggtgaaacctcgtctcaacaaaaaaatacttaaagttggcctggtgctcctgtagtcccagctacccaggaggctgaggtggaaggattgcttgagtccaggaggcagtccaggaggcagaggttgcagtgagccgagatcgggccactgcactccagcctgggcaacagagcaagaacctgtctcaaaaaaataaaaaacaaaacctctaacatagaactatgca

SEQ ID NO: 64554 - DNA, 1029 bp, Homo sapiens
gtagatctgaggcaatcctctactcctgtcccaatctagggatcctccagtcttagcctttcttttgccgacccgcagagagtgtggccttttcagttttgtattctccagaaaagaagcgaaaataccagtcccttactgccccaggtgaaatacataccattaccatttcagggattttctaagagtaactacttttaagtgtatgcttcttataacgcgtatttatttgctttgagcttaatttatgatcttcacggctcaagactagtgttttttttttcaatttttaaaaaagcagttaagcattttgtattttaaagccatgatttatttatataattacttcaaacgtggcacctcacaccagagtggaatggcttttgttatgttttgttgtaattttccaaaactatgtaaaatgattgagagttgagtcttgaccagttcaacgtgttagcttgggatagttttgtcaaagcaagaatggtagcaatcagcggtttaagcggtttcaatttttaataaaacacactattatgtgtaaaacttttttaaaaacagactttttccagttaaatcgcccccatagttcttgattgaagaccaaataatctctaaggagaaaatgacagctttcaaaataaagcatatattggttgtgtaatcgtatattttaggcttcttggttttgttttgataaacttgttatccttagttatagaagacatatgggaagccatagaagattgtgacccaggtaaagatccatgttgtaacttttatatatcactttttgaaaaaaacggtatattgttttacatagtatgtaactgaagagtatctgttccatgactcttttttttttttttttttttttagagtcttgctctgtcacccaggctggagtgcagtggcacgatcttggctcactgcaatctccgcctcccaggttcaagcgattctcctgccttagcctcccaagtagctggggattacaggtgcccaccacttcacacagctgattgt

SEQ ID NO: 64555 - DNA, 1048 bp, Homo sapiens
tgaggaatagttgatatacaataaatattgaatgagtaagaatgtttgaaatatggttgtattaatttcttaagtctcataaagagaaaatacaggctgatgtgatgtgataaatataccacttaccctaacctagtatatctgggtgaaggaaaaaaacaatctaatagaagttaattgtgagctcttcagaggaacaatttaaaacctaccaaaaagcagtttgtatttgattaaatgaccttttatcccaaatgtaggaatttattttcagaaacatttattggccacctgctttgctcaataaacactgtgttgattgctgttagaactatatagatgtgtaagaacctgaccctgtctttaggaaactttgagtctaatactggaaatgactggaaggctgtactctgagagaggtccaagggaagtaggataaaaccacagggaagagatgtggtaattctgtcttgaggtctcaaattggaactagaaatagagagatgtaggtgcatgcaaattgagatcacataaatgtagtattatgtaatatttgacacacataatgccagtgttaaaacataactgagcacgtatgaatccatactcaatcaagaacattactgatactgaagttaactatgtagttctccccagtctatctccctgtctgccttctagaagtaccatctgatcactttttattctgtcttctactcttcttgaagagctagttatatccatggataggtatatttaccttggtcctggtatcagaaatggattagaagctccctctgctggtttcatgtatagataccaactgtttagacttttgcataagtgataccatcacagtaactgcaattataattattttttattgtacctactatgtgtattaaatattttgcatatctcatttaaattttataaacactctgtgaaggaggtagtggttttccagatttatgtatgaggaaacttaaggctcaatgagataagtaatttgcccaaggttacatatctgtgaagggcagaactgaga

SEQ ID NO: 64556 - DNA, 1078 bp, Homo sapiens
tctctacaaaaagataaaaaattagccaggcacggtagtgcatgcctgtagtcccagttactcaggagactgagtgggaggatcacttgagcccgggaggtcaaggctgcagtgagccatgatcgcagcactgcattcaagcctgggtgacagggtgaaaccccatcgctaaaaaaagaagtacattattattagttacaaccaaaattgccagtggtcatggcattcacatatatctgaggactccagaattgtgggcttaattggctttgttccacatttgagtgtgccttctgtataacaggccctatattgtgaataaattcctcatatgtgtcattctcgttgtaattacttttctgtaagtttaaggttagacaagaccgcttagtaggattttatatttttaaattgaatttcagagttcaggatcaatttaaaaatttaattttccagaaagaaacatttaaataaaccttaaagcatatatagaactctttcctttactcttcccacccttcaaccttgcttacctttcccaagttcagaccttctccctagatacatgccttctgtctgcttctttttaaacagagttttcactcattgtttatccctatggcctttttctccagccacttgctctttcccacagaaggcattcagtttcctgtattggaaagctccttttcctatttcaaaagaatgctttccctatttaacttgagaatctcttcccttactcttttattgtttctctcttgctataaagccaggttggtcagtgatttaagtgctgttcaccctgattttgttcatttaagtatatgagtaaaataaagataatagtatactattagagtaagtgccaaagtgagtactatacacttacagtgcttagatacttatgagtgagcatttaacatgggctgaaatgactagagaaaattctataaaggccatctggagtttgaactggagtttggacgaatgaataggattttaatagatagtgaacaataggaaaaacactccaggaatgggaaatcagaattaggcaaaagcacgaagttaagta

SEQ ID NO: 64557 - DNA, 2883 bp, Homo sapiens
gtaatagtttataaaataaggaagtaacatgtgaggctctcccctcctcccctcccccatcataaagatattttgaaatcccaaggtgccctcatacctcttgacattaatgacttcattttttagcttgaatttgttagcaaatattaatggcagaaaaccaaaaactaaatttatggtatcgagagcaccaccttctctttttgcccatattgcactttgatttcaaactatgcactgtgaagagatttttttccccaggtaggaagggatgttccctgttatcgttattttactgagctgtggaaactcatttttaccctttttaaagtcataaatatggacttaatagcccttaaccttcaagtccaagcagttccaatcaggctgacttaggatcatgctggaaggaagccaagtctcaagaactgtcagcaacagaaaatgagatatgatgctagagagcatttgtccttgactgtaagtacagaggcttaggggaagtgagacataagcttgtaggaataataaacgttctacaataaacgttttggctatcttaagccattgtatgggggggattaggaagtaggagggattgtcctacaacaggcccttatacttcaacagcccaaatattttggtttattcctttttatccataaagtctttattcttcaagtttgggtattatagattaccattgttagcctcccttaatgggaccatatgagccaggcttttaagacggactcattttgaattgagtttcaaactttgaaagtgcaaggatttaatttttaagttgaatcccatgaaaggtgtcatcatcactaggaataacaccctttgtaactacatatagaactgttacaatggtagcagaaaatcctattgatttcatctcacccatttcagataccttcagtgaaattaagggtagtgtgatgtcccatgtaataaaacaggcttagaacatcaattcctctgctgccatttatgtgcttttattcccccttcaaaaattttttattggatatatatatttttcagtattcagactctgaaatctgtcattacaatcaagtgcttgtcacagctgaaagatttctggtggcttaaagtttactagcagtaaatttatgatatggtacagttctttgtacagaaaggcaccattatgttagaataaatttccagaacttagtgggaagaatcaggttttaaccttgtgtgtctgttacttctgagtgcatttctataatataaatgttgatttgcgtcaacattataaaagagcacttctgtggctcatttaaaagaaaaaaaaggttaagtcttttaaattttggccttgtttccaaatcctgtcttccatgttgtttttctgcacttcctgaccactcttataaaaagctcacaaacctttgaagaaactggagtaggctgttatttcattaaggtttacaaattaaatgcttgatttttaatgtattctctactgttttgatttttggattttcttaattcaacatttgaagatgtgccttttgggtaatgttaatcacgaatgtagtaatatttcatgattgtaataatgttacatgatcatgggtgtggcattctctaacaaatgatgtgaaaggaaagtagttttcataaaactcatggctctgattgcacagtcccacttgcttttgatattgctatgtcaaagcaaagggcacttcttttaaggctactttcagaactttgtattttcgctaaactataaatgcagttgtgtccagttggaggccagggtaccacatgtcacaggcggccttacatgtgtgccgtgaaaaggttcaaagaccgttaacaaaaaagtaagtctggccgggcatggtggctcaagcctgtaatcccagcactttgggaggccgaggcgggcggatcacttgagaccaggagttcgagaccagcctggccaacatggtgtgagaccccgtctctactaaaaataaaaaaattagccgggtgcggtggcacacacctgtaatcccagctaccggggaggctgaggcaggagaatcgctagaacctgggaggcggaggttgcagtcagccaagatagcaccactgcactccaggctgggtgacagagcgagactccatgtcaaaaaaaaaagaatgtgggaactcaaattttcatttttaatgtaatccccaagattttctccaagaaataaattgttgttttgtattttgtaacttaaaagcagctattggtaaatttctgagatatagcaggagaccaaaacatgtttggaaagagaataaatatatgaagagagactggttgttttattttcaatgtattgaatatattagactactatttattttctgagtggatgtgattaaatattcagacgtttagtgtatgattaagagtgagatagagatttctttggagtaattaaatccatcctgtcttttacacaatggacaaatcaagttaaaaaaatttttagatagcttagcttgttttctggtgctgttgacctgcaagagaatatacttttgcatatacaggtgaaagttttgcaatttatgtatacaagaaattgtaggcattaaaaatattttattgatatttttgctggtttgcatttattgattaaaactttgagatattctttatctcatcaccctgaacatttttccagctagaaacctcggtatactcatcacacttcagagatatggtttgcctattgcacacactcctctgcttattctcccttacacattcatgtctgctctaacatgatagagcttctctccccctaccagcttagagaactgttctgctctctgacccatgttgggagaactgtt

SEQ ID NO: 64558 - DNA, 1104 bp, Homo sapiens
gacctcaggtgatccgcctggctcggcttcctaaagtgctgggattacaggtgtgagccactgtgcccggccataatgttattataggtaaataattcacttcagtctcaagccagaatactatatctttttctccctcttgcccataaaatttcaaactaaagtgttggaagagaacaagaatagaatgttagttaatgaataaatgcttcttgctgtttatttttaaaagctattgagataaacctatattttattattttaatggaaatagtaaggtttttgtggtgtgtgagttctttttcccacgacaatttgagtctgtggcccctggtaaaaaaatatccctgctagtttgttttcagtggtaaagccttgaggcattttgagagcatcagcacaatccatgtgagctcccagttggaattttcattctttttaaggaaagtggtcatctcatgtatattgacaaataccctttaaaaattctttggcagcttaagactgggtatgcaagaggacttagaggaaatgagacgtgaagaagaagaaatgcaacgtcgaagggccaagaagctgaagaggcgttagctgctgcttttatttttgtgaaattctagagctgctctgctgcaaggatttcctgccttcagactgaagaagcccccttatcattttagatttatacttgggtactcaaggagaaggaatgcatactgtcatttgcaggctgtcatttgagcataaaatattttcagatattttccagggtgaaatctgtaatgcagatgatataatgcccacttgtgctcttatgaagttaactgttcacagatgccagccttgatcctgatgagctatgcactctaatgtggggccactcaccagtcagccaatcttttattgttcctttgctactttgaaaggaaaaaaaaggttgtctcttgatttctgtaattcttctgctgatctgtgagtagggcactgccctgctcccaatcaaacttagtctttttatgagaaacctggaccttccatgaatgttgccagcaataaagtgacttgtcctaatctatggattgagaacttgaaaatgtagagtag

SEQ ID NO: 64559 - DNA, 1094 bp, Homo sapiens
cattctttctttaatcttggttctgaaagtgtttctacccattttgtattttaatttttattaacagaatgctatctaaaaggctaaaatagagataagttttaaagtctttatttcgaatagttctacttcatgcaaatacaaagaaactgattcaatatgtttaagtattcattgaatcataattaataacaactactaagtggatactaatgttctcttaacttggtaatgtatttggtttgaagtattttgtatatttaaagctgaaaaccaagtctcccacttgcttagtcatatagaaaaacccatatgtctcccactcattatgtaaagatgactcaattgatacttgttcacatgacttcctcatttgattcctagatgtcttcaaactgtaacctgaacgttgtgttttcacttgagcatactgcaatcttgagatctcgaagtaataacatattcttgttttgtcccttttagccttagaggagaaaaggagaaaagaggaactagtgaaaaagcgaattgagctcaaacatgacaagaaagcaagagctatggccaagaggacaaaggataatttccatggttacaatgggattcctattgaggaaaagtcaaagaagaggcaggcaacagaaagccataccagccaaggaaccgaccgagagtatgaaatggaagaagagaatgaattcctcgagtacaatcacgcagagtcagagcaggagtatgaggaagagcaagaacctcccaaagttgaaagcaaaccaaaggtcccccttaaaagtgccccaccacccatgaacttcactgatttactcaggctggctgagaaaaagcagtttgaaccagtggaaatcaaggtagtgaagaaatcagaagagcgacctatgaccgcagaagaacttagggagcgagaattccttgaacgaaagcataggagaaaaaaacttgagacagatggaaaactacctccaactgtgtccaaaaaggcaccctctcagaaagaaagtgtgggcacaaaacttagcaaaggttctggagacaggcatccttcttccaaaggaatgccccttcctcatgctgag

SEQ ID NO: 64560 - DNA, 1150 bp, Homo sapiens
cacataaaaacttgtacacaaatgttcacagcagcattattcataatagccaaaaagtagagacaatccgaatattcagttgatgaatataaaaataatgcatggtatatctatacaatggaatattattcagccacaaaaaggaaggaaatattgatacatgctacaacatgaactttgaaaacatgctaagtgaaagaagccagatacaaaaggccactgtatctgtcagtgttctccatggaaccagtaggatttattttagggaattgattatggaggcctgacaagtctgaaatttctcgggcaggccagcaggctggaaaatcaggcaggagttcatgctgtagtcttgagatagaactccttttcttagaagcctcgggttttgctcttatgccttcattggcatgattggatgagacccatccacattatggagggtagtattctttacctaaagtcaactgattgtagatattatatctacaaaataccttcacagtaatgcttaatgtttgattaaataactgggtattatagcctagtccaattgacatataaaattaaccatcatagctacatattatacgatttcatttgtatgaaatgtccagaattggtaaatgcatagagacagaatgtagattagcgtttgccaggggctgaggggagacaagaacatggagtcattgctaaagctaagagattttttgggagaatgattaaaattttctggaatcagatggtggtgttggttatactctgtggatgcagttgacccttcaacaacataggtttgaactgtgtggacccacttatacatggatttttttccaataagtttttttttaaatttgtgataacttaaaaaacctgcagatgaacatagcctagaaatattgaaaagaattaagaaaaaagtatatcaggattcataaaatgtatgttaattgactatgttatcagtaaggcttctggtcaactttgagttgttagtaaagtttttaggcagtcaaaagttatacatggaatgttgttgttgttgttgttgttgttgttgttgttgttgttttgagacagagttttgctcttgttgcccaggctggagtacagtggcgcgatctcagctcactgcaacctccacctc

SEQ ID NO: 64561 - DNA, 1220 bp, Homo sapiens
tataaagacacgtgcacacgtatgtttattgcagcacaattcacaatagcacagacttggaaccaacccaaatgtccatcaatgatagactggattaagaaaatgtggcacatatacaccatggaatactatgcagccataaaaaatgatgagttcatgtcctttgtagggatgtggatgaagctggaaaccatcattctgagcaaactatcgcaaggacagaaaaccaaacaccgcgtgttctcactcataggtgggaattgaacaataagaacacttggacacagggtggggaacatcacacaccagggcctgtcatggggtgggaggaggggagagggatagcagtaggagatatacctatgtaaatgatgagttaatgagtgcagcacaccaacatggcacatgtatacatatgtaacaaacctgcacattgtgcacatgtaccctagacttaaagtataataaaataaaatcaaataaaattcaggagccatttcatggaagccgggtgagtgagagcattggtgggtgttgggccggaggaaagcaggaaggcccatcggagcatgtggatttgagccaccacattttttaaccctagatctcgaaatgcatcgtgattcctgtccgttggactgaaaggtttatgtaggcaatcttggaaacaatggcaacaagaccgaattggaacgggcttttggctactatggaccactccaaagtgtgtgggttgctagaaacccatctggctttgcttttgttgaatttgaagatccccgagatgcggctgatgcagttccatccccgagagctaaatggaagaacactatgtggctgctgtgtaagagtggaactgtccaatggtgaaaaaagaagtagaaatcatggcccacctccctcctggggtcgtcgccctcaagatgattatcgtaggagtagtcctccacctcgtcgcagatctccaagaaggagaagcttctctcacagctggagcaggtccctttctagagatgggagaagagagaggtcgctgtctcgggagagaaatcacaagccgtcccgatccttctctaggtctcgtagccgatctaggtcaaatgaaaggaaatagaagacagtttgcaagagaagtggtgtacaggaaattacttcatctgacaggagtatgtacagaaaattcaagttttgtttgagacttcataagcttggtgcatttt

SEQ ID NO: 64562 - DNA, 1061 bp, Homo sapiens
cccgcctctctccctccctcctctagtagtccccagtttctattgttgccatctttatgtacctgggtacccaattagaacctgtttttatagggtagctcatagtgttccacagagcacactttgagaagtgtagacaccctcgtttcagagtctaggtgggtgagccagatcacaccaaatttgagttacccatgtgatgtcacagaaagaacactgggtgtggagtcaggaaacctagctttttatttcagctctgccacccccttactgggagagcctggacaactcttggcccttcatggggactcagtttctctttctatgtaatgaagccccatcctgtcctgtgtctgagactctgagtatagtagagtttgcccattgtagacatccttgcggccaccgtgctgctcctgggactccctccttcctgacagcgggggtcctggcctctcctggacaatatgtccttgactcaccagcagcctcatcccagggctgttgggcccgggactgcagtggggagggtctggagccatcctctcgggcccaagccccgcttctgtgcttcaggcaggtgtcccctctctgagcttcctggggaccacagggtagaacttcctccaacggtgatggaggagagtccagggtaaggccatgttggggtagctttggatggaacttttagaactggagccccaaatccccactaagttaacatctccactgcaggaggcaggagatagggagtcaggccaatgcctcagggctgagattcacgcttctttgtcagggggtcttgtcacactcccactcctcttcctcaaccccaccctgttcccagctgatctctccctccctcattttcccagccctggagaccccagctcatgcccgtccctctgcccctgaggctcacactccctttcctggtccttccaggaggggttccaatgtctccctgaccctggacatgtgcactccgggctgcaacgaggagggctttggctatctcatgtccccacgtgaggagtccgcccgcgagtacctgctcagcg

SEQ ID NO: 64563 - DNA, 5324 bp, Homo sapiens
agtcattctttttaccctcccaaattatgcagtcacttctgtattagttacccattactgtataacaaattaccacgcatttagtgggttaaaacaacacctacttattagcactatgctttaaccaactgagctagcacgccacccgtaacacctatttattatgtcatagtttctgtttgtcaggagtctaggcatggcttagctggatcctctgctaagggtctctcacagttgacatcaaggctgagcttggggtcctctttctagttcatttggttattagcagaattcagtttcttgctgttgtatgatcaaagtctcattttcttactggttgtcagcaaggactgttttcactcctgaagactgcccacagttccttgttatgtggctctctcacaggccctcgcatatcatggcagcttactttttcaaggccagcagaagaatctcttgcttcagttggctaagacagagtctgatataacatgaccatgggagtaattgtctcatcacctttgccatattccattgcctagaaacaagtcacaagttctgcctgtgctcaagaggaaggaattatatgagaacttgattaattggggggttcgaggatattcttagggtatgtccaccacaactccaaaaagtagaggcctggcaaacttcttaccaagtcagtagcaatggtcctctgcccactacaagtaacaaggtccatttgtgccttttcagatgacctttgttttatgaacaaaatatgtaatttggattttttgtaatagtaagcatcttttctactgaacagaattaagataaagaaaatcttccttaggatacactttttttttcttttttttttgagacagagtctcactctgtcacccaggctggaatgcaatggtgtgatctcagcttactacaacctccgcctcctgggttcaagtcattctcaggatacacttctaaaactccaaaaaatgtaatttattaatatagatattgttgatagtagcaaatgcttcattatgtaattgagtgtgacattaattctctcatgctttgtcaaatgactcttactcttcagtgcaggaatcacagccatggcccccaccctccaggatttggtcgatatggcatctgtgcacatgaaaacaaagaacttgccaatgcaagagaagctcttcctcttatagaggactctagtaactgtgacattgtcaaagctactcagtaagtcttccaaatgctttggtttatccttatgttctctagaattaatagtaatatatgtgtagttcatggagcttcatatgtttacctctcttaacttcataatagtagttaacaccagcaccagtatatttgtcataccaacaccacagtacttagtacagtgtacctgagctgtttatgtaccaggacgtcccattagattgtaggcaggttcttagcaaaagcatgtcttcatctttgtagctccagtgcttttgcacagttccttcttgtgtaaggtacccaataaatgttccttgaatgaatggatgattttaaatgacactaagccaaactctttatttgaaacacaaatctaagtcttttaaaatatactacaacctgaataggtagatggaatgaaaaatactgacttacacatttatagatatttttaaaaatcatttatttcttgagtactttccatgtgcttgttgtgctggactaactagaagaaatacggtaaggtaaggtggaaatatgttctctgaccacttgaaacacatagtgtgttgttttgcttgcactggatatggaagtacattttgaaagtttccccttaagatctccatatgtgggtatttgcattaagtcaattatttccaacattttcaccttcatggatcttgttgattattaacatctatcacacctcttgacattgagcaaattttgaagtattttgtacatcagactacatcaagtattaatccatttttgtagtaatcaaacataaatctgcccagcagattgcccatcaaataaaaatcatgccaatctaatcagcctgaggggaactaatgttaccatactaacttgatataatttctatcagaagcaaagatgtttggagattaattagcctgtttggccttgatatggactaatgtattgtctatgttaattaaaaaatatattgacaattatttgagtattctaattaccaatttatattaactctagaggccttgggaaccactcttttagttgaatattatttgatattgtttatattttatttgtacaaagatgagcatattcttaaggtaaatatttgctttaattaggatgcaaacatttaaatctttccctgttgcccataaaactcttaagataaatgtcagaaattaggctctttttagagggaatctcagtaaaaactcgcattttatgtctttcctaaaattttcttcaggtcctggaccttctcaagtggttgtcgggggacctgtaggtagtatctgggaagggcatagagagctatggagtgtgtgtgtgtgtgtgtgtgtgtgtgtgtgtgttttctaaaccagcaaaacctgaatgtatattcttattatgtttctaaaataaagggagtatttattttccagtaaaatgttaaagttgacatttaaaagatggagagtgtaaatgtatgtgtgtcattttcaaaaatttactcttttaaaaatgccaaaaagacacacacacgcacacacacacgcgtgtattttggtaaggcagaaattattctaatttacagtgtgagaaacagacaattctgccatttggtttgatttttgatccttgcgggcttattggaactttcaggtagttttaagtagaaataagttttaaagaaagtgctaaagggtcagttgggacttcatagaaatattgctaataggccgggtgtggtggctcacgcctgtaagcccagcactttggcaggccgaggtgggcagattacctgaggtcaggacttcgagaccagcctggctaacgtggtgaaacctattaaaaatacaaaaattagcctggtgtcgtggcacacgcctgtaatcccagctacctgggaggctgaggcaggagaatcgcttcaacctgggagacagaggttgaagtgagctgagattgcgccactgcactccagcctgggcgacaaagcaagactccatctcaaaaaaaaaaaaatattgctaataaatgatttgcctctttattctctatgaaatatgtctttttaatgctataatttctctatgaaatacctctttttaatgctatactatttaactgattaactagtagttaaatctctctcaagcccatcattccttttctgttcctattgcttcactcttactttaggctctcattgtctctcacctgtatttattgcaataatctctaaattcgtatttcactctctgtcctcaccctgctctaagcagcttccatactgcctccaatgcgatctttcttaaaactcaaagtctgagtgctttcctctttaaaaccctttattggtttcccattgaactgtacataaagctaaacttcatagcatagcacagaaggcccatgtgatctttgcctattgcgtctgacctcatgtctcaccattccctctcatgctttatgctttagcaatgttaaattgcttttatttctctgaacatccatgtagtttcacattgctgatttttgtacatgctgcttcctctgcctgaaatgccttttgtcaacctataaaatatagcttagtttcatctccttcaggaagggctaatcatttgttcctctgctatacctatattctttccatatttcgttgtggaatttatcccattctaagtttgcttttagtctttatcccttattgtgagattattgcatgggcttggtttgattcaggggtaagattattgtcaggaattggcaccaggtgtttctggcacatagtggagatcagatgaaacttattgaaggaaggcaatgtaagtttaaagtttacttaagaaagtcaagttcaactccaaagagattaatctgatcagtacataaaccaggtttccttttgctgtttggctttatactgtgtcctctctatgcatgtctttgttaattattatatttctgtattgactgaaaggcagtttggatagtgaaaagatatagtaaagtgaagaaattttgatatttgaaatgattttaattgtatcaattatgcttttttttttcttctttgagatacggaatttttgaacgatgtaaagagttggtagaagcaggatatgatgtcaggcaaccagataaagaaaatgtgtcgcttcttcattgggctgctattaacaacagactggatcttgtaaagtaagatgggatatgtgtgttaattgtgtatttataattttagacctctccttcatttatctttttctttaagtatgggtattgaaccatgtgtaatcctcgtgtaaaagaacacccgaaactttttctgccacacacgttggttattataaagttgaaagggaccttagagaccatgcctggttgatccaaaagggaaaattagagataaagccaagggggccaatcataaagtttagaaagtaaaagtgaacattttttaaaaaaggaaaagtataataaactttttcagaagagaatgggaagtctcatctagtttagaagaagcattgaaatattttacattttaataccacgaagaatagataggtaggagatttaaccttttaaaaaaactaaatatggaatatacttttaagtgggcatgtattggattgtataaaatatttccccttcataaagcactactgcctacccattgtttcttttaaacagcttaacatgtaaaatgtacatgtgtatgtgaatgtgtatatattttgtgttataggattagatatttaaaatcctcaaagtttaagaaatttattaaggtttaaaatgttctaacacacatgaatactcacaggcaaactcctcttctgtggaaataaactggcatggtatttagataatatgatgtatgaagctcaactttgaagtaatgagactaattcctataaaccatagaagaaaatcagtcttattaccttatatgtccaccttatacagtgcctctcatctccgtaccctaaatacagggcaaaacactcaaaatgtctaacttttccaaaaggattttaaattaattctttactacttacttttaaaattcattcccacatagtaattctacttttaaactgttg

SEQ ID NO: 64564 - DNA, 1037 bp, Homo sapiens
tactccttaagtcatcatctctgttaatgcctcttggtattttattattttgagacaggccagaaccaactggatttcttttaaagtttaatccttctctcaatgtggttgataaaatacaccaaaacactccacttcactgggcagttgcagcaggaaatgttaatgcagttgataagcttttggaagctggttctagcctggatatccagaatgttaaggtatggccagatatttatctcccttagtttattatatcttgagttagaagattgataaattaacgtaaagataagctatataattgttttcagttaccccaagatagatataaatgataatagctggctatccttggaataatgtgttgagtctatgattctggtgtttttaaaaaaagtttagcactcataatatattaaaaatacttttaaactttttaccctactcttttttaagggagaaacacctcttgatatggctctacaaaacaaaaatcagctcattattcatatgctaaaaacagaagccaaaatgagagccaaccaaaagttcagactttggaggtggctgcagaaatgcgaggtattttcatatggggtcttttctatgggatagatgactttttttgttcatttggttttgtttattaaggcatcagaggaaaccagagagttggctttttgctgcattatatctgctgactatatctttcccccgcatcctattacccaaagttggaaatttggcactttcattggctatttattgttggtcctcaactagatgctctaaaagtgcttgttaccttatgaatatcattgtgtacttccacatttatttaatgaatgtattgaaatgcaaaaggttttgatttttagagacacaatgggaaaaacaccttgttgcaaggagttttatagaagcttgtaggaatagtttattccttactaaaattttatttcttgaaaagaaaataataacatttacaatgtttccttagaatcataaggactttaaaaatgatagtgttgaaa

SEQ ID NO: 64565 - DNA, 1070 bp, Homo sapiens
aatgtagggtttttaaaaggttgtttcccactttgggaggccgaggcaggtggatcgcctgaggtcagaagttcaagaccagcctcgtcaacacagtgaaaccccgtctctactaaatatacaaaaattagccaggcatggtggtgggtgcctgtaatcccagctacttgggaggctgagccaagagaatcgcttgaacccaggagacagaggttgcagtgagccgagatcgcaccattgtgctccagcctgggcaacaagaatgaaacttcatctcaaaaaaaaaaaaaaaaaaaaagattgtttccaagatgtacaatctctcaaacctcaaatttatcaatcagcaattttagaggaaaactttgtgttagctttgttgttgtattaattgttattatatactttggaagtagttcttatattgcactattattagatacttaagaggtaaaatccataaagttctaaaattctgaatctcttaatagctcttcctgctgctgatgctttctgtgattaccatgtgggctattggatacatattggacttcaattcagattcttggcttttaaaaggatgtcttctagtaacactgttttttctgacatctttgtttccaaggtgtgtatgttaatttttgcaaggctggttattgtgtttctgattttatttcttatttctgttgttggttagctggagtcacagatttttatcatgctgtaaatattacttaccatataacagcatcctgcgggtggatgggaggaaagggctctggtagcatattatttggctgaaagcaagttgctcaacccagtaacttggttgacttgacaactggtggaaaataaatatcctgggtcacgttttaattgttatttttggtgaatgatggggagatttttgtaatcatttcataattattcaagattttgtaatcatcttgaagcatttttgctcatttttcagaaattttttcctttttctaaatttattttaagctagttatttttgctgtcagtcatttttagttgagttaaattgtgagagattataaaatagtaaa

SEQ ID NO: 64566 - DNA, 1018 bp, Homo sapiens
tcaagctgattataggatgaatgtgcttaaggttgtgtgcatcagtatgcttaacaaatatcattttagtctctggaagaaagcttgctaaatgtaaaggtgaatctcaagtatataaatttttgcattatagtgtatttaaaaatatatgccaaaaaagaaataaaaatatatatctcattagaaatacaaaagatccattgaaaacatatattaaatcgttgtgaattaaatattgtatgagttggttagaagaactagaacatacacttcttgagagtcgttgtgctttagttttctcctgtgtaaaatggggggatgatgttgcataactctattaccacatggaaagtgacacatagtaagcactcagtatgtgaaagctattactgttgctgctggtattattattactaccattattatttagggaaatttagaactaaaattaatacaagtcatactaataacttatatttatcttttttcttttaggttcttggttgggtataagaaccttgtatacttaccaacagcctttctgctaagttctgttttttggatatttatgacttggttcatcttattttttcctgatatcctttaagcatcaattttgatgtgtatctcattttgcctttaaaagagtaatgttattgttaggaatttaggtattggaaaaggcccagggaatgcaacttatatttgcattcatttaatggttctggatgaagacgtttaatgttgaaaatctacttgattctaaaagtagtctcagagtacattatggaaacagtaagtatctagtatttattactcataggaggggaacagtagaatgtattattgttttacttgtaccataatttgttggattgtcttgagattccttcaaggtcagatggttctcataatttggtcagcagttacagttaattaatacattttctgagtactaagacggactgcatgaaagggatattggggaaaatatggcttcctcagtaacggtaagtgt

SEQ ID NO: 64567 - DNA, 1051 bp, Homo sapiens
tgttttaatctcagactgctattcgttagtgggtcgtggaagaattaaatgggccgtgattaaaattaacaaaagagaactgatttccatagctagacagaatcttaagatgttggaatcaacaagatggatgattttatttgcttgtacaacctaaagccctttgttctaggcaaccatatgaacctgctacttgtgagggcatataagtcagtaggtggcatacttcaccatcagaataatgttcttcaaactaaattttaaatcttggaactgccttgtggatgaactgagatgccgccctgggttttaggctagctttgtctcaggctgccgtctggattgaataagggcatctgcttccgcagatactggcctattaggggaagacattctggggcactatggaagaagacaaaacgattttgagttttagctcttttcagactagttatgcaccattggggcaaggtacataatttcaccaagccttagtttttctgtaaattggagataacagaaacaagctcatggtgtggctgcaaggattactataaagtgctcaccacagtccccatggcaaaattggcattctataaatatacctaatattttattattaattattcttatgaataaaattgatgtggaaggctgcatgtttaaactaatttcaagggcaattctaggttggcttctcagatgatcagtttcttttggtaccttttataagttcagcaagtaatgtctggcttgtgcgaggggggattgaatacaataaaatggaaccttattgatgagtttgaaggtaaaattcaaactcaggagagaaatggtgaatcactgaatattacatttgtgatattggctgtaactaactgagttaagtttaagagggataaatacatgtaaagtcccatactgagtttcagaaaatcagttatacaagtgcatgttatggtgagctatgacatagcttctggtcaagtgcaaaggaacgaggcgctgtgactaaatgctcagtgtggctagtgatgcagctgtcaagaaa

SEQ ID NO: 64568 - DNA, 1111 bp, Homo sapiens
taggtcagtgaaccacacaggcaagagcaccaaagcaaggagtgtcttcagcttctatgtgaggtgatagggtgtaattcactttacttggagagtggtgatccaatgattcccctgccatttgttttgtaagttaatcaaaataggagccgaaaattcagtcagctcagcgtgcaggatcattgcattatgaaactgaacgtatttttgagaactgaacgtatatattttgagtcgtgtgtcgatcaggatttcataaagaaattatgatgtgattctttcacaaaggatcttgccctatgtacctttaatagtgtctttctgcaaacatgtatctaatatatagggaaatacttttatttggaatctctgaatcaagagggttgtttctttgaatgattttgttaaaatgatcaaagaatatttttctagatgctcacaggagagccacaattacaccattagagataaatttatttggtcttgagtgtcacttttcaggatgttcctcataagttgcaactattcctatcaagtatttaatatgagcttcaactaataaggaaacattaattattagccaagtgggaacaaattccagtaggattagaacataggatgggaagagatttaggggcagggacatgtgtgcataaggaaggtgagattcttaggtgccaatgatgaaatttgcttacatcataattacattatttttaaaggaagtttggtgtattccttaacttggctttaacatttagcaggagcccctttctatttcagtttcattttcagcatagtagcctttctatactttttctataagacttgggcaactgatccaggcttcactaaggcttctgaagaagaaaagaaagtggtgagatttcttcgttactgatatttttaataggagggtttgtaaactttagaaagtttatatgcacatatgcagatgtgttgctttttgttacggctgcatgacatgtggggtgatatagcaaaaattagatttccactcttacagttttttcatttatgtatatgaaagttttaacacatatttttattttctgttgaaataataccccaccaagactttttcagatgt

SEQ ID NO: 64569 - DNA, 1862 bp, Homo sapiens
ttgtaataacattttcataatggtcatttagcttacatttccccactaaataaatggagagtaactagtcagtgaccagggagagtccttctgcttattggctgaggagatgcccctcctcctcctcaaatgtgaagttgtcagatgacatggcatgttttccgttgctcatgaatgtttagaagttggagaatgttgtctttgttacctaaagccagtgttcctgaaagacccagcccttggtgcttgtaactttcagttttgatgtatactggtgggtttttcttttttaatgtgtgtgtatatttgcatatttatttttctctagcagatcataactgggagatgattgccattcacagagatgaggtgataggtgggagtggtggggtggtataatttttatgcatcctaatttattagctgttggttgaaaatgcaaccttgaagagtcacatcatttcaagcacagaatgatttggtggcaagtattccaaattgcttttctaactacttcagtttggagcgagaactgtgagaatggtgtataaccatgcataatacattttccaataaaatgtggtaataggtcaaacttcatgtctttcagaatatcatcacccttgcagaaactggctctctggacttcagaacattttgtacatcatgtcttgtgagttttttcatataatttttttccgtagtgaaagcaaagtcttggtaacgttgctgatgtaagcatttgtcagatcttcatggtatatttatacacctttgtttttacccatttctaattttacattcctgtctgaacagctttctgtcttgaacatatggcagaatgatgtttataatctcttgaagttgtctctggttacatctctccgtgaattatccattgtgtgttttatttgcttttctctgtcatgaagcatatattagaactaacgtcaaatcagaggctcataatgaccttagaaaccacttagtgaaacctctcattttgcaattgaggaatcaagggaggaagtaaattctcccaaattattggtggtgctaaaaatggaacttgggtttccttcccttggttgagtgcttattttgctctgtggtactgcctcatttctgcttagccagtgtgaacaggctctggaattcagatcccacttagtgatgtcctaatcaaagtagacatatggaagtaaatactaataaggcattccacagcctctgtgtgaattgatggtctgtttaggatttgtgccaatgcctctgtgacctaaagttaaaattttgcttgtgatttgttaccactttgagacactggtttttgcttaggcctctcttaattgcccacttagataaggaagccattaaggtcactccactgccatgtatgcaactgctgtgtggctcgatatgatcaacactgcctgtggactggacggtgcataggtgagagatttaatttttcaattactactgtgaagttaagcatatgtttagttatgactcacagaaaaagtggaagggcatcctagggctccattttcaatattctagtattccaatagcaatgggcccatgcatcgttattatgctacaggtaacataatatttgcacatgcatcattctgtttggtagccacaggcctgtgaagtagacagaaaaaatattatctccatattacttgtaaaaacgctagatcagagaagttaaaacacttaacttacagtgacacaactagtaatacataagcctaggtctcctgattccaatgggtgttgttccttctgccgggttttgctgctccaggagaaggtcggaccatgatgtagtagctgaggagtatttgtgtcat

SEQ ID NO: 64570 - DNA, 1009 bp, Homo sapiens
ggataggacagcctagctagaaaagtgtttgcttagttaactttattctattccagaagttgcacttttacaaacatgttgcatggaaggaagaaagagacagggtatgatttgtccaaattcctgcctgcttctcttccttccatcacagaataggccagcctagagcagtgtttgcttagttaactttattctagtccaaaaaagtatcttcttttaagtaagcaatgaataaatattagttcagttaacatggacaattgactgtgacatatcagaaatgtgtggtttgatttaatggtacttaaaagcaaagcaacagctttatttctgttttactttggtgaagacttttgacaggaaagtggttaaggaggtcttatgttgaaaatcagaagaaacgaaaatattaagtatgttttttttcttttttcttgaggttttggcaaccatcactattacatattcttcttgtttttcctttccatggtatgtggctggattatatatggatctttcatctgtaagtgtaaatttttcttacaacaagcacatacatctacacccatttctacttttccttgtaaacccttgtatatcacattctggctgggtgactataaaccatactcctaataaaaacaaagcaaatgcctctaagactccctcagcattgggaagctgcaagaaatacaagatgaggttagttctcagtactttaggaaaaaaatgtgataaatttgaaaagtagtcaaaaatagaaattcatttaaggcaagtgcagatttgctccccagtgaagaaggaaagtcagctgctgaagtacaaagctggaggtggtaactgaataaaacaggaaaaaaaaaaaaaaaaggtcagtggtagagaggttgggggatagttgtccagtcattaaggaacaaacctctgaaagcccatgccatttggtaagtatcaagttgaaactgagaactgatgggaatactaacagttaaaaggttggaaatag

SEQ ID NO: 64571 - DNA, 1455 bp, Homo sapiens
tcacattcagtctttccaagttagtttttttattacacatgttgattcttcccttctctttgtcttttttctctggctctgaaccaattttcatattacattttgtttcataagaacagtcccaccttatattcacttacaactgtataaactagctgagtgtattttgttacctttattccatttatattccagcaatatttctttacactgaatgagggccttgtgtcatttattattatttcacagacaaaacatgaacttgtgctccatttctctaatgaggcctcactgtcatcccacctcccttgtttaccattaatgctgtattactagagccctgctctatactctccttctcatgtgatccaatagctgctacttctgtacagcctccatccatttcatcttttgtaaggtctgtttacaaggtggatagtaagtgactccaaaagtgtcagcatcctacaagttacagaaagaaagattgtagattaccatcaggaagaactctgtaactgtcagagccatctaaagatgaaaacgtttgacctggaatgatgtgagttccctaccattagccactggccagctgataagaatgtattagcacaaattaaagtgttacattgcataagataatgtacgtgacaacttgctgttgtatctttgatattaaatctgaaaaccagtattctgaaaacttcagtgtgagatcatgctgtattatcaaaagaattcccagaagggagcagtagaaatccataaactgaaagaaaatagatattctttcccaatcaacagctgttttctccacctactgttggaaattatattcttttttgtgatatcaggtgcatgggatgcatctttctttgccatcctaatgagatgctctagagagagtgtaatttgccttaacttgaaccttgattgctactctgtgatgattgctcttagaatgcttctggcatatattcatgaaagatggttgggaatcagagacttaaagagaaaagaaaagtagatttttaggatttaaatggacagttgacaggaaagtcatagactcattttcttcctgtccctggagttcttcagagcagcattgggaaaatgtccaaaactgtttatcaaattgtcagaggcatttatgaaacctcaaggtgcaaatcgacagaattatcttttaaaaataattcaccctttatgcatgggcagggtgcctgtaaaagtcattggatttacataaccttgaagatccgttcccttgtttctgctgcttcctgtgtgtatttctccttactgctgctcctagctacatgggttaggaggttgatatgaaaggccatagtaaagttctttaattggcacacctggggagaaactgagctgtgaccatctgaatcttgctctatattcttttcccaggtgtatctgtcttgtgagtccctt

SEQ ID NO: 64572 - DNA, 1142 bp, Homo sapiens
acccatgcccagctccctgcatgctattagattgtattctgatgatatctaggtgcttgtgggatatcttgtgcccacagcaatggcctgttcatctgaatgcttaataagagtttatattcagtcctgtaatagacccatagttgctataaacatgaataaggtagggagtgttctaaacaaataattaacttcaggctagtatatcttatgctgaatgctgattttagtaaagattttacggaccctttttctttattccttcactgttaactacttatacagtgttatcatagcctcaattaacattgagccaccattttgtcatctttagtttttgaactgtcatgtggaaaatgaaatcctaaaattgaatcatgatctgtgccatactttctcttctccctatatagaactgcagtgattttatcttcttggagactgataagtagtttattgccttttttttttttttttttttttggtgaattcacagatttgtccagtcattgtgccacaacattcaaagaagatggattatggacttacctcaatcagattgtggcctgttccccttgggttttatatatcttgatgctagcaactttccatttctcatggtcaacatttttattattaaatcaactctttcaggtatttatttctcttcttataatggctttgagtaaaatttctaaaacttgtagtgagacagccttgaatttaaaatcagaagatgcacattctgtttttacctctgtcactgactctgtgggtctagccatgtcatttaaccacacttgaatttcaggtattttgtctgtaaaatgaggataataacgcctgtctactacattaaaccacaagatggtttaaaggttagcataataaattattagagtatgacctaggagttacctaatctgacctctttattttacagatagaagtacagaaaggtaaattgaattgctcaaggtcacccagtgtgtggcaaaatcagaactggaaacttaggtcttctgccagtcccattcaagggctttttccattgtacagttaaattatatgttgtgtgtaagcatagtataaactgtaaaccatcatgcaaatgtcagatgattgttttccctcagtttttc

SEQ ID NO: 64573 - DNA, 1300 bp, Homo sapiens
ggctgagcgagcagaagccaggaaatctccaaatatagattcaggtccagaaataggcttcagttttaaggtaccagaagcccaggaactatctgatctaccccatctacccctggatttctgcaagatgttcaaaggacattgcatattatagattctccataaatgtttgtcaagctacacaggaaatatagtaagacatgttctctttttttttttcttggcagtcttggattcatgcagaacctggcagatttctttcagtgtggctgctttggcttggtgaagccctgtgtggtagattggacatcacagtacaccatggtctttcacccagccagggagaaggttcttcgctcagtatgaagaaaagcaacccaaaactctcaatctgatttgtttttgtttatgtcgatgccctgtagtttgaaagtgaagtaaagatttagaattcacctaagtccaaaggaaaacacgtggtttttaaagccattaggtaaaaaaagttctcaataaaggcattacaattttttaggtttagaaagatggacttttctgataaatcttggcagacatctaaaaaaaaaaccatatttttcacaagaaaatgcaagttactttttttggaaataatactcactgattatggataaaatggaatattttcagatactatattggctgtttcaaaatagtactattctttaaacttgtaatttttgctaagttatttgtctttgttgtatctataaatatgtaaaaaatatttaaatagatgtacctgttttgctttcacacttaataaaaaatttttttttgtagttgagacttggtttctgacacttaacacttctagagtcttaaattaagatgtacataggacacaaattagttcacaattccaggaatgagttgagattatgattaataccagtaagcaagatttaatttggtttttcatcttacttagaaaatagaacatagaaagtcttaaatattaattacaactttacttagtaccctcaaaatattagactgatatgactgtaattactaatttcccttgttctacaggaaatgctaattcaactttagtatagtatttatacacccctgggcatggcaccttcctgctgaataacctcccttgggttcctgttgctcttggggtaaaagcaaaaattctcattgtgacctacaaagccttgaagcatataatcctgttttgtttagcagtgtcagtggagcatgttgtactctaatcatgtggcctttcattgcaaggatccgttctctcttc

SEQ ID NO: 64574 - DNA, 1509 bp, Homo sapiens
tcctgttgcttacatagttattcaggattaggattttcagtggatagattttccatatactcctgcttcttttttatatctctgcaactctaaccatttcttttttcttttgagacagggtcttactctgtcacccagaatggagtgcagtggcatgattttagctcactgcagcctcgacctccaaggcttaagtgatcctcccacctcagtctcccaagtaacttagactacaggtgtgctgccatgcccggctaattttttattttttgtggagacggggtttcaccatgttgctcagcctggtctcgaactcctgagctcaagcagtctgcctgccttggcttcccaaagtgctgagatcacaggcatttgccgtcatgcccagcccactttaaccatttcgttttagtatggcctgagcaaaacaaagacaatgagagagtcatgtgttaattcattcaacaaatttttactgagaatttatacttctaggggtggaaagaagataagtatgcaagtaaacacaaacatatcaggtagtgaatgataggaatgaagatgacatgataggaggaaggggtggaagggctactgtaggctagaagagttcaagttcaaatatgtcagattcattcggcaatttaatagttctaattattttataaaaaagggaattggcataggttaaaagattctataatgaatatagtttgttggaaatttaaaaattattattctattattgtgggttttactgaagacttgaaagagttaaaccagcagtcagaataatttgtaccatgagagaatataactaaagctaatagagcgcaggtcttcataaagcacctaaatttgccccttaaaaattctctcttcctgcagttttcaaggcacctactagtagagattttgagtgggaccaagtacttaagaaacaaaattaaaagcttgtagtatacttttagctttgtggattctgaatttcctggttcccaaggaaaagacctattaacaactagattaaacttgttttgacaatggagagaagaaaggtctgaaggaagaaaaaaggaggtccctagtttataagagcggtttttagcttttgccagtcccgctcatggtaaggctaaagcagacttttcatgcagttcaggcacccgtgtaaactttttctgtttgggaaagtacagtgatctaataggcatgttgggaggtacatgcaaccctacccttgggccttttctagttgcaatataactttattgcctaaagcttttgctcaatggcatgtgcgtctctaatatgaattaatcagttctcttatttgtaatttttttaactctggtgtactttgcgtattttaagactgcttgttatcattagagcaagcagtactagaaagaaatctttacttatataatttctgttttaaatcaggggccagcaaacgttctttaaagggccagatagtagacattttttgggttttaaggccatatg

SEQ ID NO: 64575 - DNA, 1038 bp, Homo sapiens
cagaagacaaggaactgttccttagcatcccataatccaagtgaggccctcaacagctaatcccctggctgggatgaaggcagggacatttttaacctttggaggaagggattatttgctgtctttttaaagtaccatgggtggttgtccttaagtccatttctccatcacacactggaatgcaaacagctgtcatgaaagtcttaaataatttacaagcagacgtaaccccaaatgaacgtgtggatgcatagggttcctgtaactcctgctttctgagtcattacctaatgtttgtttgttgtcatgtaactggcatctgttgcctagaagataaattgctccccgtttttactttctacctaaaatttaaatcaaaatttctatttcatgtaaatagaaaaatcaaactgatcttggcaaattgtagatatagttcatgtattggtttctagagattttgacatgctagacaaatttttttcctaagtggagattagttccggagggaattaatatttattggatgcctacccacatatagcagacataatagatattagtcacttttacatacagtatctcattttcctcccttaggacaattatatatgagagacattactgtatcatccgataaataccactaaatgtgcaagtaaaagttaatctctcattttgcccctgctcttaatacaagctattttacttctctctgtcttatttttccgcatcggtaaagaatttattccaccagtttttcctcatcacctactggatataaagcactgtgctctggatcaaatctaacccagcacctgcctttggtggcaattgcttttgggtacttgcctgtgggcatatgatagtttttgtggggttaagtgaatttattccatgatgatacacataaaagggtttgatccttttaagacgtgttataagctgaaaggtattatctgttacgttgttattaaagaggaagcttagagtttgtcaaatcttccctgaggatggcctcatggtaaccattcaaaa

SEQ ID NO: 64576 - DNA, 1489 bp, Homo sapiens
ttcctaaagctgtgtagcacaacttaggccctcattaaatgttgcctttctaattcatatgatttgtgcccttggaaagcaagcacatgtctttctcaccttcacagtatttgttgagtatgttcacttacagttaggaaagtgatattatccaagacctactgactaataaaccaatggaagaaaaagctattcaattctaaacacgttacaaaaatctgtaacacacaattgcacattctttgtagatgttgaacgtcgacgcatttacgatatcgtgaacgtcctagagagtttacatatggtgagccgcctcgccaaaaacaggtacacttggcacgggcgacacaatctcaacaaaacccttggcaccttgaagagcatcggggaggagaataagtacgccgagcagattatgatgatcaaaaagaaagaatatgagcaagagtttgactttattaagagttacagtatagaggatcatatcatcaaatcaaacactggcccaaatggacacccagacatgtgttttgtggaactccctggagtggaatttcgggcaggtgagagatggtagtgaaaactccaggcggcatggcatttgtcctctgtctaaggaaaaggttctgtggagaacacagctctaaagctactgctgcctttaatgttcagatgccacagttgtcagctgtatgatcaggtggtagtatttttagccttgttactttagaagtcacttgtccctttatgaattttaattctctaatcctcatccttctctaaagcttctgtaaacagccgcaaagacaagtctttaagggtaatgagccagaaatttgtgatgctgtttttggtgtcaacgcctcagatagtaagcctagaagttgctgccaagattttaattggggaggaccatgtggaagatttggataaaagcaagtttaaaagtaagtgtcatgactgccatggatttttgaacctattcttaaacaataaaatctcagtcgtaaactcatttccaaattaggaaacataggtgcataaacagatcttctctaattatgtttttatatcttctccccagaagccatgataatattgatttagctaacttgttatgatacataagtatcactactctttttttttttttttttttttagacggagtctagctcttttgctaggctggagtgcagtggcgagatctaggctcactgcaacatctgcctcccgggttccagcaattctcctgcctcagtctccggagtagctgggattacagttgcgcgccaccacacccggctaatttttatatttttagtggagacggggtttcaccatgttggccaggaggatctcgatctcttgacctcgtgatccacccacctcggcctcccaaattttgggaggcctcccaaaattacaggcctgagccactgcgcctggccaagtatcactactcttatttgacacattgcttcatttga

SEQ ID NO: 64577 - DNA, 2312 bp, Homo sapiens
tctcattagacattttttccttggcatgattctattcgttatgcaatttctagaatccaagctgtctgataaatcctgttttaccatggatttaattatttacattttttaaaccaggaaaatctcttttgtgagccacataaaaggggactaatgaaaacacctctgaaagaatccaccacagcaaatatcgtgttggcagagatccagcctgactttggccctttaaccacacctaccaagcccaaggaaggctctcagggagagccgtggacaccgacagccaacctgaaaatgctcatcagtgctgtgagccctgagatccgcaacagagatcagaaaaggggtttgtttgacaacagaagtggattacctgaggccaaagactgtatacacgtaggttttcagaggactggttggaggctggggaatttgttggggggaggggggaggttgtagctattagagaagtgccagcaatttaaagcatcaccacccgaaggctgttattaacttccttcggagcaccagaaaggtttggaccccaagaaatatagctctgggaattctgaacctttgcgttattttcgtttcaggctttcctttcaggtttgccaagcattttgtactggcccccctaaccttttctcccatccagactttgcagctgttgaagctaagcgtgtgtaagttggtgtcagtcatcgagcacagatgcccctaataaatctgtcagactttattttagaataagacattgtttaccttttcctttgtaggaacacttatctggagatgaatttgagaaatcccaaccaagtcgaaaagagaaaagtttaggattattgtgtcataagttcttagcacgatatcctaattatcccaaccctgctgtgaataatgacatctgccttgacgaagtggcagaggaacttagtaagtatgcaaagaactcactgaaagaattaataattaaagtggctttatggacttaactccttcagacccccgctcatctagccagtgtttgtaaatgacacaaataagccggcatggaaattttctatctctaaagccctcttctaatataagaatgaaggtaagtagttgcaaatttcagcaaatcttggaggcagaaaagtcacaatggaggttgcttctgactacagttgtctctgaagctttaaagaaaggcaatattgtctcatgacttgtttcacaaagttacaactgtgaacttttgcttcattgctctcccttgctgttcttgaagaatcaggctgataaatggttatcttcctagttgacgctgaggatcagcttctgtgagtgggaacaggacctgtgcactcctggaccttcagcactattctgaggactagttttctgaatgttttgtgttgggcacaagttattcctcctgcccctttttactctgttcaaagacctgaatctatttggagctaaaaaggggcccgtggtgaatttggggtacctttggagtcatgtgggtatcttaatttaaacctgtgaagtgatgtgctgtgcaagataatacattttaatacaaagcaatcaccccgtgaagaaaagttgcccttctaatacatgtttgtaaatatcaactttatttcacattttaagaatataccgtttagattcatctacttttcatatatgcttaatggtagctgggtaggatattcagcaaatatctattaatcttctactactatgtgtcaggcaatgttgtaggagcctgggatacatccgtaaacaaaaagggcaaaatctcttctctcttagaacctatattctagtggggcaatagatactgagtaaaggatataggaagtaagtaaggataatacatgctagaaggtaacatgcatagtggaaaaaataaattgtagatcaggatcaagggatcaggagtgctggggaggtgctttgccataagtggtcagatcaggcttcgttgagaaggtgacatctgggcaaggacttgaaagaagcaaggtagggagctgtaaggacatcagggagaagggttccaggcagaaggaacagccggtacaaagcaagtgcatatctggcaggttccagggacagcaagaggtcggtaggatgcacccttattaaaatagtgttttattgatcacttttccagaaaggctgatctcatcaaatatttaaattgaaattaagtttcttgaacgaagagaattctaacattacagaatattgaaaacccaatttaaatagatagagtcacagaattactaatatcatattgttaatgatagctagaa

SEQ ID NO: 64578 - DNA, 1019 bp, Homo sapiens
aagtgaacttacatgcatatttcctaatagttttagatgttagtcaaataagagaattactattgcttctgataatctgaggcaaagaaaaagcctattgtcagatcagtacatctcagatgcacacactggcaaggagctcctgttgggtccaccatactgacttccatgtaagaagagcaccatacttggagtgaaaatatctgtgttccactcctacgtgacctctctcagcctgcatcttctcttctgcgagctaagaatgcaggattccatgaacatacaaacggaaatgcacttgataaacccaagatgtcacaacatgtcccatttgtccatgttcttaaagttatttggtctgcctattattttacttattgctgttccaagcattttctttaaaatagataaagatgggagtagtgtgtgaagtccctggtgtccaaaactggaaggaacatagtctccattagccttatttatgaactgctgttaatttacccttttgtctcagtggctatcctgcttctgccaggatctagctttgtggtcttaggtagctgttaggttgatgcaaacataattgctgtttttgccattactttcagtagcaaaagccacaattacttttgcaccaacctaatcattttacttctctgggccccattttctctatctgtaaaatgagggagtggatgttcaaagagcagacttttctggtcagaaatcctgctgttggacactctagatttccctgataaatctgaccatatgctatccctcactcttgtctccttgtctctctgactcttcagtggtattttatttagcacccactgcatgcagccattatgctaggtggataagaatttctgccctgtaggcctttacttattacagtgccatgagtaaacaaaagtcatttctagaagtttgatcatttaacattgtcagtccaattaggggaagctgagtgaagggcatttgggaactctatactgtctttgcttctcttctct

SEQ ID NO: 64579 - DNA, 1011 bp, Homo sapiens
actgctgagcctgtgcacgtgtgtgtaaggggagaaatccaggcatctagatgcagacttgtacccagttacttggggtcgcgtgcgctcagctgggacctgggctcgtgcgcttagtccggagccctgatctgcgaacaggtgggtgcttcctaaagtattcgctggggtccggagaatggctcgccttttctacagatgggagagggctgtcactagaaattccgtgggttgcttgaagtcttaggaccgccgatccgtttgctgaaggaatttactggcatttgttggcgttctccgctcagtggggcgatctctggtcgagaataaaatgtaaatctagtttgtcatttttcgttaggctttgtttccgtagcctcttgtccgtgaaggaattttcaacagatcttttggttcttgtttttctctaactttttctatttccttttttctttaaggatattaaaacttttagtacaattgattggactacttgaaccatcgggatttggggaggaactccagatttttcatttttaaactctaaatgtatgaggaatttacagaatggagaacgaaaaggtactttataacttcagtattcatcattgcaattttaaattcagtatcatcctgatttaactccataatttttccctatccaatgtgttttcttaatgccacaaccttggttagcctctgtaaagacctggaaaaaatgaaccttatcttatagtttcaaaaatatatagtttaaaatatatactaatttaattaatatagtttaaaaaatgaaaattatcttaaaaagaaattcagtctccaatcatgtcaaatgccctttctgaattccagttgttcaagaatcctcagaaatgttgtaatgaaactaacaaattttattattcttaaaaataccttttctctctttatgtctgagacagctaccaaatcattaaaaactagaaagagtgtaaaggggcaaacctacccctcttcaaaaattcgtta

SEQ ID NO: 64580 - DNA, 1049 bp, Homo sapiens
ttatacaaaaatacaggttacatttcttgcaaccatttctacttaactttcctttctctgctgggttctgggagggaaacttcagtcagacttgtcacatgcccaggctttacccaggaagtgagcctcagtctcatctgctctcaaatgcctaacttatcctgccccggggcctggctggaccaggggttgggggagtgaacagtgtgcaggcctcctcctcaggggcctccctgcattggagatcattgatttgcttgttcctcctcctctcgcaacagcacctgcagttcttatttcgtggggagtggtaaggagtggttcagactggtcacggtttcttccaggtctgttgtttacagcatcaacttcatccccaggctgcttgcaggactcaggcaactgaagctcaaaagcccaggtcttgtagctcaagagtctggaaaggtttgcaaccttaaattccaagggtttggctgtacagctctcctctgttctgctgtaatcacccaatcaggaggcaacaggtgcttcatggtccagtttagcagctttaagagatactggaggaaaatacatcacttaatatcatccaagtacgcacctatttgccattcctaggtgactcagcctgggcaatattcccgcctaccagcaatcttttcagctccctcagtaaaataccaacacaccctgtggctcagtgatgcattgaagtcccaatttagtgataccttatttacagattttctaaataaaattgctaatacagtcaacccttcatattcacaggttctgcaccctcggattcaaccaaccaaggattgaaactatttgaaggaaaagaacaataataatacaaataaaagccaataacaatataacaactatttatgtagcatttacattgtattagatattataaataatctagagatgatttaacgcacatgagagcatatgcataggttatatgcaaatagtatgtcattttatataagggagttgagcatccacagatttgggtttctgcagggagccctggaatc

SEQ ID NO: 64581 - DNA, 1011 bp, Homo sapiens
gcctgacagttgtaaagcaggcctgcggggaaggtgaaggtgaatttgaggctaaacctctctgtcatgatcatggattttggtgtcagacacacttgggatcaaaatccagttctgccactcactgctgagagacctggggcaggaacttcatcttctgtagactcagtttaatctgtaaaatggtggtaatagctgtcccatggtattgtggagagaattaagagatgctgaatataaataatatctcaggcccatagccagtccctagtaaatggaagccattctaacgccaagccttcagatcataggtgcttctcaaatgtccacatggccgggcccccaatctgctcaggacacccaagggtgaagcatgttattggcttcccagggtttcctagtactatatcatggaggcatctggggattgtggtgtgatgcttagccaagaggctgccctctgcacccccacttcagggaggcgaggaaggggagcagtgtgtgtgtgtggcagagatggcattgattgagaactggcagacctggcttccctgccagcgctgccatgttccagtgtctaacctatagatgttggctgaatgagaggaaattacatactctgtgagcctcagttctctgatctacacgatgggggaatagtaccttttggggttggtgtggacactatatgaaggagctggaatactgcagctatttggagccatattctagaaccaaactgcctgggttcacatcctagctctgccacttactggctctgcagttttgaacaattacatcaccttttagtttgacttactcttataaaaagtaaggacaatgttaacgtctatctgacagtgctgtcaaatatgttttcatatatgaaatacttaaaacattgtttggcagtaggtaagtacttgataaatattatcttctcttttatgatgatgagagtgcctgttacagtgcctggcatgtcttagggtgcccagtaatgaatttcct

SEQ ID NO: 64582 - DNA, 1046 bp, Homo sapiens
ggacacataatcacaaactgactgtctacaactttatcactcacatggctcccgtgtcattcagaataggcaattagattttcccaaaggccagatttggggatcagaagggcaggctgatggagcatcaacaagtactctgatgttagctttaaaatatgcagtagaatcctgaaataatctgaaataatttgaaataatatgtctctcccactctttctgcttcatattcatgcaccctcaatgtccagtagcaggttcagagccacaactgctattttttcctctcccgaggcaaggaacagccagccagccagaccaagaggtcctacaggatttgaagtccttagaatagtggctacattaagtttgcttttgggtagaaacaaacaagcaagtttcctgctggcctccctgttcatctctaggtgaagtgaggaaaactgatggaatgttaaaggggccaagcttcttcccatctactgcagcaggactgtataagaagaaactggacctgaggtgtgtgtggccttggaagagccatttcactactgtgagcctcagttttctcatctgtatgatgaggctagtaatcccagccctttatcccttataatgttgttatgaggattagatgaggtcatatttgtgaaaataaaaagaacactaacagctaatgttcactgggtacttattatatatcaggaactgttacggtttatattttataactaaaggacctgaagctaagggaagttaaaagtcaaagtcacacagcaaataagtgatagagcatgtatttgttgtctgacttcaaagcctaagtaagcttttaatcatatttttcagataaatttttcagattttagctgtgcaactttggacaagctacctctttctcaggtcttcagtggtgccatctgaaaaggagacatggctcagattaacgttcaagtccatttagctccaaattcctggttatattttaacaaagtatacagacacacaccataactctttctttctccaagtttggtcttctttga

SEQ ID NO: 64583 - DNA, 1016 bp, Homo sapiens
ttaaaattatataaatttgggagtatccaaaacaatctggtgtatggatattttacccaaggatctctgattagagtttcccttagagggcatctaggcccatagctgcaaaaatgacccagcttgtgagccaacccacttgacagtggcttcctgaagatgaattctgacggcaagcatgctgtgattgattagtaatgtctgccataggcagagaaaaggaagatgataaacaaagtcctgtgtaacctgctagaccctatcaagtctaagatcctcatatttatagggctgaggttcaaacagaagaagtggtacacaactaccattggagacataggttggagggcctagaagatcactggaggcagaatgaaaaaggatagaaaatggtggaagacctgctggaaaattctcttagaaataaagaatttaagagagctaactgctaggaacaagccaacaatggtagctatctctaagaaaaaagaaaggagtcagagcatggggtgtgatgtggtttggaatcttgctgggcttggtcagcctcatttgtgccaggttagagggggaaaaagaagcctgctgtccttgcccatgtttctttctgcatatcataaggtagtttcatgaactcaatgggcaattggtagatggctggggttctcctaggcctctgggatgcctcccatggagatctgggcacagagggcaccgtccagcccctgagcaccatgactcaccatacctggtccttcctctgtgcctcctctgtgctggttcctgggtgtccagagacattgaatcacggccctcaacccaggtgagctcacagtctagagggagacagagaagtcctgtatttcttggatcctaagatgatatggttacaaaacagtttatcaatttaatgacagaatttcaggaagacaaaaaaacaaacaaaaaaccaaccaaccaatcaaacgaacaaacaaaaaaaacctcccagcttaaccagaggcagattgtaggag

SEQ ID NO: 64584 - DNA, 1051 bp, Homo sapiens
ggccaaatcagctggccacgtttttgtaaatacggttttattggaacacagtcatgaccattcgtttctgtattgtccatgactgccttcatgctacaagggcaagattgagtggttgcaacaaagaccatatggcctgcaaagcctaaaatatttactatctggccttttatagaaaaagtttgccaacccctggtctaacccactgaggtttttccaaacgcctggaaactgctggccacaatcccagtatccttctcctttgaggagaagagaatccatccctattgtcaggttggggactggccagagacccctctccagagggagaggctgcgccgcaggaataggagcgaggggatgctgaccaagaagaaagcctccttcagaggggagttgagtcccaacttgcacttggagagcgcccaagataataaggatgataagaagaaaaccaattgctaacttttgtgattgtgtgccaggttctgttctaagctccttttttgtaggattgaaccttcacaacagcctagcacaatgggtacaattagtattctcgttttgtacatgagaaatgaaacgtagaaagattaaataacttgcctagcctagtcagtggtgggaccagaataggagtccaggcatgcttactccggagcccatgcctgtcatctcgctgcaggatctggatgaaatgggtgtctcacctgcactgggaggggtcaagagcttaaccctgtaactttcctcctttctcttttcatcaactgtttagtgactgcctgttgtgcgcaagtcacagtagagctgtgctaggctctgtgatgggagagcaagaaacatcacatatagaacccgcgtctgaggagcccgcagatgggaaggcagcagctgtgtgatcaattgctatctagggtagaaattggcagtgtcgaaagagaagcatggggaaaatgccaggtgaatcaaggggcatcatcttccgagataccacatagccattcaaatgttgagcatcaggggctcaaaatgctaatgcccggattgg

SEQ ID NO: 64585 - DNA, 1057 bp, Homo sapiens
tgagtatgtctgtgtgtgttttctgctgtactgttatatatggatagaatcctctcaagaaaagtccaaggcagaactcaatcaagaaatgagatggcagtgctctattatattagtgtaatttggtaataaggaaaccaattaattcattctttgttattaatagcaaggaacgtatgcagagaaaggtcctatggggcaagagagagatgccaagagtgcaccccttccttcatgacagtagttcttaaacttcaatgtactcaggattacccagggagcttgttaagtgtgcagaatcatgggccagagcatcagagagtctgattttgcagatctggggtgaggtccaagaattcatatctttgaaaaatatgaccaagtgagtgtgcataagatggtctgtagccttcactctgacaaagactggtctagattagaagatgaaattggaagactgagggaaggagggaactgggtgacttggagcaagcaggaatgggatcctagaagatgggagaggagctgaggtttgaatgcatgcaagatcccgagaaaacagggaagcatactttggatttggtctgatgaacagacggtggagagctctggtggacaggaagctctggctcttctccctgctgccattggcaggagatgccaggttgggtaggcatcacactgggaatgtcagccactaggaagggtttactgagaatcctggtgaaatataatgaacccaaggcatgtgtctctttgtcctctctttaaggcccaagatggctggctttaagttgcctaactgtgcccatagagttgagcttctttttatctatttccttattcagaaatgagggcttgaagcagcctgcagtggtagacctggaagtataaagtagatttgtgatgctcagggcaccagagtgggctagcagaaagggcaccagagatgataggagatgttgagtgccatttctccttattaggggctgtgttggctgagaggggccacagctgaatctcaggtctgcaggggacccatgttccatgataaagt

SEQ ID NO: 64586 - DNA, 1140 bp, Homo sapiens
aatgcagagaaatagcatcactttttttttccccgtggtaaaaataacatgcaaggatgggaagaacaaatggaggttgggaggctgacattgcggggaggaaggagctagaatgctgggggctgtctacctggtgccatgtgctgccatctgcccagtatgggggcaacatcagcctgacctgccagcacctgcctggctaccagtatcagctttcaggaataaaaagatctttttcaaaaagcctttgttccccagggaagctcaaggggcagagtgaggtccgtggagggttgtgacagttcaaaacatgctgtccatttatagtatgcagcagtgaccctatatctcaccctctctatagcaactagctccagacacaaactgggcatggcttttgatcatgaagcatgtttttacaaacaaaaaaatactgaaagtagtatgtgaggctgagattatgttaatttatgcagtttccactgctgctaggattaaaaatagctttctttcaagaaaactagaactacgcactgtcagtatgccttctaggccctcttgttgggctccaggactggtgggccagacacaggacatggattatgagatcctccttggcagtcccaggttctggagctttgctgaagtggaagataaagacactttatcttccagtggtaaggactcttacaaagtctttactgcatgtttcataaaactggatatgctgagctctaatgaaagctgttgtcagcattaaatacccagggaaaggcatggaggcctttaaaaaactgccacaatgctcctgcactgaagtgctcacattttgctccatatgtgagagggaggggaatttggccagtgtcatccacctcataaaaggcaaacccaggatttaaactcaggtctggtgcctccaaagcccaggaactcatgacatctcttcccccaactctgctgttctacatgttgattatggctacctgtggtgctcattttaatcagatttcatcaatataaacattagtggtggggtcttcctttagagttagtatagccacaaccacctcccctaggttatgcaggacacctggcaaaccttttctgaggggcccctaccaggggaaaaaaaaactt

SEQ ID NO: 64587 - DNA, 1002 bp, Homo sapiens
cctagaattggctgctagccgtagagcccaaggcaacaccactggggtaattcctgaagatccttgggacatctggttgacaccataagtggacagaagtttagagactgctctgaagggacagctgaggacagggactcctgtggttctgggtcagagcaaggaacagcctggtcaatcccagccactggaaagagacttagagaatttcaaagagagcatggaaaccagaaaatatgagtgaaagggaagggagtgaatctacatattatacaccgtctatataccagttacagtgctatgcatcgtggggagttacagggtgcacaagaaggacagaacccatactttcacggatcttacagcctggttgggagaataggcattataattacatcatggcagggagaagggatggggaagaggagatggggaaagggcccagctgtcaaatagataattccaaggcagagtaatatggtagaaggtggtataacctggcaattgcaatcacagacttgggatcaaagagactggatccaagaaccatccttgctcctttccagttccatgtccctatgcaaggcatttatttatactctgagctcagtttcctcatctgaaaaatggagataagagttcttacccgacagggtgcttgagagggttaagtgaaatagtgcatggaaggcacttagcaggaggtctgacatgcatatcgtgcccagtgaatggtggctattactagttattatctgatttctgagacctgagcagatccaacgcagctgatccgagtaggggagctgagataagtaggtgctctgacagcccaagccatggctgatggtgaaaccactgacaatctgacagcaaaggaagaggggaccaaaaaatctactgtctcagcagctcttagagcaattagtggtggttatgatgtgaatttctgtttgatgtcctcgtctttttgagaagatgtgagtgtataatgtacaactt

SEQ ID NO: 64588 - DNA, 1048 bp, Homo sapiens
aggaagaacagtggggtttaggagaaagagcactgtgagagttgtgtagccttggttcaaattctactccccctatttgggattttggacaaatgacaacctatgtgaacttgtttcttatctaaaatgtggtggagatcctcaacatttactcataaggccactgtgaggctcctatgaagggctttataaactgcaaaggaccctacaggtggagaggtggtggttatagctgttgcagctccaaagtgaggccagtacttctgaacttgggagtcaggggtctggcctagcataaccaaccactacccaagcctagcaacaagacagatggcagaaggaatggatatgagctactccctctttgctggcccaggatatctccagggtgggtgaagcactggggtcttccacccgtgctgtgagttcctggtgctttctccctcctgggtcttgcctgcagtctgctcacacaagtgtagcttcaggtgggaatgcctagtgcctgcagttgtcagttctaggcatgaggagcttgtgtctgggtttccccaaaggacaacattctgggtctcaatgaaggacaagatgcagaattccaaggcgaggccacaaaaaagtgctgggcttagcctagagctacctctccagccccaggaatgtgacggtatctggacctggacacaaagcattagctcatcccttctgatgatagacaaagagcctagtgctcagagttgggcagtcatcccggcagcttctcactgtcctgcccaggcagctgtctggactggtccagcccaaagagcctggagtgtctacttaccccactggcatggaaggtttgggtcaggccagggtcatcccaatcctcaggccctaatgctaagcccatctcacaggtactcggaggaggagtcctatttgggttgtagtatgcttcccctccactggcctcagatacagttggtttactgagcacctaatatgtgttagataaggtacaagatgttttcacagagattatctcatctcttcctcaaagaag

SEQ ID NO: 64589 - DNA, 1372 bp, Homo sapiens
atgggcagttgagcatggcattagtgggatatgctgggcatgtagtgagaccttgtccaggctttgtggggaaggctctgatgtcaaacgaggcagctctgaggctgtgggcagtgctgaccagtggactggtggaggcagagagattggatttccttcaaagcaagtcacagtcaattctcccagcttgttcagaggcccttatagatgcctgcatgtgccctgggattttcacatcccaggagacagtgaggcagacctgtttacccacattttacaaattaggtaaccaaggattgcagagttcaattaagccactcttatttatcaagcatcttactgtgatgtgaaggcacaagagacctggaccccacctccaaggagtatgagagagggaaaaagaaatgtagccaggccactggaagtgtcacaatctaggctggatttgaatcctccctctgctacttctcactatttaatcttttttgaatctcattttccttacctgtaaactagttataatacatacaccacaaactcctcagggacaagggccaggcttgtcttgttctccacctaatccctggcgcctagcatggtgcctggcacagagtaaggaatgcatatctgttaaatgaatgagtagacattgtcatgagtattaaatgtaatgatgtgggtaaaatgcttacttaaaggttcatgggaagcactcaatgaatggtagtgttaatactctgttaggaacggggcagggaaggtgcaggcacctcacttcacagagaggtgcagaccaaagagaaacaggcttgcaagacaatgagcatatccctcagccaggtttccaaaacagatgatgctgctgaaaggtaaagatgtgagtgaccatgattaaagatattgacaggcagagatagggaagaacttgcccaaaccacaaggctggtgactggcaaaagccagggttaaaacttggagcttctaactctcagtttgtgttgtttctgggccattcagaggtcttcttgtaccctttaaagttttaccagcagattgtttaagcatcctctgtatgaagctcttagaatttcaaatggactcttatttttagaagcagcatcccactgagcatttgacagtgatcgattcatttcccagtttgttttttaataagcttaaaggttactgttgataactgtttatagacagttaatgtggtacttgcagttcctgatttcttaggcctgggactcactgcgccttcaagatgctgaaaccaagcaaggtgtgaggagtaggtgggggcatctccctcccagattttcctcacctcttcaaggctgtcattcacaactccagtcactggctgctg

SEQ ID NO: 64590 - DNA, 1061 bp, Homo sapiens
tgggctgatccacggggaagaccctgatgcccagagaacacactgtgccagctggaaactgttgataaagcctgtggtgaccacttcagcgccctgctctgaccttttcccatctaatgtggggctattttaatgttgttttgaagctgagagagcaccagaaccttgggcctgctctcctggtggaaaccacaggcttcatctgcctttgtggtgttgccaaacccttgactgtcctataagggagcgggcttgagagtaacacagttggcctcaacgcgtgtgtggaggcctagggctcctgtttatttttagcaggagtactcaagcagcatggcagagtttctccatactgcctcataaggtgtcctcagattctggggctgcaggttgcacaagagagcaaccctggggtggtgacaagaagagagtttgaatttctgaattaaaggcttttgctcctctgcctcgggttaactgtgtgaccttaggcaagttgcttgacctctctgaacaccagttttatcagctataaagtagagtgggtaattcctctttatcgtaagattcagcagcatgaactaagaggatttctgggaaagtgcttcataggctgcatggtgtgtgatgggaaggtataagggacatgaatagccctgtatctggtgcacagtaacagcttacacttattgagggtatggtatgtgctatacattgttctgggtacttttcatggattgtcctatttaatctgcacaaaagccctaagagatactgttataatctctattttacagatgaggaaactgtggcttagagaatttatttgctgaagatcaaacagctaattaattgccaaagccaaattcagactctgcagcctgcagtcttacccccagtctcttggtgctgcctctctcagtgtcatcattatcattaccatcatcattgcccagttattggaacctggtcttcgacaaaccccaaaaatattatacattgtctctaatcctcacagcagcatcataatattaactcattgtaatatttacattgtggtg

SEQ ID NO: 64591 - DNA, 1051 bp, Homo sapiens
gatggtctcaatttcttgaccttgtgatccgcccgcctcagcctcccaaagtactaggattacaggcatgagccactacgcccagccagggaagtcttttttattccttaacatcaatctactccatagggtcttttggttacctgtcctcaatagcacttcatattttccttcatacttcttagcacacttgtatttacctgcaatcttcctgcacttgtccataagctccaggagggcaggaaccttgtctgtctggttcactactttgtcctcagcacttaaaaagtatctggaccgcagtagatatgtgatatgtatttgttggagaaatgaaggaatgaatgctcacaaagatcttggatcttaaatgttccacttgaatatgctacttgcttttgacaaaatgaaataacaggagactgtctgtattttctgttccatttctctaccctatagagatggtgattgatatctggagtttaagaataaggcatagcatgcaagaattctggcagatgaacaacctgcttagaaagtctgttcttgccttcgactatcagaacagcattattttctttggctcaaaggaatctaagactgtgtgtactcagggaaatggtgtagacccacggtgtggagtcagggccaagggtgagacttaaataataattaagtgaaagagggttgtgtgaagcctgggggcgacactgcctttctcagtggctgcggaattagaacattctcccttgtgtcaatgtggaagtgaatgaattaggctccgttttatgctgtgcctggaaaaataccaatccgtactcgcatagtttctgaaagcaaaccccaaatgccactgtctcagctccatgggagactgttaaggaaaaaaaagaggtaacattcacagactatgggaaatatcactgaagtggaaaaagattagcgttgttgtttttttgtttttttgttttttttgttttttttttaccttttttgaagttacatacccctttggtaatgtaacaaaacctatggaccctccttccccttc

SEQ ID NO: 64592 - DNA, 1064 bp, Homo sapiens
aatgggagtctatcacatcatcatcttcttctcctcctccttcctcatccttcctcctcttcctcctcatcctgtcctcctcatcttcccttctttccttccttccttccctccctccctctctccctctctccctctctcctcctcctccttcttcttccccttccccttccccttcccctccctctgtctccttctccttctccttccaaccctttaaaactggagaagctgaaagctgtccttaactgacgggcttacaaaaacaggttgaggactggatctggcccctgggtggcagtttgctgactcttgctctatacaagctggcctgacccttctctcctgctcacatcttcttgcccactgccttgctcactgtgctctagcctcagtagcttgctggctgtttgggggcacactggtcacattctgctcagggcttgcacactcctgttccctctccccgcaacattgccccttcaggtcttccatgtggcttgcttcctgcctttgtttaagcctctgcttgcagaagctctccttggagaagcctctctgagcagcccctccaaaatgctctccccactccaccccaaggacatgctatccctcagtggcttctctctctaggacttactatatcttcacttgcttgtttgtcactaatgccagcctagcatcagctcttccagggcaggtgccagctttgtctgtctcattcctcactctccctccctatcacccagaatagaacctggcacttagtggtcaatcagaaaaaatatttgctggatacattaataaatatatccatataaggacaattttttaattatataatatataattaatacatataaggacaattctgccatgtggccagctggttttcaacccctgtagtactactcatttgcaacaaggccctctttttaaatcctcagcccggttggctctgtgtaatgcaaagaggaatcggatgaaggtgccaagcagtgcttggggtggctgtggactgtgagaggccagttccatgtgctgtcatggtctgaagggtgaat

SEQ ID NO: 64593 - DNA, 1030 bp, Homo sapiens
ggttccaggctatgcagtctgacaggcctgcgttgcaattccagccacactatttataagctgtgtgacaattagcaatttgcttaacacttgtgtacctccattgtactgtaaaatgccagtggtaccatattcaaaggtttattgtgaggactgaagatggtgatttatataaagcacttagatagtgcctaggacttttgctaataataacattattgtgtaaagtccacttgtcttgagaacctatgaggagggtatttggataggagctaataggtctaaggcctagtgtgaacctctcattaggcagctgtgcagctttggacagctcattcaacctctttgtgcttcagtgtccttctcaggaaaatgggaccatgccagccattcagcttagttcacagagcagttctaagaataactgccaggataactgatgtgagagtgtttttgaaaaatataaaaccaggttatcatgagttcttgatgttggcatttcactggaatatgaccaggaaggaagctgtggaaaggaattgagtttgctctggaggacctccgtactggttctgctctacaatctgagaaatgcccagaacagctgaggccaatcaacagcagcagtaattatgaccaatgcaatgtcatggacctgcgcagaagccaaaagcaagtcattagcagcacttgaagttttcctttgctaaacaatggcaccttcattttgggagttcccaggttgtcctctctggacttttggatagagggtgattgcagatacactctgtttctgctggtgcacctgtttcctccctcaactcatgtttgtggaccagacccagagtgccagcatccaccccgaccccagtggtgctcactggaggcaccctctcctgggctgggtgaaggaggaagccctggagtagattgtgtccaccgttgtgtatgtgtgcttgcaaacaaccatgtcctgggaggattaagatccctaacaaaaatggagttagtttacctactgtttttgttc

SEQ ID NO: 64594 - DNA, 1043 bp, Homo sapiens
aagctactattttacaacttcatttaatgtgctgtaacattagcagacgttatgcacctttgctatactatgtcatgattccagctccctaatcctttcctggaatctttctccaaccagactggtgtggaagaggccagagtttcacataatttctctccaagctgtacctgagatgccactctaacaggcagcataggaaagctgggtcccgatctgaactgcatagggtcaggttgccaaacctaaatgcttttttaaaaagaagaaaaagaatgatttgccaggcagggaaaacgtggagcctcccaggggatggcttctggagcttggtggcaggtggccatggtaagggctgggatgtcttctccactccgatattgctgcccgtttagtctatggagggagctttcctcaacaagggtcaggggtcagcctttattgggtctgcctgaatctttagagctgtctcacttttcaaattaactgtgaggaccacccaaggtagttatggtccaccaaaataccctttccccatgaggtggaggaagggctaggggagctcaagcaactgggaagccctgagggagtagcagtttctgtcccgtgtatcccactgccccagagcccaggcaggaagaggcatgactgggtcttggcgtccagatagcctcagatatcctcagtgatgagcctcagcttttctgtgaatgctagaaaccactgatacatcattagctgaagtatcattagtttgcattttgttcattcacttattgattgatcaatttaccctttatttgttgtgtgttttgtgcagagcacagccttggtgcctgtgttcgttgtgaaagattttgcttgcagatgattcttggtttgaattccagccttgccacttactaatccctgaatcagttttcctcttttgtaaaaggctgttttacaactctctttccccaggttgtgaaaagatgaaatggcataatacaggaacatgatccagcatagagttggaagcatgtttgtctgttaaatgggaa

SEQ ID NO: 64595 - DNA, 1093 bp, Homo sapiens
aggctctgagtaaatggtcacatcttttactgccccccaaggtgtgaggcaaccagcacatcatgcaacaccaagtcgctaacagttgttcctttctgtttgcaaaaggggggaatattagggctggatctgctgccacttccagggaagaactgcagcttcaattacttttcacttaaaaggaatattgcttgttttttttttttttatttgttagcatttattgggcacttactaggtggcaatcactgttctgtgcctttacacacattatgtaatttgtctgcacaacagtccctgtgatgtaagtactattattatcctaatatgatagataaggaaactaagtctcagaaggtgataatttacccagagttagttagtaagagggaaagccacaatttcaaacccagaacaatctggcttgaaaactatacccttaaccattctcggccaggaactgtgccaggccctggttgcagacaagtcctgcccacgtggacatcactcacatcaaggacagcagaggaggatggagcaccttcccaggttaaccattaccacctcaccagctgccaaatggcaagagggcaaggcgttggaaccgcatctttgagctcctccccttccctatccagcccgccccttgtactgcacccaccaatctgctggggcctctgaacacgtcaagcccgccaagttcctttcctttcctggcccaggtgtggagcccctggggagcacacgctggcatgacaggaagaagctgtgcctgagagctgttcaaaggagcatcttaatctgcacatgagagagacctcatcccattgctgttggtaaatacacttggtagcagagttggggtgctgcagagttcttccctccctaaaaagagttagttccatgtgagaacatctgtgactggttgcctttctcaagcttggtaagcacttggggcaagccgagtgtttgggttggaatctcaggccataaccatccagagagcgggcactcagtctccccagaagaaagcctggcaggagaggaaggcagcaaggtgtggggaaagcataggacttattcaaatttcagc

SEQ ID NO: 64596 - DNA, 1076 bp, Homo sapiens
ctcctctgctgtgggaaaatggctttaaaaagatgtggggaggggatggtttgtgcatgaatgaagatgacgagaaatgacacttgttgttggaagggaggctggccacggggagccctcatgcttgtttctgactgtggataaagtactgctttagtttaactcgactttggaagcctgagttggggttttggggatctgcaactgataccgtgtcaaatactgtgtcagatgctttacatgggttatctcatagctgccttcatgtgttcccattttacagatagagaaaaaccgaggttctgatatattatgtaacttgcctggtgttaccaagtggatggtggagattttaaaatctaggtttagctgacttcaaagcttgtagttttcctggcaatgcctgacttcgacctatgaatctatggactcttggaaacaaaatccctaaatttacatatctgaaatatcagcactaccccagtcagtattcttgtaacccctttagcacacatcccctccactccgctcagaggaaatgcatgaggtggttaaggagaagaggtgagcagaggctgggtcctgcaagaccatgccaaggtctcaggggctgggactttatcttgaggataataggatgatattgaaagtcctaacagaagagtggcatgaagcaacttcagcaactattgagggccgacactagcagacgtgccttttcccgctgattgattgaaagcgttcttatgcccacatgaattccaagagaccctgctgcttcatcttcaagaactccagggattctgggccacaggtggggaactgccagcatagaacattttcacaggacttagaaaggtaaggaagagtgaggagagcgttccagattacagatcttcactgagttagttctacaattgctgagtgttgtgtccctgtcaccaaaacctgctaagaatcaacaaccctaagtgagtagacagaactacccagtggatcttagtgtgggcagatagcatgagatttggaatcagttgccctgtacaatgaacccggtatctcccaaattaggtgct

SEQ ID NO: 64597 - DNA, 1061 bp, Homo sapiens
ttccatgaaaccatgcgtgtctgatttctgaacctggaatttcactacagaggtttttatttatttattttgtcccctgatagctcagtcacttggagttaagtagttgattgaacatgcaatttttaaagctcattcatgctgaatttgctttagtgtggtagccagtgttccatctttatagagtttctttcccacactcttatatgaaaataaacaaggccctaaaatgtcaggcaagattccttctggctttgtaacctaatgtattttatagatggttgaattctccagtgaacatttcattggaaaatattcctttcctgacttctgtttctccatcaaagggatattacattgtaagtgataactatttcttagtggccttgacattgcagttctgtgtaggaaattatcctgcatcagtcacttctgttgtcatcagattcctttcatctcaagtacctgcatttcttcaacttaaaatttggaacatgatcaggcctggggccagggagatggaacctcttgatctctcatatcagtgttgattcttagaaagaagaaggtatgatgattgataacctggtctttgaaagcagaaaaccttggtcgaatgtcagctttgcttcttgttaactactagaccttggccagatcgtgtctctgaatttcagttgttttattttaaagtggagattcatttctaaagaggggatggagaatttcttttggtattctcatagaggctttgtatgctgatgctttggtgaattagaaaaagcaatgctagagaccctcctttttggggaacacttaagcctcgctgtcccactcaccatataatagattttctaaatatcaagaagtaacttgggtgtcagtgaaatgcccctctttcctctttcggagataattatctatatatctctatgtagagtgtgatatgatagctaaccctgcctgggcatcagaatcctcttgagacccttgaagggaaaagaaaaatgggcatccaaacctactgactcgcacacttcaaatatgaggcccaggcatct

SEQ ID NO: 64598 - DNA, 1027 bp, Homo sapiens
cttctcacctctgaaagcactttgcatctgcctttatcctggctgttgtaactactcacatctctctcaatcaggagcttctatagagtagagaacaagttttatacatatttaaaacacaagcacaacacctgactcactacaggagcgtgataaacaagcactcattgatttactggtgggtgggtagatggatgaagggaagaaagtaaaaatggatggaggaagggagggaggaagatctgggtaaacagactggtgaatgttcagatggatggaagcgtggatgagtgggtggaaaaaaagagatgaatgattaaatggtgggggatgcacaaatagacagatggactaatgggtgggacagatgaataagtatgttccccttcactgcctagattataaagtccataaaaccaacatatttcatgtagctgttagaccagtcatagcaaaaggcccacagcaggcactggtaagtaacactgccatgagacaatttcagtagcttggtagtaggacccacccgacggtggatgctaaagtgctattttcaaagatacaaacacacatacagtggtatgccagggcaggcatggactggctcaagagagttggttgtaacattttcagtaaattttggagctgattgttaactacagccactattttaataattaaattatataaacttaaaattatatttttaaagtgatagtaaatatttaaaactcatcactttctaattattttactgtattttactattgtttatggtcatgagattatttacacctattatatctgtatgagggaaatactatataataatgcactactgtacatctcttcccagctcagagtgggtaaattaaaatcagtcttggtagaaggatttacaccatggtaattggcaagtactacctatcaggcttttctccttggagagccaactgttaaacgtcactgagtatagacaggtgagatggagtaaaaaaaaaaaaaaaaaaaaaaaaaaaaaaatcac

SEQ ID NO: 64599 - DNA, 1051 bp, Homo sapiens
taacgtggggctggtttaatcctgccaactctacttgggtctgacaaatcaaaggctaagactccagagaggattagatggtccgggttaatactaggggaagggaacttgagcagtggaatttgtcatgccttgaccatgtgctgggaggagagagttcctccagtgaaggcacgtgggtggatactggccacagctttgccttgggccttaaggtaaccaccccatgggcctgactgagagcccagagcagacagaggaggcttacaggtcaattggacagcattagcctgattattgttactggtagccttggccaagggagaaggtgcaaggagaggacagggcccagcctctctggcatgttgttgtggaaaagttgcttacccttcaagtgtgagaagtagtctttcatagttggagctctgctcaaatccgtggagtacgtacctgaaaacacagaaggttggccttagctgaaactgttggactactgctgccattcaaagagaaaggagtttgttttccctgttgtcttgtgattgatttcttagactacctgccattgattctcctcttctcctttttcctcctctccctgtattagttttctgttgctgtataacaaattatcacaaacttagccacttaaaacaacatgtctttattatctcacagcttttgtgcatcagaagtctaggcatagcttagctgggtgcctctgcaaggcttcagtcaagctgttgcccagggttgcattctcatctggaggcttaactggggaagggtttgcttctatgttcactcagtttgttggctgaactaattttcttgctgttataagactgtgggccctggcttcttggtggctgtcagctggaggccaccatcacctcctagaagctgctctcagctccttgccacatgggcctcccaatatctgcctgcttcctcaatgccagcatgggagaaagcttctggaacaagtctgctaacaaggtagaatcttacctaacttaacataatcatgggaatggcatcttaccagctt

SEQ ID NO: 64600 - DNA, 1035 bp, Homo sapiens
ttgccactgctttgggaatagttattaggacaaacaaaagcaatattaatctggccaaagatggagtgagatgctttcatttgtggcttttttctctgggagctgagttgtagctggactgatccactctgaactattccgtcttttgtgacggttgtatttgcctttccaagagcctaaagcacaatcacagctagctcactctctttcccagtctccaagcatttccacgatgccccttcactccaagactgtcatcgatgcagttgtctctgttttagatgacgaccttgccccagctgtccctggaggacggcagctcgatgagtaagtcctgaagcttgctagatgtgtctcagtatttcacatgcctgcactgattggacaaaccctggtatgggccttaggacttggttgcctcaagtgtcctgaacatcactactgaaagtgtctctctggtgatttatttttctgacttgtgtttcctttttcagcaaatgaaaagattgaagacatcaatggctgtccgaagaacagatcccaaatggtaagtggtgcataggtagtaaatgtttgagttctgtcagcaagccctgcctctaagtgatattgaccatcttgaaaacattcataccagatgctttactccaggggattatattaataaactcacagctatttccaagtagctgtgttctgcttttctgacatttgttggcatttattgaaaaatggctatgatttttatgtagattgtgagacagttaaagtgaaatattgtccttgttcttagacacaaattatgcagaactggtacaaacatatacatgtttagtacttgaactgctgtggctcgttctgcttcctcaaagacccacatcaatatgtgtttgtgtatggagctgaggcacggatgaagtgatggtatcttactaatcagaaactggagcatgtggtcagattgcctttaaaggttggaatgatgtgaaatcagaactgtgacaggaaatgtgaaatgtgcagtcacatctgaag

SEQ ID NO: 64601 - DNA, 1078 bp, Homo sapiens
tggaagctaccttctagggttgttgtgatgggggtataaaaggcacctggtctcatcctggctcacagttaatgcaagtgagaaggtcattccctgccctgtttacaagtcacatatttcctaactatggtacatcaaaagattttttcctattcaaaaagtacgccctcagtggggtagctgaacagtgtcaacccatccccaacaatgttcacatcctaatccccagaacctgtgaatatgttatcttacctgatgagagactttccaaatgcgattaaggattttgagatgggataatgatcctggattatctgggcaggcccaatgtgattacaagcattcttataagacagaggcaggaaggtgagagagatgtgacaatggaagtaaagttggagagagagattggaagatgctaagttgcaggctttgaaggtggaagaaggggccatgagccaaggaatgcaggtggcctccacaagctggaaaaggtaaaggaaacagattctcctctagagcttccagaatggatgcagccctgccaaatcctaggttttagcccactgagactgattttggacttctgacctccagaactgtagataatacatctgtattgttttaagccactaagtttgtggttaatttgttgcagcagcaataggaaactaatacactctgggattcatgcaaaataactcttgctgtatcagagagtaagctatttgggttttatagcacaggctcattttgctgtaaatgtgggttccttggatttctgagtttactggaaggtgcctctattgttagaacccttcagaatggagcttgctgcatcagtacattcagagcacgtcactgtagggaagcatgtggaggacagagacccacagttttttatttctagtactgtgtccacattgtgggccgatatacatactaagctgtcatgggagaggcaagtgcatttcatctcagtaattagaagtgaatattgcatcttctggacctctttgccaatgtaaactcacaaataggtactttgtccccacaactaacatatgtttgtcttgtt

SEQ ID NO: 64602 - DNA, 1004 bp, Homo sapiens
ctagctcttgtcactgcccagttgggtgactatagatatgtcacttcaccttgtgggcctttgttttcccataagtaaagtgagtagccagctgaattatttcatccaagcctcacactctgtgattctcatgtaccactgagaacatttggaagcagaagtggaacatgctacaggtgtgtggctctcatttggtttccttagtgtggggaaggaagcatggctgaaggattaaagctgaattaccaaaagagactgaggggctggcccaccccttggacatttctctgcttcacacatcacacagagtggtttataagcagtgactttgcatcctgacttgtccacatcagtcctggctatcaactgtggtcctggtataattaagagctccccactccctggctttcattctcagaagcgtcatagttagcacaataggttaaaaggtcaccatagtaaaaactgtcatttttaaggtatgaagctggagctgtatgagaatctcattcaggattctggggctatagtcatataataaccaagatgaatgaaggacttcactgtttaaagtgtgcttttgcctaagtgctcccattagttctgcaaaacaaccttgtgcagtggggcaaagcggtgtccgtattgcccttttactgaggcccggagagattaagtgacttgcctggggttgcacaactaagaagtggtaagaatacagattggaactcacggcttaggttttccaaatgctatgctcctgtctactttgtcctgtgatcagaatctgctagctcccaaagtagggtgtgaaggctggattctagaagttcgtattgtcagtttcttcagagcctggagaaagggatgctccaagggaaataattcagcctgacctaatcagcaaatcacactggggggaaggcactggcagggcgcacttcctcctctgcgtggaaaggagcttgcttctgaaaggactccattcatactttctgcccccc

SEQ ID NO: 64603 - DNA, 1032 bp, Homo sapiens
agagcaggtatgcattatgaatgttcagacaggtggtgacacagaaaggagcattctacaaacttggccacgtcactcttcttattttatagagcatctcactgcatagggttccaaggaacatgcattgagaaatagtggcttgtgtcactgagctttgctaacctgaggcatccatttccatggtaggcgtttgttttcttaaaataaccagatattccagtcagagcacccatctcccagtaagccaaaacatcctactactaacgagtgctttacctaaagaagagccaaacttacttgagtcaggtttttacattcatttattccagctacaaagtgtcctgccatcatggccccctgaccctacagtggtgacatagaccgggctttggagttgctgtatgtcctcatcccttcatcttgcccaggttgggttacttctgcagaagactggttttattcactatatcctgatactttctaattgtatttccaaaggataatcttgttctcaaggtctagggatatgctatcccatgctaacactctggctataaatttaagaatgataaaattacatcagtggctcggtctccaaattctatctttgataaccaaaattccaagggcagtggtttggacgcttgattattaatgtcaaatgttgatgcaaaccccccacatgccaggtttgttttgtttttctgttagaactctgcctaaaaactattttgaagctatctaggttcagcacccctggggggtagcaaatactaaagcttggacaacattccatgaagtttgctggtaaaggagctatggaagttggcaaagaaaatctgagatttttttttgctccactggcatgaaggaatcagagcaaatcttccatgacagcttcatagaggctcactttgcttcttccccttagctcatctcataactgacatggtggccaagaacttaatccacatttcaccctgtgaaattccccactggtctagagtccaggagaggagcatagtctcc

SEQ ID NO: 64604 - DNA, 1037 bp, Homo sapiens
acacacatgaatacatacacacaagcattcttagataatcttaaaagcagtttcttcacattggaaatctatcaaatcagtaaactgagacctagaaagaaagctgtgtgtcatagaaaacagtgggcagggggggaaagaaacagcaacatccccattgtcagaagactcttaggatttgtgtgtctaatgtatcttctctctcctcattcagctcttccacttttttctttcctatcatgcagtgcatcatccaaggactcatctcaaagcaaaatcatccgcttcactctgggtcagaaaaagatctctaggttagactttctctgtgtcctgcaaagcatggtttaatcccaacccactgttccattgttccctctgttctggctgagtttgcctttggtcctctcctcgtttcatgtttgcagttcgagaaaactaaatgtgctttggctaatggtcccatggtgcagagctttgaaagtggccatgggattgttgcaagtgtgtgtgggggaagtgacagagtgcaagtgagattgaggtgtacatgacgtttcgcattttcttgacttttggctttgactgctttgtcatcagactccattctgatttaggtaaaggtgagtttctacatagtttttatagtggttttatgatgagtttgcttcctgcttcgtcctggccctaatcccacctcacctgcatctcatttatgtgtcttgtgctttgtgttgttgttgttgttgttgttgttaaaattactaatgtgggtttggttttcccttgagttataaagacttgagcatgaatccatattgggcagaggagacaaaacagcaaggcagctatgtctcgtctttgtttctggatgctcttaggtgccatggagaccgcctcagttccctgaaaataaaaaacaggcttgctcacaagctagttctcttaattcagacttcaacctgtctgctgcctcctatgaggacccatcctatggtatgggaaaagccagttatatcacgttgcatcattgcttc

SEQ ID NO: 64605 - DNA, 1063 bp, Homo sapiens
atgaggtaaattaaccaaggtacaaatcctcgcagcacagtgggaagtaattctcactgcaacttgttgggggaagagctaacccccttccttctctcccagctcccagtcagggaattgggccagcttctttttaactatataatttttacagtcccctcacaccagctcatgttctctgtttactctacaaccatctttcttgcccagccaacaagaaaagtttaaagtgattgcctgcttatatctaaaatgcttccagactgtagacttctttggtgcttacagatttgcatggaaagagaaggctgaaagttttatgacttgaaaattcagacttgtcactagatctaatgctagtcagctgaggttccagtggcttttaaacacagctaagtggatttcaagctgaaagatataactaaacatttcatcatttattcatctttcaactttaattattggaaacagcctgcttagtaattccctggaccaaaatcctgatttgaggagtcttaccattaactctttggtgaatgggccataatatctttagacacattatggatggtgactttatttcccaagccacccaaaatgaggtgttttatttaaagggagagtgtgtgtttgtctttaggccaacaaattcctgccagttttacaggaagaatatatgatgttatccatctactgtgcagataagttgtacttcagcctcaaaataatgcctttggagacaggtcatcaggtgttgaagggaaatgtatgtgtgggcaagtgtttccaaccaacctgaagttttcattgcaaatatgttggattctgagtggtagtaattcaccttctcaccactataaattgtccttttcttgatacttacaaccccagattatggcaaacagtttttatacctatcagaagagatgcacacacaaggttatcagtttagaatcctctgagggctttatgttccatgcttgataaaattagaaatgactggcttgaccctattcaaaagtaaaaatacttatcccagagggaaaaaaaaaatgaactttgt

SEQ ID NO: 64606 - DNA, 1053 bp, Homo sapiens
agagctttaacaactatgataaatccaaaccagtcacctccccacccccaccgccaagcagccacgagaaaggtgagtcaccttcttgaggagcctttttggtattttccttcagagcacatctacctagttccttcgggtgaattgggttgggtcatggggaggggttgcatctgtgttgagaatgagttacaaggacatatttggtaggcaggaactttagtagccagaggtattaataaagtgggggaaaatattgttatagtcactagcaaaaataatttgctatctttgtttgggtggggccccatagacacccggctatgcatagaagcaatatagcatttggaatttgaaaataaattttcatggaatatgttccatatattaagtagtttttcagaaatgcaagcttcttggagcatgcattttgtgaactgtgataagcttttttatccgtcagaaataatgtgaggggagttaggaacaagaggtttttcaccctttgaaaaagtcaggaatgtggattggctcattgaagatcttggctacatataaggagtggacagcattgctctaggagttgtgatgatgtaacttttgccataaaaggatatggattttttttttttttttactatacacagtactgagtttttaggatggagaaaaatagtgaatagtcccatgggggtgctgcccagaatgtagtaaaacaaacctttgcttgtttcagcctctatctcttgagacattggagaaactaaggtagtttcaaagattattcaaaaagaggcagagccttccttcattccttctaggcaaagtagtctagacatctttaggaaatatgtccaggtctcctggaagcatttcctacctggtggtgtagaagattcctagggctgtctacgtggtgtttctctatttccctgacgtccaggaaagctgccccctcactccctaaagtgccccagggacatgggcagccctcctactgtgaatgagctgggaaccgccgccattttctcctctaactcagagtcacttgat

SEQ ID NO: 64607 - DNA, 1373 bp, Homo sapiens
cattgtatggatttaccacaatatcgtttaatcactttcatttatgttgtttccaattttttgatgttttaaatagtgctgaaattaatatccttgtatgttttttacatgtatataaccatttcagtgtaattgctgtatcaaagggtatgcatagtttccttaatacttccaaattttgctcccaaaagattatacctatttatatacccatcaacaagatatgagagggctactttctctacatacttgatagcacttttatcactgtcttcggcaaaaaatactttcattcttttgaaatgaggcaaattattttaagaagctgaaataacaagaccatttgataaaaactggacttgtttactgacactgctttgacaaccagttgccttaacatagtacaaaaaagcacttgagtttgaggtcaaactttctactctcaagatacttctccagactcagtttcccctctgtgagtctgaggtcctccatcactaaaccaccgtgaggtgtgaatgaattcttcagttggcgctggctattgcacctcatctgatgggagcgccatccgtgatccatgctttctggtgggtttcctcctctagtttttgttctgtgtcattcccttcctctttgttcactccttgtcatgagcagaagagaagagccagacatggctcgagacagaattttataaccttcagcactatgtcatgtctgagtaactttggggccattgatttagaatctctataaacatgtcactttatggttggcaaaccaagttatttatctgagctggtgattagatgtaaccatggaaaagttgcccacgtcctgctattaaccaggattctgacataaaattacaggttagactagatgaaattaattcagtcatccaagtcatgcagacaaaagtacagttggggtggcctgtttcaggttactttcttcatttgttcatttcatcatcatttatagagcacttactatctgtccagcactggactggttgtcgtgacaggcagaattgagacacagactctgcttcccagggactcacagtctcagagaggaatgatgctcacgtgttctataatagagagaggctcaaagttgtgaggaaaaagatgaacatagctgggaagactcagggaggacttccgagaagtgatatcatttgtattgatttccatttcaaaatttttgcttagagaaaaggaaggctgggaaagaatgacttgtcctgcccttcctgatctgggtgttaatctgacagcaaatctgctgggttcactgtgttattcaactcatattctatggagggcttgtagagtgtaaacttctgcaagatcatttctgtggtg

SEQ ID NO: 64608 - DNA, 1045 bp, Homo sapiens
tcagttgtcaaggtaatagtctctttccactgtagttgcatgaaaatgagaatgcactgagctcatttaagatgtactaagacatacttgcagtttcctataagttataggggcatgtagttctaagaactcacgggggagagcagccaaagcatccttggttaccccagtcccatagaaggtgtctctaagaagcagatgctggcaggtcggtgaaggggcacaagcaccacttgctttatgaggcccctgtggccaaggaaagaaggtaggaaccagctgttaaagtagaactccgcaaaacaggtcttactccacttgagtctgttctccagcctttgggattcttggtattcacaggcctacacttctctgctttctctttcccacaccaactggcaaaagttgttgtgtgatgaagatgatccaaatgtcagacttgggctcaggacacctggggtctggtcccagcaactctatttgatggctgtgtggctttgatgggtcatttaacacctctgaacttcacattcctcagctctaaaatggaaatgaggatagcaccaaccacataaagttattgtacggtttccgtgagatgaaaccatacagaaaaataccctaaattgtgtatataaggtttgttgaatcaatgatttcataagtgtccaaaagtcagaaatgactacaaaggggaaagtaaccacagcagctgaactgagaacctcagagagccagttctccactcctggtctgttgcttcagatcaaaagtctgaagcacccctgtagccgcctcttcttgctcatcctcctctctctctgataaaccgtgatgaaaagtgtttttgaaaaccaagggaccaagaaacactgaatgaccttcactgaaaggacgacttttagcaaatgcacacttgacatagtttggtaaatatccaccctgttatcttttgctcctggtgtcttagaaatgtcacttattgattcttgaaattcccccactgccactcatagggggagggggaatttgagacagaagtatt

SEQ ID NO: 64609 - DNA, 1052 bp, Homo sapiens
agcactttgggaggccgaggcaggctgattgcctgagctcaggagtccaagaccagcctgggctacgtggtgaaactccatgtctactaaatacaaaaaattagccaggcgtggtggtatgtgcctgtaatcccagctactcgggaggctgaggcagaagaattgcttgaacctgagaggcggaggttgcagtgagccgagatagtgccactgcactccagcctgggtgacagagcgagactctgtctccgaaacaaaataaaattaaaaaataaccaaacaccacatgtaaaaatatcatgataatttgaactcatttttatgaggacaatgatcacttctcccccaaaatgcccttaagtgtaaggtaatgcttaatccctgtctcactggcttttacagtatcatcattttgcaagcacatttttttttttttttttttggtcttgatttcatttagggcaaggacagggcttagcaaatatttgtgagctggaagtgaactgtagccaactctgttggctatatggtgcctgaaatcccagcatgtgccagatgctgtgcttggaatagggacaggacacgtagcacagaaacagacacttgtaatatcctgtgataagtgtctataggacatttatgtctggaaggagcatccaatccaatcttggaggagtcaggaagatatcctggaagaagtgaggtctaagctgaaaggtgcattagctatatacaataaggaaagcgtattctagacagaacagcgtgtccaaagtctagatggtaaaaggggacatggcatgatagagggaagttgagtgtgtatatgtgtgtaggtgtctgaatgaagtaggcaaaatgactctctcaattctacccagcaaattggtgctagactccaagttttgtgagggcagggagcatgcctgtcatgttcaataaatccttgttgaaagaattgagaggacggtggccaaaatgggatcagaacccaggctttctgaatctctttggtgttttatcctgtcacctcactctaagaattcttcatc

SEQ ID NO: 64610 - DNA, 1056 bp, Homo sapiens
ggaaacctgagagagctctgtggtgatgaagttctgggccacctaaattctagtaggtttcagcatctgttagcaaaaggcagccctcaacctttgagagcacaagtggtaacatctgcagccactctagcgattctaactggcaaaaatgatggattgcaggcatttcatcattgaatttctactaggttacatcctgacttaatcttttggtgcttacattctaatttttaagcagaatgtctgtgtttggtagtagttcttcaactttatctcattaaataaagtttagtgaactgccaaagacaagatgagctagggccaatgtttttgaaatagaaaaaatggaaatggaatttacatctggactctaggacactttgctgcttcatttgcagaataagagcaaaaaagtgattcttgtatgtttctatatctcttgcaaaagtcctctttgctttcaaacacccacagctttgagcaaatgtttacattccacttaaacacatttggactttaatgtctgtgctgctgattacgaaaatgttaaataaatgaaacagaaaataaaatttgtttcaaggtaatattttagaatgcctgacgccccttacccagccccatgagactggtcactgttgatctttgtgtccccataactggcacaaaacagagatgcattaaatgaaggaatgcattctttagagttcatgtcgaatactcattgtcatgaagaccgtcctttagtgtaactggaaacccttacccttgggaccatgtccttataggcatgtttcttcttctaaccctggtgtaaatttccaagagacccagactgtgccttatttctctttacacccagctaacccctctgaggaacattactgtatgtatacatcttgctcaaccagtgtgtttgcttacagactgacttccctaagctgtactgcagttcagagagaaactagattgaacagaaccttttagtgcattgtgttactaaaggcaggattaaggcatgtaatccgagttgtccagggaaacccatgcattcct

SEQ ID NO: 64611 - DNA, 1099 bp, Homo sapiens
gacactgtggaaatgtgtttacatctcagactaggcacttggcttctcccacatgctagacttcacctatttaaggaggcacctgaaggaagaatctccctggacttcacacttcctttgggcttccattcacacttccattcaatcattcattcattgtcaaatccttattaagcacccacagcaaggcacgtgctgagcatggaatatggttatggtcatagacatggatgctgcccttatgaagctcatggttggtcagagaattaaactagtcttaaccctcatctttctaggggaagatcctgaggctcggcggctgcggacagtgaagaacatcgctgatctgcggcagaatttggaggaaaccatgtccagtttaaggggaactcaggttacacacaggtatctgcagtgtgaattactttactgaactacctggtatcctaattttctcctgtgtttgttcatagcagtagcaaagcgatttggttataatggatcatagcctcgctttccaaatgtgccggaattcacaaagaatgccatatgacatgcagaagagagttataggaaataaaaaattagtatagacagatttttcccaaaagcagaaggttgctaaatccattcaacaaaggatactgtagaccagctctatttaaatttcactttacttgcattttctataactgtctggtgctgtggaaatgagcaggtgaactatatttgacctgtgtgataaactgaatagcttgaattcctacccaatcttctgatatgcagcactctgtaatattgttagtcatgcacgtacataaaacatgtaaggaaatatttataaaaacttatgatcatgttttaactctgatttagttggatgaaatctagtattacattggaaacatcaggtgctttcattgttgaacaagaagttgaagaggatgcaaccctgggatgtcttttgtgatttgggcaggaggaggttttatagttgtagaaatcaaggaaagttcttgttgtccccactgagctcccagggagtctcctttgcttctccaatttcagtttctttgataagtggctatggcaaggaaac

SEQ ID NO: 64612 - DNA, 1042 bp, Homo sapiens
gggagtcagatattggatcttgtgactctaccattaggtgtgaaacatccctttttccaccatcgtcactgacactgacttaatgttggcatagcagtttgacggtgggatggtaattatgacaggagggaagacttcagtggtttcttctgcagggaagaatctcattctctgctcagtgaggaaattccagttttcctgtgaaggtgcacacgatagtcttgactgggctgcaagaaactgcagcgctgtgaaaacagtggaagacagactctgccaagagattgagctcatccttgggcagattctagtccatgtaacttgattgaagagggaactcaagcccaggcatttaccaatctttccaggctttttggatgaaatatgagaaaagcaaaagtctgggggaagtgaactttagagggttagaaaattagaactgtgtccactgctcagttgggagggagctgaggatgtaaaatgtggtattaggaactcccggtgggtggagaatcccacccttaggaaaagaaggctgtgatgcaacatcctagaatgaatgggcaagcaggaaccttcatgccccatcctaatcagttcagcattttctagtattttctttcccagattggaaagaaaattcttatttttttttttgccgggggggatggagtctcactctctgtcggcaggctggagtgcagtgatgcaatctcagctcactgcaacctcagcctcctgggttcaagcgattctcctgcctcagcttcccgagtagctgggactataggcacatgccactatgcccagctaatttttgtatttttagtagagatggggtttcaccatgttggccaggatggtcttgatttcttgacttcatgatccgccctcctcagcctcccaaagtgctaggattacaggcactgcatctggcctggaaagtgagccactgcatctggcctggaaagaaaattctagtagttgaggtcatttaattaaagtaattcgtttcttgtaccatgttttagcagggaaagtc

SEQ ID NO: 64613 - DNA, 1030 bp, Homo sapiens
aaagcttttgtccagatgtttatttggcttagtagaaatgtagccttgatgtatgagtaatatatcaatctgtacagaggctctttgaggaaagttcttgtaaaagtttatagtaagtttatttagaaaatctgatatggaagtaaattctggtttctaaaaacctaagacctctgtttttaaagtgatgctgtacttcggcttggcataacagctattttttgatgcctctagttcattttctgtactggtgtgtgcatgtgcacctgtgtgtatccttcaattctccctatggtagggctgaaattactttattaccatattaccatgtagtttagctaagaattaagggcaaatgcctcttacactttgtgtgtgtgtgtgttcttatattgtgcctggtatataccaggcatgtctaagtactttacaggttgttatctgatctcactcatcccttttattggattgataaattgggcattggctgtagtggggaggaaattaaaataacagatgaaatttctcttactaggttttgatctgtgaagtcaatcttctactcatattctaaaaattcaaagtgccatatggtacagaataaaattaaaggggcagactccacgtccatatgtttgaaatgattttttttttcttttcaaaggaggcactgagttgtgtaatgttccaaagtataagtagatatccctttatggacaaaaaaatgaccctttaaatataacatcagaagtttctccctctcagaacctttgatggcttcccattgcctgtgggaacagatctgaatgccttaactgactgtggaggctcttcatggcctttgcctcatctgccttcgctgacttgcccccggccacatttcccttcacacactccagacttcccactgctctaggctacctgccaccaccaaaagctggttcctgcatttgcaaagccctgcctctggttcctgcatttgcaaagccctccctcctgggacatgctgctttcttcctggaattccttt

SEQ ID NO: 64614 - DNA, 1018 bp, Homo sapiens
agtcttggttcacacctacccttatatataagcgtttcactttgcatgggaagtgtctgaaagccactggatggtactgaggaaagagtatgttcttaaaaggcagacagacttgagatttaatcctggctctgccaagtgaactggaacaagttcttaacctttgaatattagagatagagcttgaaaagaacaggcaagaatctgagatgcacaagaaatgtgcacgcgcgcgcgtgtgtgtgtgtgtgtgtgtgtgtctttctccactaaacttggagttcctagcaggcagacagcactcattatttttctaaacccagagactgggacttagcaggtatttaatattttgagaatggtctattcttgatgcctactctggcaggaccttatgcttatataactcgctaccacacgctatgaagctcaatggttctatttacagaacacttggagaaagccagcttagcctgtggtgtccatctagtggttgatagaggctgtggtctcaattccttttcactgtgagtcattgtgttggtttaaagctcctggctggtgatatttagggctaaggatgttggcttttgagaatgaggctgatcaatagcctagtgtagagagaaaacaggatgtaagcatttggtcttccacagtggctttttaggggctgctgtcttccctccttggtggcaggaattactccatcaacaaatatgggcacagatgcctgcggggagactccgttcttcagaaattgaggaactcattcatgctgaattaattaaagtcatccctcagtatccatgagggattggtttcaggacccccagaaaataccaaaatctgtggatgctcaagtttttcatgtaaaattgcatagtatttgcatataacctatgtagatcctcctatatactttaaatcatctctagattacctataatatctaatacaatgtaaatgctatatggatagttgttatactttatttttgtttgtattatttgttcat

SEQ ID NO: 64615 - DNA, 1153 bp, Homo sapiens
ttccaaacgcctggtaacagctcccagatggcttctcttatgttctttgggctagtttgtcccccaggccagaatatccttgaacagagggattgtgtctttttactctctcacgtttccaacttcttctaccagacctgttgtgtatgcttgggtaatatgagcggaatgaaaagagagagaaagggggtgatagtaggagcagtgctgctgctgctgctgctattaataatacaggtcgtgttcattaagtacttttcatgtggcaggtgcttttcaggcattatctcattgaattctcgtagaaatcctggaaggcctataacatgtgattgtccccatcttacagatgtggaaactgaggatgacagaagtcccttgtccaaggtcatactgctactaaagggtgcggccagtttcaggaagcttgagagccaagcctattctcttggtgctgccgcctgttgcactttaggctctgtagacccaaggattttcctacctttccttagagctctacaaagcctaaccttcaactggattcatagaataagaatatgggaagcaacagagtttctgctagctagacaatatcaagctctgtcttattctcggtgctaggttttaaggggttcagaataaggcagaggtttttttttaggaacaggtaacaaggtgcaggattcaaaacccaaaacataatagaaatgtttgtagaaagtacaaatattggcttggcatggaaagtacttagaaaagcagtaggttccaggggaccaaacttgaaccataggtggaagttagacaggttttttattgcctagacaccaaggtgaccattaatcagcataaggaaaaatgtgcccaaaagtagacctgttaaaactagaggcagttttgcaaggacatgagccctgtcactccctgttcctgggaatattcactcagaatctggaaaactctgtatcccagatattacagaaggggttcctgcatgaggtgaaaaggagacaaagaggtgatctttcaaaggtctttcagttttatgattcagggtatccaggtgcccagaggaatcattacagctggattatagactgagcagactgggtattgtattctggagataaggatctccttggaaagccacgtt

SEQ ID NO: 64616 - DNA, 1038 bp, Homo sapiens
catctcctttcaccatctgtttcattctaagaaagagcttaaaggggctttgtctagagaactgtctcttgtgtgttaggatgtgtttcatctttcagaaggtggacaaaaagcttcctgctaatgctagaaatatttgctgcaattccacactgacagttgaaccacagtaaagacaattcaggcaagaccagtttcagacacaggaactgtcaattttcgaacgtgtgcagcctttcttcagaagtgtgccctgcctgcgtccatttcaaacaagcgtagccatggattataattaaaattttacatatctctattggtttaagggtgataagtacactattgttataatccttggctctttgtgcatcggagtatgtattttattagggctattataggcctttcaaattaaaatgctcctggactttatatacgtatagatctttttcaaccaaaatgctctggaaattagtattagatggaattttattaaacttgtggaaagtcacattgcattttgcaaaagacacacaaaccttggtagcctgtttcaccaccacacagaaattctccacgtgatcaatctctctgctaggagtttggtgaaagcaagacccaagcagtggtgagattgagcctgtgtgctaaaactcagggtaacgtgaattgtagcaatgccatgagccactgcggaattggtttatagcaaacagacaagtcttgcaatgtagaaatcattgtagagtgtgttgaagcatctgctcagccaggatctacttctgccctgttttagcaaagtcactgctaaggtggggcctcgaggtctgtgagccaactcatgctggatgtgaattttgcacatatgtgagatgaggtccctagctttcactcgtttctccaaagaggttaataagaaagtttaggaatttctgatttcgataatggtctgtaaactggatttggttgtagttgtttttaaaatatatatgtgccatgctattgaaatattgcatatactctatagcgtgcaaaaac

SEQ ID NO: 64617 - DNA, 1029 bp, Homo sapiens
gagttctacaaaggaaagaggaaaagtactgagtgattagacctgattagacctcagcaaacgaaagaaaggcagatcactgtgtgaataagaaaattaataaccacagccaagcagctggggagaacagctcttccaggaaaagaccttaagggacgctggcctaccaggcagaacttgcctgtttgcagcagaatgtggctggggtatcttcagggttattaaaagtaactgataagaatggatgccttcagagcctgggagatagagactgtgtcagttggtgagtctggtatgttaccagccagcttctaagaaataataaatgaagatagtaaagtgtgcccttgatctcttgtcactctttagggttgccactcctgggctccaggtttttcctgatagtgatcagtgtctacttccagcagactagagccaggtgtctgagaagagaggatcaaaagggacaaatggagtggcttattacacatcataggctccagataacagacagataaaaggagctttggcatggaggtctccaaactggcagactgggaagaagaagaaatatggcaaggagggccaagactaggctaacagacagtcaaatggctcattgaactcctgccagttcctacatgcactgctgtcctctcagaacccatcaaaagttcccgaactccagcaagttgagagctttgatagtgtaaagatcagctctgggaaagttctaaatctctttcttggtgactgcaaagccacaccatcctcctcatccttttctttaccaacctgtgttttagcacacaacgggctgagccagttagatgctcctctcgaatgtcatcccaagatcacataaacgccattgagagcacaacgaggacagaaatcaggcttggtgtgacattagatcaggaggaggactttggaactacttggtaactttcttctaagccgttagaatacttactgaacttcagtgctttttattaatttaggcgataaggccatattacttcaaac

SEQ ID NO: 64618 - DNA, 1189 bp, Homo sapiens
atcattgtgcttgcctccctctttgtttaaagagtcagttgttatccttccaaaaagcaaaccttgtttagacctatatgagtaataagtgagcatcccctagggcctagcaccaactgaggtgcttgcaaagccactgcatctggatttctgacctttaagccagtccgccttccaggtatcattttccccatctgggaggctcagcaaaaagaaagcccaagagtgtggctcaggctcaggccaagctctgctattgctgagggaattctatcctttacttaagaagatcttagggatgcttgaagctgtgagtataatatttttctctgaaggacatttaactgttttattgccagaacccccagctgaggcttcagagtttcccctgtcatgttgatcacaccagttgaccttcagggtctgtcttccattgcctcctctaggagcagcctctgctgtaaacccctgtggctgttttgcgtctcagtaatgcagaaagaagaggctagccttgtgtgtttcagctgcagtcctgttattttcgctcgtccactgtgctctttgatttatcttcctcattaatctgtggcgctcagtactgtaaaattgcctgaaacgagatctgaagagagaccctgacattttgagggatgttgcaggattgtgtggaggagattaaatggggacagagggaaatgaggtggctgcatggctcagtgggctcaaacctccaacttgaggatttctattggtacctctttctttagctgaccctgaggtttggagagagagactcacaagcctacggtttctgtactggcaaaataaggcttgaaaaaaattctccctggccgcttatttgagttgcctggacattgcttgtgggcaacctatgagtatgcagtaattgaagccctagagaagatgtgaacagaaccacaggccattgtagtctgggtaggagtctgtcatgtcacctcctatggggtgcaaagtttgacactagaaggtgagtgcagggacgactttgggtgccctacacctaaccagaagctggtggagcactatgtggggagatgttggtgggcctccagggcccctccaacttgtggaagagttttgtggagagaataggttcatttttccattgtcagtgtggtagcaactcatgagagctctgggtaca

SEQ ID NO: 64619 - DNA, 1007 bp, Homo sapiens
cacctcagcctccagagtagttgggactacaggtatgcaccaccatgcccggctaatttttgtattttttgtagagacagggtttcaccatgtcatccagtctggtcttgaacttctggactccacggctttggcccctcaaaagtgttaggattacagacttgagccactgtgcccagcccatttttagtaagggctttattggtgtagtaaggactccataggactttctgaaacagaagaattaggtgattaagtaaaatggtggcactgctctctctaacagttttgaaaatgagactctgttcatatgcccaggatgtgtgaacagaatttttcctggaggtgcagggcaagtttgagaggacctttgagtggccttgaggctttgcctcatctctccacattgattgggttggcagtattttcactgaagaaactgatctgcttttctgtggagtgaaatgacaggttagaaaggctctcaaagtctaaatttagccagcacagtgtattcatgtgctgttttgcacccgggtcaccaggagaagatagatttgacaggttggctgggggacaaaagccagcccttgaagaaatcagttctcctttgaaaggtaagtcagactaattatttttctctatcaagcctggtgtgtgagctcattgatcagcagctgcaatgggagaatggagtggtggtactaggaggcacaactgccaccactatggggcttcagctgtaatcatcttccaagatcagccagtggtacagtaactgcctgctatccccgcacacactttagatcctttgctttatgatgctgttttggatttgtaaaaacattttatgttcacaaaaacaaaaaatatttttatagaagagaacgttatcatactttaccccttgtagaaatcttgtgagactggtcattgagagagccttgttttatagagcaaagttgcagaaaccaaatattgcagaactgtcagcctgtgtattttaa

SEQ ID NO: 64620 - DNA, 2011 bp, Homo sapiens
gctaccttatgacctatagagctgcccagggaagcacatttctgtttttaagccagacaaggggagaagaaaacaatgttcatgaccacctaccacatgccaagcatctagcagacattgtgtcattcaatttcattgcaaagccagggagattacattcaattttgaaaatcaccagtgggaaccaagagaggttaaataacttgattaaggttacacagctgataagaggcaaagctgggattggaacccaggttcactctaccaccatgccttcctgggtgggcttggcatctgagctcggaatggttttacctgttaattttaaatgtgacttcagctggatgaagggcgtactttgttgtggaggactcaccgaaatacacaggatgctagcagcacagcctgcctgggcttctcggattcagcttgtttctggaaggaagagggctgtgtattaagaagcagccctgctttggcagtaggacctagctgggagttctgtgatcttgaggctccggggctgctggattgatcaggctggagctttagtttgtacctggttcaggaagacttgatcccaagtgaaggtcaaatcaggaaaggccagtgaccttggagctggccttgggctgctgaggctgtgccctggaactctgggtctgcttcttaagacgctgaatgtatggagtcttggagggagaagatctacacccagcatattaatgctgaccaaagctattggcgctagctgttcacatgtgtgctggaggtgcctaattagctaaagctgagcttctcttgggctgtagaaatcttgacctgaggtcccttcgctttcctcttaccccaagaaagagagagcttaagggcaagtccttgacaaactgcaaaatgaggccagcctgtttttgggagatagccgcctcccttggctgccctggggcaactgtggttctgttttgtgcattcaggttcccacatccctaagatatattgggagcttagtggagggttggagggagggagactatgggggtattgaactcctgtcccattctacttagttttaagacagctggccaatgccctgtctgggatttgtcccccatcccctttcctttaatttctttgagatgttttaaaagtaacttgattgcattaaagtgtcctgtgtattttgaataacagttggaagttctgagttcttatatgaccatgatctatttagatgcatctttacctctgttcttaacattgagtcaatgtgattttaaaaagcttgggtttcagaatcaggcagatctgtattcaaatccagctctgtttgttagccctggcaccttgggcaggtcacatagcctctctaagcttcagtttccacatctatccaaagggggcattagtagtttgtgcctgataagaaagtggagaggtgtttatgggatggtgcttagcatggtacctggaacctattattaaaacttttcaccttgtataaatgtttactgttattttcatttgctataatatgctgaactctgttgatgtttaggggaaatatatcttctggtaaacagaaaactaggatgagtttgttgatatccttggcaaaagccagccagcagtggcccaagggtaagcagccctctccagaggagccttgaaggagagagggctttgtgtagctgaggtcagcagacacgctggtgcctagtgtaacaatgagggtctaaggcatccggagctttggtctgggctttctaacgcgaccaagctcctgaagccaaagggaaaaatttcatgcttactcaggggaccacctacttgtcaaggaatgagttaccaaaatgggacaaaggtgcggtggggtgaaactcaagcctgatggctgctaaatccccttggagccttttttatgcggtttgtgttttcctctctccacctcaaatcactggccttgcacctggcaccgtctgtagacgttgcttctcccctaggacactatcca

SEQ ID NO: 64621 - DNA, 1086 bp, Homo sapiens
aggactctgcaggagccctgcttcattctttgaaggtggattttcttaacaggccccagcaatagttagaggagatgatgctcccgagaaaacctcctggggaggaaatagttaacatacctgtttggtgggaaatgtaggtagccaaaccctttctcttccccaggggttactactaagcctacagttaggcttgctcactcatccacaccaaaggatctcgttccgctcgggccccggggtttcacgggaacaattgccttgaacaatagccagaaaacgagttccaccagtctggacttttttgcaactgaatgcagctgtctggcggggggcatgggccagccctgtaaatgggctgtgccttgattctggagcagaactggaaaattgagcaggtaagtcctggatgcagctggtcacagctgcgcagtgtgagcttagtcacctggaaagaggcagacagaggggcgggggctggcccagactgtttccaaggacagtaagggcctcctggaagcagacccagcctttggagtttggggaggattaggatccttgctttgtgaagactgcttttcagaaccgtagttagagaacctcatctctgctcaccggctgtggttttattagtaagtagagaggaactaatatatatctacaatctgattttttttacagcatcgtttagcatgtctttcccttgaataaacaacattatctcacagggagttcatttgaaaggtgtaatgatcctccctccagatccttcaataactcctcctcccggagtcttttgctgaaagcaagggtgtgtatatcctagtggaaaaatctgtttaatcatccctggaaccttgggattctattttgcttttttgcttcatgagagatgaaattgtaaatatcatatcacattaattcaggaccattacagattcttgcttcttttagatacctctctggaagagcttgatattaaaaatttgcctatattaaatatagtttctcaggggtcccagtgaagtctggtttactttctcagttctgtggaattctcactcctcacaacagtggagcaaaata

SEQ ID NO: 64622 - DNA, 2310 bp, Homo sapiens
ccacttcaggatggaatcaagcttggctctgctccctgttatcttttcctctgtggttatttttggtgcttggagctgctcagtctctcgggggcagatttatgctaccatttgaaatggcattcagcttttgaaatccttcagttttatcctgtttgttcatcaacagcttcttttccctccccttgtaattgtgcaagcagagcaggtgactgggtgcagacatggagtgtttagtaggatgctctttagacagctgggtaggtttgttgtcattgtggcaaacaccctcctcctggactgataggaaatcaagaaattaaaagtgttctcagagccctggatttctctgcagcagggataaatgtgtccagtttctgcatatagggaagaaagcgaggatcagcatggggaatgaaaaaaatgtatataacaacacctctcctttcttccaagctaacgttccttctcttgttttctacctgcctggacttctagccctctctcttcccctgctgctagccctaagttctgcagaagtactctgcccaggaaacaggacaggtaatgacattgcaggccggggaccaaccgagcctctaggttcttctgcccattcgttgtcaagccagatgtcttgtgcgaggctgttggcctaagccacctgcttgtgtttgtggctctagtgtactctgtgacacatggacatgccagtgagagtctgttcctctgtctgctaaagcccagggagaggtggagttgggctggcctcttcattcccattttgggaaggcgaccttaaaccctgccacttgatctggggcagcggaagctctcgcttgcatctcttgtggcctcctgtggcatgttcctgcttttcagcttccttcccattccttttgccacccccaaccccaagcccagaaatgacctgccacccactgtgtagcttggccctcacctttgtctacccctccccatgcagctgcctcttctccctttcaaaatcctttgctgaagtttggctcattatgtcttgcagactgttgtgttctgtgtgcccatttcctgcgatgataatgaaaaagaatgtgtagagtattaagactttacaaatgtacacgcttgtgtttgcccccagctgtaggtgggcctcagagatggatactgtccttaattttgtgggggagtgatgacctggccaaacataacaaacagatgttgtctcctgccagaaaaaaaaaaaaaaaaaaaccttcaccccatcaacagtgaaaactttgtttttgtcagctcacaaaccaagcctttaaaccgttggtctttagaaatccaagtgctttgacttcatcagccagcaagttgtaacatgccccacccaggactcagctcctagctatgcctgggccgcagaaattgagagggacctggaattcacttcgttacagatgaattccaaatatgcagactgctggcctcttgaaacctccaacaagtctgttctcccatttgaagtcattgccagtggcatttagggggtgggccagagttaggggtgcagggaagtgggcatccctctctctgagaagccgtgttggtgcagagagtgcccctgggcagtagaaggcacaggacctctgctttgaggtggagcaacccctgaattttgctttgaatctgtggaaaacgaggaacaattggggttaagggactcaggcctcctggtgacctggggtaaagtatgcgctggtgtcagctcaggctgaggattgggtttcttttgttttccacggatgtggatgtgttgcattgcacgcctagctggataaggcacttcctggtgatgtgcacctctttctccagggcccttcagtcccctccctagctttccctctctctgccttctgtgtgctgctctgaagttcttatttttgttttaactttcctacagtgacccgcaccttgataggaacactttgcctaagaaaggactcaggtatctgtgtttcctccttgcatctgtgccatctgttgtggctttggagcttggctgtgtgactccttcatggctggtgggggtttgggctgggctggggtccccgctttgaccaccacagcaggaccttttggatgacggctccccttgcaccctctcgttctcactctccatttgtcagcttatttgcttgagcaggggctgtgctttttcaggcttaatgtggtaaaaccatctcatgaaaaacatccctgggcaagcccaaggagcagtcattactgcttctggggccaatgggtttaatttctgagcac

SEQ ID NO: 64623 - DNA, 1017 bp, Homo sapiens
aattagatagcaagcattagacacatttagaaaaaggaaagattagtgctggctgaagttataggcagaggttatgtgaaggtggcagagtaggagctgagccttgaaggactgatagagggtgagaaatcttttctaatctcatctcactctttagagaggcaggcttttctgaatatagtgaataacaaattcagagtctttaaggatagaggtggcttgtaatcaagtgaggtttaacacttcatttctgattgactaaatgagtacctctgaaaatattgcacatgactcaaatggacaggattttcataagaaagctagttttagctgagacaaatgtaccttccttgcattgaaactctttatataccattattaaatgtcccccatctgaggcaatgggatctgtgttcatactgttctttcccagccataactctttgaggcaagagattcttgtcatgcacaaatgcttcccatctgatcaaaagcctgattggactattttgggcttttggctttagagaaaatcattccagatgagcctggggagtaattagctcatgcctggaaggtgatactggcctgtctgaacgtgccaagttggaaagctgaggcccagagccttgctttggagctgacctgcctttttactcttatttttagctcccggtgtgtaactcaaatgctgatgggactaccttttagaaaacagatgggagaagagttggcagaaacacatgtggctaaaaataagcagtcttctctttgtccccaaccaggatttgaacagagacatgaatgtctaaccttttgattctattccttttattccagcgagtcccaccactgtcacccagatgagcttgtccaacccgaccatgctgaggactcacagcctctccaatgctgatgggcagtatgatccatacactgacagccgcttccggaatagctccatgtccctggatgagaagagcagaaccatgagccgttcaggctcattccgggatg

SEQ ID NO: 64624 - DNA, 1012 bp, Homo sapiens
cacagccttgctgttgctatttacaaagtgagaggagttaattattgagaaaaataattacctctaccttaagcctgccagatgtgctcttctctgcctgtggccccatgcttgtaccgagttgttgctaaaactgtgtcagtaaatgtatgtatatgagatgtagaaatagaaaagaaaaaacttccattttccattagccacaggccatatagcagccctgtgctagtctctggcaggccagtcatgcaagtgtgtgtggctatgtgttacacacatctcttcacccagcttggcctccaacataattcctccactattgtctgtgtcgtaagctgaattaacttacctctgtggaacattaggccacaaagttgggacattaaaggcctctgttaatgtgtggacatattaacactgaaagccattattggccattaacaccttaacctgattttttatgggcatgagtcagattagtcatggatgaagaaagcacggaggaaaagatctagaacgcagggcattgctaaggagggtggatgtacatgctgatatagggacagcttagagcattagggagctgctaagagagaagagggctggaatagcaagccaagagttacgtgggctcagagggaggaggaagccctcccaggtggcagtctgcgaaatgaggaaaggtcccatagagaagatgtcatttgagcagatctgttttgatagacagtatttagatgcagcctaaacgaagagaactgcatgggcagagactctgaggcaggaaagtactgtctagggcaagcttgggagagcagtgcagaattcatagtgtaacaagaacatataagggaagaaggagaggtcagggaaggtttattggaaagatgacagagaggaacctgagtgttaggctgagctacttatcagctatcttgttggcatatagcttctgctgactgctaatccaaggtgagttcacttcgtgggtggtagatgaatgccatttagt

SEQ ID NO: 64625 - DNA, 1017 bp, Homo sapiens
ttgtcatctttagattcgcaagctgcggcgggaactggatgcctcccaggagaaagtttcagctttgaccacccagctgacagcaaatgtaagtacagacatagggcagtagcatcgggacaggaagcaccatccttgccttctgaacagcctcaagtcctcctgtgctgaacaaatagaagtagcacattataaagaaaaagacacaggctttggcatcatgggtgtgaatgtcagtttggacacttactggctttgtgactttgggtaagttcttgaatctcagcctgcgtgtccttatctgtgtaacgagggtgatagtatttacatctcagtattggcccacagtcaatgcttgcaatatgcgaagtgcttattaaaatcttaatttctcttcctctttctgaaaattttgattttaagggtgggaaaaagaagcaaaaaggaaagaagggggaagaaaagaaatgtagggcttttcaatatctaggtagctgctctgtcattgtgatatacacgattatgagtttaggagatgctgccaaccagcattcaattcaacaactgtttgagtgccagctatgccccgggcactgtgggttcaacagcagagcaagcacagtgactgacatcttaacattcagtctctgggacagcagagaaacaaaacaaacaattttgctataacatgataactgttaagataaagggaggaggtggcagtgggaatatctagggggagcacctagctcactcttggtgggggatgaaaaaggggacagctcatctgatattgaaaataagaaaaaaattttttaaaagggggacaggaaggacttcctggaggaggtgacatctaatggatgctaggtaggggagaatgcatagggatgacagcattctaaccaaagagaataatttgcacaaaggttaaggagaaagatcttggtgtattttgaactctcagtaggtgggtgtaattagtgtctatggcttggatgtggaggagaggtaagg

SEQ ID NO: 64626 - DNA, 1047 bp, Homo sapiens
atcctctccaacctcccccaaaatttaaagcacagagaggtgactgacaagaaaaaagaagagaatgagaagcacaggaaggtgggaggcagccatttcagccagacagggaaaagctggaagaactggaattgtagaggactccccaacctgctattcccttcctttcagaagggaggaacatgcccccagtgcttttaaagatttgtgttcctactggaaacctcccctgtgtgtggtgtttattattagccatgttgtgtctgaaagtccgaagctttccctgtcactggctttctctgttaaaaaattgtcttttttcctcccccttccccatttttgcttgcgttttctctggcaggtcaatgaggtaagcaagaccaactttaatatcagataccaagctaacccatccattgatatgactaacctcatccgcatccatcaccgtgtctgagcatcctgctttgttgctgtgtaacctcatcttcccaacatccatctgctgagccagactctgtgttgctgttggcatctagtcttgaaccaagagtaggcatggaatgttacccacagatgcagtccctcaagctggcaacaccagataactcttcctcccttaatgcactgattcaaaagagctcttgggaacctcttccattggtggggggaaaaacatgggagaattaatcgcttttttgtgtgcatgtctctgttttgccaaggcctaagcattggttgcccccgctgtgagactgacagtcttgtatattcagttacgcagctccttcaagcaagctttcgggaagaagaagtccccaaaatctgcgtcctctcattcagatattgaggagatgacggattcttctttgccttcctcaccaaagttaccgcacaatgggtccacaggttccaccccactgctgaggaattctcactccaactctctgtaagtctgtctgtctagtcagataacatctttggcccctgagaaccttctccagtaggaatggctaggagtcctgttatgacacatctgctccttgg

SEQ ID NO: 64627 - DNA, 1031 bp, Homo sapiens
agaaagagggagttacagctgccggccagcaaggtgggaggaaacctgggagcagagaggagaaactgttgctggagggagtaggaacggggccagatgctgctgggcggccaagtaagatgagcagagagaggcggtgatgcactcagctgtgcaggaccatggcagaactatcctccaagccactttccccagaggaatcgggtggggttggctcctggctccccagcccttttcttacattccacagcatccatgcacactggagatgtttgtttttggtctcgttttccaaagggtaggctgagagcaaatgcttgtttccaacctcgaagggtttgtaagaatgtgcaaatctagatgtgagagggagttcaaagacaaaaccataggcagaggagttgggcttaggaaattccccaatccgtgggcaaaaggaatggtagttgtggtaaggcaacgttttcccacactcgaggcattttaaaattaggtatgccaccagccctgactgtggacaagacagtggaaaaaggcttgaatcacagttaagggactgagtagggaaaaacacacataaggtgtcttcagtaagcagtttatgaagtggacaagcatgtattgagcgcctagtgggtatagttcaggaacacaggctctagagctgagcagacctgccaggtttgaatctgcctctatcatttttacatggtgcagtcttgggcctgcttgtgtccatgtctctgcctccccattttaaaactggagataattacagtacctcttcatggagtgagtaatgtacaaaggaaatggaataatatacttcaaatacctagcccatttgtttaggtattccataagcatttgttaggtacccattatgtaaatgtgatcagatgccagaaatgatgcagagaataaccctggtccctgaggagccagcagccaagcagaggtaacatgttaagttgaaatgaaattatcagcgatacagcataagtctagtcagggaaggaactaggggagaa

SEQ ID NO: 64628 - DNA, 1046 bp, Homo sapiens
ctgtccccatgtgcctaaggctgttgatgttttccattcgcagacatgttgctggatgacactggtgaatgctcggctcggaaggaaggaggcaggcatgttaagatagttgtcagctttcaggaggaaatgaagtggaaggaggttagttggatccctttccctgctttgcctgtccctcccccaggtagaactacctagcttagtgatctaattgtaaaacctctatcaccttggagcctaaggtgatttggaaatactactaacccttctcttaactaaccataatcccttgcagcattctgacacaagtaaagtgtgcgaacggcatttccctttctcgtgtgcttgaaagtctaataaagaatactaaaaatggtcccacgtttcactttcatgtaattaactaaacactaacatccattggaaagggcctttctgaatgtaatatactcccaaagcacttcagaggcagctatgcacattcagcatgtaaggtacagaaataaactgaccacatgcagccgaccaagagcaccagttttatcggtcatcagtcaccaagagtacacatcttggtagacatcaagggatggagatgccaagccctgggagcatgcaggtggctgaaaatagagctagtggggcgtcctgactccccaaggctggggaatccgagttttcctagtacggtttctgttcacttccaaagtctaggaacttccagagtctataccactgccagagactattttgggatgggggctagagctgatattgaaagttgaattttagccagtgattaaaacccagtgatgctttgaatgactgtttctcgaataaatgtaaaaaggcctcatgagtcaccatttcaagttcccttgagttttttgtttgttatttcttagtatttctagccaacatgctattgtagtttcagacagctagggaacccacagaacaaagcgtctgcagccagacctttcttaggggattcagctttgcggctggcttgctagcctcactatagggggtaagctcagcat

SEQ ID NO: 64629 - DNA, 1581 bp, Homo sapiens
ccacaattgtgcctttggactaaaagtgacagaaacagactcaaaagtagctgtaacaaaaaaggaaatgtatgggctcatggccttgggcaatccaggggtacacctcaagcacagctggatccaggtggtcagacagtgaatcaggaccaggcctgcctcagctttgcccatcggctgtgcttatttattgagctctttgtacctggttgatgaaatggcccctggtagcccaattccttcttctagcttaggaacctgaaggaaagaggggtttttgggaaaatgtaacagataattcctagggatgactctggcccactataggtcaaatgcccatcactgaattggtcattatgaccagggagaggatttgtccgagcctgggcaccagcccatccatttgggttggtggaagagctggaccagtggaggagaattggtggagttgctggattggttccacttgaaccaccaggaatgagctccccatgggaaagaagagttctaccatgaggggaagcaggaaggagtatcagacccactggaacaatcatcctcgacaagaaccctttaaggagagccttttatgtcctgagttcaaattgcatttcatccctcctgccaagcatgcgttgttcacttgctggttttacctgtgagcattacaaaggactgaggagtaaaaggaatggcctattgctgagaccaggccaagcctctctagaaagtaacaagattacctgcctctagtggagcgtgccacccctctgcagaccctgatccatcgctgctgtcagcacgtcaagttttagcacctcaagggatcagctcaggtttatttttcagtgacacctgactcttctctttcctagagtacttaaaacttatgccttcaagacactaaaaaccactcaaggatttgagctgaaagagttgcctgagctgcagtgattcacttcagtggtaccaggggaagggggtttgactttgcatttcctcaagtgagctcttgtgcaaaatagtcacttcctgtggggtttatggcagaagaccgaaacagagcagtacatatatatacagagagggtgttctagtggttttttcctgtgtttattattattattaaatttagagaccctacactccatactttgcattgaggtttgagcaagtgtacactacatcaagctcagtagcaggaaaatcttaggcttgtccctagcagataagacatctgggggcctttgtcatgttcattctggaagagtcattgtacacttagatatagatgcattggggggatctgctagcagtgactgagtacgtagaaggaatatgctattataaaacagtacatactcttcagtttactttttattaattttgctggtttcttgagagtaccttttaacaatgacctgaggttctggacagctaaccttggatggatcttctcttagagacagtatccaaaagataccccttttgaagccaacaaccctgattaatgacattgtcccagataggaaaggagaaggataagtttccacttgatgttgttgaggaccaagagtccca

SEQ ID NO: 64630 - DNA, 2262 bp, Homo sapiens
gcctgctctgagaccccagacaggtctcccgtctcttggccttgggttctccatctataaattgacaagtttggactagaagagtgttttttcaggctggtttctatgaagcccaaaagttccccagtctactcagttgaggaccagagatgaagagcaaatgtttgaaaaccatggtgccagataatctctgaggacatgttcagctccaggagttctagcctctgtgattctgcagccctgagcatgtcctcatccaggctgtagagtggagacagaagcagtagctgtcacagaagcagtagctgtgagggtttggttcagcctcatgtgaggtctggcttgggaaatgcagcccagtttccacagggaaagacctcagagggagaaacttctcaaaattgcacaaatggttctaatgtggagcagccttcttctgctccaaatatcccacttttgcattctcttctgccctgagacacatgcccacatacacacaaactcatgcccctcacacgattccttcctgctcacacaataattgcttttcaaatgccagactgagctcctaggcctgagactcactcctgccccaggttaaggaagacttagcaacagactgggccagagcgcaggacgggaggagtgctggtgtctgggaaggcaatgagtcataggaggctgcatgacttaagcagagggggtgatagccacgaatacagagagatgggcccatctgagaaggggcagggtgggcagcttccctgacagaaatcatagctagaggtcccagatggcacagacagtcatgggagtatgggcactgctggcagggacaatgagcccagcaggctgtcacactgatatctggccaacagcctgctccgcgtctccctgctctgggtctggctgagtcacgtggctcacatgactcagagttgttcaaggtggtgtcagtcaggaggggtggagaggaaaaaggcctggcaaaggaagctgaggttctaggttcaaatcgggctctgcctgacagcctttctcagcgggctctgctcttcaggccttgattggcccatctggtaaatgagggggtggggctaggtggccccagctccttccccttggaaagacgtggttttgttggttcagagctcagcttcacactgttgtcagcaccttgctctctgtaccctctccacggcaggattcgcgggagggcagggagagcagacagacagacagacagccgtggccaccctagagacacactgcagccgtggtggcccacaggactctttagtctctgtgctctaaggccccctgcagagtcctctctgcagaactacaggtgacactgccctggctgtgagcatgtcctgccacatggaccaagtgggccaaactagtgggccgtggaattgaacatacttagtttccaattctggcttctctcctccctgggcctatttcctcatctgtaaatcacggatattagtacttcctcttggagttgcacggtggttaagcaaggtattcgtaaagcatttctcacggtacctggcacaaagtcagctggaagatgtggtggtgttaaaggagaaaaatataaagcctatacctagctgtgtaatatacagagcctcgtgttgggccagtctaggtttctgttcttcaaagaatgtatgtatttcttgaaattgctagtaatggtcactaaaatcattttaccattagataattgaggcttaagaaaaggagcttggaggcatggtgttgatcttaccataaaattaagtgataatatagtttactgttttaagagccaattagctattatggaattttgagaaatacatgacaagagagaagccctcataatttcactgcctatgtgcaacctctgttagcaatttgctgttttgaaaaggagtagcacttctatataggggctgtaagagtcagacccatttcaagaaacggggttttattgagccaggaccagcccagcacagtggctcacacctataatcccagacctttgggagaccaaggcacgaggattgtttgagcccagaagttcaagaccagcctgggcaatatagagagatcccatctcttaaaaaaaaatgttttaaaaattagccagacatggtggcacacaagtagtctcagctacttgggaggctgaggcaggagcatcacttgagcccgggagattgaggccacagggagcatgatcatgccactatactccagcctgag

SEQ ID NO: 64631 - DNA, 1625 bp, Homo sapiens
aaaaagatccattttttaggttcttttcggtctccagctgacaacccaactggacaatgatctgtctggtgcaggagaaggcaaaagtttctacaagtctacatgaccttgctgatacttgttctaatagaaacccagtctgctgtgtcttcaacatactggtattttcattacaaagtatggtaaatttttgagttgtttgtttctgttttgtaaagagaatccttattggacaccagtgaaggtgtctctgttttaatgatcagggtttttattccatcttttgcatttcttctatttctgaaggtttgtctcttggcatctttttttagtttcttaccataagagtttgacccgaaactgctcacttcacattggatgacaccatgttcttcctctttgaaaagaaaaggggaatgtgtcccactagtgaaaggaaaacttttcaacactatccctgctttagtctcagcaaactcagactattctgcttagccttcattagtcatctgggtgtgagtgtgtcttgttctgtttttctttttaataaaacttttaaaccatatatttagcctgtgaccaggggggccaaaccctaagatttctggtaaacctgaagggtggccctcctcagacaatttatctcccagcaatgaccctactacactcgcgtactgtgaatttgggaggaggtaaagttgacttctcctcgtgggcagttttccaatcaccttgtgagtagacacctgccaatattgtttgaaacctttttttaatatgacatcctctcttgtcattctcttctcccctttcccacagacttccctcctgggtccaggttcagaaccaagacttctgtacctagtgctgcctgattggtgaacattgacttcaagtagcatagcccttgtgtgactcacaactccgtgtccttcctaaagtttcgggaagcagggttgtctaatatgcacatttcttattttggtcatatttttactttagtgtcactcaccttttacaaagtgactttgtactcatttagggctctatcggaaatgcttccattttgccttttctacagttaggccaattttgaaatatataaattctatgcaacatttatgttgagttaccaatggaagccaaaagttctcttcccaaactgccaagaatgatacaggccataattgaaatgggaataccttttaagtttcattaggggtggggtgggagtgggacaggaacaagacttgcctagatctttgttgtatcttggggacttttactttgttgtttgatgcttaaacttcaaaattctctgtattcaaatttgattgtggcgaatctacttcaaaaaggaaaaataatccaactttgtggatattaaatggaaggtttgctgttttgatctagttgtttccagtggagcagttttatgaaatatgttctataagatgtacattttttcattgtaacatagaaattgtaaataattgattaaagtgctgcattttgatgaattttttctagccatttttaaagagaaaactaggaattgagtattttgtgtacggtatgtttccatcctccctccccttcctcctcccctcctctctctctcttcc

SEQ ID NO: 64632 - DNA, 1037 bp, Homo sapiens
ggccgggcctgcggcgctgagcgcggcggcggcggctgctctggcggccgccctgctcctgctgcgtcgtgaggacccggggccgggggctggccccaggtaacccctccgcgtatgggaccgagctgggccaggtctcctggccgggccggggataccgtggggtatgcccagtgatgccagcagcttgtggcacctgggcgcaccctccagctcgggccccttccgatgggtctgctggctcaggtgcgggcgatggccggggagccgcgccccgcacgtgactcagcactttccccagagcccggactgcggagaacaatatcctcctccctaacagataaacagcccttgttcctcgggataaggactggcagtcccctgacaccctaagaccggcatctgtcgatgttatttccccagcatggccgaaacagaagccctgtcgaagcttcgggaagacttcaggatgcagaataaatccgtctttattttgggcgccagcggagaaaccggcagagtgctcttaaaggaaatcctggagcagggcctgttttccaaagtcacgctcattggccggaggaagctcaccttcgacgaggaagcttataaaaatgtggtgggtatttcagctgggactcaaatggacccccaggattctgcgaggtgaacatatttcatgcctaaaggctgaatactgccctgccagtggtgggggtagtgagaggccatcaaaacttggccaagattggtctgtgagagtccctcccagaagtctgactcctggattgtagcccaggtgtgcctccctcccgctcattgtgtggtcttgggcaaagcccttctctccatctgcaaccctataaagctgggtctgggttgtaatgggggtgggggctggtgagacagaagagcactgttttcagggtcatacaagctgtattctagaggcagccctggtgaccttgagaattttctcagccactttgctgattttgtcaacctgcgcacttcacactaatattgtcagggattct

SEQ ID NO: 64633 - DNA, 1020 bp, Homo sapiens
taagtaggacttttcacttaaggaaaaagactgtagtatcaataatttgctcaaggtcacaaagctgtggtgtgcttatttccaaactcacattcttgccacttaaaattctgcctgttagtcttgggaagctttggctcctgtcctaggcaagtaggcatgaaagaggcccggttggcattggccggtgttactttaatacattttccagtgttccctgtatctgggcatggtgctgagtggtggtgcgttagtgttctcatctgtagccccattgggtagatagaatgcctgtatatattctagttgtcataaaatatttattgagcaccagtggtaccgtggctgtgatagcctccataaatagtcgacataacctatctcggtaaacatttgtggaaaactaatgctccacatgtgttaggaatatagataaggtatacagcttctctgctgtgtattcctgtctttaagtagccttcagatttgcatgtcacataataaagaggattgatcctcacagtgtctgtgatgcaagtacgttgggaatactacaagatcacttttgaaataaggcacttggggagtatgccagctgtaaaattacattttatgctttatttctaaaagcagtttgagctgtgccagttcaaagcctctgaaagcagagttgacacttagaggagaaaagaatctcaagtagagaaattgtatgacttgagagaaacagactctatcaaagggaactctcttaaaagccttttgataaaatcagtgatattatttgacaaataaattcactttgacatttaaaggataattggttttaggtataaaatgggactcagaagtactaattccctttaaaagtgctggattcccttcctttcagatacaagtgtgtttgttttttcttaattggaagtaaaactagaaaccagcagagttaaaaaaaaaaaaaaagtgtatatgtaacatgaaatcagtatttagacttcttaggggactattccatgaagc

SEQ ID NO: 64634 - DNA, 1994 bp, Homo sapiens
gtgctggggttacaggcatgagccactgtgcccagccttaatgtttttaatgttgcatttctaaagtattagaatcatacttaagatagaattttgttttgttttttttttacttaccgatatagggggtttgtatactattaaagttttctcataacaagagttttatgacaaataattggttggttggatgtattactgctttcctttgttttaaatgctgcttcatttctggaaagatacgagaaccagataacaagccttattgggcttgcatcatttaacttcatgtaaaagctagtatacaccatgtcctggcaaaattataatttgatacacaccataaaaattagggatttaatactttcagctctgatatcagttgccaaatacttggtaaaatgtggatcttaattttccagatttgtattgttctgacaaaggaggagtagaattttagaaatcagttttccatctttttagaaatactagaaaagctttaatttgtcatttatggctgcttctcaagatattcagaagtatcattgtattactacttctaattcttaataaaattcaaaatataagtagtaatttagaggtcagaattattttattgtttaatcagagaaggctttatagaataggtcagttaaacaaaactcattatgttaacataggtgaattatctttttccccctttaggacttgaattttatggatacattaagctaataaattttattagacttaaggtaagttgacagcttaatttataatttcgtttagaaatcaaagaaatgctacagtgactgtcagtgtactgattatttaaaagaatatgaggaactgcattaaatttggtactcatcatattgggggaatcacggacattaggaggtagcacagcagaaagcaccatgtaaatgtctaccataactaacaaatattgttttcactgcatctaagagatgaatcggtgtatgtgaaaaagtaattcagtgtcaaataaagggaaatactgatggacaggatctgtaaaatcagaaataatttctaatgtgattttaagtattttggttgctcttttttattctgttttttttcagatactttgtttttttttttttttgtcctgtttaaatgaatgtttaatgacatgacaacgctttccccaaatccaaacagtaaaaaaaactctgcgttgaaactgctggttaagcagtcgtccagcaagttaatgaaatgacaggcacgtagactttttggagacatactgactttgtgtaatgcaaacatgatttcctttttgtttaatttctgtagtttttactaaggggattttgtgattatatgtaatgaaaaaaacatgagattaattttatatccagaatcctacagttgagtacatgaattccatatacaacccagtgccttgggagaaagaagagtatttgaagccagtattagaagatgaccttttacttcaatttggtaagatgaacataagtgtatctcctttaattaacataaggccgtttgttaacggcaaaatggaggtagagtgttttaggaaaagacatgctttttaaaattatctaaatgcttcatcaggtagttagtttcagtagaaaagttaagttgcttaaaaactaatagtcggccaggtgtggcggctcacgcctgtaatcccaacactttgggaggctaaaagggcagatcacgaggtcaggagatccagaccatcatggctaacacagtgaaaccccatctctactaaaaatacaaaaaattagccgggcatggtggcgggcttctgtagtcccatctactcgggaggttgaggcaggagaatcacttgaacctggtatacaggtgacagagcaagactctgtctaaaaaaactaaaaactctgtgatcaaaagattgtctggttttgcctttaattgcttcatgtattttggagctcttatgtgaggtttatacacattta

SEQ ID NO: 64635 - DNA, 2953 bp, Homo sapiens
tatgttcagtttagccaactaatgaaaaacttagactaacagcatgctctttgaattcaaattaaaatagtgtagatgataaatatttattattattattattacttttaagaccgagtctcactgtattgcccaggttggagtacagtggtgcgatcacagctcactgcaacctccgcttccgaggttcaagcaattcttctgcctcagcctcccaggtagctgggactaaaggctcgcatcaccagacctggctaactttttgtatttttttttttttagtagagataaggtttcaccaaattggccaggctggtcttgaactgttggcctcaagtgatctgcctgcctcggccttccaaagtgctgggattacaggcaagagccactgtgcaaagccaagatgattaatattcaattaaaagtactttcactaatctttctcaattggccacatagtagaaacttagggcgtatttattcctaacatatttatacttgttttattgttataagatggcctgataataatgtccatttatttctttagatgtagaagatctttatgaaccggtgtcagtacccttctcataccccaatggactcagtgaaaatacatctgttgttgaaaaattgaaacatatggaagccagggcactgtctgctgaagccgcattggccagagcacgtgaggatctgcaaaaaatgaagtaatttatcaatcttgcaaaattaattgttttagatctccagaataatacaacctaatggcaaagtagaatatagtagaacatttcatatactggaaagtacaatgtagatattttatcttcatactgttaaagatatgtagcatttttgtacactatggatatagttaattaatataaaatcttatagttttacctattctgatatgttctgacaaatgttgtcctcatgaatgtttttgttctttattgccttcctttcagttttcctgtttgcattgatttctccattttactttttctatcctagttttttaaagtggaaggattaatctttttgaggtttggggaaaatacagggttgaagtttttagttttaaagaatcaaaatgtaggccgggtgcggtggctcacacctgtaatctcagcactttgggaggccgaggcaggaggatcatgaggtcaggagtttgagaccagcctggccaacatggtgaaaccctgtctctactaaaaatacaaaaattagccgggttgtggtggtgcacgcctgtaatcccagctacctgggaggctgagacaggagaattgcttgaatccgggaaggggaggttgcagtgagctgagatcgcaccactgtactccagcctgggcaacagagcaagactttgtcggggtggggtcggtgggggggaatcagaatgtaattatggtgtagtatgaacccagaaaaccagatatacagtgacagttttttccagtgaataaattagcattctactggtgtagtacttttcaaagtttaatgtgcataggaatcaactgggatcgtgttaaaatataaattctgattcagaagattgagaatagggcctgagattctgcatttctgacaagtatacctcacaggccttcctgttggatttgtaagctgtttgctgttgcctgagtacccatctgatggtttgccagaatgaatgtccagcaggaaagatagtagagccaattgtagttcctcttccctgtttcagaatttttatgctaggtaaccaagtaaccaacaccagctctaccttttgcccctttgaacttctcccttttatataccttatggattcctaatatgtcatgatctgagagggatctaagttttagagctggagtgggcggtgctggtgtatgtaaataattatctatttgggtctactttctgcttacataatactcccaagaaataatatggttttaaagaatattaatagagctgaaataaacgacattgattcatttgctaaaaaaggattttaaaacaatagaaataatagaggattataaaagtaatatgcttatttgttcagttgaaagacataaggagctacaatctgcggttggcattgcttttgtggtttgtagaaggagtatgtataattgtttctgaatattgccattgcttcagatccagcagggggagctttcagttgttcaagatagaatgtgatttagaagactcatcacactgtactccctcccctttcctcttcctcaacctctagcctttcctttattcatggtccaataaacctgtctcaagggtgtatttcaaattgattacagacaatttgctcaggattttgtgatgcacacagatgtcagaacctgctcgtcatctactagtgtcattgcggacctccaggaggatgaggatggtgtttatttcagctcatacgggcattatgggatacatgaagaaatgctaaaggttagaaaagaacacaaatgcgtcaaatccatactaaaggaaaaatagaacaggttctttcttaatatatgtgtgcactataggagacctcttttttttgggtggggagaactgctttttaaacacctctttggtgcttggtatctcatcttgggttgaaaatattacaagactgggcacggtggcacatgcctgtaataccagcactttgggagcccgaggcaggaggattgcttgagcccaggagtttgacaccagcctgggcaatacagtgagaccctgtctctatttaaaaaaaaaaaaaaaaaaaaagattacagaggcatcagtcatttgtacattccatttaaaatcattaatctttttatgaaatcactttttccttaaaatattggaaaaacgacaattttagtcttctcaagggcagctattaaataggaacaattagatggattaaattatatattaccttttaacgtgtaaa

SEQ ID NO: 64636 - DNA, 1932 bp, Homo sapiens
attttgttgattcagttttgctggatcacagaatagaagtttggtaattgataattgtacttatatggggtcttttaaaacattgtcatgtcattactaattgcatgtcatggttgtgctttttgttgtcacgtaggtaatggcataacattataaataatagatatgttattataagtaatacgttattttaagtctcagtgaatttgttgaaaagaaattgacttgcttcattttctttattaaaattaatttttttatgtttagagtattttctttaaagaggtttatctagggccatgtttgtcatattaaatcaccccatcagcttaaataccataaacctttcattcctttggtatggaaattgtgttgggcttttcagacagattaaaggtcaccgaaactttcagtagagtgttgagtgttgtgagtacaatcatcagggaaattcagtttgagtacttaccatttacaaatctttatcctggacacttgtatgtcagtaaccataagacttcacacctgctctggtacgtttaactcctttcaatgtacatatagatttaagaagttccaacttgaagtttccagtgccaccttctccctttgagagaatcacttaaatatcattctttgtgccttagcttcctttagttcttgtgcagtgtaatttcctccccttggaaatgatttgattaaatgtctataggacatatggatagttgattcaaaaagaactgtttattcatttgcattttgccaagttacgtgccttggatgaatgtgaagcatgccttatatcacagctttatttcttgtttcttagaacgattcttagcacacataaactgttcaaggtatattaccactagaatcttacctaatttttataaatcatttaaaattgagaaatcatatttacaggacatatttttatgcttggcattggccttgtttttatagagtataatttggattttttgttgcttggcttcatgtctttccatgacactatttttggtacatgttttaattataattttaaataaaagtagcttgtgatcttatttctttagataagatgaagataccttttttgaattccagagatatgattgatagagggatagattacatgaactttcagaattccttgccactttatctttttgaagaagagtcatcattggctaacactataaatccgaaatgcatcggtcttctttgttttaagataaacattattcattctgttgtacatttatcacagatcatagtaccatttagtaaagtgaaatttcagtaatttttctttgctgcattctctttattgtatctgcacctgtctcatgcacttggtccacctttatgagcttgtaaattaaaaacatactgttgcttgtgtatgtaaaatttgtagtatataacttttttctttaccttcattcttttttttatatttgtaggaataatttcttgatactttactagtcttaaaatattatcttgctcctaagtattggagcagtaattttgttattttatttttcttagtttcaaggttgatataaaaaaaatttttaaatttctgtttattgttgatttgtattgacgtgttagcctttgttagaataaatttttagaaatggttataaaggctactcttttatttgcttgcgttttcgtatttattggattttttttttttccaaaaattaagtgactgaattgaagctctgctatatacaagacactatgttttgtatactttggatttcattacaccagcatgagcatacaaacaaaaacagatttatatattgtaagagccagaatgaaagattgtagtttagttgagcagcagtgcatggcattaggatagcagttggaattcttttgattaaggggaagtagtggtcaggcagtatg

SEQ ID NO: 64637 - DNA, 1004 bp, Homo sapiens
tattagctttaattatcactctaagtcttatggtgataatgcacgtcaagaggaaaatgtacgcatttttaagaacttgggtcttatttgagtttcagtcttcataaaatattttctttgtgtgttgttgctatttctattctttattgttttcttaggaaaaaaataagcttggtatcccaggtataaaaactgctatggaaactagcaatgtgtgttaatatggcaaatatctcccttaaaaaatttatttgtttagactgtcctataaacacagcgttttcctctctccaccctaggacaaaatacgaacagaaagctaccgagatttcatataccaaaatccacatatcttcaaagacaaggtaagtagtataggttatagaattatacatttcatcttgttcttgggcagtagaaatcctctcttggctcatcattgtgatagcaattgatttaacatcttctgtctgtatttcatggaagacatttatgatgctgctctgtggtgcagagtaccaataacaaatgctgattgctgctgtcattcagtatgctcttttttaaaattgaaagttattacaatggcgtaacttagttataatgacatagcttagttaaattttgcttattcagataattttgcttaaaccatattttttgtttacagttattcccatgaattttaaatgtatcagataagcaccatgtcatagcatacttttaattattactctagtttgtgttaagtaattgagaattaatgagtttaagaacaataagggttcactatggtagtatagtatttagtttatatgctttattttaatactttatttaccccatttagagatactttgtattttacaattaattttaatattggctcaagttatttaaaaaatgatcttataccctgtgtgtgcatgtgcctgtgtgttagaaatttgtgttttttggcttttcttccttacacttttttttttctttattctctttttccc

SEQ ID NO: 64638 - DNA, 1073 bp, Homo sapiens
tgctggagtgcactggcgcgatctccgttcactgcaacctccgcctcctgggttcaagcgattctcctgcgtcagcctctggagtagctgggactacaggcacgtgccaccacgcccagctaatttttgtatttttaatagagacggggtttcaccatgttggtcaggatggccttgatttcttgaccttgtgatccgcccgcctcggcctcccaaagtgctgggattacagacgtgagccaccacgccggcccttcatagtttttgtatttgcaaaacaagtgctggaaagcttatttaatgtttgtctaaaaaccactctgtttccagtgaagcaaattatgttgctgttaatgatgttgctttatatttctagttggatgatgcccagatttttattttattttttccttaatatgttatatagagatgaaacatgagaatcactaatcctggctagtctggaaccagttatatacttttgggcaagtggtgaatctctttgggcctaacctgtaaggtgattgtaaaaattccttctggttctaaaattctgtgggttttattacggtgagagcattatcattgtttttcttttagccatcttctcttaatacttggtgataggaataccagaggagcttgttaagaaagtaagttagaatgttccttcagtatgcttctgaatggacttgtcttataataggtaagtaaatactgaaaaggctcaagtattagtaatcataagattaatcatcaagatattaaatatttttattaaaaatgttttctttccttttttccttcccttctctctccatcccttcccagcctccttttcttccttcttttcttaatattatttcaattcacaaagctcctgtggaggccatatggtttctcagattaatttaactttgggtggtatttaatcgtgttgtcacccactcataattaatttctgtttgtagtttattgaagaaattcccagttaggtgccttctttatgcttgtgattattatctacagttaaaattcattcagttttttaagaaaaaaaatgaatcaaattt

SEQ ID NO: 64639 - DNA, 1036 bp, Homo sapiens
tatctctcttctggagtcaatactaataaattataatttcaatacgtaatggaaagagccgggcatggtgactcctgcctgtaatcccagcactttgggaggccaaaggattacaggcgtgagccaccgcgcctggccagtttcagatttttattgtgatcttttcctagccagaaacatcataatatatgaatagaatttaatatagagacctttttgataacatctgttttgttttggttttttcttaattaccctaggtagttttggatgttgggtgtggaactggaattctctctatgtttgctgctaaagctggggcgaagaaggttcttggagttgatcaatctgaaatactttaccaggcaatggatattataaggtacatatattttaagccttcatttaagattattttaaaatttaatgattatttaatagattttcttgtctttagtagctatctaaggcagactaaagacatttgtcttttagtaaaaattcactccagaataataagattttaagttgaattgagctagacacatttgagctatgctgctgaataatcttttcacagttctcattgatgagaattatttttatattgatttctggctttctgactatggctataaatatgccaattctaataatataaaattaaaaactattgatacttagagtaatactgacagaggactccctacttactaatatatttattatatattagtaatattttctttagcaaataccagttatactaaagactaagagttatttgtcttttccttttgtaacaacactagtccatgtacctccttcaaattaagtaaattccaaagttgctgaaaacaaggcagagtggatttagtttattaccccctaaaacttttattctctaaaaatctctgtcttttgagtatttagctgggttgattgattttacagttggcttataccctagtgagaaggcctttatttgaaatccagctgacacaactgaatttctttccctacgtgcttaacaaaa

SEQ ID NO: 64640 - DNA, 1006 bp, Homo sapiens
cttacctcatgctagatggccatgtttaagattcattatagacattatttttgccaatcattactagagtcatggtcatcagagcagagggaagcatttgttcaccagatccattttgcaaaaatatgaatttttaaaaatctgttcacaaaactgttgaacagctatgtagtctgaaccccccccccacctttgttttgaagtatcagagagttccttaaaaggatttttgaaattttcagccatacatgacagtagagagaatgatatgaattcctgtgtgcctatcacccgcgtctacatttatcaatttttcacgattttttttatacatttccctcccaccttttttgttttgtttttgtttttgttggagtattttaaagtgaaacttatacattatatcagtaaatgtgtcctaatacatttgagtgttggtgcatgagaacatttattgaaaatgacttagcactcaatctttagatatcccagtttaataataaaattgctaacattaatttagttttttctattgaatctcctttggtgcaggtgtaactgaatctcctttgatgtagattatttatacctattataagagattaagaggctgggcatggtggcatgtgcctgaggcaggagaatcacttgagactaggagttggaggctgctagtgtgctaggattgagcctgggcaacatagtgagactctgtttctatagtggggtcagaattagttaccaggcagcctgactccatagcttatcctcatagccagtttgcaattccttatctccattgaactacttacaaggtatgtattggttgtattcagtagtttgctttacttaaaacctatggatgtttgaaaagcaggcctttttgttttggataagccaacattgtactgtttcttcagaaatgttctttgccttttttatattgtgaaaaggtagttatttttatagtgttcttatgtgtctctcctttgtcttccatttgaaa

SEQ ID NO: 64641 - DNA, 2838 bp, Homo sapiens
ctcatctatccatgatgtttctcatgtcttactttacattcttagatctctcacctgaattaatgcatctgcacttaactggaccagttgtttgtactttgtctttgcctcccaccactctctgtcatctgttctctgtagtgcagccagactgatttccccacttaattctcctctattttaaataaagaggaagaaggggtggggggaagatatgtttgtcttgggaagacataaaagagggtaaattacatatgattctactatcagagactactatcaacattttggtatatttcttgccactctcaaaagccttaggtcacagagatgaaattcataggaatgtaaactttactaaaatatcagctccccgtggtgtggcaggaatttttctttttttcattctttaatgtgtcccaactaccaggaaggggacccagcacatcctaggcattcagtgtaagtacttattcaatgaatgaattaatcaattttcaagatttgggacattacatattcaaagccaggtaaatcattgtcaccaaagcctgcaaacccattgtttctgatagattccagatgactatttttatattttttcactttattagaactgagttattgctaatttcgaacaataaatgtcctcagtgttagtaattccacagctacacatttgtaaataaagatgatacatttgggagggagcagctcatagaatagcccgttatggttccaggtctatgccccataccttcttggtagttcgtttctcatgggatgtgtgtaaatctacccccagcttcataatgtttaagaattcttgctttttgttgacatttatgaatgaaggactggatactttaataaagataactggcataggttttgtctctgaggggaaagggtggagactggtcagtttacagttacccccgtaatgttttagtccctttatcactcccactttgtaaacctcttgactccaatggtttgcgttgtgaagaatggctccacctccactgtcatgctcgctgacgtgtgcactgagtactgggtctttcttcacaggtttaccaatataatttcattcccttttttctctcactgaattatgagattctttggctctttgatattcccttccaaaatctccatgcatttatcagtgtcttacattttacgttattgtcatttcactgttcttagggagcaaaagagaaataaatatgtatacttcgatgacatattgaactgaaagtaaatgaatagtatatattgtatctatttatatctattaggatattcctttcttctcccccataagctatcatccatatattctaggtgaactttaaatttgttttatcactaactttaaatgcactcgattaggtgttcattgtatgaactcacatgtactttatgctgtttgcttgtctgtctccccactagaccatcttcttcttagaacatagaccgtatcttttacctaaatcacatagggaaaatgtagattgaaaatttaatcctatattttttattccaaagatcctgaaatgactcttcattatctttaagtaaaatatagacttgaagataagtcatagcattacctctaaatatcccccaactatgtcactgtatactatctcttgttgctctagtcatactaaactgttcagttatttaaatttgcttctctctctctctctgtcacacacacacacacacacacacaggaggcagttgtgcacagacacaaccctcttctactcccatacctgtacacatctttgtgtatgctgtgtcctttcctggctaagctcagatgtcacttagataaggatttatcatttgagcttccatagtccccaatcctgtttactgttctgtctctcttagaccatacccgtaagtgcatggactgtgtcttttatctctgtatgcttcgtgcaagataattaatcatgatgatgtccctgtatcatgaagtgaaagttaaattgctacttttaagataggaaataagataggaaagtatgtgttctaacaaaatttcccctcagaaaaagttgataatttcatttttattggattagtgaagagaattacttaaagatatcctttttattacctcgtcatagttctctacattagaatcatgctagtttttcagtaggtgtttccaaagataaagattcatttggtttatactgaagtagggtttagtgagtagccacttgagaaaactaagtaaaatctgtatatttttttcacgaatggaaaaaatcaggtggtgattaacagtctcatgaaagaggttttctgtgtcagtgatatctgttttaatacaaaattaatgggaattacaaggctttgtcttttttcctgtgttttcccttaagtcataatctttcttgttatagtcatatttgaacaaataatttctgatacaaataggtttataacttgtagcagacaataaacaggcctagcagatggtcttttacagaacacagatcttgtttcggcataaccattctgaagatatttttaagcaatgggaacatttttctcttttaaaagaagcttgccttcagttttctttgaagtgtttgtcattgttaaagccttaatcagtattttggtaagcaacaagcaactatagcaatttcatcagaattttattaaatacccttttgaaaaaaaaaactcataaacatttctgtaaaactttttgtatgaaatatgtaaaatgagtacataaaacatcaataaacatgtttaatatgcataagtatccataaataacaaatgaaattaaacatgtag

SEQ ID NO: 64642 - DNA, 1010 bp, Homo sapiens
taatgaatttttttcacccaccatgggggattgggaatattgttttagaaactgtttttgtgggtctggaataagacccacacgtgccttgggaaagatttttagagattcactttttcctttgatagacttgcttattgggcggttttctgcagtctgaggaatagggccaatttgactgtcagtcttttgttgattaagtgagagtgccatccagtgggagaaaaagctaatacaagttttttaaactttagaatatgcagaggaaattatttcttgtgctaagttatgttctccagaagtccacaatactaaaaagttgggaactgtatgttggaaggtgagagaagtggaagaaagtagtcttgcagaacagtagcacgcatataatagggacctaataagtagccgttattaccatgattcttcttcttgcgtggaagttggtgatcaagttaaataataggtaaattaggagcttctctgacagatatttgtgattaatacatgtaaaattctattgtcattttttgactatgtgatatacagatattataaattttatccttttttgtctttaaccctattactcaggacccacccctggtccccaaaaaaatgttaccagtttctagtatatctgtcttaaaatattacactctattataaacatgtatgtatatttcttggcatactcattcatttaacaaatagtgtggctactatgtacctggcactcttctaggcgggataaagcagtgaacctcatgttcagtgtaaggtatgcatattctacatattgttctgtaccttgcttttttcgtcaataagtttccctctaatgactgttatagctgcatcccacaaatttattcaattcaaaatacacccttgtgatttctgctttggtccatggattatttagaagcatgtttaatttctaagtgttaagaaattttaaaaatgtctttctgttattaatttctaatttaatttggttgtgataagag

SEQ ID NO: 64643 - DNA, 1019 bp, Homo sapiens
aggcttgtgtatttgttgcaggtaatctttaagtatttcagattattgagtctttgtcatcatccttcagattaactcttccattatatttgtaactctaccttgtcttaccttttttttaatagttaaattttgcctagagatgtatcagtaattcagttatttgaactaaaaaaagttagaaaggcaccttatactgaaggtatcaaaagtttcatttatcactaatgtatctaatccaagaagatatgaacagccattttaaagacaagattcccacttcaatgaatgaagttaatattctagtccctgatttaattccatatgttcctttatagtaatcattaaagtataaatgcagtatttaattttttaaaagtagatgtcactgttggaagaagaatgcccatgagcatcatgggagaaaatatcaggcgtaattctccttccagatggcacccctacaggtgaggcagcagcctgtgaaattacagtctgaattacactgcagatgagcggggcatttggaccagagccttctgatatcagtaataaatgacttggttcagaaccaaggacaattcccaggaatttaaaggctgttgtatcacatagggagcctatcgtaaaatgaagtttagcaaagtggaaagttgagagaaaggacaatgaccattagcaatacgtatgtgaatcttttcatctgctaatatttttaactggatattttatctcatgaatgtcttattagttctatatatatgctagtatttgcattgatttttccaaactaatattttcacaatgaatagtggctaagggccagttgccaactgagatattactctgaaatgattgcacacctgttgtaaattctaatcttgtttaatatggtctatggaaaatttttcatttttgcaatgcttgaatccttaacaaatgtagtataatacacatactaaatcttattttcaattagacaaatcaatttaagaggcaacataaaagggtgattcaga

SEQ ID NO: 64644 - DNA, 1051 bp, Homo sapiens
gtagtcagaaagtgggtaatacttggttaaaatatgttcagcagttctctttaccatgagaactactcagaacttttagtgtgctcatgcacattatgaatctctaataggaggatatggcagctggcgtttcttaaacctttttgactaaggatccctccactttcttttttgtttttttttttaataccaaaaagaaagtcactagacaggaaattatttgggaagtggttttctagactagagtttctcaaccttagtgctattgacattttgggccaggccattctttcttgtaagaagctgtcctgtgcattgaaggatgtttaccaacataccttggctctacacagtagatgccagtagcatctcgttcatcccccacccccagttgcaacaatcaaaaattactcagacattgccacgtgttccccagcaggcaaaatcaagtggagaaccactgctctagatggatattgcatcattccagggagttatagggcttgttaataatgtctatccaaacattttttaatgaggaagaaagagtagtctggaaagtagaatcatagataaagaaaatgcagtatattttaccacaataaactttctgggttcactttataagctggcctgattttccaataacttactgcaaaaaaaagtttcagattttgcagaatattattacatctgtggcagaaaaaaaaatattctgtaattaaaagagtagcaccgatgtttaaattgacctgcttatgagagtattgcacatttctaaactctttttttcccctttttttatgcagggctattttcttctgtttgagtctatgttagattctgtcctttatgcaaagaacaaatacttggcaaaaggaggctcgggtgagtataaaattctggttttaataatctaattttagtctagcagaaccagatgaacctttggatttcaaataaactatgcatggctgaggaagttcccgatagggttgaaagatgtttgcattacaagaagctttaagacatttgtttactatattgttga

SEQ ID NO: 64645 - DNA, 1046 bp, Homo sapiens
atgttactagacataatcctcacaagagccctttgagattttacagtctcctaaaagtgtcctggatgacacatattaaatggctaaaccatgattttttttaaactcacatctgccagcctccagtattcatgttctttttactaagccttgttttcctactaaaatgtattttttaaatgtgattattgccttgacgttctagggaagatccaagtaactgtttccagacctgcctgacttgatcttattgaggaactgacagcaacttaatacatttaaattgaattctcactgaaattcattaagaacttacagcaatgtgaacaatggcagagctatttcttatcatcagagggataaagtggaggttcatatatctagctctttctatacttttatatagctaatattagtattaagataatacaggggtatatttaagagaggtcagcatttaactccttaagcagtgctgttgaatcttatttgttaacagaatcaagagaaagaaagttcagaaaagagtaacaaaaaatagtctatttgtgtttttgagtatgtcttgatgcgtatcaccagtcatttagatgctcattgttttatcacaaagcaaagttttcctttctgtttttctgaaggaaagatttaccaagtaattagtagtaaaaaggtgatagaaagaatgaatgcagtatgagagagggaaaatattgaaggcccatacaaacgtgatgggaccacaatttatttttacatgagtttaagttcaatttatgtctcaccatacatattatggtgagcagtaaaggctttataaagcacaggcaataactgggatgttcatctaccccattatcaatcaagcaattccactgtgttttagagttatatatttactatcttacttctaagaaaactaattttgtaaagttcatgaaagcaggtttactagcaacgatttctactatttctagctaatatttactaagcactaattgtgtatcaggaattgtaatgttttacatgcagccaacaagagatga

SEQ ID NO: 64646 - DNA, 1058 bp, Homo sapiens
ttgtcttttttatttttattttttaatggagtctgtccctgtcacccaggctggagtgcagtggcacgatcttggctcactgcaacctttgccttctgggtgtaagcaattctcctgcctcagcctctcgactagctggaattagaggcgccctgccaccacgtccagctaattctttgtatttttagtagaagtggggtttcagcatggtggccaggctggtcttgatctcttgaccttgcttgcttgctttcctttttggtgtttttgttttgtttttgccttgtcatctcattcctttgctcagagcaaaataagcttaaatgttaccattttccttactttgtcctgaaattttatttatctccactcttttcaaccccctttctccttccttctcttccaacaagtaccgtttaccttaggaacctggggttcctctttccgtttcttccatttgaaaagcattaaaatgtggcatcatgcataatggaaagcatatggatttcacaattagaccttaagttgaatctctgctgtgtcagctgactagttatctggttagctgaagaagaccaggtatttatttgggcaagttactttctgcccaagttactctctgaatttaagtttaatttataacatgaagattataatccaactttgtaaaattattcaaaagtctaaatgaggtgcttgacacaaagtagttgctcaataaatgttaattcccagtcagagttacaactggtgaacatgagattagcagtaggtttatactttataaaagttatgaaatgaatttaagcattgtggtattaacacttaccttttatacagcacttcacattttctacacttttacatagattatctcaatataatcagccactggcattggttcatagtgcttaaaggattcctttagtattttcataactgtctacttcctcatcttcagatctgcatttttcacatttattagtttgagtttgttcagtaatagagcagtagtgtcattttttatttttcagcatataatttttcaaagcatatta

SEQ ID NO: 64647 - DNA, 1053 bp, Homo sapiens
gcaatataaaaactgtgcttttctgtatttttgtgaaagacaaataatttgaaaaatacacaacacccaaaaataaaatcatgttcttctttagtttctcttctaattaccaacaatttcaaaattgttttattacttttagtaagttacaattttttcttataaaaaagttacctttagttttatggtgtcactaatatattacttaatatagagccagagataagtaaattttttcagtaaaaggccatatagtaaattttttttcagttttataggccatatagcctctgtcccaactattcaactctgccactgtagtgtagtgtggccatagacaacatgtaaacaaatgaatgtggtagtgttacagctaaactttatatattaatacaaaaactggcagcaggctggatttgactatgggccatagtctgctgaccctgatagagagactgatggcattttaaaacttcagcaagattttaaaagatattctaaaatagcagaactgtatcaactatgttaagtatcttgaatgtctgtgtactgcacaactccagaggatattcagttcccattaactatatagtgtgaacggcactccctgaagtaggaccatatggtggccctgataataacccccctccatttctgctcatttatatcaaggttatctgtatctagcctgctgcctgttttgtagataaagttttattggaacacagccatgctcatttgtttatatattgtccatgctgctttcacaccaatagcagaaagcagtagtttcaacaaaagtcagttttgtccacaaaacctaaactggtaatttcacaaaaaatgtttgctgatcacctgactatacccttattatgttcctctttaatgatgaaacgacagggcataatgtgggaaagcttctgtaattattcagtccaacaaaggatgtatcagaaagttagccacatacctaaagctgcttctgaattcttatttttttattcagtgtttctcatcctaaggatgtggttcaacaaactaaatacactt

SEQ ID NO: 64648 - DNA, 1971 bp, Homo sapiens
atcttatatattatcccttctcccctgctccagccaagtctgaattagctggttttgccatgagctcccttagtaccttggatgctcctgttcttagtatttattacctcacaaataactatgcatttctttttcaaaatagtctaaatataagtttattgaggatagtgatatgtgtccatagtctgtaaattagactggcacatgtgtctggcacatactttatgcttataaatatttttctattaaatgagagtaatatgaagtggtcttctgtataactataaaaccctattacatgattttcttacatgctacatatctttttaaatgatttgtccttttctgcatgtttttagaggaatataggaataagtaaagatctagtaccttttaagttagcatactttaagttttaatatcaataaatatgtttatttcagaattgtttaattatataaccctattttaattcaaaccctatcattggaatccctgttttaattttatcatcatgataatgcgtatctgtttttaaaagaggctacaagatgaagcatggttgtttttcctgatctataccttcattaatctcccattgctagtaatccttactgatggatttgatatttatatttaggctttaaaaaattatattccataagaaagggagataatgcttaattgttgggcattttgtttgttacagtctaccctgacatttgcactatcagccttgtagcagtgagtgatgtgaataaacatgctgatagaattgctttttgggatgatgtctatggcttcaagatgtcctgcatgaagaaagcagttattccagaagctgttgtggaagttttagatccgaagactcttatttcagaaccttgtggtattaaggtaggtgttttaccaactttattttttataatggtattgctatttttcttagttcagcatttgaaaataatatattgattttatatatgggctttcaaaacagtacttttcccattgtaatcagtctaaaacaaattgaggtcataatatttaccagttgactatatcatctctttagaatcacttctctgtatattaaaactccttacactcagttttacagtccttcaaatctaactctgaaccggttgaataatttatatttactttggcttaataaggtaaaaagtcctgctgtattatcagttctgcttcatcatcctccccagccttattttagcttctcatttacagccagattattcattcgtgtcatatattccacacagtttaacttctctcattcagatttcttccagcgttttcagattaagtaattacatatagtaaatttgcccatgaaacgaaagccctactatgttcagatttctcagttaattccttttgtgttttgtcatcttattttttgccatgttaatctctgggtttattatgaatttttctatgttgaatttacatgggttcactaataactttgcagcaaaaaacaatactgcttttcttaactcttggtctgtttcaactagataatcaaatctagagcagtatgttcagtgttaggttcaggatattgtctttgtctcaagagaaaaaaaaaaaaagagtctcactctgtcgcccaggctggagtgcagtggcgcaatctcggctcactgcaatctccgcctcccgtgttcaagcgattcccctgcctcagcctcccaagtagctgggactacaggcatgcaccaccatgcctggctaaatttttgtattttagtagagatggggtttcaccgtgttgaccaggatggtcttgatctcctgacctcatgatccgcctgcctcggcctcccgaagtgctgtcttctcgttttaatcacgctgttactttcatatagcatcaatatttcttctctgtacaaagcagatatttagtacatatttaattttcttaaatggataaagcattaa

SEQ ID NO: 64649 - DNA, 1527 bp, Homo sapiens
ttggaaggatcgcttgaagccagaagttcgagatccatctggtcatggacatcagaatagtggttacaatttgtggggtgacttgatgggaaaggagcataaaagaagtctctggagtactaggagtggtccgtatcttgatctgggtagtggttatacaagtgtgttcaccttgaaaaagttcactgagctgcatcccaatgatttgctcacttctctgtgtgtgtatgtgtgttctatgtaaaaccagtggttcttgcgttagctagatatctgtttttttgcttgtatatagtacttcagttgaaaagttgaccaaagccaaaaaatgtctatctggtggtcagtagtttgataggtttaaggagttgaaagaagcctaggatggctgggacatgtagatcatagtgctaagagatggaaagcaccttgtgctatttggccgtttcagttgtgatgttttttaagtagagtgttgtgatcagaagggccctttagaaagattgtggctagaatatggagaacaaagaggagaccaccagagtggatgtgggaggccaatatgtaggttattctagtagctttgcagtgacttacacaaaggcagttttagcggacttgttcatgagttacctaagagataaaattgacaggacttgagaatgagttagatgatggggagtgagggcaataactcccattgctctcagtatcaatgatgactccaaggtttcttacatgtacaatttgaaaaattatggtcctgtcaaagaaaattggaagagcaaatttagaggtgaggatcagatgctcaattattagtacgttgaatttcatacctttgagttatgtaagtagtgatatccagtaggaaattgaaacacagttctgtggcctgtcttgtcaagtcatacttgtgacatatttggcccagatacataagagtaggaatcaaagaacattttatgaaagactttttgaaaatatccatcaaaatatgctgctgacactttaacaaagcattttaaacaatgataaaattacatgaatgaggatgtattttttaacctatgctattccttgaggctgttggattccaaaagcttgttttttaaaggaaatccagtggagtagcatcatatgcagatataatttacgcaaattaactgcaagcattcaggtaaaaaaaaaaaaagtctgagagaaataatggtctcagtagtacagatgattctgccctcctttttaattgtgaacatgtgccccaaaatgagcatgatgtgagaaacacatctgctgtttctttagtagatttctgtaggatgagcatcttgctagactgcatgattgtctttataaaagtgtgtatttttaatacaatatggcactcactataagccatctacttcatctggagcccagccaaagaaatggtgatttgtaccattgcttaaagaacgggttgtattgaacttactgagggatagtttatatgttagtctctaaaatgacatcttaagagatttt

SEQ ID NO: 64650 - DNA, 1922 bp, Homo sapiens
ggaaccctgcagttgagtaaaataacctgtccatagagttaatagagattcgtgtgcttgatcctcttttgaaagccatgctgaaaaataatgcttctgaatttctgtaattcattgtttaaatttcagagacattaaagaaattttatcagcattttaaaaaattctgattctaaagcctccaagtgagtgatattataaaaggatttgaacatcaaattgtcctaaaatacaatttgagtggaatcttaaaattcttaagctatattaaaatcatttaattctagataggtataggtttatgcttgaaatcagcaatgttgaaggacaataaattctgagaaattagcaggactagaatatctatctgaagtttagcaataagcacaaaatagtgtatttatcaaataatcaataagagtggactcttgattagagatgtcagaggggttctccctagacttatcacagaggctgtcaattaacattattagattgtgataagaaatgagttggaccaggtattttcctttttgattcagccggttacccatggagtaatgacgtataaggaagtaatcttcccaagttcaggcttattttaacttaggcactgacagacaccattatgaatattggcattaagatcttctaaaaatcctgaagtacctaatgtttacagacattttatgtatatgtatgtattaacaggaggaaatcactcctcatggaaagacaagtcaagtcaaaaatttggaaagacaagtcaagtcaaaaattagaaaaataaatttgatatatataccagatggctcagaatataccttataatatttgccagatttttagttcccactctatatatcaggtacataacagaagggcttaggtggtgagttggtagctatctttctaccttacttttcaaaagagcaaaaaaaaactattcatttcagaaaatagggtatatcacatcttctatatgtcccccttttaccgtctgttaaatcgttgtttcagtgttccatctcttaatttatactattgaagggttgtaaagacaagtagcatttggtagaacttggtcacctagacacaaaaattagttttaatatttttcagttttaaacttcttcagcagtcataaaactaatttttttatgctgcgttgatttgtaaattcagtgtatctgttttgttcaggtgaacaagtgtattcttaatattaaaatataatgtttacttacgactgatagtatcttctgtcatttgaggaattaggaatggaacatagggcttttgcatggatagttttgggggaagattggaaagcagcacaaaaaatggaatataaggaaacagtaatcattgatatcaagcagtggaaaaccgatgatgtgtgagggagcaggagaagagaaatctagagaagcagtgggctgcaagcctttttaaatggcagagattgccaaaaaaaaaaaaaaaaaatactatgcaacatcacttttcattcaaacatggactgaacactatgtgtgggcttctgtgctaggcactatgaatacaacaaataatcaaaatgtaatttctagccctagagacattcatttagaaggagaggccaacataaatggagaattgtaatgtagtgctctataatagaatagcagaggcatataaaagacacccgtagccttgtatactcttcctttccctgatccctgctcgtctttaaggtttttactttaagtatggcttcttcttgaaagcctttctaataccatatgtattgtattagtgggaagtaattaattgtacagatgagggaatatttctctgaagttgttgcatctgatagcagttttgagttaaaaataggaagttataagttacagcatcatcatttccttttaccaaaggtt

SEQ ID NO: 64651 - DNA, 1026 bp, Homo sapiens
aagaataaggtatgagagaagtaaatgaacacttgcatggactacagcacagcttcaagtcatctgggtggtccaggaagtctcaaaccctgatattagattaagatctcggtttgccatgcccccaggttccttgcagaaacaaaaattctttctagaagattattacaggtttcaaattattttcacaaagtttttcaaatattaatgttcaaaacatattcagaggtaatcagtcacacaaggacacaaaacaacatgaatcaagaaccagttgaagcagtagacaataaaaacagagctctaggtgctccaggaattagttatagcagacataggttttgaaaaactatgcttactaaattcaaagagaaaaaatactgcaaattttaacaaatggaaacattttttaaaatacggtttggaaaagaattgaacagacattctaagaccaaattaaatatgatttgaacagcagatcttcatgtattagtgtagagaagatctgcgaactggattttagggcagaagaaaatgtccagaaagaagcctggagacatgcaagaatgagacagagggaagggcaagaaataacgtagatacaagaaaaggtctaattacatatacatgtaaatgggcatcccagagaaaaggaggatgagaatgttacagtatttaaagagatgatggctaagaattttccaaaacagatgaaagcaacaatttaagaagtcaacataacctaaatagcataattttaagattgtatccaaatgtaggtgtatatctaagagaagtgaaaacatgtccacgcaaatgtttatagcagcattattcataatagctaagaaatggaagtaattcaaatgtctatcacctatagaatggataagtaaaatttggcatatccatgcaatggaatattattcagctacaaaaaagaatgaaacacgatacaacatggttaacccttaaaaacattacgctaagtgaaagaaaccagtcacaaaagaccatctcttatat

SEQ ID NO: 64652 - DNA, 1056 bp, Homo sapiens
ttgaagtataataggaaaaatgaatctttgcttaagagtattaggataggtcgttagaggcataggtgcatgagggggactactagggtgctgagatgttctgtttcttcatctgggtgtgggtttcacagctgtattcagtttgaaaattcagcatgatgtacacttatgtgcacttttctgaatgtacattataaagcagtttctaaaatgaaaaatcagtaaatttcaatgaatatgggttgtataaaacaattttgtgtttatagctaggaagaaatgtgaggtatcaatttatgaaatgtcaaaatgaaagtattcgtgttacagactctgaagatgatttttgccccctaaaaccactttaataagcaattttgaaattacaaggaagcaatcccaaataaatttaaaaggagtttcagttatcttgaaatattctatgtagatcagaaataaattacattgtgtttttcaataaaagtatttttaaaaatatttttggactattgcctgttttactacttcccatattgctttgtctattttttaccaccactcaatctggcagtatctcttgagacgtatatggcacttaatgtgtattgttccctagaggagaatcatgaaagaaaaggtgcagattttctcttgggatacaatagaaaattaattgaaaaagaaagagtccgtaatttaatgtatagttacaattggggaaaaaatcataatatataattttcatatttgttgattatgtcttcttaaacgccatttattactagcacagttcatgctctgtatgtggcagctcgtatagcttatgtttgtattttcatctccttggtttatatatgatgatctaagctataacagtcatttttatggcattgtctgcttactctttctttgcttgcttcagactcatcagttggcttttgcattccatattgagattttgaaagaaatacttcaacgaaaaatgaattgtatttttgttatagtgattctgctgcatggattacaagcactctatctccatgcttggataaactc

SEQ ID NO: 64653 - DNA, 1023 bp, Homo sapiens
atgtgtcctctttaaagaaatattcatcacactaaaatacctgagaaagtcattttttatcccaaatcattgttcttcaaatgagtgtatattaaatgaactgcatttacctttatacatataaacaaaacatggcttaaaacagattttttcatgattcagtttacaaatgccatgagttttctttttgtgaaatccacaaaaagatgagttctgaaactattacatgctgaggaatatttaagatgtacaacagagctccatgcttgtattttcctatgtgcatcaaagtaattgtcgaggattctcacaaaatatcaagagtgatcaagctatcccagaaattcactatgtatacgtagtttcctttcattctgttttcttctatcattgtttttgtttttttactacttaccactcattctcccttctctcactctaagggacttttataactaaacttttagttataaatttttctgactgtggtataattcagtgaaattttatttaactgtgaccttgcctttgcagattaacccaactcctacagatagattttaatgcttttttccccctcagcagttctcattgccccaacaagatatatacgtgagacaaaggagaaatttcttctgcagtcagccttcagacctctctgatcttttacgagcatatgtcaagttgtagctccagttagttatttgttgccattgcctattagtcattatttcctatggttgtttattcttatatttgaatgacttccacagagataatgtatattcattgaaattaacatttaaaagatgttaagatagcctgtcaaagtgatggtagcaaggtggccaaactgtaattgaaaatagtggcatgtttatattttcctgacaaaataagtcatttattcctaaatcagctgatatttggttatatcattattccttatttaatagctttgcagaaataaaaacactaatcataattcatttggttttatattactatgtttcaaattgaagg

SEQ ID NO: 64654 - DNA, 1124 bp, Homo sapiens
tgttccatgcttttcagagttaaaaattattagttccattcaagttcagttagtcaatgctttaataaagtatactgactatgtaataaagctagccatatttgagactgaagactaaaaattttaatttggctaaaatttattgagaacctactatataacattgtattgggtaaggggcatagaagtgagttatacatatgccttgctcttaaataaattgcagtataaggcaaactgtaatatactatcgtaactaacataacagaatgtataataaacacatttgctcatcaaatattgtattgtattgtatcctatgggccaggttactgctctgggcactgagagtatagtggtgaacaagacaggcatacaggaataaataagaaaacagttgaattggtctgtgaaggggtatcataagtatctggaaatcaactgataaagttatatttagaaatattctaattaaccacgtggtttttatgataatctgtggctgagtactacattgttttataattctatttggcagaattattactagtattttgattctctcttggtatctaaattgcagtgaacctcagggttaaatattgagtttggtttggacctaatccatattaaccctaccagatcaataaaatgtcacatttttaacaaaagtagcagagtacacaaattagctttaccatgatttttcaaaaaatcagtgtcctgttttttacactttctaagcttaatgtaatgccagctttaaaaagtgattaagtccagctagttccaatagtgaaagaaaatggaatggtatttaaatttaaccaaaaaactcaaaattatgtatttatctgagtatgttaatttctttaagagatcttttgtaggctgggtgcagtggctcacacctctaatcctagcactttgggaagccgaagtgggtgagtcgcaaggtcaggagttcgagaccagcctgaccaacatggtgaaaccccatctctactaaaaatataaaaattagccgggtgtggtggcgcacgcctgtagtcccatctactcagccttgcctgaccaacacggtgaaaccccgtctctactaaaaatataaaagccaggtgtgg

SEQ ID NO: 64655 - DNA, 1048 bp, Homo sapiens
accttaaataaagtttaaaaagtgggaaaacatcacaataaaaagaagtgctagttatacattgtttacttttctgctacactgtattccttgaattcttaacaatttttgcctttgttttacaggtgaagccttgaaaggaaaggtcacagttcacaagagtaagaaagatccacgttctctcaccgtgaccctcacgttgaataattcaactcaaacttatggtctccagtgaaacagccataaaagcacactaccttgtagtttttaatgtgggggtagagtgggtcagcaggagggagctggttttatgtgagcagatggatggatgatggaccctttcctaatgagcctcctcaataagagagaagttctcattgtgggaatctgacatagttcagctgaggaagagaatcagctgatcctcatggtctgccacgtaatcattttcttagacgtttgctccaccagatttaaccaaatgtaactcccacattgagtttatctatattgaaaatcatttacattggcctatatttggaagagagatagtcttttgtttttaataagtttcttactataaattttaaacaaattggttagttatttggatattttattaaactagtaacacaggtactacacattttattatggactcctctgaggaggagtttttaattgtatttgctagaaaatcaggatgtaataaagatttgtataaaaaaactaaaatatggaaaagagcttcagccttcatatacaaatcatatatgcagacagcctagttgattatctagcatacttagggttctcattttgtagtttcttccctctttgtgactattccttagccttatagatttctagtactgcccaggaaatctaatttcaatacatttatcctaggtttcatgaaagtttttaaagattgggataaatatgtacttatttactaacgtattatctttttcaaaccagatttatgtgcaaaggttaaacatgtaactgttactaagcagtctataaagttgtcatttacaattac

SEQ ID NO: 64656 - DNA, 1033 bp, Homo sapiens
tgggtaatttttctattttttatagagatggggcttcaccgcgttgcccaggctggcctccaactccaaagctcaagggatctgcccacctcagcctcccaaagtgctgggattgcaggtgtgagccagcgctcccagcctaaacagaacattttaaagctagagatggttgacccctgcccttgagctacaaaataacccagctagtgaatgacttctgagccttaaagaaagtaattgcagtggtcttcaagatagctctggacccaaaactatcaacattaggagagacagttggggaactcagcagttttaacaagtcttgggattccttaatgccttccctgcttggatgtcacccaagaacatggcactactgttgtagtgatgcatggggccatggcaagatatgtaaagtgcctgcacagctatccacacacgctttgttggcttggaggctcgtcggtcttaagtctcttcatgattttgagtgtttcgttgctataaagttagagtaaactttttcaagaagaatgatagaagaaacacttctaaaatatcttagtaattcatggacagaaaaccaaacgccgcatgttctcactcataggtgggaattgaacaatgagaacacttggacacagggtggggaacaccacacaccagggcctgtcgtggggtggggggtggggggagggatagcattaggagatacacctaatgtaaattatgagttaatgggtgcagcacaccaacatggcacatgtatacatatgtaacaaacctacaggttgtgcacacgtaccctagaacttaaagtataataataaaaaaaaaacttagtaattcatttgacctttccaataaagttttcatctattgtctcaccatcctggttaatgtggagctgttcacattgttagttctacagtgtagctaaatgcagacaaaaatgttgccacttagttgtaattaaaatgaagataatagataacaaaggaggcaattaattatagcatagtcattttatgga

SEQ ID NO: 64657 - DNA, 1086 bp, Homo sapiens
tgaggtcaggagttcaagatcagcctggccaacatggcgaaaccccctctctactaaaaatacaaagattagctggatgtggtggtgtgcacctgtaatcccacttactcaggaggctgagacaggagaatcgcttgaacccaggagatggaggttgcattgagctgagatggggccactgcactccagcctgggcaacagagtgagactctgtctcaaaaaaataaaaatgaaaatagataaaaataatgacagtaaggattcttgttaagtttttttctctctatctcaaaggtttctgaaggaacaaaatctttcgtgtggtgagtgtctccaggatgttttctgaaagtaaacagcacatttttcccctctttggaactgaagctaaggccacattaacatgaatggagctccaggtctttgtttcattagtgtgggtgtctccaatgagcctcctactgtgaaccctaataggatttccctgcttacacctttgtttgccctggctcctcatgctgctctgtgatgtttggtttaatgagacaactcctgtgatccagaaagaaaaataaaaggaggatcctgtcttttccttaaacagacaaaggtgtaactgagggaattcaagattctactgtttcctggcactttatgttatcaacatgtgatggcaatcctgaacacactgagccatcccagtaaccatttaatctcaaaaagtcagccgcggactggcagattgcatctcacagaagtccatttagccttaataacgtggaaagacagaagacttgagttggaggggcaaggagtgggtgaggaaggcagaacagagagtaggagctctaaagtgtttcttctgaagtgagaacttgaaatgtaacctagtatgggtgcaatcaaagtacatacataaaataggtaaagtaactatggaaataagaacagtaatagatacagtaacagtaacaaagtagtaataggaaggttagggtagcctaaataaactgaatcctctctatcatagagaaaggtaatcatagataatgtctaaagtggatacataaaaacatggagacataa

SEQ ID NO: 64658 - DNA, 1106 bp, Homo sapiens
ataatttttgacatttaaaaaatctatttaatattgttaagtgaaaaaaaattgagttttactgggcatagtggctcatgcctgtaatcccagcactttgagaggctgaggtgggcggatcacgaggtcaggagttcgagaccagcctggccaatatggtgaaatcccatctctactaaaaaatacaaaaattaccctggcatggtggcatgcacctgtagtcccacctacacgggaggctgaggcaggagaattgctggaacccaggaggtggaggttgcagtgagccgagattgcaccactgcactccagcctgggtgacagagtgagactccatctcaaaaaaaaaaaaaaaaaaaaaaaattgagtttcaaaacataatctatctaggtacaattacacatatgaacatgcacacacagatataagaaagaatgtatcatagtggttgtttctgcatgataggaatcaaaaaatatattattttcttttctctgtagttttgtatattgcttgatttcatttttcaaagaccatccatcttttttataattggagacatggcaatggcaatgattatgatatgtactgagaaaataaagactagcatttttggaataaatagaaacgtagttagagaggaaaaagggaccccatattacatgcagcctcaaaaggtggatagagttcagatatgatatataaagaactagaagtagacataatactagttaacattgatttattcttactctaagcactctgataagtgcactatctctcatttaatcctcatagcaatcctatgaggtcataattttaattgtcctatttatttatttatttattttgagtcagagtctcactctgtcacccgggctggagtgcagtggcaccatcttggttcactgtaacctctgcttcccaggttcaagcaattctcctgcctcagcctctcaagtagctgggattataggcacgtgccaccacacccggctaatttttgcatttttagtagagatggggtttcaccatgttgtccaggctggtctcgaactcctgacctcaggtgatccacccaccttgacctcccaaagtgctggga

SEQ ID NO: 64659 - DNA, 1088 bp, Homo sapiens
ggaggtcccctgaaatttaatttctgcccttaagcataaaccttagaaccctccaattatatctcagaattagaataacatccaagctccttttgggtcacagggcttatatgatctggcccttctctctctcccactttggcctctcttcttttttcttttcttttctttttttttgatacagagtttcactctggcacccaggctggagtgcagtggtgctgcaggatctgcttcctgggtgcaggtgatcctcctaattaactgggaccataggtgtacgccaccatgcccggctaattttttgatctttttgtagagacatggtctccctatgttgcccaggctggcctcaaactcctgagctcaaacagtcctcctgcctcagcctcccaaagtgttagaattacaggtgtgagccaccgtgcctgggtggcctcattttctacttctctacccctggcccattcagtttctgccatgctagccttttttctgttcttaggacactcccagtttgttcctcgtttgcatgcacccttctctgcatgtggaaagcttcctcccatcttgccttttctagtcattcaagtttcagcttgaaagaaacttttcaacccccctttctaaagtaggacccccccatccaagttgctttctatcccattactctattttcttcatggtgtttattgccatctcagattatcttattcatttgtttattttttgccctcccccaacctaacccacaggaatgcgagctccatgtgtgtgctatatagtaagcactcagtaatacctgttgaaaaaattatgaaatgaatgaatgcagagtgaatggaaggaagacatctttgggtcaactggaaggggaaaacttaaatcttcagttcaggggacaaggggaagtctgatagaaactgagaaggcagttatagacattttgtctgccttggcaataaccggtttcagctctaaagaggccttcctgaccaaccgtctgttgacagaagcctagcaggtcctgtttcctaacaggaaaagagtaaggaaagagtagatttccttctccaaggctgtaggac

SEQ ID NO: 64660 - DNA, 1046 bp, Homo sapiens
caaatatttagggaaacctgttaaggaaaaagagaaaaaaagaagacatgatcagtcagcccttagatgtagaagcccaggacccattaaaatgaaacattgcaaagccatagcactcagtcctcccaaacccacactttattttcttggtttatatattcagaatgtttatgattttttattctctgatcaccttttttttccaaacatttgggtctcaaaagtaagtttccagggaaggaaaacaacacacaaaatggatagtggctgttttttttttcctttgaaagctttcacatagattaccatctcaaaaacagtgacatgctaagaatgcagaaatcagatgaaaaatgagccaatgggcaacaaaaagtagctgtgagaaatgaggtttattagcatcttcccgggggatgtcagagaataagggaagctttcaggactttcttccaactcttccttactattgttcatgagatggagctgatagtaaggccctgtggggatcaagaatgttagtgatcagaaaactaaattcactgtttcactgctctaaataaaagtggatggacttctgcctcagctcagcttcgagaaggtggaagaggagcgggaacactggaaaactgtttctcctttttctctcctccggccctcatggtgagaggtgagatatcttgatgaaaaagaggatccaggtttgctgggcttcatctcggctctgccagttactagttatgtgaccttggggatattatttcacctctctaaatctcatttttcttatctatatagtgggggcaattcaaatgcatgagatttttgagaactttagatttaatgtacttacattttatagaacaatgttgggcacagagtaagtattctgtgagtgtggtcttttattttcctttattgtcagtaaaatactctcttatcctcactttagatgcatcaagaaccccatatactttctcatacgattcaatgagtcctataattgattagtcagtaaggtgaggcttagttaacctatcaggtgg

SEQ ID NO: 64661 - DNA, 1081 bp, Homo sapiens
ccagccacattatcaaccaaatttaatggtgtgatgaagatattccaaacgagtgaggatagaagacaattttttgtccttcttaggatgctactggaagatgtacttcagaagaataaggaaatacaccaagagttagttaagtgttaagaaattattgggaacatggccgggtgcagtagctcacgcctgtaatcccagcactttgggaggccaaggcgggcagatcacgaggtcaggagatcgagaccatcccagctaacatggtaaagccctatctctactaaaaatacaaaaaaaaaaaaaaaattagccaggcatggtggtgggcgcctgtagtcccagctatgcaggaggctgaggcaggagaatgaagtgaacctgggaggtggagcttgcagtgagccgagatctcaccactgcactccagcctgtgcaacagagcaagactccgtctcaggaaaagaaaaaaaaaaaaaaaagaaaaaaagaaattattgggaacacattgtttttaacttaaaataataaaaccacatggttcctacatggaacgtgttaaatatatcttgatatagccctaaaatagaataaaacagagtagggagtacaaaaccttaacaaagaatgaggtcaacctgtttgtgctgatataggtgatctctctcataacttactagtaaaagaaagcatgacttaacattctatatgattctttccaactaaaggcatctatgtatatgctaaaatatgcattttttggaaagatatgtaagaagctattagtatgaacaatgttactttcaggaaaaggtacttggttttgggagatagaagctttaagatgtatatgtattttacagttcatagattagaaaatactatttcaaagcagttccatccaaagtgcctatgttaaatgagtggggactggggtgagtccttgagtgtttagccctaacctatcctgttcctctctcctgatcccacatataagtcctagtcataaattatagaatgaaaagcatgaaaacatttgtgtcctattatctcaacttcttcattaatttaacaaagttct

SEQ ID NO: 64662 - DNA, 2084 bp, Homo sapiens
tatacacaaagcatagtgttggcatctgcttctggtgagggcctaaggaagcttacaatcgtgatggacggcgaagggaagccagcaggtcacgtggtgagagagggagcaagagaaagaggcaggagttgccaggctcttgtaaacaaccagaactcgtgtgaactcagagcaagaactcactcattactgcaaggactgcaccaagccattcataagggatctgcccccgtgacccggacacctccctctaggccccacctccaccacaaggtcacatttctacatgagatttggcggggtgggggggacgtggatcaaaacattctaactatatcactgtacaacgggatgttttgacacaggtatacattgtggaatggctaaatcaagctacttaatatatgcattacttcacatacttatcattgttttgtggtgggaacactcacaatctacttgcttagcaattgtcaaatatacaatgtatcgttttttactatagttagcataatgtacaacagatatcttgaacttatttgtcctaactgaaattttgtgtttgttgaccaacatttccttaatcccccatgccccagccattttactatctgtttctactatttcaactttttcacataccatatataagggaggtcatgcagtgtttgtctttctgttcctgggttatttcacttaacacaatgtcctccaagttcatccatgtcatagcaaataatgaaattgccctgattttaaaggctgaatagtattccttggtgaatacataccacattttctttatccactcatcttatatttaatttatatttaatttatttaagtttatcttcaatccacctgggatttatttttggctgtagtgggtacaaatggagatattaaatagttttccactggattgcaaagctaacttctttttttaacattttagcttttattttaggttgaggggtacatgtacaagtttgttatataggtaaatttgtgactcagggatttggtgtacagattattttgtcacccaggtactaagcatattacctaactatttggttctttttttttgattctctccttcctcattgcctcctccctcaagtaggccccagtttttgttgttcccctctttctctccatgggttcacattatttagtttccacttataagtgagaacatacggtatttggtcttctgttcctgggttgtttgctaaggactaactttttaaatactaaaattcacatccaaatgtttctagactcttccttctgtttgactatttcttcactaaaaccattctgttttcatttttgtatgcttataatgtgacttgatacctagtaagaaaatattccttgcactattttttaccagacactttttagttactctatctatttttcgactccaggtggactttagaatttgcatatgaaattccatctaaaattgtaatggctttctcattggatgttgttgaatttttatcttagtttgtggcatttttaaaatttgtaagtcttcccatctaggaaaattttctctctctccttttattcagagatttttatcttctttgtgttgtgtatttattttgtcctttatgttatgttatttattctttatagtttctgaacatttcttgttaaattttttcccagctattttaagattttggtgctattttgaagtaccttttgtttctaaagtacttaaagagctctaaaaaagagtcagttacttctgccagtcattatttataattaattattttgccctactctatataaagtattttatttgagaaaactaattatacacatatattttggtgctggtttattaagcttcagctatttaagggttaatttaaatcttgcctcatataactaaacttctaacatttcagaataaaatgttctatatttctcattcctggaaaaggcaatcccccctttcttccaatttcagtatttttagtaacaagcacagaaaatatattcaagtatttttagtttttctctttagattcaatttgtgtgcaatgtgaaatatggaa

SEQ ID NO: 64663 - DNA, 1075 bp, Homo sapiens
ggaccgggttctgtttttacctttgaataagaagttgtatttcatatagaagagttctataataatgtctggatccctttatttttatccaacagttatcagtatattgctatataaatacctgccaggaaggacattttttttcctgcttcaataactgtttaagtgtctgttgttcccattttcaaatctccaaaacttttatgtgaattcttttagcatatttttttcattatttctcaacctcctttttttctggatggctgaagtttccagacatacaacccaaaatgtcttaagagaattaatataaaaaagctaagaaaatggaaagcaaagaaaaatatgcatgtacattacctgcatgtagatatgtaaactcatttttaatttcctttaaaggataatagatgaatctaatttttcttattactctttcactaagtagcaattatgatgtaaaaggtatcaggaaatttcttttttttaaaattacttccagacgtaatctgagttcttagattgggttagtctgttaatatcattaatgtcaaggagcattttccccagagctccctagcattcaaaataaactggctgaaataagccaaataagtgattttttttcattgcaatatcacagaggcattttgttagaatgtaaaaattctttccagtattgtttttatcagttaattaccaagtataaagggaggctttacagagaatattctatcagatttgagggaaccactctaagggaatagagagatatttgaagtcaaaactactatagcttacatttctgttccctttattcttttgaacagattaatgctataatttctgaatttgcatatattatttaaacagatacgttgagtgaaagctcctactcgttgattttgtttgtttttcatttttgagatagagtcttgctttgtcacccaggctgcagtgcagtggcatgatctcagctaactgcaaccctccacctcccgggttcaaatgattctcatgcttcatcctgccaagtatctgggactataggcatgcaccaccacacctggataaa

SEQ ID NO: 64664 - DNA, 1020 bp, Homo sapiens
gtattcatggattagccaaatctaaatccaagacctgcaggtattgactttcagccaaaccgttgagtcatttaagtttggcagtgatttgaaatgtgaaaaaaaggatcatgagaaattggattgagaatctgaattcttttaagaaggggcttaaacagaagagtccttatctatgacagtgactttaggtttctacatatttgacatatgtctaattgtgtaacttctattgcatgttaattactcactaagccttctttctctcacctctgtctcctggggaaatgtaactgtgtttttgcttttttctcaccactaaaattttgactgtatacaaagtaacaaaataaaaattgcttaattattcttattgtttttacttaatgttcatctctaattattagaaggtagtttgagttacttttctggcaaaacacaggacagagtacatgagaaataaatgtgccactgtcaaagaaaataaaaacttcactgtttagaggttttgagggaaaggattgtgtccttctggctcattgaaattgttacatgccattaggcttactgtaaactatcccttgataaattatttgctggacaatgagcttaagaatctgaggtgtcttcttgcttttatagagcaaaataggactctgatgcttaaatggaagtcacagagcacataatagggtgtaggtaaagttactgaacagccacatctcactttcaggaaagtagtggaagagattgtgtcttgagaagacaggcattttagaggtaacccttttaagatttcaattagttatttaagtatatgaatcatgtgcttatatgtattacttaaatgtttctgaggccagcaggcatataggaatcttaaccagctacagggagaagttttgtttttctaggactagacatattttttttttaactggggcagaaaatgctttgggtttttcatgtttaatcacagaatttggagaaaactttaggactttatatggataacatcat

SEQ ID NO: 64665 - DNA, 1031 bp, Homo sapiens
ctttgcttaaccttttaggctatatttttaagggtaatgatcatgtgtttacagtgagttgtaaaaatgctgtcattgccagtgttcagtcataaaatttggtgaaaatctatggttttaaatagcccaaacaatgggagttaacaaattgggcactaacattttaactttttctcgtgtttcaatatgtggaatttcttgcttagaagctggctctttccaagtatattgtttcatacaaacttggagtttcttgtttgattttctatttgacctttgattgctgctgttttcctactaagtgtttggccaaaagtgagagggccagtacagataaagcaaatagtgtttcatggggttaataattaataaactgaactgtcatcagaaaacccgcggatccagttcattataatgtcatgatgacaacattttgtgagagaagtctgtataaaaagcaattgctcttttgtttccaaaacaggtattacaagtggataaataatgtgcactgctctgagcccaaaggtacgcagtggacctggcctctctgatatgcatcagtatagccaatggctagccagcagacatgaagctaatttgctaccaatgaaagaagatctggccttgtggttaaccaatctattaggtaaggttataagatctcattttgtgagcaaagacaacagtttttgttttatttttcctcctgtagtgtccttcacctaagcatgtgatagcaccttggaaagaaagacttttattatttgacatttgcatctgggaaacctgaagcaggtggaaaatttaagtgaatttcccaatgtctgtcatattaactgtgcttagtaattccaatatgatgcactcaaatgtggaaatatgcagtcagattgcttattttatctatatgctggtctgatttatttttggcttttctttcatgcagctgaccaatttgacctactcttttgacattgtacacaggccacagtgtctgtaaaatctggcttctaaatctggatttcttt

SEQ ID NO: 64666 - DNA, 1051 bp, Homo sapiens
gatatttacctttgtatgacttttacttgagaaagtgtaattatttctacacagcctgttcttaagaatttgccatggataaattcagctacttttatattatatttttttgaaaaaaatactgttgataatattaatattaatgtaataatgagataatatatcatccccatataaagattataactgatttcttacaatcatacattgattgtaatcataaagtatatatttaataatttttaatcattggaaggaaaatatgttacacatgaagttattttaaaaagtctcagacttgtgttttttcttcatttgaggtagtacatttcaactataaagtatgtaatagtctgtttttgccaaaaaaaactcacctttcagagctataaaatatacagaattgaaagctgacacctaatatatttttcattagatacagatgttcaatgtaaaattctttttacaagtattcatgaaaaacaggataactaaaaagatataatgtataaaaagtaaaaatcatactttttggtaaattgttaatggctttttaatgaaagccatttttttctttttatgatttatgtgttgttttaagtatattgtaactatcttataacttaaaattatgaatggaatcttcaaattgccatagaacttaatgaaataagaatacataaagatctattacaaacgtagaaaatcttgcaaataatttgtaaagaaataattcaacaatttagagtaaagtttatcttctttatcttaaaatttaaacttatttgaataacattataattaagagaattatttctaatatttactttctgtaattttgtgaaataattttcttattagaaaatgtggcctggcgtggtgccttatgcctgtaatcccagcactttgggaggctgaggcgggcagatcactaggtcaacagatcgagaccatccaggccaacatggtgaaaccctgtctctactaaaaataccaaaattaggtgggcatggtagtgcatgcctgtagtcccagctacttgggaggcaga

SEQ ID NO: 64667 - DNA, 1030 bp, Homo sapiens
tgaatctccctctggaactctgattaaagatagaacttgtccaaggaggtagaaggtagggcattgaagttgggggccataccaggaacaaaagcatagcagcagaaatagaaaggtctgcaaggggaatctgtgaaggcagcctatagatagatcacggagtagggtgtagggatgttagatgggaaagatgggttagaggaatacagggagacctttggatattgggttaaagtgcttagttttcatattccaggtaaaggagaaaattagggattgtgcaataaaggtgtctggagaatgcctcagtgaggacggtgtttagccatcttaattttagcagtgagcatggtatgtattggagagagaagttgaggacacaaagaatagccattgttcttgttgctagaggtttaagtatcaccttatgaagatttttattaaggttatggcatgagaaatagaaggaagcttgaatctgtaggacttctgactaataatttacacaaaaaattaaggcaggaaaatggaatcttctgaaacttggattaataggaaacaaaaaaaggaaggggctttgagaaagatacgtttagaaagagtatataagaaagcagtgcagtggcacgatctcagctcactgcagcctctgcctcccaggcccaagccatcctctcacctcagcctcccgagtagctgggactgcatgcaggcatgcaccaccatgcctggctaatttttgtgtttttgtagaaatggggtttcaccatgttgccccatggctggtctctaactcacgagctcaagcaatccacctacctccggcttccaaaattctgggattacaggcctgagctactgtgccccgcctacctgtattattttaatcaggaaaaccatttcaatagaatctagagatatggttttatacattggccatgttattcaagttcccaatggtggtttttaaaaaatacatacatggttctattttaaattaaagaaaattgatctggctgggtgcacccta

SEQ ID NO: 64668 - DNA, 1038 bp, Homo sapiens
tcttgtagtcagacatacacctaacaaaaaatacttgtcctgcattatgtcctgccttgtgggtcaaagtaattgaatgggccactggggatgagaatggaatgattaatggaggccaaattgtgaaatcactggtaaagctggttctttgagttttgttggttagttttcattccccttgattactaaatgatggaactctttcacccaggatatcattttgccaccttttatttgaaataaaactgttatgcagttagcactatgttatgaaaatattaaatgttgagattcttgcaaccaaaggaagatagaaaattccaaagaaatgactatttctggtaagctcctatcccagttatgtaactcagctagaatagcaattttagtgataaaactgtgtcaaatattttatttagtgtgaatctgacatttgattttccttttataatgcttctttttgttatttcagggaaggagattacagcagaaacttttatggagaagttggacaatggtgccttgctctgtcaacttgcagaaactatgcaggagaaattcaaggagagcatggatgctaacaagcccacaaaggtaaaagatcccaatgcaaaaatcactcttaggtggtagattacatttataattgcttataaattgtgtgtaattaaaaaatttattgtgaacggatgcatcaaggtctatactaacaacaaagtacagagagttctttttaattaggtaacatgttatttgcactctaattacataaattgcataatccttttggtgaatctaattaaataaaagcttatgagaaatgatggtattaaaagagtattgtgtataaactcaatgaatctgaaatattgattaaaaacttagcagagaaataattgtgtcattaggcaatgcacagatctagccaagaaagatttactgaatagatctttgttttcaaaaatattatggcagaatactagaacaaaatttctggactgtaatttttggtttattctaaataagtagtaccattga

SEQ ID NO: 64669 - DNA, 1248 bp, Homo sapiens
ttgtaagactcaatgtaagataaccctaaagcattagcctataggtcaaaggctttgacattaagtgcattttgcttgggttctagttttatttattaattggacgtgtctgagccgtactttccttatctgtgaaataggattaataattacatatgtatagcttccatagagcattgcacaaaatagggctcttgataaaatctctttttgataaaatctcttttccttacgtgaaagataagagacccttgtaagtattttcgattaactataagaaaataaatactttatagtctacggccataccaccctgaacatgcccagtctcgtctgatctcggaagctaagcggggtcgggcctggttaggccttggaagggagaaaataaatgctttataaatgtttgtatttagcatgagagctgctatgtgcaaatatgtatacatttgccccaatctccatgataatatggaatattgagaatatttattgatcaaaagttatgtaagtactttccttttaaacagccatttcaatattataatttttataataaaactataaaacaaaaagaaaagaatttttttcagttagtaaaactgcagcaagttattaaacttgaaatagttccgtgaacctgagcaaatttttaactgaatataaagctaaatttttttctgattgtgataaaggttttagtataaaaccttaaatgtgttacttgaacaagtggaggtttaaaaatacttattatcatctcaccaaaaagtcacatgcacctgtatgttcatagcagcactattcactactgcaaagacatgaaatcaacctagatactcatcaacggtggactggctaagaaaatatggtccctatataccatggaataccttgcagccataagaaaccaaaatcatgtcctttgcagaaacatgggggcagctgaaggccattatcttaagcaagttaatgcaggaacagaaccaaatggtctcacatataagtgggagctaaacactgagtacacatggacacaaacaggagaacaaaagacactggggcctacttgagcaggaagggcggcaagagggtgaaggtcaaaaaactacctattgggttctatgctcactatctgggtgatgaaaccatttatatacccaacctcaacaaggtgcaatttacccatgtaacaatcctgcacatgtcccctccgaacctaaaataaaagttaaaaaaaaataccga

SEQ ID NO: 64670 - DNA, 1388 bp, Homo sapiens
gtctagattccagaggctactacatttatttgaatctgcttataaagagccccttcaaaattgttctttttgtctgtgagctcaaaccataatatattgtttggtagtgtaaataacagttgcattaaaggcatatgaaacatgtgactgaaaataaatatgttaaattgaaactccaaaaagtataaaaagaagaagagcaaattctggatagaaaaagggaggttcacacacacatgcacacatacacatttttcatctacgtgatttcctagcaccagcgcagtgttgtcccttgagcatgaaagtaaacctgactgaatttttccatgatgacatcatcccttctacttacagtctcacatcctgcatttaacaacatgcaggcacatcagcaagacaagattgtaaaaggagtctaactggggaactgttttcatgatatttgatagcactaattgcggtcaatgctttcaaagcactgtggatgtagaatattttgtcagaaaaagtcactctcaccctatggaaaatggagaattaattattttaaaatgagctgttactaaatgtgttggagaaactcaagtcgttggaacaaatcaataatgaatatgtatgctatttcttaaagggaaacattcatagattttatattaagaaccttttctaaaaggctgaaatttgggggaaagagttgctttttcatttaaaaatgtctgagaattgctaggtaatttaaaatgtaagcactcaccatatttatgtgtgtgtggtccaaggtatgtggtactggtacattacagagtaatggaataatgctttttagatgaggtaactgagtttacaatatatagagctcttcaactgtatcttaagctcttaggggctgacgacatgaatggcttctattgtttgacttagcagtttgaaaacacattacatatcatgcatgaagcctgaagccttctagtatgtgttttgtgtttatattactgtgctagtcatgtctaatttcacaccagtgtaggctgcttgtctaacagatgcctcgctagcattgctgtttcatataagaaataaaaaatgtggtaatttgcatatcttgaagccaaaagaagcaaacaaaaatcccagctcaatcaaaaattgttaaaaaagaattaaatcttggaagtgacaaggaagaaaagaaccctacaatgaaggtgaaacaactcaataaattcagaaagtcttttgagactctgttttgtaggtgttatggaggatgtgaagcaaataagtcatggattctttcttctagatcaggatcacttaagtgcttttgtgccatgttcttttaggcacttgggtgaagcctgtggatcatttctcctcatgctatt

SEQ ID NO: 64671 - DNA, 1018 bp, Homo sapiens
cgatttcagcatccaagcaacacagaagcttgctggcttttcattgctaatgtttaacctggatgttgagaagctactcattcacgatgataatatgaacttcttgagggcagcagttaaccaaattaaaagtgtgccaccaatattcctaacctcaagatcttgttgtcaaagccactatgtctaagcatttgctaataaaatacattttccctccaaaactttcctggggaggggaggacattgtacatgcagttttatatgacagttctccttagtggaaagtctattcccatattctatcttcctcctccttcacctccttgcttcctttttactttttaataattttcagcctccccttttattccttttcttcattaccctcattcaacactttgctcttttagtttccacttctgactaggatgatagttttaaaattatctacatttttattagggaaagacatagaatgttatccttatgtagaagcatctttgaaacctgttttttttctgtaggaaggaaaaacaagaattaatttcagaaatcatagctaaataagcagaggaaggaactctgttagctaaagcaacttgctttggttacctgttttcccatttattatcttgcataccatcagacagggcttctggccagcccatgaagcccaaagaacaagaaatgaagatacaaatgtttgaagaagtcttgatgcaaattaaaaattcaagattaattagaaaatggtttcttatccacatctgggtatacttttagggttgagatcagatgaataagtaagataaagtgagaactaacactgaatgaacattctcaaagaatttattaataaaatcaagaaaaaaaataggtgaacacaccagcaatttacaacttggctagaaaacttgctgccaattaatagacctttctttgatccaatagaaaattaacctgtaatcagaatatgtaacctcaagttctttaaatcatcatatcaatataatcttca

SEQ ID NO: 64672 - DNA, 1068 bp, Homo sapiens
agatggctgaatgagaccacttatttttgttctcatgggtaaaacttacttttattttcaactaaatagagctatcatcactgaagagtgaaatccctctgctaatatttcagaaaaatatcagtttctgaatataaaatatgtgtttgacttgtgaaaagtaaaactgtgtaaaagcaagttaataaaacctcaaagatatttttactgacagtgttttgatattcattgctgaaaacaaagttagtataaattcagcattttttgactgtagaattaagatgatccttataatagaagtaaaaaaaaaacttttgatattttcgtttagggtcataatcaataatcagtggtatagtggagttttttatgaattttattttttagtatttctttgatttggagcaaaatttatgatcatttaaaagaaaaatactttcggaacattttctttaatctgtgatttttattcattaccttttaaaaggaaatgttacttaaaagaaaaaaatattcttatacaaagatgattaactgacccatcctatttaaagcacttgaactaactgctgagaacatcatatactttcacatggttgaaatttccttccaaatctaaatcaatctttaaattgctttaaaacagaagataaatgaggaaaaaattatcttgcaggaatctataaactgtctgttatatgccttaaaaaggacagtttctcgcactaggctgtaaaatttgtccctctaaccctagtaaaataggatccagatgtcttttgtttgaaaactctagactactaaatagtttgagtaaattttctagtttaggcctcagtttggggtcttagtaattttacctagagctcaaaaactgtgtcaagtgccagaaaaatgagaaatccattcctaaaacctcatcataaagtcattaaccataagacctgttccctatcactttaaaaaaaaatgagacaaaaatatgttgccctttgagtattcgccctactttcattatcactggggtataaaggtatgaggatatgattttagtggattctaccttct

SEQ ID NO: 64673 - DNA, 1062 bp, Homo sapiens
tgttatttttaaaagtcagtgatttactcccatggtgctcatcatcacatgtaatatatggtaattgtatcattataagttatgcatatgtaatgatccagggtctttttaaaggtatggtgtggagcctcctggtttgataaagctggaaaaagagattgaacaagaagaaacactttctgccccttctccttcaccttctccttcatcaaagtcttctggaaaaaagagtacaggaaacttactggatgatgcagtaagtaaaatcagtcagacttcttaccaacggttagtctttcttgcactacaaaacatattctgtgcaatctcgtatcagtctaatctttacctatatcaattttcttgaaatgtattttaagcccatatgaaaaactttgtagtcctacaattcattttgagattcaaaactgaactagttgttcaaaataaagtgtcatttaatgctgcagaccaatatctaaaactttagaataataagtcaactccctgaaaattgtatttgaaaacatgaaagtctctttgtcactggatcaccattccccctttcacagatgagaagtctgaaaacaagatcttgaggattgttaaagaagggaaagtaaatgtatgatagagaagttaagtgccttttatggactaccattgtttttcaagtgctctcatatatgaaaggcaggttccctcttgagaaatggaaacatagaaattgagtaacctgctgaggggaggagaggagcttagattccaacaaaagttttgtctaactcttcaaggtcgctctacttagcagagcccttgagtcacaatttttggtagttaggaaatgttttaacagaatcacagtaaaccgtttttaggtataacagcaaacatggtgaattaaaactctcaagtgaccttggttgtctgttaagtagttattggttatgaaaagtagtgtgcttgagtatgtgtgtgcatatgccctccacatatattttaagtgcaaatataaaaaaaattaataaaggagataaatcatgagtgactgggatgttgttt

SEQ ID NO: 64674 - DNA, 1010 bp, Homo sapiens
aagagagaaagcaaaagaagcagatctgtgttaagatattatagtccagtgaacagtttcagcaataactgccagttttgaaaccttcaatgtttcttcacatttctttgtttgatacttaggggaatagtgggaaaaaataggtgaccctttatgtggaaaatacatcaccttctttaatcaagatatcatgaaagaaacacagtggtttccattcagattaatttattctccagatgtcctgatagagtgattcagctgtgataaaacggtggagtcaggtttagttctcctcttcgcgagctagttctcacacaatgagttgaatacagttctcagaaatcattcttactttcttcctcttctccatcaacttcctcagtctggggatgagagatagtataattctgagtaatcaggctcctcttgaaatcccatttcagcagaaaactggctgggttcctagccaaaaaagaacacctgccagactgacttttccctaggtaatgtaagaagcacagatgtcatcagtcactgtttacttaacaatatatttccactggccacagtctggccttgtttcttccatttctgcttccacctctcatacaactacaaaaacagcccttgacttttaaaatgaactccattttcaaagctagaaaggcatttgagaagggcaggccacttgagaaaatgtttcttgtattttatttcatttgataccaagagtttctgtcttttgtctaagaagactgcaaaatggaattactttccatacagacttgtgattgtcattttttagtggaggaaccagttgaacatcaatttactctttggttaattaccacatggcagcaaaattgtgccaagcatgatcctcctaaagttcaggcctcaggccatgtgctttcttgatgctgtcagtctgattttcttctggatgatcgaccccttctcccaatgcccctccctttcttcatccttgctttcctcatggaagcccttat

SEQ ID NO: 64675 - DNA, 1024 bp, Homo sapiens
aagatcctcttcattagggtaaagttttacttttcacttatcttgtttttatgggaagattcagaatttgagttaggggaaatatgacagataagagcaggaacttccatatggtgcttacgtttaaagatacatggtatgaatttttttaaagtaacatacattataatgtactactgaaggctaaatacaactgttttctctttgtacatataccaaaacgcatatacaccaaagacaccatggagatcaaatagatgaagaaggctttccacttgtgttatgttttgctaagaatcaagataatttaatctctcaaagtaagtttgtggcttttactaagaccaataattctttttttaaaaaaaagaaaagaaaagaaaatgaaaaatagagatacattcctagaaatctgcagttgtaaataaaagtaatttgctgctttatggtttagtcatttctaaaggaacagaggttgtgatgttttttaaaaaagctatattctttcctcagttgaaaaagttaaaaaatatcctgctgttttgtagaatagaatgatttgaatacgtacatctagtaccagcaatgtgtagtctcacaatactcaaatctgcaatgactctgttgaaattttgcccttgtaaagttttcttaatttctacttttgaccaaaacttattggtataacaggtctttttaaaggccctgcaacatgtagttgcaaaaagaaagtttaatcataattttagccttaaaatataatgttaatggttttgaattttaatctaattttagattagcatttactaatatatttcttaaatttccaggaaataattgctattctgctttggaatagcagcaaaaggatataacaatgtgttattattggagtatgagacagatctgcgtagatggcctcactaggaaaggcagttgtctgagttgcttattgttcttttgttctttattgcaaggatagcatacatattttgttaagtcaaactgcctgctgtcatgttag

SEQ ID NO: 64676 - DNA, 1045 bp, Homo sapiens
tctctttctgattttcttaaagtgaagggctttctaaacaagacctatgtttcatgaaaatgtggttagtatgacattttaaacaaggcattttcttaaagtaacaactcctagatttttttggtagcaaagtgcttgaagattgggagaccaaaactgaattgcctgggcaagtactaaaggcagtatttggtatgttgactttaagaactgagattatgtttgaggagatatcaacttaacagcagagttaaggtagatattttcctttcatgaatctttcatgcagtacatttcttctggttaaatttggggttgaagttgccagtagagtttacctatcgtgattttttttttttctgttaatctggatttcaagagtcaagaaagggtatctgcagaaagtcatgtctgagatgagactcaaagaataagcacatgttggctaaacaaagtagaagtgaaagtgtttcaaccagaatcagaaagaaaggagacagcatacaaaaaggcccagaagtaacagaggaggagatgaggggaagagagagagagagagagacctcatcagaactgtagaagtgcagccttgagagttgaggacaaaaggaggagtgggcaacgagaggctggtgtagcaagggagacatgatgccaggcagacacacagagccagctcatggagagctacctgtatgatgagagctttggctttctcctgaaggcaataagaagattctaaataatttttagacgaggagaaacatgagtagattgcattttaaatcattcaggctgtagtgcagataatgaattgaaaaggtataaagttggaggacgagcattccaccgttttggcttggagagtgtggaggtcaagagggtggcagctcattctggggacctacctcttgaaattccaggtatatatattattatctactgtgtgaggctatcttgtgtcttggttatttaaaattgaaacaccgttaagtttatctttgtcctgcaaacgataacagaaaagcaacatgttgattttggc

SEQ ID NO: 64677 - DNA, 1043 bp, Homo sapiens
cacttgctatataaccttgatcaagttatttaaaatctctgtgactcatctataatgtgaattataatgctactcagttttagagggctgattattcattcagccgatattccataaattattgtctagctcctgggaatagggtggtgaatgagacaaggtccctgctgttaaggagtatattttctgatggagacagattctttctcagtaagcaaatatacaggtaattttgagttctaataaatgttagaaggaaacatttgattcaatgtagaataatagggttcaggaggggttactttgggtaaagcttgaagagatggcctctccaaggaagtgatatttgaagtgagatgtaaatgatgagaaggagccaggcttgcgaagagcgggaaaagcagtttagaggtaacaggaagagcaagtgcaaaagttggcttatttgaggagcagtatagcagattttttaggaaatgcacacctacaaatgtaatacttaattgtcagtctgtaggtagaaatcatagcagatttaaaagggtcacatgccctctagtgtcctctatgccttatttaatcctgttaataggcttttccaagtgccatgaagaatgttgaaactgtgtatgtgtgcatttgttctgtgaaatgcattaatatttctttatgtaggaaacagaattctgagaaggcagcttctgttgaagggggatatatttatttatttttgtaaatgagaaggaatggaaacagaggggaacaagaagtgttctgttgaaagggatgacttgcatattttagtttggtctgttcattcttacataaactagggcaaaacaatgatcccattaagttttttgtttttttttttttctcttcagtgtttttcttttttgggtttaaaataaaggaaaaaaaatagaatcagggaatactttgattctgttgtgtgggttgaaattctatctctccacccacaaaaaaattctgaaaaatgggtcttggaatttttttcttcatgagtcctagtcatcgccctc

SEQ ID NO: 64678 - DNA, 1891 bp, Homo sapiens
cctgtctctctttctacctggtttccccaactcattgttgcttttaactataagatctgaggtcatggtttagattcatttgaagaccactttgcgtcttctggcatggctacagaaggttccagtaaacctgacacaggcaatcctgtggttaaattgcaaggacaccttcagtcttagaggacaaaaagaggaaaagggatagcaaaaattccagtgttcctccatcacactagacatattccaaatgtagagattctgaatgccaagaacagcttgcttggtctgtgtgagtcgtggatgttttgtcatctaagcccgatgtactctcccacactttgcatcattactgagggataaaaaacaaaaacaaaaatccccccatagcactcagaaagtgcatctttatagtccgcatggaaaaagaaggtcagtggcacaaagcatttgatgccctaccacctcctcttttttccattcatcctgggtgaaggaagagtgtgtcttttctcccactcctacctagcctgtctgattcactctgttgcattgtcctcattggaaactgctttcctggactcttgacacattcttactgtatcagagctgtgcttaaccaggaagtgccagatggtactgaatcactggctgcttaatattcaagaacaatattacatacagaacagaataatgtatgtgttgattaaaggactttgctgatgtcttgggaatcaggaaatgcccttgtcacctccacagctgtgccttgacaatttatgcagattacaagttttgtgggggactctttgctaagcatgtttctaccttttttttaaactatatcttcagcacttggttttttgctctaagctgcttgccattcaaagtcctagatatatgctactttcgttgaaaagattgttttctagtgtcctcttccttgtcgctctcttcaggattataagtctataagggagtataggacaaaaactgtaaacatagatagctgtacttttttcggggaactggcattataattctggaagatgtcaacatattggcacattcagaaattaccttcatgatgctatggactgtgagtaatatgtagttatctgaaacagtttctgaacatgaaaggatataataaattcaaggcatacttcttggataaatccttctaaaggacttagttttctaaggggagttttggttaaaatccaaagcaaaccaagcagagaactacccttttattgttctatctgtccacaaacagattctgcttctgcggtatccacctcagaatagcttaaaatgttcttaattatgtcccttagttctgttaaaacaatcacaaagcttaccaggcttttatttttgaaaatagatttacatttacatgagttggataaaaaaaaattgtgaaaatgaacttcatccgagctgtcaccatcaatctttattatttttgaaaacaattggccagatagaaatactggtaaaaattactgagaatgtcttgaagtgggtttttgaagattaaccaataagatcagctgcatatctcattacctaacaagtcctcctatgtccattaatctacttatgtatggatagataagcgtttatccacttattcatgcagaaagaacttatcactgtccactatgcaaggactggttttcagtaatagtaatataggatagtattagtaataagtcatatctcaagacgtgtcttgaacaatttgctgaatttctagaagataatcggcaatgtagtacagaaatgattgtaattgtatctaccgtttacttctatgaatgttggccttgtgtggaaatagacaaaaatagatacctgtctctgacaatgaagttacaaaattgac

SEQ ID NO: 64679 - DNA, 1063 bp, Homo sapiens
ttcatagactatatgctaactcagacattttgcaccaagtagaaaaacaatgggtcatgaaatacaaaccaaaacactaatttcactagaaccaggggttgattcaaggtactgtaagaattctcggaatttaacacttttgatattttttcatttcagatgctgcacaacaaacatgtcatggtccgtgtgggaggaggctgggaaacttttgcagggtatttgttgaaacacgacccctgccgaatgctgcagatctcccgtgtggatggcaaaacatcccctatccaaagcaaatctccaactctaaaggacatgaatccagataactacttggtggtctctgccagttataaggctaagaaggaaattaagtgaaacaaattggtcatgacaaggggaccctcataatggcctgtatccacttctccagtatagtcagtttagttcatatgttctgaaaactgttttggagaaagatagacagaaaaatgtcatcatattgaaaaatgttcaaagagtagcactatttatttttaatgcttctgtagaatatgacctattaaaagaaaatctaaactcaaatttaaattatccaaattttaggcaaattattatttctcaatatgcgaacacagtatttagaacacaatattagaaacacaattctaactaaagataaataaggagaaaacatttaggatttgcagataagtcaacagaaagtgcctgctttacactcatgagtaaaagcactccagacatttttataattgcaagatttttatgcttttttttttttttttttacaaaatgatgattagtgtgataatgtgctgcaaaaaatatccaacagcactacacataagtacagagtattcacaatagtaatatgttactggaaaggccacttccgaaaagtttacattcacttggaaggctgccttaaagtatatctcttatctatgaccaaatatctggggtacttttagaagttttcagtacacccccttagagaatagcttatgagttatttcacacattcctgagcacatggctgtgt

SEQ ID NO: 64680 - DNA, 1003 bp, Homo sapiens
gaacctgagttggtggttagggaaacctcaggaacattttaatcacattgggattcagaagagcaacagaaccaaaggttgtttggtgtgttcatacaatccctggatttataggtggattttctataaaggaaaaatgatgtaattagtatcctgttttttcctaaagaaataatactatcataaaaattctgtctatcctttgtaccccaggaaaatggacatgaactttgaattttccctttctccaaatgtttgactttttattttcactgataagcattatgctatgttcttagaagacaaaagcagctcttgccagttttgaataatttctgcatgaatagaccagtaagaggtaagtagccatgactgcctatatgtgttgagacataaggtatatttctttaacatctccaagcaagcatttcaaattctcttaactactaaacatgctctaagctaattcaaatatagtattgtggcttttttcttcaattttctcaaaagctacagacacaaggcatttgtatgtataacagactttgatgaagttttggttccagtaactcaaaacactaagtttcccatttgatatggctttttattgttctagtctccctcttctagttatgcttcatcttgcaaatattgactttgaatgtgataactattgcctacaaattaagtattcatacattactcctgtggatatcatacttttttgttattatatcctgaattgcattggctttttttggttttgttttgttttttgagatggagtttcactcttgttgcccaggttggagtgcaatggcacaatctcagctcaccgcaacctctgcctcccaggttcaagtgattctcctgcctcagcctccctagtagctgggattgcaggcatgtgccaccacgcctgactaattttgtgtttttagtagagacagggtttctccacgttggtcaggctggtctcgaactcctgacctcaggtgatccc

SEQ ID NO: 64681 - DNA, 1039 bp, Homo sapiens
ataattgagtttggactttattcttcatagatgtccatagctagattttctaacgcaaatggcctttgatatcccaaaaatttacatttaaatgtaattattttcaaaatgatttccttatttatatgaattgcattaatatatttatattaatatatgaaaactatcatatcttctctaaattcagatactcttttagtaacatccttccttttaaaatggctgtgcattgtaaaatacttacagatgtgaagcaagtttaggggaaaatttgtatagttacaaaatacccagtgaagaaatgatgttttatgtaaggctgttgtagaaacactccttctatgttaccaaaaataaaccaactccctacccccaaagaaaaacctagaaagcaaagatagacaaaaaaatgttttgcacactggacagatttttgttgtctttctgtttttcttatcaaatttcttcaaggctgcatctcggggaattttagatgttcaatctgtgcaagaaaagagaaagaaaaaggaaaaaatagaaaaacaaattgctacatccgggcccccaccagaaggtggacttagggtaagtattaaaattttcttagtgattaacttaactggcattttaaaaaaacttaagtagcaatccattcataattttctcctgaaatgtattatcagaaaattttgaaatagtttaaaagcatgagtagtaaatattggaagtaataccaatttattttaacatttattggaatcaattagcttttttccccaaaatgaaataatagatttattattttaacactatatatattttaatactcttatgcttactactaatcttaaataattcaaaaattcaagcaatatggagaagtataaagaagtgtaaaagtcatccaaactaagtaccattttgacagacataatttctaaccttcatttatatatcttattaaattggattacgctataagttctgttttatggcctgagctcttttacgcattgatttggaatctttgatctttcca

SEQ ID NO: 64682 - DNA, 1085 bp, Homo sapiens
ttgatgtctctctgtgaagaatggccataagccaacgtagccactctctaggacagccctgattgggggaaatttaggttcaggtgagacacaatgaggagttaaaacaaaaatgtataaaatagcatatgtttgttacttacagatcccagacaggatataggggtgccagtagagggctgacaggaaatctgcaggaggctgagagctcaaccagtgggtggcaaacatgagagaggaaacacctgtacaactatgtctttattaaggtacgtggcattatcccttaagctttcccagggggttgaagataggttcgtttaaaaaaaagtgcaggggtggatacttatttacatgactctggcataaaccattaggttttaccgtggtcaacacctgtgagatctgttgggctttgggtctgtgggttaaggaacaagtgggttatgtgtcaatcacaccacatggggagaggaagttttaactaggccaaagatgataaggtatgactgagtttcagacaactcatgttaggcctaaaaatgaatgctgaggcaggaaatatattaaacaaattcatgagaatgagataacccatattttgttgatggtaaagcaaatttaaaacttgactggcttgaagtacacaataaggaagtaaattcatttgtttatctttgttgcttctctcttggcatctcccaagcttaatattgctttgtacttggtggttttactcatgcaaatagtgttgttaagaaatgaaacctaatactttatatttagaaatatgttaaatatacacataaatggagaaaatattcagtggtgtgaccttgaaaaagagactgctgttttattgttagccaataaacgagtggtagagaaaagcaatctatgggcatgcctttgattcattgaccttaaaaaaaaagaaaaaaaaaaaaacttatgaactcaggattaaactaaaggagataattttgaggctttgcttaatgtttctctgcttagcacctgtcatacttctaataatttgagcttagggtttaattacatagcacctgtcatcatcacaatacatt

SEQ ID NO: 64683 - DNA, 1030 bp, Homo sapiens
tttaaagaaaaccagtttgcttcccagtattataattagttgctctaaatacagagcccattttaatatttgtggttagctctcaacagttcaatacaaattatgcatcacagttattctttaaattcttgccattcactcttatgttgtgatttagtcttctagagaaaggaaattttctaactttggacacttaagtagatgacagtcaacacatgcataaataataggaaatatttaaacaatagaaatccagcccacagtgattttagactgtgaacatctctagagttccaaaagtacatttgctttttaaggatactataattaaattgaatgaaaaagctctatagtctctagcgtccaaagatttaatgttcgatatctaatacagggtcaaaaagccattatcttttcctttcatgaaagtgttgattttgatagggataaatttctttaaaaatagttaacacacttattacaacaaaaactggaataatcatctatttcactttagctttgaaacttctgcaatgcttgtggtatgtgaaaactatggttattaaattttaccagaagagaatgctgggcttgaaaaagatgaaatatttataataagtagcatatcttattaatgtgattactctgtaggaattcattttactggatacccagaataccctgtgatattgaacaaatatgaaaagcaatgcggtactatcagtgtcattttgcaaagaagagaatatgttttaaagatctctaacagaaggccattctgtgtataatatttaacagttcttataggcacatggttattgtgcagattagaacctaaactgagcagctttgaaaggacagttgtgttagtagggatgagcttattgtcctgctgggaaaagctgagtagctcagccatggccacctgggacagtgggttttctggccaaagacttctgttaacttagtttcttagtcagtagtcctgtatgtgaagcaaatggtatttcacatgtttagatcacgctgg

SEQ ID NO: 64684 - DNA, 1053 bp, Homo sapiens
tgctggtatttgtttttctcacatatctcaaactatttattcattcagcacattattttggctagcactgagcaagctgctgagatataagataagtaacaaactaacaaactcactgccttgactaaatttacagtcagtataggagtcagacatgaaatctgtatattcataacaggtattgctctcagcttctacctagttttcttgccagaaagctcagattctcagttctgagtcttcctcttccttattcctccaaacttttctcaagaataatactggatgttagtcatccaaaaagggtcctgttccgcttttaaagggaagtctatttattctagagctctcactctcaaatcactcccaaatggtgtctttgtttaggttgaatctcagcaggacagtgtccatttgtctactcttattcctgaacagagagggttctcatccacaattacagttcttttagtccacattcacattcttaggatttgtttcctactgttaaataaattgccaggacagcatgatcaggaggtgtattcaacctcaattgcatgttgttggaaccagtcgtccctgcaaactgctaccattgtgttgaacacaagttaccagtcttgactttctctgtcctcccaactgtgtacctctgacttagtttcctaacagtgaaaaggttaaagctaccccagttttccagaacagatattattagttttgaagccgagttgggagatttttatatcttccctctgaaaaggccatagaagccttatgaaattttacccaaacctctgtaaaaactctgcctatgcaagcaagggaaggtgctgcaaattaagaaaacaaacaaaaaaaaattttttatactctttccacttgattaatacttgcacaactgagagagtacttcagagactgcacaagaaagatgatctgacccagggtgactttcaatctacacttactaatacaatgcttaaaattctttaataggataacctttatcatttgaaactgtgataagtggctgaaaaggaaagtaaa

SEQ ID NO: 64685 - DNA, 1032 bp, Homo sapiens
aaaggaaagttaaaatcatttatatttacctttttggggatctgacgtatttggaaagagttttgaattattggtgaattttaaggtaggctgtagagttgttttttcttgataaggggtaaacccagtgaagctatcactgtttgtggtaagccatccacttggttccactatcaagggggtcacagatggagaagttggttctgaagagaggatgctaactgtaatggaactgttatcaggagttttcacggtgtcattgaccaaagaccaagtgaagttttctgaagacagagcaggtgtagcattgggatgtgctgagatgggcaaaagatcttcatctgctataggtgcattccaaggcactttagaaacaaagctatggatcaagggagggcttgtggaaatggtagatgtgggttttagactgcccaaagaatgctctgctgatgagttactggagaaatctgttattccgtggctgttgttgggtagattcaaaggaggggaatgactcgccttgagatttgaggtggttatattttctttatctgagtttaagtttgcttcactttccaaagaaataggtttattttccattgttttaaaaacttctgcaatgttctgtgttgtgtttatgtcttgattttcttttccatggctccccgatagaagtgaataaaacaacgttgaaatcaacagaattttggctaaggccaacattgtaggcttctttggtattggtttttttttaaaggaatctgaaagaaaataaccataatttgaattccttaaataaaatactctgagtttttaaatggatctatatattttaaagtgataaaaatctagacataatatagagatggtaatatcatatttttattccaaaattgcttattttggattatgtacttaaattagtgccattgagtactgctttccacgtaatctttcttccttccttgcttctagggaaatgccatgcaaaaacttcctcaagccacacactgctatttcaaagaccattta

SEQ ID NO: 64686 - DNA, 1038 bp, Homo sapiens
aagtggtcagcctgttcaccatgaatggccttagttgacacctgttacccattaggggtgataacattaatgggaagaaatgatggcaactttgaatgctaggtgaaatctaggaggaaggcatacttggcaaaccacatgtataatatgctacttggaaatgtatcacagccatctctgggatttgaaatatccagacttgtagggaagaaaacaatgacttgacgaccttaaaaagggttagattgacattgcaggaagccaggatgtaattctcagaaccagtctcagggagatatatgcttggagaactctgccttccatcaactgcagtgtaatgggaaagagggtggtgaggttttgaaagacagatttccatgtaaatgtgcacaagccaggcatggcttaaaatatcatgcagtcttcactcacatactaatttgactttggaaagtatggttgagttcagatacttataagaaatgacttaaacaaatccttgccttggctgccagaactctacatcccttcagtttacaggttggtaggaattgcccatgtctcttgctgagattatggatctgtgccacaggggatttatgctgctttacattgactatgcagttgaagagttgcacatcacctttagtagtcaaaccaaaaatctaagattccaaaaagaacagcattcattgaaataatattccattgcattggctacttcaagtctcttttacccctggcagagccagttgcagtgcaattttttgtactaaatgccaataaagccacatacttataaactatgaatggctattcttatatagtttagaacacaactaatccatactttattgtggaaggctgttttatagtttatttaattttttctctatgatttattacaactctcacggaatattaacttgaaatgctgtaaatacgttggttttccttgtccctttgcaccttgacagtacgtagtatacattgtggtttatgcagctctgacaccagtttttgctattgtaatatgtt

SEQ ID NO: 64687 - DNA, 1073 bp, Homo sapiens
cagaagaaacatggatagatgatagctgtttcattgtttgtttttgtcaagcatattcactttcctccttgtcctctgattctgagcaaagggcctcagactctgaacttccctcaagtgccgttgttatgtgaaactcttccattcagattccagagaggttctcatgctcccccccctccttatttgtagcaatcgtagcaactaattccactaagtacaagggagttttttacactcctccatttttatagcatctgcatttctttttctttgttaggtacatgtatacacctgcctgagtataaatactctctctacctaataataacatcaaccaacatcttttccaaattagggccacagaacagcaacatttgtctgacagtagtataaagaataatgatagctctatccttaagaagtatttcctttcctttttatatagtcccgttagggtttaaaaccatattgatcaactagaaagaaaaatatgaaaagagaaaaatattttaatttaaaaattgtaatacattgatttataaaatgccttctctgatacttttgaaacagatgtgaaaaacagaaaaagaaaaaattgtctgaaatgtttattttgcaaaacagtgcaatagaatctagttatgccttcatcactgttgacagtaaatactgacagccccttgcagtgtgttagttttagatcactctgttttagttgagagaaatgttttatatcatggtttttatatgaatacaaattatttctcaaagatttatagcacacactattctcaggaattctgtattacatgaatgctgcttatatattttcatattctaacttgtcttttcaagcaaataactaatatatatgtgcatgcagtctgccttgacaagttgttccaagctgaagagctttcactgtacaatgtgtggaaaatcaccatagatcatggctgaaatagtttgtaattgtctgagtctgtgcacgtacttttagataaaatgctgctgagtgactgcatgatgagatacaacttctgaatgctgcacattcttccaaaatgatc

SEQ ID NO: 64688 - DNA, 1777 bp, Homo sapiens
atcttggtgaagtgagtgttggcatatctatgccaagtgggttgccagtgtctgaaagacacattcctgctgtcaggattaggcctctctcatatgtcacgaaggtcatctgttttagctactgagcatgtcccgctccttctttttgtttcttgcttgaaaaaaagagtaataagcagtggctttaacccagtaattgggtagtaaagttaaaagtttaggtgggaatactaaacatattgactagaagttaactgctaaaataatggattgttttattaattttttgcatttttaatgagtttaattctaacaaacagcatatttgtctgcaaatgctgtacttaagtttctttattctttatgctcatatcatttttataaattatgaaataaaggaatttttgtgtcagtagtgactgaaggatttggagatgatatgtaaaatgttcttccttcaaatgtgtttattagatggcagacatcacaatactttaaacacttcatatacattagcaaaagaatgctccgtaactcataatcacaattacagtgatattgtgaaatcttattgacactgattcagaatttctgtgattctaaacaagaaccttgatttactataacttcatatgaaaaataaatgtttttctgtaaacttcagtatctgacaagaggaagctagtacacaatcagtagtttcccagactgagttaagaaaatgaaagttttgttgaatttaaggatcataaaattaatttcttagtaaaaattttataggagtttgatttacataggttttaacactaatgttatttggattcttagaattatcatttatgctttaattttaactaaatatttactgtatttggaaagtgttacttatttgaaaatatcaaggagtttaagtttcaaataagtcacattggcttattagtgataatttgtccatttgacattttaacatttttctagaagttttaagtggcttctttgatgtcaagaaagtttttccttgttttgatctgatttttcaataattttaggtttttacagtggaaattcctatccagaaccagccttttataatccaattccgtggaaaccaattcatatgccacctcccaaagaagctaaggatctatcaggaaggaagagtaaaagacctgtgataagtcagccacacaagtcatcatctctggtaattcataaagccaggagcaatctttgccttggaactctgtgcagaatacaaagatagcgtatgtggaaaataacatgcttttatctggagctatttaatttaaaaatcagaaattgttttttactgctcagtcaataactcaacacttaatgtgattattgacaaatagcaatttttgcatttgtatatggagtccttagagttgaggaagatattttctggattttggtttttataaactttttaaggttgatcttggcatgttgttttgcagaataagtggctgaatatgtaagaattgtgtttgtatttagcttgtattaaaagtacactgtaataccaataaaactaacaatttttcttgtattgttttatattgttactagtttacatttatgaacataagattaatttgttcaaaacaagcacctctaaactgcatgcttgagtaacccttagaagaatttaaagcaaaaaaaaggaaatagaaaaaaagtttaagggatggtgggttagaatttaagtgggttagcaccctagagtaatcaaaaacagtctttgctgatgggt

SEQ ID NO: 64689 - DNA, 3333 bp, Homo sapiens
ttgttattttaacaacatttgcatcttgtacatcactgccttcgtccaaattgtttataggcttgatttctgtgtctaacttattcatgggaatctatactggcatcctaacttttcttgatgctgtgtcctggggcagattcgctgaatttggcatttggtgggaaactggcagtggctgcaaagtagctgggtttcttgcagttttctcctcagaaagtgccatatttttattaatgctagcaactgtcgaaagaagcttatctgcaaaagatataatgaaaaatgggaagagcaatcatctcaaacagttccgggttgctgcccttttggctttcctaggtgctacagtagcaggctgttttccccttttccatagaggggaatattctgcatcacccctttgtttgccatttcctacaggtgaaacgccatcattaggattcactgtaacgttagtgctattaaactcactagcatttttattaatggccgttatctacactaaactatactgcaacttggaaaaagaggacctctcagaaaactcacaatctagcatgattaagcatgtcgcttggctaatcttcaccaattgcatctttttctgccctgtggcgtttttttcatttgcaccattgatcactgcaatctctatcagccccgaaataatgaagtctgttactctgatattttttccattgcctgcttgcctgaatccagtcctgtatgttttcttcaacccaaagtttaaagaagactggaagttactgaagcgacgtgttaccaagaaaagtggatcagtttcagtttccatcagtagccaaggtggttgtctggaacaggatttctactacgactgtggcatgtactcacatttgcagggcaacctgactgtttgcgactgctgcgaatcgtttcttttaacaaagccagtatcatgcaaacacttgataaaatcacacagctgtcctgcattggcagtggcttcttgccaaagacctgagggctactggtccgactgtggcacacagtcggcccactctgattatgcagatgaagaagattcctttgtctcagacagttctgaccaggtgcaggcctgtggacgagcctgcttctaccagagtagaggattccctttggtgcgctatgcttacaatctaccaagagttaaagactgaactactgtgtgtgtaaccgtttcccccgtcaaccaaaatcagtgtttatagagtgaaccctattctcatctttcatctgggaagcacttctgtaatcactgcctggtgtcacttagaagaaggagaggtggcagtttatttctcaaaccagtcattttcaaagaacaggtgcctaaattataaattggtgaaaaatgcaatgtccaagcaatgtatgatctgtttgaaacaaatatatgacttgaaaaggatcttaggtgtagtagagcaatataatgttagttttttctgatccataagaagcaaatttatacctatttgtgtattaagcacaagataaagaacagctgttaatattttttaaaaatctattttaaaatgtgattttctataactgaagaaaatatcttgctaattttacctaatgtttcatccttaatctcaggacaacttactgcagggccaaaaaagggactgtcccagctagaactgtgagagtatacataggcattactttattatgttttcacttgccatccttgacataagagaactataaattttgtttaagcaatttataaatctaaaacctgaagatgtttttaaaacaatattaacagctgttaggttaaaaaaatagctggacatttgttttcagtcattatacattgctttggtccaatcagtaattttttcttaagtgttttgtgattacactactagaaaaaaagtaaaaggctaattgctgtgtgggtttagtcgatttggctaaactactaactaatgtgggggtttaatagtatctgagggatttggtggcttcatgtaatgttctcattaatgaatacttcctaatatcgttggctctactaatattttccaatttgctgggatgtcacctagcaatagcttggattatatagaaagtaaactgtggtcaatacttgcatttaattagacgaaacggggagtaattatgacacgaagtacttatgtttatttcttagtgagctggattatcttgaacctgtgctattaaatggaaatttccatacatcttccccatactattttttataaaagagcctattcaatagctcagaggttgaactctggttaaacaagataatatgttattaataaaaatagaagaagaaagaataaagcttagtcctgtgtctttaaaaattaaaaattttacttgattcccatctatgggctttagacctattactgggtggagtcttaaagttataattgttcaatatgttttttgaacagtgtgctaaatcaatagcaaacccactgccatattagttattctgaatatactaaaaaaatccagctagattgcagtttaataattaaactgtacatactgtgcatataatgaatttttatcttatgtaaattatttttagaacacaagttgggaaatgtggcttctgttcatttcgtttaattaaagctacctcctaaactatagtggctgccagtagcagactgttaaattgtggtttatatactttttgcattgtaaatagtctttgttgtacattgtcagtgtaataaaaacagaatctttgtatatcaaaatcatgtagtttgtataaaatgtgggaaggatttatttacagtgtgttgtaattttgtaaggccaactatttacaagttttaaaaattgctatcatgtatatttacacatctgataaatattaaatcataacttggtaagaaactcctaattaaaaggttttttccaaaattcaggttattgaaaacttttcattttattcatttaaaaactagaataacagatatataaaagtgttaatctttgtgctatatggtatgaaatacaatattgtactcagtgttttgaattattaaagtttctagaaagcaatctattttgccttaatttaaaactaggtatattaatgaatttagttttaaagtaagcaaattaaatatttgtaagtggacagtattagaagaaatgttggaagtaaccattagaaaacactattttgatatttatttgtaaacatataagaacattttgctgaaacttagaaataaggttttatcctaagtctgaactatactcatggaaaacagattatgaaatttcagaaaaaccattgat

SEQ ID NO: 64690 - DNA, 1031 bp, Homo sapiens
aaggtgataacgagctttctcttagcacttcctgaagggggaatagaaaggaaatttaaaataagagtttcttgtattatttggaagcctgataaatgatgcagaactggcttttgaggtctgtgaatatcttaacaatttaaaacattttattggatatgtcattttcatgaaagttcataaaacatgttttttagacagttgtaatacatagttttcttgtgtttcatagtcaaaatcttgtttttcttttctaatttttcagtaaaacagttgtaatttgtgtcataactagcatgtcaaagtcagttactggaacatggagttcagcgactgaatgagttcttgcaatgctagtttgtattatgtaggattttattgtacatagctttgtatgaatagttaacatcaccgaggtgtagtcctagctatattatcttactgaatggcctttgtcagtttctttgaaatatcagtttctctggatgaaaaatggggataattatactgtcttaacctgcttcatcaggttgcttttgaaagtcataagaaaatatataaaaaatatgtgtagatacatacatatacatacatgattataaagtatattggggctagaaaggaagaagaaaagggagctaatatttattgaagtctaactatatatccagcatcctgcttagttccttatgtgtataattttacttaagctgcacaactgtatgaaacaggcattattatccacaagtgagaaaatgaatacaggttaaaatttatacaattttaagttgctttcttaaggtaagaatagcaagttatgaaccatctcattccagaccctcagtcatcaaatacctcttatgccctagatattgtgctatgtaaattagcttagatgcaagaaaaaatgaaaaatttcatctaaatatcactctttatcaaatatttaataaaagaaatatttatagccttaccaaatatttaataaaataaattaaagtcagtttatttttaaaatagcctggtccatg

SEQ ID NO: 64691 - DNA, 1344 bp, Homo sapiens
actttgtgtaagcctgggcagtcatagggaagaagactggctcctagttgccatcacttttagaaactgataagtgacactaagaagctggtcttttcgtgatttggaaccaagtgtgttgagtttccttgttatctaggaaatatgtctcagaatgaatttactcaatgtttaaatttcctttaaggttcagtgtaagtgtgtttgtagattatttctgttttattaattctataatatcagaatttctcagggtgtgttcctgaatacggagctggctgtactgttgatgcaatttttatatcgtgcttaggaaaagaagggtatctgcagccctcctggaatgctcttgtttgcatattgattgtttgtcttctctcggggccttatcactaacctttgagaaggcaaacaatacgaagtctgtttttattttcagctttttcagaaactgagcttttcctcactgagttagcagtaccaaaggttatatcatatcatttatatgtttgaattggtatcagaatgataaagtgggaaaattcacacctgttttgaaacagatgccagctagaattactgctgtacagaacatattccaagaaatagattgttgtgaaggagaggcattcaacataaacatgaaaaaatattgctggccaagattgaagatctttgttatcttatcagcgatattgtgttactacctctaattctaaagtatagtctaagtaagtggcattctgagtgtttatttgaaagattaacatgttactcttataattgcagagatctgagtagaaacctgatacatgaaattcacagtagagcttttgccacacttgggccaataactaacctgtaagtggatgattatgcagtaatgtcatgaaagtagtaactagtgctatagaaacatctgttttaacattgtcgaatcaaaatatttttctgtttagttattcccttgtataaatgctaagctgtatttatagtaaaagtcttcttaaacggcaagatacatgctagaactataattttagcacccccacttgaacttcatcttagggatctaatatttatgatgttaatacgtgtacagatgtttttatgtgatttatatattgggcattaacttgaagtctcattcatattttagagatgtaagtttcaatgaattaacttcctttcctacggaaggcctgaatgggctaaatcaactgaaacttgtgggcaacttcaagctgaaagaagccttagcagcaaaagactttgttaacctcaggtgtgtttttgcttatttttcttttttgttgaagttatggtaggctccaaaattacaga

SEQ ID NO: 64692 - DNA, 1036 bp, Homo sapiens
gatgtaatataactgttttttaaaatgttgataagcataccatttctcttagagcttttcaacaaaagaacatataagttatttatgggataaacaatattgaaaaaatacaaatttttaaaccgtataaatacaaatttaaaaaaatgtagctttaccacttaaattttatatattttgtatatttttctatatttgcctatttaattttatatatttatgttatgtactttatatatatactttatagaaatgtatttttacatatattagtgtctatgctcaacaatatattcttgaactttatcaatcttaggcttattgtatcactgaggtatttgagaagctgacaagtcttaggaaaaaagacttgtttttcttattcaggcatatctctttattacttatcttagctctgctttcaacgcttctgagtaccactcttttaatataatactctgataacatagcattaatttgttaatttccattgttttaagggacttgtcttacaataatataagagaccttccaagttttaatggttgccatgctctggaagaaatgtgagttggtctttgacttattccttttgttgtggtgtattgttagtttgttgagcatttcgtatttttaatagatggctttaatagtaagaaattagaaattcctgtaatcagatgttcccataaataacatgtcaaattgaaccagatgtgttcatgcaaccagcatgtattaggcacttagctatcaggcatcccatgaaacgctatgcgggggggagttggaagttagtgtatatttaaaagaaatagaagacaaaaacttgtccagctattgagggaaaccagacatgaatgccagttcccatcatgtcctgtgttgcacagctctggtggaagctggttgggagatgggaagggggaggcattaattctcccattttaactctatgtagtcctgtaactttattcctacggtatttgtcatagttgtgttgtcttggttccttttctccctgcatcatcttcct

SEQ ID NO: 64693 - DNA, 1040 bp, Homo sapiens
acagaggaagaaataacaggaactggtgatagactacagaagggaggggaataagagaacattttcgaatgctgagccagtttgactgaaagaaaagacagaaacaagatttgggggcagaatgcaagttggtttcaaaggtcttgggtgtaagaaggtgacaacttgcaattaactgtgatcagactgtgtgactgtagattagtgttttcctcctggtccatgtgggaaatcaagcccagtatcaacatctaatgtcacaagtgtttttgagttactgtgaagatgatatcagaattggggttcagttcaccttcttgcatgtctaactttatggaataattaggccatgggatgtatagaatctagtccatatgtaaatatgtgagcacttattctatatgggaataaattttgcttactatcttgagttgaattatttcttacatgaataatgtttttccgcaggactttgacaggtacaaagataagcagcatacctaataatttgtgtcaagaacaaaagatgcttaggactttgtaagttggattcttcttcccttcccctcataccttttgtttatatattcacacatgttcaattttattttaaggatctactttcataaggtggttttgaggtataattacttcttagttgttgtaaaggagcagatatttgagtcatctccagggtgggtaatgtgcatttgaattaggttttagggttttgaatatatcatatacttgtgactttattttgaacaaagtaaaaccaagataggttctttcttcattttttctcatcctgctctttgtctttattctagtttctccaggggtatctctcctcatagtctccttctttcatctgcagcctaagcagagcctaactctttattcagtctggaatgaactaaagcttgtcgctttctaaaaactttaggctgacctagaaactaaaagtaaataaaggatgtaaaaatgtctccagaataaacgattaagttattaagttgttaataagtactcagtggcag

SEQ ID NO: 64694 - DNA, 2467 bp, Homo sapiens
ggtatttttagtagagatgggttttcactatgttggccaggatggtctcgatctcttgacctcatgatctgcccgcctcagcctcccaaagtgctgggattacaggcatgaaccactgtgcctggcctccttctgattatttttatctcaggtcatcacgctgatggtggaactgaggtcagctgctcttataccagaatttcaggaagccactgtgaactccaaatggaaacctcagtttcacgctgtcatttacaaatggatattcaatgaattatattctagaatgaattttcagagaaataccattcagatgatttatgtatttaatgcatcagtaatacatgattctgaaaattatttgaacttgtaagtttcttgacctaaaaacatcatggaagaagaatgatttctctctattcattattgtaagaaaaggtgtaaattcagttaaactcctacatggttttgaatgacgatatggttgataaagaaagattaccatacagaggatatgatttaaaaaaatacttgtctgtaacaaaatgccttatgaattatgaccactatttaatattttgatatattttcacccatttttttctagagacttgaattataataacttgggggaatttcctcaggctattaaagcccttcctagccttaaagagctgtgagtattgcttcattctctttatgtcttcatatccctgaaactcaccatttaatgttccaacaatgggattttagaacatcttgttccattacgtatatccataatacatgcacacaaacacacaaataatcataaagttggattgtgttcgatgacagagacaattttgagtatagattgatgtatagggttagatgctggtaaaacaagaaggcctgatatacagcgtctgcctttaaggagcttgtagtcttagtcttactggggaaactgatcatgttaagacagacagctgtttctaggtagaaataaatgctgaatgaataggataaataaatcattctggaagaatacctaattgaagtttggagttactgcagaaaacatcaccaaaaggaaggagtttgaccagacttgaaagaacaaaaatatttaaacacaggaatgagggagcatttttgtttttatttttttttttgattgtttgtatgttttgagacggagtctcactctgtcgcccaggctggagtgtcacggtgcagtggcatgatcacagctcactgcagccttgacctcccaggctcaggtgatcctcccatcttagcttcctgggtagctgggactgcaggcatgcaccaccacgcccagctaattgttaaattttttctagagatagggtttcatcatgttgcccatgctggtctcaaactcctgggctcaagtgatcccctcagaatgctgggattacaggcgtgagccactgtgccctgcctgagggaacattctggacgtcgggtttgtcatgggtagagttagtgactgtatatggcacaacagggactgtgtgtcatgagctagttgatggttaacattctaagatgcattgccaagaggctaaatacaggctacagtgagagagattttgaggttagaacacctgtttctcatggtctaaagcttttttttatgatgaagcaacagataaatgcatatgagggatctgatagataccaagctaagcagtgggttaaaaaagaattaggtatgatactgaaaaagataaaataaaattaaaatttgagatttcctatgcttttgaaaattttcatgtagtcattatcagttgtattttatataatgctgaacagcagtagatacttgggttttatttcgcaagaggataatgcatttcaaaatacttttctcctatctttctagaggatttcatagtaattctatttctgttatccctgatggagcatttgatggtaatccactcttaagaactatgtaagtatttttgaaagtttcttttaatgtataattatgtgaagctgtgtccgtacaatgccaaacaccctgataaagaatgagaagtcaggattttagatatatgtacattgtgaacatagagttaatattagagtgcttgtgaacatatgaaaattttactttttttggatattttcacagacatttgtatgataatcctctgtcttttgtggggaactcagcatttcacaatttatctgatcttcattccctgtaagtatgtgaatttaaaaacaaacctggatatttatacagttgttttagtggaaaacaagaatttattactggaactccagaaaacaaaatctttaaaatttttttctcccttgggcagaatttataattgttcttatttttgtgaatactttgccacattatcatactttcaagtacattcaagagatgaaactagttttatttttagttatagttgcactgtaattttaaactgtttaa

SEQ ID NO: 64695 - DNA, 1408 bp, Homo sapiens
aactgtttagctgtttagctgttgatatgtttagctacatcattcctttacacaccaactcagacatataaaacaatgataatagttgccaatgggagatggaaaagtcattttatgctttttttcccccttaggcatcttcataacaataaaattagaagcctgagtcaacactgttttgatggactagataacctggagaccttgtaagtatattcatattttgggcaactgcattgtgatattgaaagtataattttatacttcactgcagaaaaagaaaaaaatattggccttaagttcagctccttattaattcactttgatactggattaaattcttgctatcaaataacctaattatgaatactaatctaagtccatggctaaaaatggcaaagtgtgaattgcatattttcccccaaagaatacacattcaaaacagctcaatctacaaagatttatacctttccagaaatgttggttttgttaaatgtatgacagttttggaagttagaaagttctaaaatgaattctggatagtgttattttttccatgatctcagttgccttctaattgttaacactgggtttgaatactatatctgcttttacaagtaacaaatgaagattttatattctgctatgatacttttgttgttgtttccacgagctaaagtgtttgagacctctggctgtttcaactgtacattgcaccactatataagtaaaaggcattgtgtagctgtgtataattgagaataggatatttatttttgttcttttagcctatattagttgcctttattgccttcattcaaagataatgtaatttttgctgttgtgatgagtaaatgattcagagaaggtcccaattacatgggtgagtaaaacctgattagaatgctcagggtatgtagtattttatttgactgaattttctggttaactgtcaattaatgagaagacttaaaatcttttaggactctattatttcacttttctatctaaattagaggataggaaacatcaatggatatatgaaagttgaaaatcttgtagaggatagttccaaactcagatctcctttgctaagtgtgtgagttctagtgttataaataaaagattgaataggtttcctaatcctaagctgtgtacactatttcaattatgttaaaattaaacctcttcccagttaaatttttatttgccattgtttcttctctgttacaaaaaggaaaaggaaaccaaaataggtctcaaaggagctgagcttttaattttattttactttcattctgaaatcaatcatgcaaatcgtatgccagtgtgctctttatgttaaaagaaattaaactttaaacactctcagaactaagactttttagtacagatcactatggcttgt

SEQ ID NO: 64696 - DNA, 1022 bp, Homo sapiens
gcaaagtagcctatttggtcagtttagtttcttttttttttttgtatgcctgataattatgctctaaaacataatttcaatatgaactttgcaagtgtttttaaaaaatatatctttctgctataaagttacttcttagccaaaagccaaagatagttgaagaatatagatttggatacatgccattcttatgaagaaagagaaagaactgactttcatacactatacagatcatgaaaaagttattagatgttatgaggacttctagtaaaattaaagatgataatttttataagtcctttttgttttgaaagctttgagttgtgagacttgaactgactcatttcactagaatttgttactgaacatggttgtttttgtttctgttaggcgtttagatgccaaccatattacctcagtccccgaggacagttttgaaggacttgttcagttacggcatctgtggctggatgacaacagcttgacggaggtgcctgtgcaccccctcagcaatctgcccaccctacaggcgctgaccctggctctcaacaagatctcaagcatccctgactttgcatttaccaacctttcaagcctggtagttctgtaagtatctatcccttttaattccatatatttgtgttaattggggtacaaaaacagatttcttctgacagattattatcaaggcatctcgctgaatatgctcctgagtagttagtgctttgggagctgcttttgtacaatattaaacagaataggataatttaaaacattaccagctgatgataattgttgaatctccctaagacaaatgaccagttataatcatgagaagaaattgggtcattcagcacacacttatacagcttttacgtgtgtcccagcagcgtattcaatgttaaaagaagggaagtcatttcgaggtgtccatagaagttagtcccagggatatttcgtgttttccacttgttcagagagtatgtgatgcagtgtgtttttaatcttccaagacataacaa

SEQ ID NO: 64697 - DNA, 1038 bp, Homo sapiens
tttttctcatttaacctcttatttaagagtttcatttttccatagttctttttaatccctacttatatgtgacttcacaattttttggaaatttttagtacggaggaaattgtatccatgcttttattgttgtattatgctattttgtatagaagatagctttattactgtcttagctcaaaactcacctagttttctagcagtaagttaaggctatcttttttccttgatgacacagaattcacaagagtttaacggttgtatacagtactgaatttatattaaaaaggcactgaccactttccttgttatactattttctgtatcagtggaggcattgtaggtatttggaggtgcattacatactattttattgaatatgaatatacatcatcagcatgataaaataaacaatttaaacttttcagctgcagtaacactaaggaacttcaatttgtaatgaaaatacaacccaaaccccctacctggcctatagggacttaaggaatgtggaccctgtttgcatcccctgccacatgtgtgtccctggtccctctactcccctcctcctgtgttttaatcactcttaaccttctgggagttgctggatcatactaagttggtttctgctactgggtctctgacgtggctctttcctttgcctaaaacactccttgcccagctcctactttgactcattcttgcattttctttaggtctcactttaaatgtcaccttagaaatacttttcttgaccaaatgcgttttgagtaactaccctcctcctcagagtccctcagtctttaacctcagtgccctgtttatctattccagaggtagtttttagagtatttgttatcattttgtaacgtgtttattgtgttgtatgttacctccgccactggaatgtcagtctcttgaggacaggcctcatgcctgttgtgttaactattttatcctttgtacctaacaagatgctcaatttaactgcgttgagtgaattgcaggtaattatctacaagtataatttagctacat

SEQ ID NO: 64698 - DNA, 1063 bp, Homo sapiens
gctgacttcacacactctctcacctcgggtggatatacacaggacaagtcatctgacctctcttggacctgaattcatcaggcattttaaatagtcatgttttcttttgcttcttaagaatatattttacttcaagaccttcatattgaattgtcattttgtaagatttaataatcaaaatactcaattattttgtctagtttaaagggtaataaagagaagactaaaatctcattttcaactgtagaacagaaaaattaccaaaaaaatacaaatattctctctaatttgtggtcaataagtacattaaagtacgagacatttattggtaatgtagatgatttaaagtgatgtttttcacagaaatcataggtttctctttcatgttttagaaaagcatactgtgcttatcattcatggagcaaattgcttagtttaaattatctccaaaattgggatgagtgtatggagtggaggtaaaacaaacttttttttaaaggctttgggatgttttcatatacatcagaaacacaaagagctgctctgtgtcaggcctgttttctttaaggaggaaatgttcatacgtttgttagtagagtgggtgcagtggtgaagttagatagagttaaagttctctcatggtgtaaaacagtcttatcagcacttgagtcattttgaaaatctgttcttcagatctgaattacatgaaagatttcattgtggttttgaatagtgcttaaaagaagcaaagttcattagggattgaaattgaccagaagtggtttgatgcaagtgtatgtttgataatgactataaaatctgaaagccaattgttgatactaataaaaaggtagcataattgcctcccataaagttaaaataactaaaacattacctcagcagggtattaaaatgacatgtcataattatctccattagaaattttttaacatcagattacatttttattgactattaaaagatctcaaagattaactttcctaggtttttctcagttttaaaatatgtttataacacttacattattggtaagttagaacag

SEQ ID NO: 64699 - DNA, 2090 bp, Homo sapiens
ggccttgtctgggttgaaagaactcaaagttctgtaagtaatgcaattttagagtttcacagctggctgtgtattttctttctgcgtagtcaacatgcttggaactaggttaagcacagtttcttttagttcaggattaaaagatttaaggagtggccagtgagtagtatgagaggccagagtttgatttaggcaaccctgcatctagattaacaaaagttaaaactctaaataatacgtattctgacctccagtatattacggttgaatgttaggctttttgggtgcctaatgcattggagcaaacccttacttcagttttactggtagggttttgtttctacttattttatagctataagaactttgaattacctgactctaaaagggaaaaaggcttacaagtgctccaaatgttaaaataattttagagctcaagggaattcagatgcctacaatttgtatagccagcgaatggtgaggaaataaattcttggcagtggtcaggagcctggagtatggcagattaggaaacaggtgaactgactgcccccacttctgccactaccatgctggatgaccttcagaaggtcattagacctctctggttcagtgagctaggtgggacctttatctcttctattctgtggttatgactcacgtcaggcagtcattttattaatgtgacaggaatggcttcaggcaaaaaaatcaaaagaatttcattttcagtatggatctatgcatctatttggcaggccctaactagtagatgatcaaagctctatttctcttctggccccacatgcattgaggacatgcctgctgttccttaagagcttgggatctgccatccgcttgaaaaaattggctttacctaatgtccatgtttccgggctctgctttattccaatttgaaaaggcattaggaattccaacggatttgcttattatacctcccagttaacttgttatagctcctaattaacattaactaatagcacccagggtgatgaacattaactagtgtgccttaattaccagaaacaaaaccacccttggaaacatggattacccagcaagtctgtattagggcatggcttgggatagcagtatagatttcctttctggctttacaacaagtgcttcttgaagttttgcaattctcttgtcttagatgctttccacctccacctcccccccattttcccattggaaatattttttgaaaaaaaaaaaaaaaaggctctgaatttttctaagaaaaaatggtaactatcacttgttactcactaaccaaaaattttctttcagaacgctccagaataatcagttgaaaacagtacccagtgaagccattcgagggctgagtgctttgcagtctttgtaagtaacttcttggtttcttgactcaccaagagactactctggctgttaaagatgtaaataactagaattgtaaggaaagaggagatttatcctttcatctgagataaaaacagagatagctagtcaatgttatcaaaacgtcctttggtgagggagaaggaggtggttctgtttacctcttctcttgtcttagaggctgagagaaagctactgggtattcactgctgggtgtacttccatgaacttgtgcactgctggtgatcagcatccctttggaaccagttatgtgtgtacagaagttttagtgtcttgtgccttgactgtcaagaaacagccacaaagaggtttctgtttcgtgtggtaatgataatcagaacaaatcgattgtaattcctcaattttgtcaagggaacttctcggaaaaaatgaaaaagtattcttcaaaacaaggaacttcattagcttctactagaataatgaatacaaatttgcattgcctcacttcatgtcctaaataccaaatgcaatgggactctggggcatagtttctctaagtgtggtactttgaccacactttgcaacagactcactagggggagactgctaaaatgcagaaccctaggctatatcctagaagtaatgctggttttctttttaaaggtagaattcagaagtctaattttaaataacaaataatctcc

SEQ ID NO: 64700 - DNA, 1023 bp, Homo sapiens
tcgttggcttgtatttcaggataagcctcatgcagagctcattttgtcatttatattaaagataaatagaggagaaagagaatgctttttgaagttaggtgactttagttttctcatggtttataaaacgggcagagatttgggaaaaggaagcaaatattttggctaatgtggtcaaacactcttttctgttgacaagttaagataatcaggtgttctgcattttgccactttgttactttataaaatacttttttttttttatgagcccagcacaataggctgaactcaaggaaagcccatagatacaaggacattcacaactaatattagagacaaaagaataataagaatcctgtaacagccttactctgtttatagtgtttcttttttggaggactctagctttttaacacttggaagagcagtcacagggctatctgaggccctggggaaagatggctactgcctcttatggcttttatggtgcaatttgatcttttaaaatgtgaccttttaagcactttgcattacagctgtgagcattatcagttgaatttaatgggtgagaccggggtccctttgagattgcttgtaccaagcttgcactaaggtagactttgggatgctatggcatcggaatggtgagcattttcaaggaggagcttctgagaaagcagtttctgtttcatgaattggcatgttggtgggtggtaacagaagtttgagatgcacatcctgttcttgaaggcatttgtacttggcccacaagactaatgtacaagaaacaaccagtagacggtagcttgtgacccaagtttatgagctccgagtgttcaagcatagggcacatttataagaactgaagctttcaagaggagcagcattgcagttgggtgtttaagggggtacaaatgaggttgctaggtgaaacatttaaaagatgtagtgctttgggaggccaaggcaggcggatcatttgaggtcaggaattcgaaaccagcctggccaacatggtgaaac

SEQ ID NO: 64701 - DNA, 2638 bp, Homo sapiens
tcacctgaggtcaggagtttgagaccagcctgaccaacttggtgaaaccccagtctctactgaaaatacagaattagccgagtgtggtggtacatggctgtaatcccagctacttgggaggctgaggcaggaggagaaatcgcttgaacctgggaggcggcagttgcagtgagccaagatcctgccattgcactccagcctgggcaacaagaatgaaactccgtctcaaaaaagagaaagagagagagagagaaagaggaagaggagaaaacattgctgaggggtagataaatgttggtcagaagggaatggtggtgctcgaagtacttttcaggcaggacttgacgggagcccaatgccaggccatctggtaaccacctctgcaaagggaaggtaggaacatgagtgaatgggaggctgtggtcactgtcttctggctttattatctagtcttcaacctctccataaggggaaagggaaattgccattagtaagaaagcactctattatttgtgtgcacagttgctgtagtctccctctgctttttctgcccgacgtctcctcgcaacagctgctgaaagccactgaatcctcatgtgccctccctgctgctcagtccatatgtctaatcagtgtatatatggtatttcttactccactaattcttggctagaattccagccaaaaggctacaatgaaatttctgtaatagaccacaagaaacctaagtcccatcatttctcagagaaataacaccaattggtaaattctctatttcacacttgcctctcttgttttttaagctgcttcctaagtgaagaaactctagtgtcgctcagtgcatttcatgaaggagttaactttggcccagattaccatctgacatgtggcctagtccttcacacacacccttgaccagtgccccatatttaagacagcgcagttcctgcattttccccctgctggaagggagagcagataggaaatttcaggtcatatatgcattaagagtcaaggatattattgaaaattcttgctttccaaaaagctttccctggaaggagcccctaatgtcaatccatggtctttatgaataataaatgcacacaaaagagattcatagagacattgcacactgagccacttgtatgccgcttcctggaatggttccaaatccagtgggaaagcggaaatctagaggattactttttgcttctcctctgccctttctctttctctccattctctgtctttgctctctttgcttctggggctgttgtagcaaacagagtaagtgggagttgccttgaggtaaacggtgtcccctttgaaatcctgctagacttgttttaattctgtgtgatcatgtgcacaacacagcgtgtgttgagatactactgtggaccagtggactgatgttcccatgtttagagttcctccccacctttccttaagaaaatatgcttccagcatatgtcgagaaataaaatgtttgccctggcattcgacactttagccacgtagttctttcctgttaggagagtgagggagtagaaatgaaataagaaaagttgcagaaaagggaaaataatcaggaagctttctcacccttttagtagtaatattagctttgcaaatccagagtcttacaatggggcttagcggagacattatagcaaataccaagtgtcttgtctttgtaaggggtcatacaagggaatatagaataaagatgacctagtccctgctcatgagggacatataagatcattgaagaagatcagagcagtacaaaggaactaaaggcagaataagatgcacccaatgggatagctttgtctaaggtacccgtggaatcaaaggaaggtgatatcatgagttcataccggtggtagcgtaccctacttggacaacttgaacaaggcttcagtttgtagagggcagagttgtgggtatttcaagtgaaggagatggtgtgagccaagagtcagaggtggcaatgcatggtgtgtttggatgtaataacggtgcttagttgcaccaggggaaaagagagcctttgggaaaatgcttagaattgtgctttttcagattaagtggtttgagacaggaatcctgtggaagttcatggcagtagtccaggaggaaaaaaaatcaggtgataacaggaagagtcaaagagtggatgggttgaaaccttgcagagagacactctcgtggtctttggaaacagaacacggaggggaaagaactgatgcctgggactctccaccttcacaaacagaaaaccataccactttcactcttattttttcaccctaattatctttttcctttagtatttcacagccactggaaaatagtaaaagaatattgtttgtgggacaaaaagaaaaatataaataacaagatttagtcaatgaaaaaggttttctgagggcagccaataggtcctgaagtagtgagaagctacgaaaactgttggctatagcacagaagtgcaaacccaggcatggaatgggaagtggctggtctttgctaatagagggccaaattcctgctcaggatcagccacctctttttcctccggagttgcctaaaaaaataaaaaaaataataataaaaaacaaacaacaga

SEQ ID NO: 64702 - DNA, 1730 bp, Homo sapiens
agttggtatttactcatggagctgagtcatgtggacgggaggatatttgaacaaatataggctctgccaggaaggcgtgaatgggtgttaggtgggcaaccaacagggtctgtctgccagagtacctctctatattcacattttacccatttttatagagccattttgagccctttctgccatatgaagccttctctgatcttccttttccaagcccctcttgcactctctacttctcaccacttagcagcgtattgcatgccttgttatttcgtgcttcaagtgtgtcagtgtgtacttatcccctcaactctattgacttttctctaaggaagggcagggcctgttgtcacacttctatatgaccttggtgacagttaccacattcttgaacttgaaattgagggaggggttaagacaaaggatttcttctcattttgaattgattgatgtaagaaaccttatcagtctatataaaaacggaattctgttgaagtttgtgattaatgaactgtccttatttaaaagaaatgaaatgagaaatgtcctgggaaaactcaatacctcctttgccatgcttagggtacttagcctgtagtaaaaactcaataaatatttgttggttgacgttagctgtattttttttttaaagctggaacatattatttcctcacatgggtggatattgcatgtgtttattgccagagggtaaatgactaggttgtcaggataactttgctcaggaagtataactgttgcctgggtttttactgatttacctctaaaataaagtattccatgggttcctgtaagaagtgggagacgcaaaggccaattcggtgcaggtggaacttaaagtttccgtgaattgaatataaagctctttagtaggtagaagagttctagatggcctataaaccaagttttagcagaaacgtacttattttttgttaagcattactgctttcattgttgtgcatttaaatggaaatatataatatgaaatatgtgtgaaataacttctcccttctcagcaaatgaaagctattctaaaaccttgagaatttccataataagggtttcttaattcatgtatattcttaaaacatataaaatttttacatatactttcataagagttatatgaagatgcaaaagtcttccctagtatgtgaagaaatggggtagtacatcattagttgatataggactgttctgatgtgctttcttagatgaggtttatactgatagcaacagtgtcgaagcagaactataaaggatgctattagttgttagccctctttattcactaagaaagtaaccatatcctccggtcctcttgaagtcaacggtagaaaataacacaaaacaggccaggcgcggtggctcacacctgtaatcccagcactttgggaggccaaggtgggtggatcatttgaggtcaggagaccagcctggccaacatggtgaaactccgtctctactaaaaatacaaaaattagctaggcatagtggcgggcgcctgtaatcccagctactcaagaggctgaggcaagggaatcgcttgaacctgggaggtagaggttgcagtcagccgagattgcaccactgcactccagcctgggcgacagagtgagactccttctcaaaaaaaaaaaaaggaaaagaaaataacacaaaacaacacttttttgtttctaggatttacattagtttatttacattgtttt

SEQ ID NO: 64703 - DNA, 1795 bp, Homo sapiens
gtaaaaatggttggtttggttgcaattttgaattattgaaaggaagttatggaaaagatacgcagagcttagggctagactaaggacattttggcagactgaaacagactttaaactcttgagtgactcttgaagtttttttgagctagggaatgatttgttcagatatgaccttcaataaatgtagtctcatagcagagagtttgaaattgagagagttcagggagaaatgaaaatgccactggcaatcgtctaggtgagaattatgagaatccaaattagggcagatgggaggcagggatagggaggagggcacctattcaaaagatgttatggaaatagaatcaagagaatgtcttggctgggatgataggggtaacatcattaacaatgaattttaagattaccaggagtctggtggtgctttgacgaaaattagcaataatgcagaaagagaaatttttttagaagagaagataattaaatgctgtttttaacatacatgtggagttcaggtgggatatgggtggaggcatctggaaattcaggagtggagtccaggatagagatcgaagggcatagattatagaatagtgtatcgtgggtatagatttaggagtcttttattttgaggtcattactggaaacattagattgaaagagcttgccaagggagagagggtagaagaaaagggaagaaggccaaagacaactccttgggaaacacttgaatcagggtgtgggaagaagaccaagtgccggaggagcaggagaactggggcagaactctgccccaggagctgtgggaggagaggtttttcacaaagaaatgagagatcaacactgacatgctggagaaagatgcccatgactagtgagaaagggccttgacttctttaagtatttttggaatcatttcagtaagttgttgaaagtgactttgggtaaagaagctcatcaggaaacagacatttggggactgctaataggtggtttttggagagtggttaaagcttagaagttgtactgcatttgactggagtctattgggtttaagagacagaaacccagctgaggcataatagaggatttattgttgcatgtagatagaactagacagtccagaagtggagttggcttcatatgttactggatctcgaggcttaaaagctacaagagttttctcatgctttccatttcttagcttcagttgtctctacttttgtgttctggcttcattctttcctgttgcaaatagcctgtctccatagagtggggaaatacacctttcagtacattgttgcttctaggcacccaaaataaatatctaaaagtgttcctcactgcaaaactcctagggggatcctgattggccagactgacctcgtatgcctgtccttgcaccatcactctgtttgagatggtatggtgcaacctgggttttggactcatcctaataggactgcttagagttgggaattccccaaaggaagcagaagaaaagagaaaggaagacctgctgggcagaaagaaaccatagttattcactggccactaggatctagggactaggcatactgtgggaaacatttgtttaattgggccagtctgaaatgaacaaagtattattgaagaatcgtaagccctcagttgggcttagatagtataaatttgtagtgaaaccaactagatctttaattttgtcccatagtgcttagcagcccaggaacgaaggtgatgaaagatgtgatggactcaaaatttggatttgataaatcaggacttcataggagac

SEQ ID NO: 64704 - DNA, 2674 bp, Homo sapiens
gttaatgaggtgtgctttacaagatgtgactgggtttggcaaaatttgatgtgatgaatgtttaaatgtgatagaatgcttggggtattgggagaaatcacttcccaagaatacagaagaagtatgtatagatacttacacatttccttattctttcaataaactctgaatcctactctatgccaggtggcaggtgctgggaatacagatacaagcatgacccatcttcaaagttgacagaccctctagagttgtgctgtccagcaccgtagccactagccacaggtggctattatgtttagatttaaaatgaataaaattaaataaaatgaaaaattcagttcccttagttgaactagccacatttcacgtgctcatatagctgcctgtggttgctactatattagacagtgcagatgtggatcatttccatcattgcagaaagttctattggacaacattgatctagggggagaaatgaaactaacacttgttgcatcatagtgaagacgtgtgtgcagggaggaaaggcctaaaacagtgtattttcttaagactgtaggatttgggatagtcttccacagtagcttctgctgagtgttgaaggacatgtaggaattaaccaaatgagggtagtagtaagggtgttgtaggaagaacttcatagtatgtggaaggcatggacatagaaaatttcagaagttttaggacgcataaagttgtgtcttgttatgacaagactaaagggtacatatggaaaaatgtcaggagacgaggccagataatgaagggtcattttaagataagaaatttagacttgttctgaaggagtttaatttgatatttggggagtgataggaatgagactagggtttttgccctgaataactgggtgccatttgctgagaccgggaacacagagagctgatctatttgggacccaaagaattccatttgataaagataagagtgtaaatagtatgtgtttagagctttacaatgaacagaagtccattcccataactctgtaaggaaagtcagtttcacaaaagttgaagctgaactgacaaggttaagggccttattggagttcatgagcctggtatgctgttttgctgggacttgaagtcaggcccatagagcccagttctttctggaacactgtgagtgatgtgctgggacttgaagtcaggcccctagagcccagtgctttctggaacactgtgagtgatatgtatttgttctcaggaaaatattccatccaactttttcagtgaaatgtactttagatactattgttgccatttgttttgttttcacatttaacctactttttttcctccttctttttccaatcctgcttcttctgtatatttaacctactttttgaaagttttatagttcataaatagtgttacctagtgattcctgctctcccccaacacctgttgggaatatagaaacatagattgtggccccaaattcagtacatgaaaggttctgaaatctttgcactttactttcctattctttacaatggaacttctcacagaactaccgtaaaggaaatatgggataatttatgtaaaagtgatttgtaaccataaaatgctatgtcgccgtgagaaattttactaatcatcttaaacattgcagtcttccttgatatcatttggaagagagatggttttgcttgggggtagaagttggagtttctgttcacaatgtaaaaggaaagccagaattttaagaaaacattcacttagcgttgacaggctctgctgcctgatgtgacgttgtcagacatgtttttggctctcctttaggcttgttgggtattggtagtcatttgggggatggctgaaatttggagctgtgaaaatgttggagttaggaacagcagaaaggaatatccagctaattttccataagctgtcactgaaaaaattgctgtggctgttactttgatgtggcaacagcagtagaagccattgccagctttggcacttggacagttattgtttaatgcacactatatgactaggataattccagttgtttcaaaacatgatttgactttggaagacttcacaatgctaaagtgaaacttaggtctctgaatactaattgaagattacctgtcattttgtttcatctgtaggacagttaattctaaatggaattactactttaccaaacggggctagtaaataatttaaacagaaaggtttaaaatcaaataaaaacaggggtgggtcaaattaaatagttttaaataattgaattacatatttatacacacacacataacatatgtcaaatacagctattcaattcatatatgtaattcaatccatgataataacatatacaaacatatttaaaacattctgcacacagatctatataatattctgtatcaaggtaatttcagactttcaaaatattgcaagcataatttttcatatacccttcactccaatttcccaaatgttaactttctctctctctttctttccacacacatacaaaatatatgtacatttttttctgaaccatttgagagtaagttttagataaatctttaaatattgcagtgtgtagtccagaaacacaaggatattctcttgaataaccacaagatgattgtcaaactcagaaaactagctttgat

SEQ ID NO: 64705 - DNA, 2105 bp, Homo sapiens
aagtggagtgtggcagagaaagccagttcaaaaggcagctgccagggaggagggaaatggttaataaagtattttttagctgtttgaattagtgaattgttgagttatattgctgggtgagttttctttctgcggacgctcttaagggaaaactggaaatggaccacatacctatcatgtacgcacttgtccttagcctgcatctgttcataggcggaacatgaaatccactgacaactgttacctggaggacttttataggttttgaagaaaatatgactagggtagagctaggacatgcttttattgtccttgagtgactccagaagccaccctcacctataaattctacatatcgttcctagggtattcatttgtttattttgatcaggtataggtagtactgtgaataccagagcactgggaagccaccctggcccacttattttaggtggtttgagacttttttccaaggatacttaagaggggaaaatacaggatctgagtacatttctaaattatgggacataatttataacagaacatttaacttttctgtgttttctgaatattgcattctgaagccaaattgtgactgtttctatgtgtcttctatgctctttcacaaaattgtaacacctagttagttttctgttggattaaatactttaagcttcataccacttaattaacaatattcttaactttacgttttccagggatatcagtatgaacaacattactcagttgccagaagatgcatttaagaactttccttttctagaagagctgtaagtattactttgagaaatgtgtgtgtatgtctttttccccaattcattttggaagcttttgctacagagaaagtctgatgttttctgttagacattctgatagcttaatttcagtgggctttgtgaggaggaaatcatgtttcttgggggaagtaaacttggttttctaagcagcatagttgctgaagctatttttgaaagccataactaaaaaaatgctacttccataggacttcttttttgctgcaattattataactacaaatgctgcagtgacaccagttaattacagtgttattctgagataacaaggctgctgtataattaccattgttaccaaggagttgctatatgggtaacagaaccacaaaaaataacacaaggtgtttcagggccatgagcaacaatttcaacagtgagccagcagaaaactgagggtaggtccccttggacaattgcagatgacctttggaaatggggtgaaggcatgaaacactgtctaggtctctaagagcacctttaactttaagaatgtttctgaacttgtcagttgcatctcacatttccaatttaacagtttgcactgtggaaatattttctccttgtttcaacctcctttttgttgtgctctccacacttttttgaagtccataatcaaaataggcactttcgggttttaaaagaattgggaactatatattatattttgagaatcccagtgaaaaaataaaatcgacttgaattaagttaatataggcttctacaggccaagctaatggattatataatatatagaggtaggaaggtgatggtttgatactaagaacatcaaagagatatagccctgaaggaatctaaattcatattacagattgtgtcatacagcccagctgttgagtattagatccaagtcagcgaatgtcttccatcttttagctcggccactcccctagagaatggggaacaggagtctaataagatatccaggttatgtactctgatagaatattgaaatagtagttaaagagaaatgtttcttcccacactacttagtcaaacataatgctcccactgcaaaagttgaacagagattatttgccacttacaagtttatgagctaggtcaaattattctctctgctcaatttctttgaaaaaggtgcagctaataatagtccctccctcatagtattctagagaagacagagtgaattcatttatgttaaatgcttaggacagtacatgaaacagaatgaatgttatataaatgctgactaatgtttattttactattttcaaagtgcataagaaa

SEQ ID NO: 64706 - DNA, 3796 bp, Homo sapiens
cccatgatgtatgggctgctaaaaatagcattgatatatattagacttcagtgtttacactttcattcaaaggtattttcaaggaagatttttttcattttgcaaatgaagaatcttttaggtgtcaggagatgaacatgttcagaactatacgatttcagatttgtaaaaatatataccatacatagaaaaaaatctgtaatgaaatccatgaaatatggctgtggttaccagtgggtgttgatattgtggatggttttctctgtatttcaattttttaaaaacaacagtggttacttttgttatcataaaaaggtggggagaaaatgagattacttgccccaaaatatggaatagtgtcagaaatcaaattcttaatgaactttgattagaactttggtgttatgtgtgtctttactacttgtggttgagagagaccttcccttcaaatttgttccactggaggcattttgcaaagttcatttttagttttcagtttttggtcatattgtagacatccgttaactggagattggcctgaaatttctggttgattaccaaagaccctggaaaagtcattgggagagttttttttatttatttctaagatttgaaggtgacattcttggtcattatcaacatgtgttttttgagtttatggacatcaccatcattttttttttcttttcctagagaacattttagagaaccctgtgttctcttgaacctgtatataatttagtgactttttaaactgccagataatatttgagataaaattaacaatatagtagtagcagtacagttttatctaatacaaataggagggcttgttcaaatttagataacattgggtcaatcacggtatatttaaaattaaataattctgtggcagaaggcccagacccagtaaggatgcagtgttagagtccacagtggtacatgcttagccatcagcaaacaggttaggcttgcttagggatcattttacagggatcttaaaaggtaccttgttgaaacatgatattctttactctgtagatactttagcattagtgaattttatgggggaaaagacgatgagagtttaaccactggagagatttggcagtttcaattaaacagttgcaccctttaaattttaattttgaaatcaatgactgctggtatttgggagttcatgtttatttttctaggaaggtgatgtgcttttgtatttctaatcttttgtttaaatgaagtatttgatcttgaagggttctcccagcttaaaatctttgtctcctggggttctggagtttagttttgtgtttaggaacaactgctccaagttttaggtcttctgcaacatttagtgtcttctgtaaaagtggtttctttctgagaaggccaacaaaggcagtgtggtgtctccttttagtctggtcttggtccactggattcagatggcttccaggagcagcgaaaacatggatgatgataagataacagctctttcttgttgaacttattatacatgacctgacattttctgatcttcacatcaatctataaggttcagttattactgcctccgttttacaaacgaagaagccagggcagagaaaatatcaatttgccaaagatcacacagctggtggtagtaagtccatatgtaaaccttggtctgtctggcgccaaagcccgtactcccagtaaggccatcagctctctggaaattgcccttctgagacatttgggagttggtggtgctttgacctcatatgatatatatttacatttggttttctatcccagaaggtgaaatcctgcgatttattactgatgccactggtaagattgtacaactcatgtgaatttgaaggtactaatctgtaggagcatcttctggctgaaaattctttaaacaacttccttatatttatgtatcataataatttatatggcttttgagcctcatatatttgtaattattgtcataggtcatcctttctaacctcttatttataaagtctgtgtacttcagattctctttatggtgttggtaatgtcagatctagaatctactcttaagactatctatagattgtttatcaccatcagccctcattattttaaatggatacccacgcaactatactctgtaactacaggtttccagagcttctccggagataacatcttgtagctcaccactgcccccacacccaactttttacttcataaatgttgtaactgaatcccagaaagtatgagagaaaacatctgtaaagagggaacttctccgggtgtgtgaaattaagaaaaatttagaaataagtattactcctgaatctgaagctttgaaataaaaactcaccgtgtgttttacatatgttagtttgtaaatatggagtctcactaattgcatttacagctcacagcaaaactacctgttacgtcttgttactataaggaaaaaaatcagagctgtgcgtgtgtgtgtgcatgttttaaaaaactggaatgcagagaatagtgtggtgtaaattgtctctaattatgtgtctttttctggtgaggcaattaattggttctctccagacctttttctgatgaggaaattaatcagtttttctgttacagtgataactcacctgaattcaggtgtgccaagcttagaggaaactgtacagaatgcctcattttgtaaagcaatcaattcttgttgtccttcctctttttattagaatgactgaaaagcaccaaaactgtctgatattttacagaatcattgtttactcattttggatcattattttgctttcgatatgattaaatgttttgttgtattcttgagaatgattttattggttaaggccaaatgtatctcccgtgagagtgacttagtaatttaataatgacagagggatagtctttaaactttgcattatgataaacttttcagaaacattctataaaatgaatctcatctgtttttatctgaaaaggtagactcctccatgaataaactacagaaaagggtgaatcagtatataatgtcagtataaaggtgacagtatatcatgtcaggccaggaagccacccaagcaatcagcttcaatttactgatgagcagatggaggcccactatcgtacaatggctatgtggcagtgtgggagttgcgcctgccttttctgacccctgttttggtgccatttctccagtatcttgctagagtgtttatgaaaaacaaaacatttcctcgccccttcccccagggataatgatcactgactaaagtagtattggggcctgggttttaaaatagtaattcctagagaagcatagtaatttggcttttcttttaagctcctttagtaggatttgagttgttttcaatgatataacattttagagtgcatgtatgtctctatggtcataagactcatctaaagggaaatttcttgtgctaagaaatgtatattaatgttggttaatgttggttccttaattgctaaagctattcctggtcctctttttcttttttctttttttttttaaaccccggttgtcaagcaaaagtgctcttccagagattcatggataattatgtcaaggtgttaggggcattattcctcccagtttttaagcttgatgggactcaagtatttgttttacatcttggctaccactggagagaagtattaataacaggattcaaataatacttaagaagactcatcgtttgcacttaaggtcatgggctctggtgttttctgttacactgcttattgaatggtcttggggaagctt

SEQ ID NO: 64707 - DNA, 2812 bp, Homo sapiens
tctttgtaggtgggcaccatctaatagttttattttttagttacccttttaagaatttgtaatttaagccacacataccttttgttgtgttgtgatatttacacaccagtgttttatcctcactcttttctaccttctagtgttagcttccccttgaagaacacacccttaaatgtctcctaggctgtattgcttcatcaagagtgtaaacaattacagcataaaatggtacctttggaaatgaagtcatgcgtctttcttaattgctgaactcttgtaattctgaagggggtctattttagcctgtacttactcccatacttgctaacacaagcaaatgggcctacacatacagctaggaaaagcatgaatctaagggtttcttagggttccataattatgcatggaatgtgcaggagcaggaatgtcaaagtaggagtaatcatgatagatttagaaagggccttagaggttagttggtacaaaatattttacagtgaaggaagctggaattaagcaggtctgggtttcttcttcctagcttcccctcccttcgtcccattgtaatatatggctgtcaggatgacgtttctacagcaaatttgatgtgcataaactttgctggcagctttccacacttttagaataaagttctgatttctaaaggtcacatatgaaggccttttgggatgtagtttttgcttgtcttggtagcttttctcaccacttgtacacatactgcctataatgatcaaattccttggtggtcttatctttttggaccatactgcttgtaattctctaattccttgatggttttatctctttgaccactctggttttatctcatttgaccatgctttcacacatgatattctttctgacaagaaggcgccctccaccttcccccaagacacacattatctagttcagaggctttcaacaaattttttcttttagtatgaacccagtgtggattgcaattacattatgaccatatacatatataggtgtgtgtgtatgaatgtacatgtgtgtatgtatattatacgtaatatatattttatataaaaatctaaataattgttatgaacatacttatttttatatgtgatatacttaactttgatattagtaatatctgccctttgtacctgtgcacaacagctttggtgttggaagccttttttgagctccaggtctgattcgatcatcttcacttgctgagtcacacgtcatagtatttacttgttttgttcctctcactgcctcagacagctcttgagggtagagactgtgtctcacttgtcctagcacacaggcacagacctaataggtgctcagtaaagagataatgaagaaactggacccagtgttctgctacaaattgatagccaaaatcgcaaagacagaaaagagccccatatttctcgattctcaagacagagctatgcatcagaatttttcatttagagtaggacttggagaatggctagacataggatgaattattttttttctgagggggaaatgtgagaagacactatcatatatactcttagttataaaagaaaaaacccacaaaatacaggtattgagacttaattacatacagccaaattcacactttttaatatacaattgttttgaaaaactacaattgtgtaactgctatcaaaatcaagatatagatcatttctatcaccacataaatttttttaatgcctcttcgtagccagccttttctccaccccccaactgttgccaccactgatcaattttctgtgtctataggttcaccttttccagaatgctgtataaatggaatcgtgcaatatgtagcctgttgcatctagcctcttttacttagcataaggtgtttgaaatcatccatattgttgcttgtatcagtagtctgctcctttttgtgctggataacattccattgtatagacataccaaaatttctttatccattcactaatttaggttgtttccagtttggggatatatatacacatatatatgtgtatatatataattatatatattattatatattatatttatatataatacatatatattaaaacatataattatgtatatataatttatgtctaggattgctgggtcatatagtcataagtatatgtttaattttataagaaattaccaaactgttttccaaagtggttgtaccatcttgcttgttgccaacagcatatgagagttccagttgttccacatctttatcagtacttggtattgtcagctgctatttaaaaaaaatttagccattctaaaagttgtatcatgtctcattgtggtctgatttgcatttccttcgtaactactatgaacatcttttcatgtgcttatttgccatttgtgtatcttatttggtgaagtatctgttcaaatcttaaaagcccattttaaaatcagacttttcttattattgattataagagttctttctacattgtaatataaattctttatatgttttgcaaatatttcttcccaatcttttttgtgttgtttcattttcttaacaatgacagcacagctttgaaagtctttgaagggaatatcctaaaaggtactaaagtagaggttttaccagcctgggcaacacagtgaaacctggtctctacaaataataataaaataattagccaagtaaggtggtgcttgcctgtagtcccagccacttgggaagctgaggtgggagaattgcttgagcctgggcagttgaggctgcagtgagccatgattgtgccactgcattctagcctggggcaacaaa

SEQ ID NO: 64708 - DNA, 1082 bp, Homo sapiens
tttttcccaagggctctaataagggaattcggtgtaacttcctgaatagtaacttcattggcattcttggaatagtcatagcaatcagtttcttgaagctgctacttctaacatcactcattgtgggccaggagaagagtgccaatgtgctgtttcaataaaggtagttgcaaaggtgtaggaattgtaaaaattgtgcctacccaccagaatttctttgtaaagcaaccttgtttatgtttcttaaaaaatatttcataccttcttgctccattctcaaactctgtattatatggagcttccctggcaactgtaatatgagcctgggttatctttctaggttgttccgagactgcagcctgtacctgccaatgtgctgccccataacccagccatacttgtctacttgcagtttcctgaatggctctgtcctctagactctaccttcatgccagctgttctttcgtttcggaggcccttccctgtactcctttacttggctgttttccctacttgcatacagctgctctttttccccttaagatcagagggaatgttttgctcatcatgccaataaagatatgttgatcaacaaccagaaaagctgtgagttttttaagtaaaactgaacatactaccatcaataatacatccactccttttaaaggtacccagaattccatgttataaattttgcctcattttaaatttattaaacttctccaagcaccactattattaataagcaagaagagacttttcctgcatttctttggttaggtacaggtagtactgtttttctctttgttttgatgttttgttgtaacattaggtcattactttagctacagggagggactcaccccactgtgacccattaacctcatagtctaagcaccatttgaccattgtttctggggaaattattttcccaaattccaaagcatatttttaaaacatcactgcaacacaatccagcttaaggtagtggaaagaatcatggaccaggatttatcatttggagtctgatcttgatactttaatgaattatttaacccctctgggtctcagttccctcatta

SEQ ID NO: 64709 - DNA, 2535 bp, Homo sapiens
caggtgacattggaccactttctgagaacccctcgctcagtggttaatgctgaagaaagtttgttttctaataaagtaaaaggaaagaagataaatccaatgataactagacagaggaaataaactggttggtaatatagagtttactgggggccattttaggggggctaagaagagactgtctgaaggggtgacatttgagagaaaaccaggaggtaagaaggaggtgctatgggaagagctagggaagaatagaccaggcagagaacaagtgcaaaggtggaaggaggagaggtttgcgtgcttgtgggggttgggggagctgggagtggggtggggatgatttgagatgatgttggagaggatgcaggagcaagttcaggtagggccttgatatagaacaaagagactgctaagcactggattggcatgaattgtcttcttgttttaaaaagattgctttgactgccatgtgtaggtcaaattcagaggggcaagcatggaaagagggagaccaaacagaaggctactgtcgtggtcccgggagagatggtgatggcttggattgaggcaaggggtcgaggggtggagaaacaagatagaagtgagctggaggaatgcactgtttttgtttctactggcttatcaccgcctggggatgctcataatggaggcccatgaaaagcttaaattatatttcctatgtgctgttttagaaaacagagaagcacagataacattttagaaaaatagtcattatcaagttatttaagtgtctgtgcctccacctcctccattcccctgaaggtaaacctcagctatctggaaagcttggctgtccagggcaacttgttctctgagatctctgatttagccctgttaacgtggagtataatctgtgtgtgtcattgcttaattgttggcatgtagtgactcaactggtaatttaaattaaaagactgcatataagcatactattgttcttcttggatctcgatggagctttgagtggcacttaagtgatggtgtctttgaattaattactatagctggggaagagctgggaaaacacactagggaaaaaatgcatagttgtgatgtaggagtgagaggagtacgttcgatgtgagagtgagcctagaatgaaccataccggagttagagaataaaggaatagatgccaagtactcacagatgtctggggccccatctacaccactgcaccctgctgaggtgtggtcagctggtagccccacctgctcactgatgggggaacttccccctgccctgcagggctgcagggggaacagtcacatggaggtcccccctcttcctgtctctcaggatcccagcccaggcaattccacctcaggcagtctctttctcacatgtttacacacatcctcttcaaaccttgtgtttcttttcctttgctcttttaaatcttgcccagtcacctcaggaaattctctccttttctttgttctattccagagccaaaataagggaaaaaactttttagtcatggttaatatgcgtgagattcatgctatgataaacatattgacaaatgatctaattaccaaatcctgtggctcctctatttgcaggttgtttggacagcagaacactttctatcctggaagcttttcttttaggttcctcctccacttcctgatcactcctgtttcccacctccccacctccccttcctgtttctattcccttttttttttttgagatggaatctcgttctgtcacccaagctagggtgcagtagcgcgatctcagcccactgcaacctccgcctccagggttcgtgattctgctgcctcagcctcttgagtagctgggactacaggtacctgccaccatgcccagctaatttttgtatttttactaaagatgaggtttcaccatgttggccaggctgatcttgaactcctgacctcaagtgatctgcccacctcagcctcccaaagtgctgggattacaggcgtgaaccaccgtgcctggcctgtttctattcctcaactctggttatatctagaaatgtttttctcagccattttctttatttttctcctctttatctctaagtgatgccatccacttctgcagttttaatgctccgtgttgcccactccctcacctttacctcctctttggcatttcttctcaattctaggcttgaagttacaactccctgctggataacatcacatgacccaacagatccaacacactttttcctcctgttgtgtctccaggtgacagcagcatcactctaccggctacatggacaaaaaaaccaccatgtcatcttcagagtttgcctttaagctgcacacagtggtacatgcctgtagttccagctacttgggaggccaaagcaggaggatcccttgagtccaggagtttgagtccagcctgggcaacatagcaagagcctatgtcgtaaaaaaacaaaaaaaagaaagaaagaaaagttcacctttttttccaacctctaatcagtaacattcagtaacaaag

SEQ ID NO: 64710 - DNA, 1128 bp, Homo sapiens
ttgcctccagaagcaatggggggtcctctgtaagatcttaggcttgtcagcgctttgctttagacactctcggatgtcctagtaattctaaaatatttgctgctgtctgtaagttctaggtatatccagaacttcttcgttatatgtcaattgttcttccatgatttcttttctctttattttcctctgttatttgaagggcagaaataggctgcttttttccatgtccacctctttgaattttgccattgggtcttctctgggacaaacactttatatgaagtaggtgagccagtctcctgtactccttatcctgtggcttgaccacctctgggcaatttcattcaattgcagacatcttccaggaaatgtctaatttgttaaacaaatacttgttttatttctgagcattttgaaagcaaggtcaaagatggtggctggggagagaaggtgttcaagtggaaaaggctgctagcgtacagtaggaaactgtgggaaggaggatttagggaattgtaaagactagcccatcttaagtagggttagtgctcctggtatgtggaatgcctttttattccttgcctaggagtgagtggcaatgctctgctatgtagatcagtatttcagtcctgaaccaccagggccaagaatttgccatcctgctggggataataaccggcaggatgtgacatattacaatcaatgtgcatagagtaccttccttatgtcagcatgatccaaacactttacatgatgaattactttattctcacagcaaccttgtgaggtggatgccatgattcattatttatagatgaggaagctaaacacagaatttaatccatctgtggaagatcacgcagctaatacatggtagaacttggatttgaactcaggcagccttgctgaaagtcatgttctactgcctgagactgaaataatattatatggatggagtgctcttgaagattggtcatcttacacggattagtaagttctttggatggacaatccttttgtcctgagtgccaagaaatatggaagaaaaagatagtgacccaagagtcatggaagaagaaaaacagaaggaagagcaaacccaggctaggcagtgtctttgggggacga

SEQ ID NO: 64711 - DNA, 1067 bp, Homo sapiens
ccccatttgtaaaaggggacactctcccaaccctacctgccttgtaaagttgctgtgaagtccaaatactttcacgagcataaaagtgctttgtgagagccgggcagtggttccccgttgtgccactataatgtgtattcgaatcaccaggagggctgtgtaaaacacattgctgagacccacctctaggatttttgattccatcgacctgggtgggggcccagttacttgaatttctggcaaatttccaggtgatattggtgctgctagttctgagagcacaatttgagaacccctactttaaggagttctagatatgtgagatactaccttaccctttcagacagttccatgtgagtatgttaaccatacttcttagtgaaaaataaagagaagcctccgggtctttgtgggaacaaagttacaaattaattgaaatccatactcttcctaagcagcttggacctactactgtcccacatgtaagtatgcaaaactacattttgccaagaattaactcatgagaaccattgaacttgtattgaaagtcaccttaacagtggtattgtgctctgtaaaactggaatcttttcccacaagatgcatgtaaataagagatctcaaaaatagaaagactctctttctcaaagaatacaaacaggtgtcacatagaaaactcgagatgacatggggattatttttctcaggtttcacagactgcggtctgggttggctttcaggattggtttggagaagggtccatctgctgggtgggcaggtgtattccttcccatgtgctccgtgcctctccacacccctccactgtggtcaagatgcattgtagaaatcctacctcaaggctgggtgcagtggctcacgcctgtaatcccagtactttaggaggccgaggcgggcagatcacctgaggtcaggagttcaagaccatcctggccaacatggtgaaaccacgtctctactaaaaatataaaaattagctgggcgtggtggtgggtgcctataatctcagctacttgggaggctgaggtgggagaatcgcttgaacctga

SEQ ID NO: 64712 - DNA, 4758 bp, Homo sapiens
ttgtgccttgcatgtaacatactcttaaatgttgaataatttgaaggacatagacagattgtctttcgatattctattatattttactggtgacattttattaattaacttgcttagccaaagtttataccatgaacatcaaatatgtggctactgcactttttttttttattttttgagacagggtctcactctgttgcccagcctgtagtacagtggcgccatctcagctcactgcaaccttcacctgtgggctcaagtgatctactggcctctgccttcagagtagctgggactgcaggcatgcaccaccaggcttgaaaaatttttaaatttttctgtggagacgaggtcttactgtcttgcctagctggtctcaaactctttaccttataccatccttctactcggcctcccaaaatgcttggattacaggtgtgagccactgaaaccagcctctattgtacttctaagtgtgctgctgtattcgttgggggaggagggacaatatgaactgtgcttcctgttttaacatttatgaagcccttcatgtgtaccagatatcatgctaagagctttatatgtgtgagtttacttgatcgtcataacagctgtataagaggtattctttatctccattttaagctcagaaaactgaagtacaaaatgtttaaataagcgttagtcaaatatattgaaaatatatatccagggtcatgatttataatctgtaaccagaatttgaacccacatagtctgactccagagttcgtgccctccagtctctcacactggcccgcacgtgtccataggtgatagggtttggtggaaaagacagacatgcacgaatcaaatacagtatgagagtaccctaaaggagggatgaacaaagggctgtgggagcaaagaggaggggaatttactctgccttggggattggaaggcttcacagcagaggtgacatttgagctgggtcatttagtcttctgtagggcagctgcccgagttctgccttgtttgaaataagcacatttacaagagaatagtggagcacattccacttgatggattggattgacagattgaaagtaactccccagaatgatggctttgttaggtatttgttctctgagaaccctacctgccactcccctttggtgaattgtggcaagaaagctgtcacattaagctgtcactcaggatacttgtgagagggggagggaagaacaaattatgggcagaactaggtattttcagaacagtctaaaacccggaaagattatatttcagagcatttaaaagtgaacacaacagcctttatttaagttgtgcaaaaagaaaattgaataatgaaaacttaattaggctatggatatttttaaagctggacattctgattcttatccaccctaattatatgaagctttttaaaggccaagatagaaaaagaaatcaattatagacctacacaaagttcttatagagattgtttaattgtaaaaatatctttcttgtgtgtgatttttaaggagtgtttcagaagtagattcaattccaacttgtatgaccctttgtctcggttgactagttgtttgctctaagaatatttcatgttttgctgtttctttcagtttgtaggtgctaagctattgaaaggtttagagactaatctaggtctttctaaattatggctgcttgcagttttattcctggagaaatggtttaacagcacttctttgagttggcactcttctgcctgtctcagctctaactttcccgcctccttctcagtagtccctctttcaccctccactccccaagcctgaaatggaaagaacttgctttgttactgatgataatatttaagctctaaaattttaacagtgtttcagttgcaaataaatggaaattgtgtattctgtttaatgtgtttcagaaaatccctgctattttttttttctttaaatacaagaaaacaggcgtgtaatgcctcattgaaaaaagcctgtaggggtgctttgtgcaggtcttaattaagggctttgaaagaccaaacaaaaggaaaaaggaaaatgctacagggttattgttattccaccccattggctcagctagctgaccatccattggagcattttgtccattttgaaactgaatgacacttttgttcgtgattaacagaggtgaaagaagccaattattgggccgtctttttccatagagcagctgctgttggatttaactgcaggcaaatatggccttttactaccacaaggatgttgtgatgacagtttatttttatagaactctggtagaaaacaaaatctgtctgactcctgttatgaatatgccctggaattttcatgaaagggtcattttaatgttctagctgtcccagagttctctttaaaaaacaatgtatatgtatataaatacctatgtacatatttttaacagctccttgcgtatggattcagccttaaagttatgtaaagatattttttaatttgtacatttgtaagctgcttcagcctttccccattttcattttagtaaaatcccccaaagcttgttaaagtggccaagtaattaggggaaaacagagtcgtcttgctgaagctgttttgatatacaggctacttaggtgggacgcatgagtctcagagaccacctacccattagttcagacttctaacctctctggtgttcagtggtaggaatgagcttggggaggaatttcccatcgtgcagtggtattacttgagtgtgtaataacaggtgtacctgggagaggggcacatggttcagctgtcaggatccacccaactctgatatgcccttagacaatggagtgggagatggggtttggagaccagagatcagccaggatttctttcagtaagactctaggccttccatttttgaggcatccttgtgttgtggataaagtgccctgtccagtgtttccttgggcaagtttcttaacctttctgagcctcagtttcatcctccagttggagttaataatacctgtctctcagaatggttgtgagaattaaatgagttgagcacgatatgtgtctagtacagtccctgttatataggaaatatttgatgaatactaacttcctttatttctcttttgctgtgaacagctccttataccaaaatctgaaaccaaactctgcttcttacccaattagtcttcttccttccagattttcaagtagcagaggattcagttttcagggataatttaatgaaaataactgtcttctctctacggccctctcttcttcatttgtctagaatagaaccaacacagctcttgtgtataatgtgaagaacatggaatattgactctttctttgtgaatgattgtcataattcattttagagtcttctcaggtctggtgctgttttgctctgtaatcttttgaaaatcacctgtgtttttttgttgtcgttgttgttgacaacatagtggtaataacatttaactcactacccctcagatgtgtttgaagatgattataagtggtttataagccctctgtaggtatcactacattaaaatggaagaatgaggcccctaaaattgtaaaacaaaacaaaataaagttttgcggcaaggtaggtaacgtagttgtgtagctgcatgggactaagttattagttgaacaaggtgtttaatattgaggttcatcttgtggcctatcaggctctttggatggcattttcacccctacaaaagagtgagtagttctatttgtagacctcccacaaaatgtggtattggagctgggttgctagtctcttcttctctggtttgatttcccactcctcttcttaatcccaagcccttgcttgccccattctgtctaaccctcttccatggttgatatgcttttctccatctcagcctcttcactagctcttctctgaagaactgcttcccctgcagacttttggttagaggctgctcatcttcctacactgttaagagaataggattgattctcaccgctcctcattgttgcccataggtcactgggctttcatcttaactcacaatctctgttccatctgtggtccctgacctttagttctgatccttcgcaaatactgtcatctactggcttgtctgttggtcccctttaaaggaggattgggtgccaagttcatgatcttatgatttctgccatcctctcccctgccgtaagttctgtcattcacccaacatggacaatccttttgacacttttgcctctcatttcatttatctccatcacattggtgagccctgtctcaactccacttcagccttttcctcccatgaccaaatcttggaccttgtgaccacagaactgctaaatccctctgactacagcccctctctctctctttttaagaaaatttttagctcagtgtatacaaatttttcagcctcattaagccctcatgtcccttgaactttttactttctctctatcattcatttctttctctggttagattaagatctgtccattcctttagcctcagtgtccttaaccctcttaccctgttgtcttattaaaggcgattttttatgtaatgatgaaatcaatcttatttagtcacccatgccactttttttgtgtgtgaaatacctagtaagtcccaaactaagtacttatcatacatgacttaactcatcatttgaggaggtagttaactagtagaggctgactgcttagatgtaatggtttaatggag

SEQ ID NO: 64713 - DNA, 1109 bp, Homo sapiens
attattatgatactatacattcaatattaaaaaataaactcttaggcatgtcttgaggattcactcattatacttaagtaggtatttattattttacagcagctgataaatactggacagtgttgatgatgggcagcatgttctcttggatgaagataatgcaaataatagtcttgacttctgatagttttattattataagttagctaacttatgatagttagatattgtcaactaggtgagttttacctcccatttgcatacttccatagaaaaatcagaaaagatgtaaaaatttattatagtatgtgtttattatgttttatttagtttttattaagtatcagtgagtgaatgagaaaggcatttgttggtagtcttaatctagtgagagtagaagtgaaaggcaatacttctgtcctcagggggcttgctccaatggttgatttaaggagctcatttttgttagtctcattactctcttctagaaaaatggaatacagtaaacctacctgatattttcaaatgcaaatacatatctgtagctttaatgttttattcagactcatgaaattagtgtttcatgacaaaataatttggattgtgaacaaatgtacagcaaaatcattttgtttccatacattcttttcagctaaagaacaactgaggcagggcgcggtggctcacgcctgtaatcctagcactttgggaggctgaggcgagcggatcacctgaggtcgggagttcgagaccagcctgaccaacatggagaaaccccatgtctactaaaaatacaaaattagccaggcatggaagcacatgcctgtaatcccagctactcaggaggctgaggcaggagaattgcctgaagccaggaggcggagcttgtggtgagctgagatcacaccattgcactccagcctgggcaacaagagcaaaaactctgtctcaaaaaaaaaaaaagaaaagaaaaaaaagaacaactgaaactctggatgatttattctaatttaaacatgattctaacttactgatgattttattaaactaggtcttactagattgccacatttaagccagtgatcctgtatttaatggtaaggtctttg

SEQ ID NO: 64714 - DNA, 1121 bp, Homo sapiens
ggcatttctttgcagtggtggagcagttccttaccatgattgtagtggtagttacatgaatccatctgagtagggtctgtagctttagtaaatagtgttgcatcaaagtaaatttcccggtttagctgatatattatggttatgtaagatgttgccattgggaaaagctgggtgaagggtatgcaggaactgtctgcactagttttgcaacttctagtgagtcttaaaccattttttaaaataacaacaacaaacataccagatctgttgagagtcctgagaagtcttagccatggccttaccccttaaagaagatgaggaaactgagtctctgaggtaagatgacagcctgaggttgcagagccagagtctcaatctagatcttttaactttcacatcaacattattttgctccctgagagcataaccagttttaatttgctattgagcaattgttggaagattacgtgggtgtccattttttcccccagcttcatgcccacattccccccagctatgtatgtgtgtatgtgaattctcttttatgttctaaagcagagaaagtacaatatgcaaattatgcattaggtttataatttaaatggtttgaatcatatttttgaatggaatggacatggctctcctattatgaaagtattttattactgagtgcttggtacagtcttagtatgaggaatgaccttggatctctgcctgtgaattagtagctgaatggtgttttacttctgatgattcagtatatttgccttaattactggattaaccaatttcttgcctcccactaaaagcacacacatttatctaaacaggggatgaatgaatgaagttttagggactaatttttgtggtatttaagcaacaatagtctagattacccacaaccttaatttcctttcatgagtcttgtagatgggctttgtcaccatttacacttgattacttcattgttaaccccagtgatgtgatttagcatgcaaagacttaattattcctttctggcctagtgagaaatttccttccaataattgcctccactgccctttagcctccttaaaacatttagtttgtttgaaacaacttggttgctcagtaagcaattc

SEQ ID NO: 64715 - DNA, 1199 bp, Homo sapiens
aggttataggtagatttaaaaattttcggattggcaattggctgaaagagtttagtttttatctaaaagcctggaataaatagaaaggaatgtccgagttccaatgataagggattgtggagaccaaagttttatcatgcagatgaagcctccaggtagcaggcttcaaagagaatagattgtattataaatgtttcttataagtcttcaggtctgtgttgatgctaatgctggttggctcttactaaattccaaaagggtgtaggatataatgaggcatgtccaacttccccttcccatcatggtctgaactagtttttcaggttaactttggaatgcctttggccaagaggagggttccattcagaaggctggggcccttagaattttatttttggtttacagaatcagtactctttcaactttaaaataataattacttactgagataataagtcagaactttaaaaattaatttgttcaacatttgtttattaagtgtctgatgtgttagggactgtttttggtgctggggacacagaattgaacagtatctgatgccatccttgcattcctataacttacctggcaggggggtgggggattagtggtagacagtaaataagcacaatgaatataaaaggtcaggtaatgttacataccatcaaggaaaataaagcaagatgaaggtggtttgctgttaaagtagggtagccagggaaggctggaatgaaatttagatattaagataattagtcaatatctataggaatatgaatccatcttaagcaatggcaaaacaaaatttaaaaagttcctcttggccgggcgtggtggctcacgcctgtaatcccagcactttgggaggccgaggtgggcacatcatgaggttgggagttcgagaccagcctggccaacacagtgaaaccctgtctttactaaaagtacaaaaattagctgggcatggtggcaggcgcctgtaatcccagctactcgggaggctgaggcaggagatttgcttgaacctgggaggtggaggttgtggtgagctgagatcgcaccactgcactccagcctgggcgacagagctagaccctgtctcaaaaaaaaaggtttctccctaccccatagtgacaacttaattaaacataaaagtcactgtgcatgtaggaacattaaaaaagaaaataaaagataaa

SEQ ID NO: 64716 - DNA, 1203 bp, Homo sapiens
tagctttttggctattataaataaagccaccataaatattcacacagagtttttgtatgaacataggtatttatttcacttgcataaatacctagagtgagatcctgggtcatatggtaaatgtatgtttataagaaaatgttggtctcaattttaatgtcttagactgtggtgaggtttgttatcaccaattacttatagtcacaatatattgttagcatggtatgtagtattagcaaaagctgttaaaaactgattttgtttaaatgtctgctttctttaagttctttaaactcctctatgctgagaatgtctgcttttaaaagagaagaattcttagctccctttatgatacctagcagttgctgtaatccccgccagagactcctgtagaaattaccctaatgtgaagcattttgcttacagtgaaaaaagtttgaattattaatgtattcatatttggaatgtctgatttttttaaaaaatggatatttagtgaagaattgctgggcctacctatacattatgcattttacatgtgctaactagaatttccacagtaaccatcttggtccatggcaggattcccattttatcactgagcaaactgggatttaaaaggattaggtaacttgttcaaatatcccacagttagtgggtggtagtttgtgaagctcaggtgttccatatttaagtttgctcatccctgtagtttgcttagatatttgacaatttatcagaagaggaacaggtgaaatgagaaacaaaatggtgagaagctacaggttattacaggaaaaaaaaatcagaacagaaaaaaatgtgtacccaaaaagcacacatacatctatatgtctgcatacactgggagactatgacttgatttagagtcaaaaatctacacaatagattcaaaatctgttgtgtaaaatgaagttgtctgttattcatagcagaacttttaaaaagtatctctaacttggtctttttgctttttatacatacttgtttaaaagctttcacatcatttcccatgttaatagtgtttttttgtgtgtgtctggaaagtatcagtcatatgctttttgactggctttttctttcttccgtggacttcacttacatggtatatgaggatcagatctgttagcagactcacttttctgtttctaaaggagcaaatttctgaatgtgctcctttaa

SEQ ID NO: 64717 - DNA, 1643 bp, Homo sapiens
aatctcagttttcatcccttctctgctatttctgctatttatctcatttgattagtttttaaacatcttaattttttctacaaggaaaaattttcttgttggccttccgttctccaagttcattttgagtccatggtcatgtcatctagctttttatgttactatcaactccccagtctttttatttttgagacaggatctcactgtgtcacccaggctgaagtgcagtggcacaatcatggctcactgcagcctcaacctcccaggctaagggcatcctcgtacctcagtctccgaagtagctaggactacaggtgagtgccaccatgcctggctaatttttgtatttttttttttttttttttttttttttggagacagggtctcaccatgttgcccaggttggtcttgaactcctgggctcaagtgatctgactgccttggcctcccaaaatgctgggattacaggtatgagccactgcgccaggccctcagacttcttttgtaggcatatttttatgaatagattttcaaaaatggtttgtttttttcctttctttttcttttttttaagagtctggcacaggaaatgaagacatccgagttcaggagggcattgtagagcttgggcaggtcacttaaccactttggacttagcatttcccatgtgcaagaagaggcagcttgcattatcttcagggttgcaccaaggaaacgcttcagcatgacttttttgagtgacgccgagtgagaatgcaatttgtcatttcttgtgggagtgactaagccgttgtctgtgtgttataacagtgaattaaaattctaaccctgtttctttggttctttgaatgtatatcaggttcaaagcccatagacttcacaggtgagccactgtgctaatggaaaaaggctactcatctggtagattcttcatataaaaatccatgaagaccctggtagagaaacagtagtacatctgattttataaagataccttcttgtagatggtgctacttccctctaacaagaaagccttatggaggagaggtacagtttatctggaggagggagctcaagggaaatcttacatttttgcctgggtctctgtgacttgttgctgccttcctgagatggctggtcaagtagaaaggtgctgtcctaacatgggaacgcagggtttctcttcagagcaaatgggcgtgtgatagcccatcctttaaagacagtgtcaatgtgatctgtagatactgactttctacttccagactttgtgacactgaggactttcattaaaagtcctaactcagtggctgggggctgtggctcacgcttgtaatcccagcactttgggaggccgaggcgggtagattacctgagatcaggagttcgagaccagccaggccaatgtggtgaaacccttctctactaaaaatacaaaaaagaaattaggctggcatggcgacgggcacctgtaatccagctacttgggagactgaggcaggagaattgcctgaatccgggagggggaggttgcagtgagccaagatccagcctggacgacagagtgagactccacctcaaaaaaaaaaaaaaaaaaaaaaaaatcctaactcaatctttgggaaccttcatgccaatgagag

SEQ ID NO: 64718 - DNA, 3386 bp, Homo sapiens
agggaggagaatctcttgaaccccagaggtagaggttgcagtgaaccgagattgtgccactgcactccagcctgggcaacagagcgagactcctctcaagaaaaaaaaataaaaaagacatgaaccagtaattctctcacttagggttccttaacacttgcagtaaccaataatgttttataatttccagtcaaactaaatgctctgccggttatggtatcataagtgtttaatgtccaggcccttggctcttaacattaggattgtaaggtaacatttgacaacttaatctcttaggaaagatcaaagttctgtattagtaggtagatccaggcaagtttaggcatattcttggcctctgtctctgtcaggtctatctctcagcttcttattttagtcatctttataataatggaaagtactggcagcctgcaagtttggattttggtttctggtctccttgattgtgccttttattctcattcttctaatcaataaataatggacatttgactagatgatggctaatgcctctctctttgctttgaatttctgtgaatctgagtagaatattaagtaaagttgcaagaatcatttagtaatttatggaaatatttttaagactgtctcctgccttttctctattaaaaaaagataaatatctataaaagtacagtatttgttggtatacttgagttaaaagttaaaaccctgccaaatgtgcctttaactctgaaaaataaaagtaatgtaacttagagtattctttataagacacctttgctcttttaattttttaaacttgatctcaaggttttggagtgagaaatatgttacccagcttgctatttaaccgtcccgtgcggccttcaagttgttggcaatgttaaagcttgttttcctatacataaaagaatatggatgactttttttcttttttcccccaactttgttcggtgaagtgtggttttttaaaagcttgattgaagatgataaaatgctgtaattgtaaatcctgtcagtgaagaaaaaaatctaggacatttagcaaatcagtactcttacacaatggctaatttgtctgcctctcttgacatttcttttgtgcctttcagcacctgatggtcacactgtatgctaggtgtcaactctattgtctaaaattgtgtgagttaaaaattgagtttagaaatcagtcttagcatgagacagatcgtgattttttagctcatgtacagttgataacttctcaactttccgaagactaacaagttagtattcaaacacctcttttaaattgcaagatgtaattgtgtgctagtatactctgagttcactcacacatagacaaatattcgttattaaactttgtgtatggctgagctatttttagcaagatctttaaagcatactaaaatattctgtgtcgtgtccaggcaattaaaactctgaatgattgggttggttggttttaatctctaaaacatgtttttcataccattacgtattttaattgtcagaaaagctcactagcctggtcttcccccaaccacaagatttggcgttatgcatctgggttcagcaatgcctttctaatagtccaggtccctgaaatgaatatttaaaatatatatccttcttagctttctgtcatgaaagatcttatgggtaagacattgaaccaccctcctgtggcaacatgttggttcataagaatataagcatatccttgtaaggaaatgtaaaccatagatattttgggaggcagctgggccaagattgggtatacgtttagatcccaggctggcctgctgtttgtgctagtgagaaaatgtgcagaggaagcatatttaatatgttacaagacatttagtggttctttattccttatatttaatttgtaattaagtaatctgaatcaagataagcctttttaaaaggctgcgtaaacccctttagctggttgtgttttctagattgacactaggagaatgcaggttttttttttcaaagttttaaaaacaaaattgacccttgaaagagtgaaaatctcattgtaccctggcagcaaagtacttttggtatttgaatcagagtgtagaacccgatatccagaaaaaataacaagttacattctctctatccccttatatttttaaagttctatttggggaaatttttcttcctaagaagagtgacataaatttggcagggagatagctccttaccttggagctgtactaggcatagctaaggaatgtgcctgggattgcttcaggtcacacttctccactcccctcaggctttgaggttccttatgtagctcttagtgtaaacagcagagtcatttagtacaagtggtgacatcgaaactcccctaaagagttttattagagctgttttcatgtgaggggagatgaattttataattcgcactctcttcaagtgtctggttttgaagttgctgaatgggaggtgtgtttgcaaactggcaatctcttctctgaaactagggagtaaggagtgggctatggctaacttcctggtttctcccatttccctaagggatcagctgtatgcctagaagcccttgaagaaaccataagggtcacatatgaagggcttggcagaccagatattttcaggagggaggaaactcatggttgccactccattctagattgccagccttctcctgtgtgcaaaccgtctcagagaactgcatttttgcagaataattctccagaaaatgagagaacactctctcttgagtaacttaacaggaactcttaggccagcctatcaactcttttctgtagtagggaagagaaagcagatatgttaactgtggaccttcagatttcagttcgtggaaactgttcatgtgctcttcagccttctgttttaggtactaaattaattcagattttgcgtattttaaatgtgataattgctcttcagttgcccttcaggatctccttctctcacacaagttgaagtgtacgcggaattcttacttaatttaatcagagttcataagaagggaacattaaatgaatttaatacatttcaaatatgtttctgtcattttttttgttttgttttgtttttttgagatggagtttcactcttgttgcccaggctagagtgcagtggcacgatctcggttcactgcaacctccgcctcctgggttcaagtgattcttcagcctcagcctcccgagtagctgggattacaggcacctgctaccgcacccggctgatttttgtatttttagtagagacggggtttcaccatgttggccaggctgctctcgaactcctgagctcaggtgatccgcccgcctcagcctcccaaagtgctgggattacaggtgtgagccacc

SEQ ID NO: 64719 - DNA, 1964 bp, Homo sapiens
ggatgcaaggccacaccgaggagcagaaccgtggcatggaattcagacaccattcccacaggggattttcagattcattctcagcacttagccttttgtccagatttgagaaggtcccagagagagaatacctgcttcttctccttgaggctggttgaaacttgttcagtctaacagtgtctatttcctggtgaaagccgctttaccggagtctggggacagcgtcagatgtgatcctcagtactgtgaatgggattcctgtattcacaccatttgctgcacctgtagcaactatttatgtttttgaacaacagtattcaatcttgtgtcacaatgcactggcctgtcacaattcaccccgaggagtgttcaaggcagtaatcttactaatattaaaattccgaagtttaatcagaaggattcaaggttattactgtatttgtgctaataactcaatcacctacattccaagattgggagaagagatgaagtcatggggaggggaatgtgtatgtgagtcctctggtttgtgtgttattgctacggtgtttgagaaacgtagacctcgagcacaaatttgcatgtcctaggttatgtttggcacatagttttaagattagcaaggctatttctgtgacttcgtgaagaaagtggtggacctgagtccttgatcatagctttactatgccactgagtaattgaatggccttgggcaagtcattcactttttttttttttttctcgtgacaatttcctcatctgaaaagtgaagcaactggattcacttgatcacctctaaggctgctgcttacttccagaagttctatgattttatattttttacaccattttaggatggcaaggtgacaataaggttatgatcctctcataaaaatatcccaggagtagcagaatatccttttagttgagctcacaccaccctctttattacttggaggagttctttgtgtttagaagtgtgtgttaggaaatttgccatggagacttgttgcagaatgcatgactagctaaggcactttgctagggtagaatagccctggttgtttcctgtgggtatggcttaacacttggaaaataaaatcactctgtttcagtaatttggatactgtacaaaaagttactcaacatcctcacttccatataattagtcataatctctcaaaccttcacagtgtatgtatcctgtacatgagcaggttgttgagctttttatttagaattgagttacctgaaggactttaaagtgtttttaaagaatctccttttggaaagatcatctcagattcttccctaaggtgtattttttttcccccactactccaagcacctttcttcttttactaataccatttgaaagtactttttaacgtattctctgatatctactgtgtatttcctggcaggtcaggtcagtagtcagtggctacatgtttgtatttattgatggtagagttttgttatcttttgatttctgaattacagaaatcaattgttggcttagtttgtgttgtgtgtctttctagagatgcattagttttatatacaagtgaactttgttcaaaacaagaacgatgtatgaatatctttaagtataggtcctttattttccaaactagtgaaccatgtgttctctttaaatataagcgaggaaaaaatattctgccaggcatagggagtgctgggttccagatctgtcaataattcacaggagtgaccttgaatgagtcatattcttaacccttcaggaccttattttcctcatctgtaaatctgtaaaacaagtcaacaactcttaactgccaaaagtgttttttattgttgttctctatttaatttgattttttttttttttttgagacggactcttgcgctgttgcccaggctggagtgcagtggcacgacctcggctcactgcaacctccacctcccaggttcaagcaatt

SEQ ID NO: 64720 - DNA, 1097 bp, Homo sapiens
agtttgagcaggaattgattgaatcaagagaaagaagacctgtggagaggaaatgggactaatttttccccaagttctctagaaacgtttagggaattcgtgcagaaagaaatgcagaaagaaaggtccctttacctgaacctcttgcaaggctctgcatagaatagaaaagcacaattttactattttgaccagtagtaaagaccttgtttagcagattcctcacattttagtgagtagacttgtcctataaggaaacgggctgttttacattagtatctaaaaccacagagaaataatcacacttttatgagagcatactcctctctccaaagcatcttctggtagaactcactgaaggtggtgaaatgctgtatcttcaactttgggccttagaataagttagtgttcatggcttaggaaacagaaaaataattggtaccagtctcaattagagtgcctaaactagcattatcttagcactttctgagctttggtggtgtgcaaatgtgttttattttcttagatttgtgacctgtaggtagagtgatcgtacattctggtgactccttatttctccttagtactcatttcaccctcaaaaatatatataaccaccctctctaaaagggttttcaaggacagcatatttgcattttactcatggggaaactagctcattcagtgattctcaaaagcaatgtatgaagcaaggccagtgctgcaggtttgcacactccagtcgatcatatatgggacatgttgcgatcacctagggtctttttccaagtacttccagtctgctctcccatcgcagctttactgagatacagttacacatcaggagactagttccgtggtctctaagcgtttgttcacctattcttaattgctggagcatgtgaaccaaaaacctctgtagttatacagaaaattacaatcatgaaagtagaagttaaaaagatgaaactataattactaatcagagttcttcattttcttctcattgctcaatggcttgtcctggagtagtgctttcaccttccctggggacaggggtggggggtgcatttcactttaaagatcctgggactgac

SEQ ID NO: 64721 - DNA, 2363 bp, Homo sapiens
gggaagttctacttaccaggtcatccaatttaggagatccaatttctgcggagggaacaaaaagacgggtgggggagggaaaaactagaccccttgtcctactatccttctaccttcaatccacaacctgccagacaaatccagccaagtcaagattttgccttgaaccaccaccaccaccaccaccaccaccgccgccaccaccaccaccaccaccgccgccaccaccacaaccaccaccaccttgtcactcacgcccgagaaacacgcccctctggtcctcctcttggccaatggcggctctcctctctgcatagtaatgagctcgagacctccccgggccaatggcgctccgggagaagggatacttttgcatgtacctaagtgatttgcataagccagcggccgggggtttgggaaccagagcgtgcaaccctagaagggaaaaggacgggaagagattgagccgcggctgggagacagcgagccagagtctgggtgtttgtgcgagagccacggcgggggctggggcgagtggccggcatggctgaaggctgcgctctgcaaccttgaagagccgctgcattgagaggccagggacagggagaccggtgcgatggcagagcgcggcccccgccgctgcgccgggccggcccggctggcgtgagccgccggaggagcggggctgcctctgcgcgtccatggagcagcgggaagggcgaaactccggagcgccgcgtccctgcgccgctgcggcggactgctgaaggggccgagcccgcgcggaccgccgaggaagagacccccgctccagcccgcaggccggctgcccgggggcggcgggggacatcggagggcagcggagcgagcagcgccgcgggagaggccggcgcgggaggcggccgcagcaatgccgggcccgctagggctgctctgcttcctcgccctggggctgctcggctcggccgggcccagcggcgcggcgccgcctctctgcgcggcgccctgcagctgcgacggcgaccgtcgggtggactgctccgggaaggggctgacggccgtgcccgaggggctcagcgccttcacccaagcgctgtgagtgcgggcggcggggacgcgagggggggggaggaaacggggcccagcggggggcgccgcggggcggagccaggggtcagtcccaccccaccccgccccgccgccgcccgggcctggggagggggtccgccggtcacctgcgtgcgggctgcctggcacccactcctgtgccacgggctttccgcactttgctagtccgggttcgagccagcagtagctttcgttcccagactttttgggcacaagcaccctcccaccccaccgcgcacacccccaactcacaagtgcatctggggccaagaaggaggaagtaatctaaaaacgcttgcccctggcagcctgtccacgcgaccttcccttctcatgagggccctcgctcagcgggcaggagttccgctactggcggggctgagggcgccgagaacttggcctcagtctgcataccgaggcatgtctcgtggggaagcacctggagcctcctgggttccagcatgtggggagaagaaacacctgtacctcagtcagggcgaatctccttccaatttggccccatccaggtagtgcgtcccggcacctacctcggcccagttccactcgggactaccccactaacgcccaggcttctgcagcacgcaggggagtccgagaaaacaagggagaattacagggttctgttggtggacatgctcttacccaacaaggccttttaaagaaggaatgctgacctgaggtgcaggatgttggaagagaagcaagttccggagcatatgctcagcccaggctgcaaggtagcagcaggtttctaatgcaccttcacgcagccagcagatcttttcttttgagctgcctgagatcgagagacacactgaaatgtttcagacttacaaaatcgccctgccaaaacggacttgagagctttagacgttcccttgagaaaagaagaggaatctgaactaggttgtggaggtggtggcaaaggccacggatagaggaggaacagggtagggtttttgtgttcttattgcttcttgcgttgcgtggccagctgaatgcttaaatcaggagcagtcgaagaaacgtgtgagagaggaagggatcctgaggggccctagggtagagggaatttccttttacctgtagtggaagggacctcttagaaatagacagttttaaaggaccctgtgaagaaatctttatgcaggcaggagcattgctgtatttccaggtgggtggtggcaaaggtgttccgcttgccctctcaggat

SEQ ID NO: 64722 - DNA, 1049 bp, Homo sapiens
catggtggcgggcacctgtaatcccagctactcgggaggctgaggcagagaattgcctgaacccaggaggtggaggttgtggtgaacagagatcgccccactgcactctagactgggcaacagagcaagactccgtctcaaaaaacaaactaacaaacactaaagtttgcagtttgctccagtgtatctcaaaatcaaactggtaggaacagacttataaaaagctaatagatatatctaacttggaagacttgtatccttatgccatattttatcatttgactactaaaaaaagaaactgaattaaaataatccatcacagcatgcttctccaaaacgatagtattaacacaatgcaaacatcagaatgtccaataaagttaacaagccaaggcaattttgttacatacattaacccatttattataggccaatgatgtctcaaagagtagaagagcgtctaccggtctttgaattccttcagtcttctgatggcgactttaccgtgacagcagaagtggtattgtaggtccaggcactgccagccactgtcttcatgcagaaaccacagtgccagatccccgtagctcatctcttcatcttggttttgccacagaaagagcaaatgtacttggtgtgctgggtgatttcaattcttcttcaccattttccggagggaggccccatagcgggtcccatatttactgatgattctgactttcttggtgcatttggccatgtcaccgcaaactaagtctaagcccagagagctatgtgtttttttgtttgtttgtttgtttgtttgtttgtttttttaagtagagatgaggtctcgctgttgcccaagctggtcttgaactcctgagctcaagcaatcctcccgcctcagcttctcaaagtgctgggattacaggcgtaagccaccacacccagccttatttctaatttttaaagcatcaagaagaaacagtttgtcacaacgtaatacaactttctaacagccagaagtgcccaaagatggactactccccatggaggtatgaatatgc

SEQ ID NO: 64723 - DNA, 5672 bp, Homo sapiens
gtctctaaaataccttctgtttagcttaccttctcagaatcaccagtgaatttgtgagcattcagacgtcaaaaatacgtgctcaaaagtagtttttaaaaagagacaaaagaggccaggcgcagtggctcacgcctgtaatcccagcactttgggaggccaaggcgggcggatcacgaggtcaggagatcgagaccatcctggctaatgtggtgaaaccccatctctactaaaaaaaaatacaaaaaaattagccgggcgtggtggcaggcgcctgtagtctcagctactcaggaggctgaggcaggagaatggcgtgaagccaggaggtggagcttgcagtgagccaagatcacgccactgcactccagcctgtgcgacagagcgagactccatctcggggggaaacaaaagatgaaagaactgaagtaaataaaagtcatatttttaatatgtaaaactttctttcaggctactgttgctgcatttgctgccagtgaaggacattctcatcctcgagttgttgagctaccaaaaacagaagagggccttggattcaatattatgggaggcaaagaacaaaactctccaatctatatatcccgaataattccaggtggaattgctgatagacatgggggcctcaaacgtggagatcaactcctctctgttaatggagtggtaaggatgaattttatttctatttgtagtgatctgttgtgaccacctgggggcgtatttgagtaataggagaaacctaagaaacttgtggtttagaaatgccttgagggaatcctaggcagtactattaatacagtgatccttttttttaagcactataagtgtattttgcagtgtaaattagcagtgcttaatgtcatttttatgacataagctctttattaaaggcaatacattaaattagaagtctaccctcattttactcttataaaatgccaattgcttgatctactgaaataataaggcatatagattaatatgctaattatttggaacttaaaagccagcttttagactataaacagaatatgatgtaagagaggatttcatatagattaaaatggtaaggcaggattatttcttagttttgtaatgttggaataatataacattaaaacttttcttcattatatatattgtaaacatttttgcattttgagttactttcaaaacttagatattagtgtatggttggttgtttttttttcccctagagtgttgaaggagaacatcatgaaaaagctgtagaactgctgaaagccgcacaaggaaaggttaaattagtggtacgatacacacccaaagtcttagaagaaatggagtcgcgctttgaaaaaatgagatcagcaaaacgcaggcaacagacctaatacatttcaaaacttgatatttcattttgcgttttagctagagaagttttccttgtgacttactaatggctgcaatgccaatgattgtaagaaaacaaacaaatttatcatgaaattctccttgtcattttataaatgcctattttaacatcatttatggttccagagatgcatacacttttttctgacaagaaaaagtaaaaggtgatgagggcaattctgtcctactgtttttacaggcctttttcaaatgcagattttgtcataaagttgttatagattttttaaaatgcttttttaatattaaaatgtacttttacattcttaatctttttttagaaaggaaaagttttcttcatttagctgctgatttaaaagtaaagttctccaattctttttttttgcttactctattttttttaacctgtgaaatttctttacagttttccaagaaattaagcataacagtctcatctacggcagttcattacactgtcaatgttaacatcattgctgcattttgtactttgaacacacacataatatatataaccagtggtaaatcatgactcagtacagtgcaagttttttcacttttacttaaacataatatataatggatattcatttatactgatttatgaaagtaagtttttaaacactgaaacaatcattgctaaaatacatattcttaatatttgagcattgaggcaagaggatgtaattgatagcattacttattacatccctatttatgttcaaccgtacatcaaattataaatgcaaaacaggttcagatttcatcttttgtgatttcttttaaatactattcatttttatttaaatgcacagtatttcccctatattttagtccttccattcctagagacaaaccagttatttggtggtgggaagtagctgaagcaaagaaggaaaagtaatacctttaacctcactagcttcaagagtagacattcttactagctcaatttaaataattgattttaaataggaagaaaagaggatatatttaagatacatagaaattatgatgtgaagtattcatgagaatctgtagattccatcaaaataagtaggaactcatactaaaattgttggatttaaagaggcaacttttgtttatgattcaaatatgggaatttgagaaatatttcatttgtccactggatgtcactattttactaaaaggcagctattagtgtgggactgtgactgaggtcttaaagactgaaagagttggggttcattttctgttacaacttacaggaacatttgtactttaagaaaaatttaagtgacaaatgttagaagatgatggattgaaaaatataagtaatttggcatattgaccctatataaaaaagtgggcattttgtaacattccttcaggaagaatagaattgtatgcttttttctgcatgtttgtgatcactgtgagtctcagatgattattccagttttcaatgatttttcaaaataaaagtcaatcagcattgttatttatcattaaggtattgaacactggattgcatggttgaatgtgtctttaatccactacaaaatgtgcttgttattgataggatcatgttgttaaattgtaaattttcaaaattaattgatgttttaaaaatgttgagaccaaagtagtatagaagtatggacttaatttaattgtaaaattattagaggtatttgttgtagagctttatatattaaagagaggtattggtgcatataaaaacagtaatattattgttatgcttgtattcttgcatttcagggtaagtaaaccctgaagaaatcttattttagtatagctacagctgcagtagcttttaagtatgtatcaacatttcattataaattatagcttcctggttctgtgtctcagctgtttcagaactttcagccaagttaaatcttttttggtgttgaaacttttagtaagttgagtaagctatttttttccctacggtaatccacaatctgttctttgtgtgggttgacacctatttataattcttaaaataagggtagctcaaaggagccaagtacagtagtttagcttgctactgttgagcatgaatagcagtaggttgttttcattaatgcagttttcataatgtatcccagaattttaaatcttgaccatagaaaaatacagtcattcattggcaaagatgtacagtggtggtttagtgcagtgaggaaatgatgggaatttttatcttagaaatggatgattcgtgaataaaactaggtacatagtaagtgtatgatagatgtttgatttgtaaattacaaatataaattatcacccccatttccatttattttcttgatatatcaaaatgtgttgacttagtgattctcaatcttagctacatattagcctggcagagctttaaaaaattgatacctgggtcctattccataacaactaaatcaaaatcacccttttttttttttttgtaaagctttccaggtggttctaaaggacacctagggtcaataacccattataaaatgatctgattacactggacactcttaggaagtatcaaaatagaacagttcaatttgcagctacttaatgattaattacatttcttaggttttttttttgttttttttttggtttgtttgttttttgttttaaaagagacaggatcttgctttgtctcccaggctggaacacagtggtgtgatcatagctcactgcagcctgaaactccttggcttccacctcagcctcccaaagcattaggattataggcgtgagccactgcacctggccaagtaatttcttttaggaataaaaggtacttggcattccttatttgggaagtaattacagtcttatctttttttttcttttttcttttttttaataaaatctaccagtaatttaaatgtgagctttttatgtctgtcatcattctgccccctttgcctttaaaacttacaaaaatacgtgtttgttatttgagaaagcatgtttaaaaattgcagatgagaaatattgtcgttaataattatgtactgtcttaatgtgggcacttcatttgttagtataatactagataatagcagcctagttctttaggatttgacgattcaaattttttttttgttttttgtttttgtttttttttgagacagagtcttgctctgttgcccaggctggcgtgcagtggtgtgatctcggctcacttcagcctccgccacctcaaggcagttcaagcaattctcctgcctcagcctcccgagtagctaggactacaggcgtgtgccacctctcccggctaatttttttgtatttttagtagagacggggtttcaccgtgttagccaggatgatctcgatctcctgacctcgtgattcgcccgcctcggcctcccaaagtgctggaattactggcgtgagccaccatgcccagcctcaaatatgtttttaaaaaatatcattgtcctcctcctcttaagatttttttaagttattttgctcaagtacttaagtagtctggctcaagtactttgtttacaattaaaatggatattatagcatttaatagaagaaatggttatggcttatccaaaaagaatgtcagcatgacctggtgtagacttaaaaaactacatgtttgtgaatattttataatgtggaatgatcattgaaatatcaaggattctagtaattgtatttcctgaataaatgtatgtttatgaattttctaacttacattttgttgtgtcctctgccaacaatctggttttataattgttgtctaaagtttgctagtagtgtttcttcaaaggttattccaggtatggttaagtagtgagaaaaatcacttattaattttcaagaactttgagactaatttgtattgactcggttttttaaaataactggcaaatgctatgcttctacttttaaaatttgtggtaatacccagaatggatgtaaaataacatttttcaatagattacttcatttatcaatttaattctgattttaaggcttatttaaaataaatttgtatgagttatgtcctcgttctttggatttgaaaaaagttgatataactacacaatagataacgtttatgaaaggtatgtataaaaaaacataattcctggtggctgctgaaatgaaactttgaatttctatattttgctttgtctttcataaaatttaaagaaaacattttcttgtgttatttcaagagcggcagtatgacgtgattgagagcacag

SEQ ID NO: 64724 - DNA, 1024 bp, Homo sapiens
ggtaaatttttattgactagtttctgacaatattgctagcttttctgaagcagtacaatgttcatgtatcggtcacatttgagtcacagtcctttccgatgacatttggtattttgtgttcaatttgcctgtgtttctccaaggtcttattttatgcttctgtaatctcagtagtttttcctatctactgtaaaatttagtgttcttacattttacattctcaccctccatgtgtgtacacacacacagtctccttcccaccaaatgtgcaaattcaatgctttttttcccctcgattgtctgtatattatttgcccttgaggaatgaatcctaactgccccactgttacataggcattgagaaaacccttggagaaaattatctgtgtgtgtgtttaactctagatatttgtagagcaattgaattattggaaaaactacaaaggagtggagaagtaccaccacagaaacttcaggctttgcaaagagtccttcaaagtgaattctgcaatgctgtgagagaggtgagtaaacatcattaaaatttacaaaaatttgagttaattaggtcagataatactctaaatttgggttcaacatttcttaagaaaaactttagaaaacattaaaaccagtccctctcatttttggaatttctgataaaaccattttataaagatgcataactttgcctgaaattttaacttcacagagaactcaagcatggtatattctgagatataactttggcttttacaggtatatgaacatgtctatgagactgtggacatcagtagcagtcctgaagtgagagcgaacgctactgcaaaggtaaatttttttgttttccaaaagtaagaattcttcataaattagaagtttaaaatatggagttattaaattcataataaacttactttgaagactaacatgtatctttcaagctacaccaaatttctcaagtactaagaaataagacatttgtttctattgcctttacataaatgctgcatgataaatagct

SEQ ID NO: 64725 - DNA, 1047 bp, Homo sapiens
tagagctagtctttcacagtaccatctgaatacctctttgaaagaaggaagactttacgtagtgtagatttgttttgtgttgtttgaaaatattatctttgtaattatttttaatatgtaaggaatgcttggaatatctgctgtatgtcaactttatgcagcttccttttgagggacaaatttaaaacaaacaaccccccatcacaaacttaaaggattgcaagggccagatctgttaagtggtttcataggagacacatccagcaattgtgtggtcagtggctcttttacccaataagatacatcacagtcacatgcttgatggtttatgttgacctaagatttattttgttaaaatctctctctgttgtgttcgttcttgttctgttttgttttgttttttaaagtcttgctgtggtctctttgtggcagaagtgtttcatgcatggcagcaggcctgttgcttttttatggcgattcccattgaaaatgtaagtaaatgtctgtggccttgttctctctatggtaaagatattattcaccatgtaaaacaaaaaacaatatttattgtattttagtatatttatataattatgttattgaaaaaaattggcattaaaacttaaccgcatcagaagcctattgtaaatacaagttctatttaagtgtactaattaacatataatatatgttttaaatatagaatttttaatgtttttaaatatattttcaaagtacataaaatctgggggttctgggtttttttctctttactgtaaaacaaacatgaaaacgtgttttattataaatacgtgtgttccttgctttaagactaatctgactagttttagtaattaaacagccctccagagaggatacttatttgaaagcctgggaggccaatcctgcagtctgtgagcttctgagaagttgtaggattggatctgtcttccatggtggaagatgggagtgtcattttctcggacacttgaaagttttacccctttgaagtgatatactttcatcagataccaaaccatgtatcct

SEQ ID NO: 64726 - DNA, 1047 bp, Homo sapiens
agactcttcacttactcttcctgtgtcatggaatgcctgctcttggagccctggaccaccatgtaaaaagtccaactaccctgctggagatgcaatgtgaagcagtgatgagattacatggagagagtgaaaggcccaactgagcccagccttccactttgccctgctgagatgctgggcatgtgagtacaactcacttggacactccagaccagaccagccaccagctgaaggtcactaagtgactccagtcagtgccatgtgaaatgaaagaattgcctagccaagacctgccagaattcttattcatcagctataatatggttgttgagtaagccactaagttttgttacagtgcttgttaacgtgttacaatgatgtaataaaagtttctgaactgatttactagacatttgtgaccacattaattctgtacaggctcattcttaccaggtcttgttttgtgctcacggagaaagtaaggtgccattatgaagggattggggtttggactgagatttggattcaggtaagctctgccattaacaagtcacttggtttcttcagacaaataatttgacatctctgagtctcactttccttatctgtaaaatagggataatcacacctgctgtgtggagttttgtgaggacttaatgtgttaattagatattttattgctaggcagatagcatcctataaatggtaaccactctcactgcaatagtgatgccactgctgctgctgataatcatgatgaaaccaggtcatcttgcctatgactgccagtggagttggatgaaatgccccttccaaacaagcagccctcctcggtctgccagaaggctaaaatctcaccattggctttttcaagttatggcatttcagtttaaggactcgatatcctttaaatttccagttacacctggcaaggttaacacaggcaaaaacattacaaactggaaacagaacagcaaagtgaaaaaaagcatgtgatttaaaaaattttagaactagttttggttacaagtccttccagatctaaac

SEQ ID NO: 64727 - DNA, 3572 bp, Homo sapiens
aaaagattactagctataatttttaaaatttaaaagcctaaaacaattaattttgattacatttaaaattctatatggcaaaaataccataattaaagataaaaggcaaagaacaaattgggaaaaatatttttcaacatatataaccaagggctaatttctctaacacctaaaaagttcttataaatcaataaaaagaaaaccaacatctcaatggaaaaagaacaaagctcataaagagttcacagaaaaaggatatacaaatggctttaaacatgtgaaagaatgttcaacttcactcacaataagaaaaaatacaaattatgagttgcttcagcatcctggtgttgctgtgccgtgggtcctgtgcggtcacttagccaagatgcctgaggaaacccagacccaagaccaaccgatggaggaggaggaggttgagacattcgcctttcaggcagaaattgcccagttgatgtcattgatcatcaatactttctactcgaacaaagagatctttctgagagagctcatttcaaattcatcagatgcattggacaaaatctggtatgaaagcttgacagatcccagtaaattagactctgggaaagagctgcatattaaccttataccaaacaaacaagatcaaactctcactattgtggatactggaattggaatgaccaaggctgacttgatcaataaccttggtactatcgccaagtctgggaccaaagcgttcatggaagctttgcaggctggtgcagatatctctatgattggccagttcggtgttagtttttattctgcttatttggttgctgagaaagtaactgtgatcaccaaacataatgatgatgagcagtacgcctgggagtcctcagcagggggatcattcacagtgaggacagacacaggtgaacgtatgggtcgtggaacaaaggttatcctacacctgaaagaagaccaaactgagtacttggaggaacaaagaataaaggagattgtgaagaaacattctcagcttattggatatcccattactctttttgtggagaaggaatgtgataaagaagtcagcgacgatgagactgaagaaaaggaagacaaagaagaagaaaaagaaaaagaagagaaagagtccaaagacaaacctgaaattgaagatgttggttctgatgaggaagaagaaaagaaggatggtgacaagaagaagaagaagactaaggaaaagtacatcgaccaagaagaactcaacaaaacaaagcccatctggaccagaaatcccgacgatattactaatgaggagtacggagaattctgcaagaacttgaccaatgactgggaagatcacttggcagtgaagcatttttcagttgaaggacagttggaattcagagcccttctatttgtcccatgacgtgctccttttgacctgtttgaaaacagaaagaaaaagaacaacatcaaattgtatgtacgcagagatttcatcatggataactgtgaggagctaatccctgaatatctgaacttcattagaggggtggtagactcggaggatctccctctaaacatttcccgtgagatgttgcaacaaagtaaaattttgaaagttatcaggaaaaatttggtcaaaaaatgcttagaactctttacagaactggcggaagataaagagaactgcaagaaattctatgagcagttctctaaaaacataaagcttggaatacaagaagactctcaaaatcggaagaagctttcagagctgttaaggtactacacgtctgcctctggtgatgagatggtttctctcaaggactactgcaccagaatgaaggaaaaacagaaacatatctattatatcacaggtgagaccaaggaccaggtagctaactcagcctttgtggaacgtcttgggaaacatggcttagaagtgatctatatgattgagcccattgatgagtactgtgtccaacagctgaaggaatttgaggggaagactttagtgccagtcaccaaagaaggcctggaacttccagaggatgaagaaaagaaaaagaaataggaagagaaaaaacaatgtttgagaacctctgcaaaaccatgaaagacatattggagaaaaaagttgaaaaggtggttgtgtcaaaccgattggtgacgtctccatgctgtattgtcacaagcacatatggctggacagaaaacatggagagaatcatgaaagctcaagccctaagagacaactcaacaatgggttatatggcagccaagaaacacctggagataaatcctgatgattccattattgagaccttaaggcaaaaggcagaggctgataagaatgacaagtctgtgaaggatctgctcatcttgctttacgaaactgcactcctgtcttctggcttcagtctggaagatccccagacacatgctaacaggacctacaggatgatcaaacttggtctgggtattgatgaagatgatcctgctgctgatgataccagtgctgctgtaactgaagaaatgccgcccctcgaaggagatgacgacacatcatgcatggaagaagtagactaacctctggctaagggatgacttaactgttcaatactctacaattcctccgataatatatattcaaggatgtttttctttatttttgttaatattaaaaagtctgtacggcatgacaacaactactttaaggggaagataagatttctgtctactaagtgatgctgtgataccttaggcactaaagcagagctagtaatgctttttgagtttcacgtcggtttattttcacagattggggtaacgtgcgttgtaagatgtatgtaacatgatgttaactttgtggtctaaagtgtttagctgtcaagccggattcctaagtagaccaaatcttgttatcgaagtgttcctgagctataccttgatgtttagaaaagtatttgttacatcttgtaggatctactttttgaacttttcatcccctatagttgacaattctgcatgtactagtcctctagaaataggttaaactgaagcaacttgatggaaggatctctccacagggcttgttttccaaagaaaagtattgtttggaggagcaaagttataagcctacctaagcatatcataaagctgtttaaaaataactcagacccggtcttgtggatggaaatgtagtgctcgagtcacattcttcttatagttgtaacaaatacagatgagttaaaagaaaaaaaaagaaaaaatacaaattatggctacactgaagaaaacattgttcacctaccattttggcaaagctccaaaaatttgatatgggactcacacacttcatatatatataccttaaagtgtctgtatttttgctgtgttgccccattcttttcaagatggtaaaggcatgcaccttggagtcaaacagacatgagtttaaattctgattgtgctgctcccagcttgtcattttgggtaaatgatatcatttctttaagcctcagttttcctcatctgcagaatggataagacagttttgtgggtctgttttggacagcaaa

SEQ ID NO: 64728 - DNA, 1048 bp, Homo sapiens
gtttatcaataccctttcaaaaatatatttaaaatctttgaaagaagacccatcttaaagctaagtttacccaagtactttcagcaagcagaaaaatgaaactctttgttttcttcttttgtgttctaaaaaaataaaatttcaaaagaaaaggttgtcttttaagttttttaaatatttgttgccttttaaaatccctgagtgtaagttaccatggtggcagcttagttttactatgccacaacaagttgactaggacattttagtaaatggtagtgagttaaattatctttattattttttaaaaataagaatttagaagtggtaaaattatggcccaagatgtatttggttctctattatgttttgatacattattttaatcatatatatgactttccttttcaaaaatactttaatgtacaagtgtaaatatatgtgcccataaaatcattgtaaatattatttagtcatcacaaataaaatattgtcccttgctacttgatatattaaagatgtagattttaaagtgtttcattttcttgtctcattactacccctttcatactctaaaccagtggtccccaacctttttggcaccagggactggttttgtgaaagacaaaacctcagactgagagtagggggtggtttcaggatgattcaaacacattacatttattgtgcattttatttctattattattacattatatattacatatataattaaataattatataactcaccataatgtagaatcattgggagccctgagcttgttttcttgcagctagacggtcccatcttggggtaataggagacagtcacagatcatcaggcattacgttctcatagggagtgtacaacttagatccctcacatgcacagttcacaataggggtcacactcctatgagaatctaatgccactgctgatctgatacgtggcagagctcaggtggtaatgccagcaatgggagcggccacctaccactcgcttcctgctctgcagcctggttcctaacagaccacggttgggaacccc

SEQ ID NO: 64729 - DNA, 2050 bp, Homo sapiens
tatcaattggcataaaaataccttattattagggtttcttagttttaaaagtaatgggggttatttaaaaaactaggaaacattatcgagtgtctttttttatttttttgaataggctcatcttcaggtggaactaatctggttaagattcctacagaaaaaagaactcggagaaaactaatgccatctcccttgaaaggacagcatactctaaagtctccaccatctcaaagtgtgcagctcaatgattctcttagcaaagaacttcagcctattgtatatacaccagaagactgtagaaaagcttttcaaaatccgtctacagtaaccttaatgaaaccatcatcatttactacaagttttcaggctatcagctcaaacataaacagtgataattgtctgaaaatgttgtgtgaagtagctatccctcataatagaagaaaagaatgtggacaggaggacttggactctacatttactatatgtgaagacatcaagagctcgaagtgtaaattacccgaacaagaatcactaccaaatgataacaaagacattttacaacggtacaaaaaaataatatttgccaattctttttttttaacatagactttcaactattagttgaggtttatttcataaaccaagtgtgccattttgattataaaacagtctgttttattttcattaaattttaattatctttctctctgaatattaattcactaacaaaatattttaaagtcttaaatttgatatcttaagtcagttgaccgtcgttagtctaggagagaccttaagatatgtttagtttgttcttcttactctgaaggtggattatacaagctattgttggaggattatcatgtttattattcattaatattttcactgaaggaaatttcacactttctattgatgtttagcaaacctcaacttactctgaaatggtcatacccctaaagtatggttgaatgtgtgtcatccaagcaaacatatccttctcactttatctgcataatcatacccaatctaaatatggaaagaaaaataccttcactattctatgccactgggaatgcagaaatctcttgatagcaactttacctgtgttataaagagaaaagaataccccaggacaagcaagggaatctttacagtatagcagaatgtttttctttatatattaataccaaatggttttctaattatggacacatttgcttccttttctcttcatagttcaaatcaaaattattattttttatttgtcactattaatatacaggcttgatccttcttcattctcaactaagcattctatgcctgtaccaagcatggtgccatcctacatggcaatgactactgctgccaaaaggaaacggaaattaacaaggtatgattaaacataaactggtttggttctgtagttatataagataatctttatatattatatgctattgcttttttattttttataattagactctcaattcatgtttaagcatacttaggataaatttctctgaatggggtactggatttatattatcaaagggagatcttgaaaaactcaagtatttcacttgatattttataaaatatttcatattacagacttaaaaataaattgaaaagttttctgtcaaaaactacttaattttaacttttctggggtgacaatttttacttatttcgttatttctacttacttcattatcctttttaaacattaccaaatttcttccatcatagaattatgttattttaatggattaagatatatgactaaaatataatgagtgaagagacttttatttctgcctaagacagtgtagcttgtatcagaccaagctacctatcaagaacagttgtaaaaagtgcataaaatagaaccaacagctgcttgaaggcaatggagaacaaccatgatagccaggatggagagcctgagatcccagagaaaagagaaacatgctatagacagctagactttctctgcctctgttttttatttagcatttgccaatttatggcataaggcatagag

SEQ ID NO: 64730 - DNA, 1381 bp, Homo sapiens
ttcagatacttccttctttattaaatcttccttttaatggatcatctttcctttgcctgcatatattcatctgtattcccatggcttttaagttttttattcctttcactagtgttttaaccttgttactgtcttagcaataaatatttgtttattttaatttggaaaaaagtgaagccaaaagaaacaagatatactttattaacttatattagtatttagttttaatagcctactgaactttttttctaagcatacatttgtggtttgcttttttaaaacaagaacagtggaatctattatatatatatagttgataaccagcctctttttcactgaactacttgctgtagacacattttgctatcaacgaatatgaatttaagtcatttttaatagctgcatattatatttgcctaatctcctgctaattaacatttagtttgttttcactttattattacaagcgacaccccattaaatgtctgtgcatgtgtatttattttgcaacttgcctaattatttccttaggctaagcccttagaagaagaatagcttaatcaaacagtatgtatactttaaaggcattagatatgcattgtcagattccccacccccagaactattataagtgtagtctaccattgtaagtgggtaatgaaggtgaaggtgaacattttttcatgtgctttttgtctagttatagtttgttctgaattaactgcctcttcctttgccttattttgctcttatccattttgttttgtaagaattatttctctcagagacagaccagccaacctatatacacatgtatacatagacatacatacatacacatacacgagctctaaatcctttgccaaatgtgttacatgtatttttttctctcttattcatggttggttttgatttttatgtaacccaattttaagttatgaagatattcatattttatttgcctactttctcttttcagtaataataggaaatagcatttcattttgggagcaatgaagtagtatgttgcctcctattcatatttttgagtctgtgaagaaagttttatttttttaagtctccattatgtttattatatatgttattactctgtattacttgcattactttttacctgacttctacctggaaaataagaaacatgactccaactctggcaacaacaaatataattgctatcatgactttgagaatgtcattttcttgctgtgagcaacaaattataaaataatgaagtttaaataaacactaaaaccatctagtactaaattctggttgtttgtataagatgatccccattgtaactttcctggtggccagtagttaggaccactcttttaaagtagagattcagtgaaaa

SEQ ID NO: 64731 - DNA, 1561 bp, Homo sapiens
ataaaagatactaggagaaccagtctcttaacatagtaccaatattctgattgaatatagagttcacacataagtttaagtttcccctaaaattacttgaatacaaggaaatttcatttgaaagataggaaatctctatactaatttctcatataacaaatataaagcaggaaaatgttaataaaccaaatcttccatattttttccatttggcaacaaaatttaatcatgaaacaatggaaatcatgcttgtatccctaaatacattttgtttgacttatcatccccatgtacataagacagtatttagttattcatctatagctgcaaatattactgtgaattaaaaggttctttgtattgtcccttcttttccatctttggtaagtgtaaatactgagaaaatgaaactgagagagaaacatgatatctgctatttcccacagaaaaaatatcaaaaggttatgggttgatttattattcaaagtgctggattaatttaaaggactataatagttccctatgtattaggacaatagttccctatgtattagggaactattatacatccctaaccatgagagtgtctcataagtgtattataaaatgtttattagtttggttaatttagtggtaccttatcttatatttggttaatttaatggtactttatcttataagataagtttacgtatcttataaatagttaaaattcatttacctgtatcatttgcaactatgaattccatgagtcataaggctgttaaaaagaatccagatttatgatgagtacactaattgtatcaatcatttgtagcctagaagtttttattgaaatgtatacattaatatttgatttcactttagaactttgccaactaattttgatttagcacagtttcccagaatttctcctcacgtacatattaacaggagtgcttgcttgcaaaggaagaatccttgccatcgttttgtaccaaacctcaattagatctaatcccattcatcaatgtctccctgtcatgaaccctactttgcagcctatgactcatgtttgctaaataccgcattcttcctttacaataacatacagctctataaatctcttaacgtttacagtcttaaacttttgataaattacttcctctgggtaaaatcattcagaacacatgatatggcacatcaaaagatgaccccaaaagccctgcccatttttaagagagggattttaaacccattagtgataaattatctagtctctttattttatgtaaaggaaccatctgtgaaatatttccaaaagctgaaaaataaatataaagccccctctacttaagaaaccacatgaattgccatttagcaattatgttttagagatttatttaaaacaaagagagaaaaagatgtttcttaatttattttaaaatatttttagaaaatttggcataagaaatgaataatatagtgacatctaaactagttttaatttctcttgtctctttccactgcagtctacacttcacactgccaacaaagtgatcttcctaataaagtgtagacc

SEQ ID NO: 64732 - DNA, 1474 bp, Homo sapiens
ttttaattgaagagtcttttttctgtgaattgcccagccatcctttgacatttttctgatatagtcatctttagtaacaatcgttacttttttacaagatcttaagtgtaggttttttttcattcattcaacagtgtttaacttacagcagtatttcaggcacttgtctgatgatagggatcaaagtatgaaacaaactccaccaccctcaaggagctcacttctagtagagaaagacaataatatagtaaataaattaaacagaatgctaggaggtactacatgctataagaaagaaataaagggagttcaggagtgtggccagggaggagagagattgctattttcagtagcatggtcagggaggatctcactgataaaacttgaaggacttcacaggactagctatatgaatatctgggagaagaaacttttttaggtagagggacacaatcacagtgcaaaatctctaacataggaatttgcctgacatattcaaaggctggtgaggatatataactggtacaaagaaaaagagaatgaaagtagtgaggagatcagagagataaagggaaggaaggcagatcacatagggccttgtaggttactatcaggacttaattagtcttttactctgaataaaacaaggagccatgacatggtctgagcagaaatgtaacatacctcaattgtgctcttaaaagatctctctgactgctgtggtgagaatagattatactatggcaagggctgaaacatgaggaggcactagaataacccaggcaaaagatggaggttattcagaccaggataatagcattggagctggtgagaagtggtcagattctaaaatgttttgaaggtagagccagcaagatttccaagaaaattagatttggaataggagagaaagaaatgcttaagactgaatctaaaattttggaacttagcatctaaaagaattgagtcaccttcagagagataaggaagacttcagatggagcaggtatacagggtggaggttgtagaaaattaggagttcagttctaggcatgttaaatttgtctaagatacatccaagtggagacatcatgtaggcagttaagaatctgaagttcaggagagaagtctaagctaaaacataaattcgagagttgttaacatttagatgatatttaaagccataggacaggatgaaatcactaagggatattaactttttcctgtaatatacatagtataactatacccttcaagatttgccacttattcttgcttttgtttgaggtttcctttttaatgctgaaagttaaaacatttatgtagtaaaatagcttttttctctctcttactgccttcgggatctttcctcaaaaggcctttccattcataagcttttaaatttttgtttccactttctcctaatttatgttggtgttaaatgataggcaagaatctaaatttattttttcca

SEQ ID NO: 64733 - DNA, 1031 bp, Homo sapiens
accattgcacttcagcctaggcaacaaagcaagactctgtctcaaaaaaaaaaaaaaaatctgatgagattaactataatgaatatagtctatattgttgggcatttgggttgtttaataaattttcactattattgccaataatgttttagtaagcaaatatgtatatttatctttgtgctcatatctgactatccctacaataaattcttagaagtaaaatttctggctcaagataaatgcccattatgcaaaatttgaaatatatattgccaaataactctcctccttcaagtgatttaacccccatcaagcagtataaatgaaggagctttttttttttttttagcctcaccagcttttgatgttaaaatatttttaatttctacctttagtaaatcaattacaaacatgtatataagcacaaagaatactatgagtaccatgtgcccaacacctaactttaaaacttatcagctcatgtctagtcttgaaaacccatctgctttcctccaccccagctcttacactagattattttaaagtagatctcggagaacacatggacacaggaaggggaacatcatacactggggcctgttatggggtgggggaaaggggggagggatagcattaggaggtatacctaatgttaaatgacaagttaatgggtgcagcacaccaacatggcacatgtatacatatgtaactaacctgcacgttgtgcacatgtaccctaaaacttaaagtataattaaaaaataaataaataataaaattaaaaaaagattaggattcatttagttgtagcttgcaggccaaagctgattcactatctgttttttatgtcccatgtgccaagattttttttttcacatttgtatatgactggaaaaaattagaaaaatattttgtgacacctgataattataaaacattcaaatttcagtgttaataaataaagttttatttcaaaaaacaaaacaaaaaaaagtagatctcagacagcacatcatttcttccatttacat

SEQ ID NO: 64734 - DNA, 1347 bp, Homo sapiens
gcctaggctagagtgcagtggcacaatcatgcagtcatggctcactgcactgcagcctcaacctcccggactcaagtgatgctcccacatcagcccctccaccccaccaagtagctggaactacaggcacatgccacgaaaccagcctaaatttattttttaatttttgtgtggagacacggtctctctatgttgtccaggatggtcttgcacttctggcctcaagcagtcctcctgcctcagcctcccaaagtgctagaattactggcatgagccaccatcccagcctgcattgtagcattctgtcacaattctcatcctagcgctgtggtcagtttgatgggttacattttgttttgttttctcttcttgactatccaggtttttgtttctttgagacatttgttttgtttttgttactgtcttactgtgacagacagagactaggatattataattaaccagagaagccataaaaaagagtcaggaaccttagtgagaatgacggtggctatcaactatttttcccttatctatgactctagcctgaaatggaatctgcttctctctgactcttgtatttcccttgaggggaaggtaagtaaaattttatgaatatctaagatttggttatgacttcatgatagccacctttgcctgaccttaaatcatttataagctcatatcctctatccagatgaagataaccatatttttctattatatgcccaagtctcaatagtacatcttttgtcaaaattaagagatatttatctcccaaagagggggagttcttcgaccaaattcaaatctagtttctgctcttcttttttttgatttcctgcttccagaaccagctgcaaatgcttattttaacctttggggatccactgtttcaggtctacccatcctatctgataattattgactttagtgtctgtgggcaaataccccagagacgtcaagatgttctggcccattgttttcatgatagtgtgcaagacccttagggtaagaaatcaaagactaattttaatttcaatttgtgcctaggtaaaacaccaaaaatattttgaatactcattatggctcctgaaccaagctacaggcaagatcagatactgataagcactctgatataagctcttttttctgtgatttatatcagccaatttgaggccttataggcaaacacagaacaatagaacacattatttcttcacatcaaagacaagagcaatatatgcatctgctttgattttgagtaaggagatcatggaatgtatctgaccttgtatgaacttttcaaatgaaacatactgaagggactgtactttaacgccaaaa

SEQ ID NO: 64735 - DNA, 1077 bp, Homo sapiens
cttaatgggaaacatttcactctaatgtcagggtttaacatgcatattttagaatgtattcccaaacacttacttgccattttagagcaatgggtggtggtagtattctgatggaaaatgtcctctgagaaccatcacagaggatacatttgatggacattagaagtaaaaagtcataaatggactttttgaggtttcatttaggattttctgatattaaatattgctgccaccagacccacatgccctggtttctaagagtccctacgactgtaaatgctaaagcaaaataaagatgatttaattagctgcctgccttcagttaggtacaatattttcatcttcatttttcagacgaagtaactgaagacccactaaaatctgtttgcctaaatttttacatctgctgaatagcagagaaaagtcaataggtcacacctcccaccttctgttatagcagtggctctaaacttcaagtttcaggacccctttctgcttttaaaaattatttaggacttcaaagagcttttgtttatatgtattccctctaccaatatttctatattagaaattaaaacagatttataaaaatatatttatgcattgattcattttaaaataaataatattaaataatagcttaattgtaaataataaaaattatattaataaaatataataaatagcaataaattataaataattaaatgttaaataataattaaaataaaaattatgtgtggttacataaataattttattttctcaaaaatagtgaaaatagaagagtggcgttgttttacatgtttgcaaatttctttaatgcctggcttttcatatcagctctattctcataactgctgaattgttattctgttgtgatgttacacatcatttagcctctagaaaactactgtgcaactaactgtatgagcaaacaagaattttaaaagactaataacattttcctgatattataaaaatggttttgatagttttaaccttgtgaactctctgaaaggatctcaggaatccttaggggtccctgtaccatgcttgggtaacctttgcatgata

SEQ ID NO: 64736 - DNA, 1064 bp, Homo sapiens
acagataaaaggaagaatctgcagtattttctgtctatcagagctatttggaaaggtaattctcaaaaggaaatcataaaaagaaaacacaattgttcttttataaagagtaattataaaacttcacttatgactataccaagaaaattgtggagtttaatactcatgtattacctaaaaatattggtgcagatacttttaacttgaatgtttgcttagaactctttcagttttaaaacgatagctttttttggtgttgttaaggagctctctagaaacctttgataccaattcccttcctttcatcctaatcagtgaacaccaccacctaaaataagtctagatcacaaaattgacaaatattaactttgtccttgaataaaaagttatagaaaaactaagaaattatctctttaagtataacctaaagataacttatcaattcatttactggcattaccgttggtgtaatataatgcaatgaaatcacagtgtctgtacatatttcctatgaaatatttatcagtttgacaaaactgcagtaaagtcagtgttttgtggcttatattcattcccaatagagtttcattaagagctactgacgtaaattggcagtgtttttaccgctgatccttatgagtatatctaaaattctggccagtttagaacattttttttaaatgcatgtacttgattttactttattttaaagtcttcactgttatgaatgtttatactgttactgtagctcagagctgatctatgacttaaaaccatgaatatattttaaaaaattaaaatattactgtgaccagtgttctactgacccagaaggatacaggattgcaggttccatccagagttttcataaaatttaatcagcttgaagtctgtggccatttggaaatatgaatcaaactcctcatctttgatattctagacctacattgcccttaggaggaagcacactgcagcagcttttctaggtttaccacattataaacttggatgttttaagtcctggaagtgtcagttgattcttagccaggctgtagggggtacct

SEQ ID NO: 64737 - DNA, 1349 bp, Homo sapiens
gcctattatttcatctgtaaaataggtataaagcttattttttaaaaagtcttttctacataatttatagtccacattcatgatgttgatgtaccaatctctgtatttctccagaaatataataataataattggttacattagtatttttgccaaagatgtgttgtacttaaaaacatgtatatcaaaatatgtatgtttaaattataatatatcggggttgaaaaaacctagagttaagctgttgtgatgactcctcctcttctccctttcccctctgccactctccttaagtgtctgaagatgagcatgttattgtcatcttaagaaaaatgttcccaggctcattatataattaattgtaaaaggtcatactatatgggtgtacagaaaggtttgtaacacatgattttcatgtagcccttacactagccccttgaggaatgaattcttagctccactttacagatgagtaacccaaacatcaaacagttcgaattctaagtcaggttaagtgagaagtaggcaaggtctcaatatcaagtatttggatttatatgtttaatatcctctctactataccataaatgtcaaggggcccatactatgataaaaatgttaaaatatagtaagaactcagtgaaaaccaactgaattcctgaaagggtagcatgaaaaactatctctgcattacttagaagtcaaaggagtaagaaagtagggaattttattatattgcaattacatgcttataaataccttttctcaataaagtaatttctttataatttcatttacattattaatgtgctcagcagatcctcttgtcatagattttaaatgtgagcataattatcacaaattctgaattcatggaactcaatgaaaatgcaatgtcatgttattcatgtatttatctctgtgattattatctctctataaacaatcataatttctatctttcaacagttgaagagcaatgttcttaatgtcaataatcatataactcaatatgtaaagatctgtaatgagcagaaggcagaggtatgtctgtttatatttttatgctagtcttgcgcagttcttcatttatagaattttataatcttaattgtccaaaaatttaacatatttttctattaaaattaaaatctggttaattcagttattttttacagctaaatttggctgtggccatgtaaatgacttcttttgtattttaactagtgatttctctctactagattttattgttaaaagaaaaactaaaagcctatgaagaacagaaagccttcactaatgaaaatgaccaagcaaagttaatgatttcaaaccctcaggaaaaagaa

SEQ ID NO: 64738 - DNA, 1004 bp, Homo sapiens
atagtgctcttaaatatcaattagattataccttgttcagttgttttttaaaatgaaaataattttgattttgtgctctattaaagtatatatttcccttttaattttgttaaatcttatcctcatttttttctattttgtaatttcaaaaagatttacttgcgacaacaagacaaaacagcaagtatcaatcaaaatgtccgtattgccaagatgtcactcattgacctggcaggatctgagcgagcaagtacttccggtgctaaggggacccgatttgtagaaggcacaaatattaatagatcacttttagctcttgggaatgtcatcaatgccttagcagattcaaaggtaggcattatatgtttatttgttaaatagtttgaaatattgaaatagataagaaagatactatttaatatgattttgttttaaaggtctgatatatatcacatttcaagggtatatcagtaatgttaatatatagatcaaagacctcagaaaacctagtgtattaaactgatttttatttcttttttaatttccagttttataatgagaattggttaaatagaaagtaatgaataccagattgatagttaatattttatggtacattctcatcacttattttgaacttggtttttaaagtgatcactacacagcaaacatgttaattaaattggcatgaagacaaactaaccatatttttaaaaactaaattctgttgtttagtattttatatattataaaatagggttaagtattaaagagtgttgatttttttttaaggggggtttaagttataaaatgtcatgaaatcacctaataaggtaatgtttactagatgcttctgggcatatttaaatatagtttacatataccatatgccagaagtgcttacctagaacacagtgtatttcacaacatagatatttgtaaaaatgacatcctttcaaaaaaattataatatggcaatttaagttaaaccatactcgaaagct

SEQ ID NO: 64739 - DNA, 1027 bp, Homo sapiens
aaaaatatttcttcatattatcattttactacttttaagggtttattacattctaatgcctatcattcattgtagagaattgtaccagcaatgaattatcactatgagctacttattagaacacagaaggaaataacacaaaataattttttagagactaaattttgttattttttttcttaaatcttgtcagtaatagttgtaattgtcatttggttagcaagtaataaactttatacctttaataaattcataaaatcgggtcactagtactacatagaaatgtgtgttacttataaaaattactttttaaaaaatggccagagatataaactacagatatgtattcagtatgatgcagtagagtgaagctgtctaggctccagttcctactctgctaatacctttatgaccatggacaaatcatttaacctctcagagtcttagttccctcatcattcaaatgggtctccttttgaaatttattattagtaattatatgtcaaaattaatgtaattgaaggataaccgaaacaaataccacctgtccttggtatgggttttctgtaacatttaagctctaaaatttcaaaagtttggactacttggacattgtgaaataatagatatcttccacagtaagaaccatgccatctccatacaacctgcatttcccagagtttcccagtaccgtgtgttccatacatttcctgaaaataagaaaatgggccgggcgcggtggctcacgcctgtaatcccagcactttgggaggccgaggtgggcggatcacgaggtcagaagatcaagaccatcctggctaacatggtgaaaccctgtctccactaaaaatacaaaaaattagccaggcgtggtggcaggcgccagtagtcccagctactggggaggctgaggcagcagaatggtgagaacccgggaggcggagcttgcagtgagccgagattgcgccactgtactccagcctgggagacagcgagactccgtctcaaaaaaaaagaaaagaagaaa

SEQ ID NO: 64740 - DNA, 1746 bp, Homo sapiens
cttgcagccaagatcacttttactaaaaatagttcacaagctaaggctctccaatcataccttgatatggttctgggagatccttttctattcattcccatgacctaagctgaaatagtgctggagggcttgtgaaaatcaaatctgggttttaggatagcatatctgtgattatatatggttcagctatagtatttgagtttaagccaaatatcctactaatatttcaggtaaagagatttttatcgtagttgtgtgtacgtatgtgccatttaattgtttgttttagggtacttaagtgcatatgtgtgtatgtgtgcatatatttgtgtgtgtgtgttgtgtgtgcctacgtatgtatgtatttttcccccagtgtttacctagtgagtgaaacagaattattaacatcttttttgaatgaatactacatgccagttgttttgcatgaaagtaaaaactgatattaaaactttattttcttttttaatttcagagaagtattcaagtatttatacagataggaatcaagataatcaacaatgtctgtcactgaggaagacctgtgccaccatatgaaagtagtagttcgtgtacgtccggaaaacactaaagaaaaagcagctggatttcataaagtggttcatgttgtggataaacatatcctagtttttgatcccaaacaagaagaagtcagttttttccatggaaagaaaactacaaatcaaaatgttataaagaaacaaaataaggatcttaaatttgtatttgatgctgtttttgatgaaacgtcaactcagtcagaagtttttgaacacactactaagccaattcttcgtagttttttgaatggatataattgcacaggtatttgtttcaatttgggatttaatttctctatccgatttcacttttgcattaggacggacatctacttgacccttctaaatataatcaaatttaaggagcttgtatgctaaaaattcttaagaaattcaatagacttgaactgtaaatatagactttgaaattttagttatcatatataacttatacatcatttgtaaacctttctcttccagggccttactgtggcccctatagacatctgtcctttcagttgcctatgttattaaaccacatgcttattgcaattaacatcagttttctcataacctgtatttataacttttcctacagcttacctatgtaattatctattcctggagagtagtcagacatttctgaacatttgacagtttcttttcagcagtttttcttcatggcacattgaaataaaaatgtttaagttggcgaaggataggaggagactgaggatcaaaaaactacctatggggtactacactccttacctgagtgatgaaaaaatctgtacactaaaccccgcagcatgcaatttacccatgtaacaaacctgcactgtacccccaaacctaaaataaaaattggaaagggggtaaaagtgttaagatcccatgttaattatctcatgccctttagctcattgttagcccaagaagcatctttagtgctttttttggcctttcaagaaagccatgttgatttcctttttaaaaaaaaaaaaagagagagagagagagagatacccaagatgcaaaatggccagtttttcagtgcctaccaggcactaaacaccattattaatatcttatttttgtaattattagtatttatgatattttccccaagacagctcacaactat

SEQ ID NO: 64741 - DNA, 1053 bp, Homo sapiens
aataagtgttataagaaaggcatgctgttcaaattagagaagggaaaacacaagcagatgtatacatgtgagtactggatctttaaagaacagaatatttcaaatttcagttagaatacgttgagctgatggaaaggtctagcaactgactgagagagatgaaggtcactggatttgaggtgtacatattgtcaaagtatgagacattgtgtcagtctacatgcgcagatgttgcattcatggttattctgtttataagtacaaacacttaaacttgaccacttaaatatgacatatggcattgctaaatatgacttgattttctgaagtagagagctattcttggttaagtttcttttgatttatgcaatagttacatttctagaaaattcagtgtatattaattaaatccttataaaaagtactgtgtgatatgaaaaatgacattttgttttaggcttggataattgttgctgccccctctccttcatgaatagacactgtaagtcatggagaccttggatcagtttattttgtagcatgtgctgtgcatttgtgcattgcaggatatccaccattcctgtagctcacccattaagtgctagtggcatcctcccattttttttttttaaattacagtctaaacacattttcagaatgcccccattgagcatttctaggttagaggaaagaaggcacagagcaatatgtcgattagacccaaggagaaagcttctattttgcacagtgaccaatacgatagagatgtgaagcagagaatcacctggcaacagagtttcaagtacgttcctgaaataaaattgccatgaggcaaggtggtaaagttttcttaccatctcaacctcctgtccacatttagcttctttcctcgcaccatctctagcccaggtttacctggtagcctggttatgttaacaccggtggccccagtgagaattcttgactggttttggtaaagtgtgtaatttcagcatactttctaactaaattagcatttttcttcctttctactatacttccaagcattttttt

SEQ ID NO: 64742 - DNA, 1102 bp, Homo sapiens
tgactcgtgttaaaaaccttcaagacaatttcaggcttactgtggtcactttaggtcttggcatttgatcaattgaggaagattttgaaaaaaatatatttctcttaacacactatggtagccagtctacaagatgggttccattgattatcactgcctaataatcatgctcaaatgtagttccctgctgcattgaattaggttgaccagtgtaatccataagatactgcaaaaatgatagtgtgcaacttcaaaggggaagtcataaaataaattttggcttcttccatgctgtcttttggattgcttgctcaaggtgggacagctaccatatcattgtatgcttaagcagcccatggagaggcctatgtagagtggaattgaggctcctaccaacaatcagcacccagtggttgagcagtcttgggaatatatcctctagtcttaaccaagcccgcaaccttgtgaaagagaccccaagttagaatcacctggttaagctgctactgaattcctgatccatagaaaccatgagataatgaatatatatttggtttaagccactaaattttagggtaattttttatgcaggatacagaagtaatatacacagaaataaaggcaaagtttcaactatgttgactgctctaaaggaaaggtatgcattactatacgagtgaccaacagacttcttttttaatatggaggtttgggaaaagcttgtgagctcagattcaaagaacaggaaagatattcctaacggaacaacatgtgaactggccctgttgttgattcaagatttttttgctgcttagctcagcaaggtccatgttcttgtctcatgaccaggaagaaatagccacgtggacattgaagagcgagtaggtgtagtggattttgttaggtgaaaaggaaagctctcagcaaaaagaggggtcctgaaagcaggttgccggttgcccacttcacagttgaataaaagggctttttacatatataccaatggtctgggttccctatttgtataaagcgcaaattcctggtagctccaccccattcccccgtgcgtatgtgggctcttagttggcggtggacatattta

SEQ ID NO: 64743 - DNA, 1064 bp, Homo sapiens
gtgagttattatgaaaaaagtcttattcattccggatggcatgaaaatctcagagccctgcagtaacgactaatttatatgagaaaattgatgacctagccaaatataaaattagcctgtaacaatttctggatagaaatgtttaggaatttggagttagtaaaaaggaatgttcaacctaaagttagcagctttcttacttacaaaatttactgctgagagggttatttgtaaactttgaagcaaaactctagtcaaaatagcatgtttcttgtttagcaaaaggaggcaggaccaaaaaaggataattctcattcattcctttgcttgagaatataagatttggtagggtggaagaataatatgaaaagggagtaattttgccatctcttcaaatttgcttcaaatattcctctagttaatagaaataccagagatctgctctactgagaaacaaatgggaggttagaaagtcacagaaccttagaaaaacaagatatatttcaaaggtgattgaaggaaagctttgtttaaaaggatgaagaaaaatccagatctgatagtgttgatttaagaattatcctttcaccaaaatatctgcagaaatccctgaaattcttctcttacacccccagccacaaataatgcaaggaaaataggggaaaaaaagggctcaaattgacaaggtggttgacctgatatattttattagtgatgcagaaatagcaaagttttgaatgttactgacaagtcaaaggtcactgataacaagagagaagatgctttttctggcaggtaaaaaacagaattgaagatgattttctggacaaagagaaccaactaagagaaggttgatttggcttttgaatcaataattaattttgctgaatcagccatgcacactgcctctggactgttacataggctactctgtgctacttttctgagaaagaagcaaatgatgtaggaaaaacatcatttttttttttaaaaaaaggagagtaacttctaaaacatctacatgaacagacatttttcaaaagaagagatacatgtggccaaag

SEQ ID NO: 64744 - DNA, 1033 bp, Homo sapiens
gacagggatagcatcaggagaaatgcctaatgtagatgactggttgttgggtgcagcaaaccaccatggcacgtgtatacctatgtaacaaacctgcacattctgcacatgtatcccagaacttaaagtttattaataaaagaaaaaagaattactatatcaagcagttgctgaatcaggttcatcacagaggggagtgcaaacccatgccctgaatcaacctcttaaagctatctacaggaatactttgacttcatggtcttagaatttactttacctgagtttaattcttagctttaccactactagctgtgtgaccttgagcaactgttttactccatcattatcaaatatttattgagcacttattctataccctattactaagtaaactaatagaaaattctctaagccaacgtttctataatgataaaaatgtttacattatataatttataggattgtgatacaggtcaaaatatgatcatctctgttaaaatattctgtgaatcataaagtagtatactagtattatttgctgtgagctttatgagaatagggactatgtcttcctttgttaccttattatctaacatagtacctgacacatagaagtattcagaaaatgtctgcagcagactgattttcttaaagatctcaaaagcatccatttgtatttaggatattatttccgaagttaagcttaaaatacacataatttattcttttgattatgtaatggtattcatatatagtttgaattatgtggaacattcctaagggacttactgcaagaaaatgtgttactagataaaatcatttttatatgtgccctattatcagcaggccctattttctacaaggtaatgtagggtttgaattaaaagaaattgttaaaagtttattaaatctactatggccaacaactgttgctatttttgtgcacctagagctgtagttaatcttcagatttttgaataatttatttcaggtgtcacatatatatattgagtggctgaaaatatattttgta

SEQ ID NO: 64745 - DNA, 1064 bp, Homo sapiens
agttgcctttcaatagcaagattctgttatttctgtgtttccaatgctagtattagcattttaattttcccaataagaacagggcaatttgttgattattctgttagtggcacccatcagattattttgtaaactgtttatacatcttttcctctcagctcaaagtacagaaagtcatgctttattaatctttatgtacactccaaataacataatgcctgacccatagcaaatattcatttactttctccattggaattgtatttaaaaattactaatgagctgttgaagttcaccttaaacaacataccatgtaagtaaatatcattaacgtaaattatccaacactgttgaaatccaaactcactctacccacctttagacagagggaatgacatcttgagagcattgcccaattttctcttctcattcaccttccaaaatgcatgctagttgccttaaggcttctgaagaaccataaaggcagcatctcactttgtgtaggaagaagaattagtatagctgcaaggtgatcccaattcctgcctgtctgttggttctgaatgctccattcacttcagaatccctgctgagagataatacattgcttcagcaagaaggcatttattttagtcatagtttcattcctcaagtttatagctgcatagcaccctattctaatttataggaaaaacatggagaaagctaaaatgattggtttgaacatatttgacatcttttttatgatttatattatagtgttgtatttaaattggcttactcgttattcttttgatagaatgacatatgcttttttctctacccagagatttaagaaatttttaagaaaatatgaaagacctggtttgacataggaatttttctaacttatgaatatattgtatcccttcacaaagatatacaataaattgtgtttatcagcagtaataaaattacattaaaccagctctggtgtttgaaacccaagatgtatagtttccatatccatgtctttatacaacactaagcactcaataaatatatatcggttaaatcatgtaata

SEQ ID NO: 64746 - DNA, 1052 bp, Homo sapiens
tgtgtgcattaatcccccagactccctgagggattcatttgtacttgaaatccaggatagaatcttgcctatccttctctaatgtcagctttcttttgcttttgcatgcttctcccccaaaaaacctctcccccaaatacaatttttaaaaaaatatactgtagtttgctaatttgtataatagtagatttttattttacacaggataatttatcatttgtgtctaccaaggtgaaacatggaatgatgagcaaaaggatttcttgatccatcgcagtggttgataagcacctgtataagatctgacattacttctcttagtttcacatttctgcattttaatattttgggcaaaaggagaattgcattgcccaaatgctaaaataaaatacagtgactcatatatctgttctaaacaaccaactaacaaagggtatatgatgtataggttattccactttgtgaatgctaactaaatcagccttaggggcttattgaaacatttcatcttttctgctatttcgctattcaccaccataaacctcttgaacctaactctagctaggaggcgctttattatagcctctctgtttgaagccaaagttgtttcacagctgtgttccgtgatgaaagttttccaaggcaaaaatataactcttgcagttatttaacagaattccaatggtaaaattttcatcttgttgaaccatctgaaaccctgtatcatttttatttaccaaatgtattaagattttttttcagtggttcctattaaattacttaagtaaattttaagaagtttttaaaaaaggaatatttgtgtaacttataaatagaacctgatattggctgtctctttcttaatattatccatagtttaagaagtaaaacttaattataaattcatttagatcattactatttagagatcacatagcaattgttttatgatataattaaataagactatattctacttagttattataatgaaatataaagagctgactagcctttaattttttaagccacatatctcagggccctttgaa

SEQ ID NO: 64747 - DNA, 1030 bp, Homo sapiens
tttctccagaaccattcaagttcacagattttaattaacagtttgaaatttgtaatattacttgaatttcagatgggtgagaatttaacactatattaaaggagcccaggcaaaaggacatgggttgcgtcaccgagacttattaaatgtgatggaaattcaacagccgaatgctggcaaacaggtgcaagagctgaattaatatttaaaccctaccactcagggggaattgcagtgcatcacgttgacagccacagcacgatgctaatttcattcacaagcttaaaaatctcaatacatttaaacacgtgaatgtattaaattttaaaaagtgtaagtagcataagggtatcccagaactaaaaattgcaatttctctctgggacttcaaatcatttatctagccagaagcatggtgctttttatgaatgaagtatatcttactactttcacatacaaattgtgttctattattatatgtagtgcagactgttactaagcaagattttctcttactttatgtgaaattctttgtgagtcataagaaaaccaaggattcactgatagagtttccagcttctgatatcatacatgaaacagggttctcaatcaatgcttccagtgatgctaagtggtagaatatttctggaggtaaagaaaaacaaaactaaatacatacagaagtttttttggggtgatatcattagaagtggtaagttgtaagctaaaaactcagccaactcccaatttgcgtttaccagaaatttacctactgtgggtcacttgttcatttaagaatttgatggaagcagcagagcatctccgcataaaattgcatgtacatgcaaaatcctatgaagatttcagggagttcatgaatttccacattccaaatattgtttatgatacgtcttgatctttatctgggactggaagggtatcccttattgagaggacttttttctttgccacctgctgtgtaccaggccttaaaatggattggggaagtaaaggaaagtaagaaaagatc

SEQ ID NO: 64748 - DNA, 1013 bp, Homo sapiens
ataagtgctatactaggggtaagcacacctcttctcatgtatattggtactaggttaacaaagtccattgatggactataacacacaaaaaggagattttctctcatcaaacctaatgacacaaattgtgattttccatcttacctactctattccttaatcaaatgaattagccatattagactctgtggtgaaactcaggagatgaaaaagcagaacaataagtttctatttctgataacagtatatgggagatgagaaggaggtgaagaagaattgcaaaacagtgagctcctcaagggcggggaccatttttctgtcttattaatatttttctccctgtggcctcattcagagtccagcataagagtaggcattgaatctgttagttttttttttttatcttgtgttcttgattaaatcaggagccagctgttcttacctagtttgtgcattcctaagataactctgttccttgttctctgatcagtgactttcaggagaaaaccatttttccttcctcagaggcacagaacttttattgtctttaagcttaataattcatagaaccttgctaatcctttgtggttggattattttttcttatccatgtgtcccattgccagtcgatgttttgttcttactactttaatttccattatcgcgtgccattttattttaatttttatatattttgagacagagtctcactctgtcgcccaggctggagtgcagtggtgcaatcatggctcactgcagtctcaacctccccagactcagatgatcctcctgcctcagcctctggagtagctgggactacaggcatgcaccaccgtgcctggctaaattgtaggatttttttgtttttgtttttgtttttgttttttggtttttgtttttttgtagagacagggtttcaccatgttgcccaggttggtcttgaactcctgggctcaagccacttgcctgccttagcctcccaaagtgctcccaaatccttccctcctaaagga

SEQ ID NO: 64749 - DNA, 1349 bp, Homo sapiens
acagatgagaaggcaggaatcctggagcaacacacctaagtcagtgtttcaacattaacgtccacttttaaaaactctttactttgaaatcatttctaatgtatagaaaacttgtaagaatagtgcaaagaacttccgtagactctttttcagattaaccagttttaaacattttgtcatatttgtctcatctctgtgtgtgtatgtgtgtgtgtttactacttaatgccttagtttcttttttaagaagaaagattttctcctatataaacatggtatagttatgaaattcaggaaactggacattgatacaacactttaatctatagtccacattttaattttattaattgtttcaataatgccttctataccattttgtaatccagtcttggattgtgcagggtatttagtgttcatgtccctttagtctcctttaaacaggaatatgtcttgtccttacttggttttacatgatattggcatttttgaagattataaaccagttattatatttcattatttttttgagacagggtctcgctctgtcacccaggctggagtgcagtggcatgatcgcgactcactgcagcctcaacctcctgggctcaagcagtcctcccacttaagcctctcaagtagctggaactactgacatgtgccaccatacctggctaattttttatattttttgtagagatgaggttttgccatgttgcccaggcggtctcaaactcctgggctcaagcaatcttcctgcctaggctcccaaagtcctgggattataggcttgaacccccgtgcctggcctggcctgttattttatattgtgtccctgaatttggattttgtagagctcatgttttaaatctgcttttgaataacatgtctcttgcaagagattgcaattagactctctgtccagattgagctgggctcaagaattctcgatatagcaggatatgtggagcatctgtaaccactggacataaagcagctagtgaatgcagggggtgaaggccgtagggtggggtggagacccttgtacctgagccggggtgtaagctcccatcaatggactgacagggaccttgaagggtcaccaaggccatctgcttggacttcagcagaaatgcacatttctactcttctagatgtgccagtctatttttaaagccctccagggaaagtaattctgtgtgtagcttccacactggtgctctcgcctttgctgtgtgaagttttctctgttgatcactaacttcctcaaggagcagatcttacaagtttttctcatcctggtttccggaagggctgtctgtgaggcgtgagcccttcattctgtacag

SEQ ID NO: 64750 - DNA, 1061 bp, Homo sapiens
aacagcaagaacaagaatttatattctcacaattctgaaggctaggaagtccaaaatcaaggcaccagcatgtggtctagtaggcacctttccgctgcatcctcatgtggcaggaagtagatgttcatgtgagcacaggtttgcagaatgctgcccaaagcctctttcaaaggacattaatcccattaacaaaaagcatccctcatggcctagtcatctcttaaaggcccacctcttaatattatcacattggcagcacttgaattttagaggggattaggtttcaacatgaattttggagggaacaaaacatttaaaccatagcagaaagtgtgtcaaaaatggcaaattatgtagaataaatttagtgaactttaaatgtcagtacttctgatttgggtttaatatccatttagactgacaattagcactggggttttaatgcagacctctaactttcatttttgaaatgatattttttttctaaatgttggctttgttttcagaacaacttttcagtttaggtctttactacatggctttacatttttttttcttatcccccacctgccaaatatggcaattttctttgggcttgaatgtgtctaatatagattttgtatttcctaaaatacttagtggactacttggcacatagtagatattcaatgatatggtttgactttgtgtccccactcaagtgtcatcttgaattgtaatccccatgtgttgagggagggacctggtgggagttgattggatcacggtggcggtttcccctgtgctgttctcatgatagtgagggagttctcatgaaagctaatggttttataaggggatcgatctctctctctctccatctctctctctctctctctctctctgtctctctccatctctctctctctctccgtctctctctgtctctctttctttctctgtctctctctctctctctccatctctctctccctccacctctatctctccctctctctcttgctctctctctctccctctctctctctctccctctctctctatccctctctctccctctc

SEQ ID NO: 64751 - DNA, 1050 bp, Homo sapiens
tcttaaatataatctgtaattgcagatgttttcgtgaagttctgactttacagggaacgcttctgtttgattattaaatgtctattataagacttcgataaataccttttttattccttattttcttttagataggtgttgaattttatcaaatgctttttcagtttcctagataaacttgcagcacaaatttgattctctttaatattttctctagggtgatcagcccatgacctaaacctccagacaaaataaaacggaaaatttgctagaatcaagaatgatggatccatgttcagttggagtccagcttcgtactacaaatgagtgccataaaacctactatactcgtcacacaggttttaagactttgcaagaattgtcatcaaatgatatgcttttacttcaacttagaactggaatgacactttctgggaacaatacaatttgctttcatcatgtaaaaatttacattgacagatttgaggatttacagaagtcatgttgtgacccatttaacatacacaagaaattagccaaaaaaaatttgcatgtaattgacttagatgatgccacttttctgagtgctaaatttggaagacagcttgtacctggttggaagctttgtccaaaatgcacacagataatcaatggaagtgtggatgttgatactgaagaccgccagaaaaggaaacctgagtcagatgtatgtgtaatagtcatttttttctacattgtgaattctaccatgtaggattttgcttaactataagaaaatcatatttacattattactaaatttgttagcatacagtgaattaaaaggaggggtgaaagtggatgatgtttctaaatattattcacatatactgaaggtcaagattgggggataaagaaagtaggcctgggaaagtaataataaaatatgcctaagactccaagctacaacttttagtgcgaagactttaggagtgggttttagaatattctggccaagccaggatttagtttcttttctgataccaaagtaactacacgggacatggcaac

SEQ ID NO: 64752 - DNA, 1028 bp, Homo sapiens
ctttcctccccaaataacaaacataaacccttaaacaccgaaattttgtttcaccaaaacttttcaaaaagattataatactattctagaacttgaaatcatattctctgctcttaaaaatatataaaatacaataataaggacccaggattgttaggaaatcagttatgtgccactggattatatagcagtttttgtgccttctctcctgtgttggcagcagccattgcagttttcacaatgccttcctcctctgctcctaatataccagagactaaaataaaataatggaaatgttactaatacattaaccaatatgctttgaatatggtctagggccatgtaaattttcttgcacttaggctctaaaaccttgttttcttttttgtgtgttccagactgtcttccatgttagggaatcgtctggtttaacattaaataaaatgttaatctgttgtctgttgtcaagatttgagttgataatttgtttacctttcttcagggaagaactgctaaagctttgaggtcattacaatttacgaatccaggaaggcaaactgaatttgctccagaaactggtaaaagagaaaaaagaaggcttacaaaaaatgcaaccgctggttcagacaggtaggctaagtgttactgaagacatgttaacttgctgcttcacatctgcattgttcccctatttttctcttaaattttgaattttctgggttcatattttaaattggataatgtagaattagtaaaaacctatgaaggcctttgtttttattcatataaaattaaggtatccctttcaactacaaaaatttgtttctaagaaggtagcagtgaactgaagaaataattttggcatgagagttaaaataattacaattaaagtaattcacttatttgaaaagcattgttattatatatatacggacatacctcattttattggtgcttcactttattctttacaaggtgctatttatttttacaaattgaaaatttgtggcaactcggtggtaagcaag

SEQ ID NO: 64753 - DNA, 2237 bp, Homo sapiens
gaaatgcagttctgtatagtcaacataatgaatgggagaactaaattgtttagaatatgactctaaaacaaatgttaatataatcattcagaattttttttctaagttcagtcaacatttctatatatgccatgtattccatctgttaaaatttaccattgagtcatttaaatatttttaggccaaatttactagagtccattaaagaacaagaaacattaattgtagtataaaaatctatagaggtggtatactataataaaaataaaactgtgttgataaaacagtgaagaggttggtagctaataaagtgaaccactattaacctgtcattcttttttgtttgtttaaagtaaagggaaaattatgcacttcaagaagcgtattcagaatttttagatttgtctcaacactctatagagttaggtctcctcttctcacatggagttcatttactgctgacgatagaataagccttgagcctgataaattatagatgattttggcatgacctcatctaaaaatattttatctccttttttttttttactgtattttcaattaaatcaaaaataacatatttatgaggtataattcattgtgttttattttacagacaagtgataccagcaaagagtaaggtctatgatagccagggtctcctgatttttagtgggatggacctctgtgactgcctggatgaagactgcttaggatgtttctatgcttgtcctgcctgtggttctaccaagtgtggagctgaatgccgctgtgaccgcaagtggctgtatgagcaaattgaaattgaaggaggagaaataattcataataaacatgctggataatctgcggtaccaaactatggagcctttaaaggtctttatttctaaaaatctgttactctaagatacattttaagcttgattatcatatgacaaagattttaaaaccatctcagtgtgccctaatttttcatcatgggtgctttaagattcactatttgatataaattcagataggctatttttcagtagtcagcgttaagcctgtctggatcaatataaacaagtagggtgtaggcagtcctctatttgcatgtttcccatgggcacaaatttcagtgacctagatttagtttaaataccagtttccttaccaggaaggaaagaaaactggtaaggaaactgttgttgttaaaatctaggttaaaattttagttagcacattgtaactgagtaattacatgaagtacaaacctctctgctagctcttcagtctacaaatcgctatgtaaataacagatatgcttcatgattgtgaccagtcatgttatttctttcaaattcttccagtggtttgtccctgtgcatctgttaattcagttcacgtacagcagagcatgtagttatgctgtctctctgtcatctacttgacattctatagaagtgaacactcgaaagaactggtcaacaaagatgaaagtgcagcaaagcaatgaaaaatgataacactggaagtgaaattttaatcaaacataaatgaatttgtagaagaagtcactgaccatgggaatgttgttcttgctgctgtgtattcataggagcttagtgaaggcaaacttaccaacacaaataagcaaagtggttgcaataaagacagatacgtcccagaggaagtgatggttaaaaaaaaaaaactttacattaaaagatatttaatgtgaatatagaaatatttcacaacattgaaagcacaagcaataaaagggtggaagctgacccaaacttagaaggagtatggcagtttgccgtgaacataaaagatgcttactcagtatggtaagttacttgccagaaaaaaaggcaagccctattcaaactactttgtttttacaatgaaataaaacactttaattctatttctaatgttttaaattacagtgtactaaatatttttaaacatttttgcatttttttctacatttataactggtcttaagagtttttaatatttgagcagaaccttaaaggtcatggaacaatcatcattttccctattgattattaagattgcaggaccatttttatggtcccacagtaccatgtgaaatgaggatcgcttgtagctgggaacagtgcttacttcagggaaaactgattttgatagaaccgactagttgagtattaaactgttttggaaataatttatatatctaagtgctgaaatatatttctctt

SEQ ID NO: 64754 - DNA, 1068 bp, Homo sapiens
taactgttcactcacctgttaccagaagtacatacagttagcttgtcagttccttgatctgtatgatttacctgaacactggcaaaagaatatttcagctttattcacttaagtcagatgctagattactttctctaaagtaaggaaatacttcattattgaggacataaacactccagttttatctgaacattaggatcattagatcttaattgtttctaccatcttttagtttttctaagtatgacagtgcttaggcttttcgtagggacaaattaaaatcaggttttttacttaaaataggaatatttttgatggaatgaatgactttaaaattgccatattgcagcattttttagaacagacctgtaatttttcaaagactaatacgtttttcaaaggaaaatattcttgagcaattttgctaatatttgttcatcatgcccatttagggaagcaaacttttaatgagcatacaaaatgtttacagagaaaggtgtatctgatttacagtaagctgtaataaagctatgttttggaaaaattaaataatgagcccacttactattttgtaatataaaattacagaaatatggaatataatgaaatcatctagagcctctttatattgtgcataaatattccaggtgactataaattattttagaattaatctaaaaagcaaagttttataaacaatttctgttgtgtgtagatcctagtagagaagttaggtcacaaatgttggtctcacacaatgttggtcacaaatattaaggtagaaatgcatgtatatatttgaataaaatgtcatctcgtgatcttttccttttttttaaaatatggaaatagctatttaccttgtaacatcatatataggattcttctctttttaaagtattatgtttagttctatataacaggctgttatacaacctgacagtctactctaaaactgcctccctggcgtgatttcaagcaagtaatttttagcaagtgaattttgaaatatccatatatatatatacagtgattcattattaaaaacataattttagtgagttctat

SEQ ID NO: 64755 - DNA, 1021 bp, Homo sapiens
ggctctgtctagccatctagaaatgcttgcctatgcattggggactttcaaaagtctggagcaggagggtctatgatttgatggaccatggcttgggaaattctaggaagaaaaaaataatgtgagcaattctctctgtgtatgtatatatgtacacacacatacatgtatgtgttaatatatatcatatgtaaattaaaagctgtacattaaccctctgtgccaaaaattttacaaaagttcattcactttatccacataggcaaacattctgtttttatttgtaaaaactgaagtccagagaagccaataattggccagtctggaacttgaacttgggtctgtttgactccataatccatgctcttaaccgttgccttcaaaataagaatggctaacttttaaagagcctgcaggtgctcgttacgctaactggcacagccaacctgccagctcctaaagtctgggtgctatgtgatctttgcactttccccttcacagcttctgtgccaaatccgagcacagctgccccaaggcttccaagctgtaatccctgcagaaggtgcccagaagactatagtaataagaacccaagtctttttgatgcagccagctcaggacctgtctgtgcattgaaaatttgtggacgttgatttgtaacaccagggctgtgaccctgagtagcccacctgaggataacaggcaccaacttcctgtttccaaatcctgctttcctaggacgcacccagcccccactgaagtttgtgggggagtaaattgctattcacctgtccaagcctccctggatttatggcttggcacctcccttctgcctgcaccaccgtactgtgtactgcaaacacagatgaccttttcagcgatttcgtcctaacttgcttccataaagaaaacctgttttgtattgacattgtttggagtaagttctgcctatgttaactcccttagcccctgcccctggaatttcagcccagggaggccaagtgcttacaatttcaagagc

SEQ ID NO: 64756 - DNA, 1153 bp, Homo sapiens
cattttgttaacaagtcgggattctttggtgaggtcagatttcttctatctgcctcccttttactgctcttgattttccagggttaataattcaagatgatagctgaaccataggactaaatttcaaagcacagagtctagaggtgttttaaatgaagagggaaggttgtgcaaaagtcaactgggtagaggaaggctggcgactagatttaggctagtattcagataagtgtggatccagaagagccccagctcagagtcatgcctaggtgacaagccaggtttttattctcctaacaggaaaggacttacttagaaacagagagtagccccttccaagtcttctttgccattctagggttgaaatttgatggggaaaatagaagctttcaggtctcacttaagagtcaatgacaacacaaggaaatctgtctcccagtccctttttcagcttctagttcagttaacatacttttacgtatttgcaaagatgtgtaagctgtttaatagaatcatagaaaaacctaaatgaacagggaatgggatgtattaaaacaaacacaagggagttaaaagaaaattcattctgagttgtgggtaggtaacttagtgtttaggtcccagttttttattgcatcctaatgcttgagcccagcgatgctgaggtaggcctggtgatgacaatattcattaaagttaatttcctgatagaggccacttaaatctgattgttgttttaatttgtttcactgctaatttccttcgcttaaatagaggaagctctctgcccctcccacagccagcccaggcagtttcagggaggtgacagccatcacggcattcaccaaccagagaatgccatcatgtcacactctttaggcaggagatgatgtctttatttatctctagaacctagaagttgcctgatttggaaaatataggtgctcactttcaaagtctaaaagtatattgctttattgaatatgaaatctcctccattactcagctagacctaaatccatctaggacttaatgggaaaaatgtgagtcccagcagtgtccaggatttttgaattatacatactcattttgttgtttgaagaacaaatataaatacagcacaggctaaaacatcaaagcaggagagaaaact

SEQ ID NO: 64757 - DNA, 1042 bp, Homo sapiens
gcaaagcacccgtttttaagcccagacatattacgattccacagaacacactttgggaaacatggtagtaatggtatttcttagcgtcctctgcatgcatcattgtggtaactctgagctgataggacttagaagcagtcatgcctcatgcagaagtcaaaggagaggcctcagccagatttagtggcagctccgattgtttattgagtgaaatgaacgtgtcagcagtagactgcagtggaaaaaacactgggcttggagtcagatggtcagaacctattcttggcctggcactaccagttttgctgccttgagtaaagaggttaacctcattgagcttctcttttctctgtaaaatggctattacctgccctacagctgccctaataaccatcattcattcagtgctccagagtccagaacaggggtcagcaaatgttttctgtaaaggactagaaggtgtaataaatatcttagactttacggcccatatggtctctgtcatggctactcacctctgccattgcggtgtggaagcagttgtagatgatatgcaaatgaataggtatagctgtgtcccagtaaaactttttttttttttttggagacggagtctcacgctgtcacccaggctggagtgcagtggcgcgacctcggctcactgcaacctccgcctcccggattcaagcaattctcctgcccgagcctcctgagtagctgggattacaggcatctgccaccacgcccggctagtttttgtatttttagtagagacggggtttcaccatgttggccaggctggtcttgaactcctgacctcaggtaatccccccgcctcagcctcccaaagtgctggaattataggtgtgagccaccatacccagccccagtaaaagtttatttataaaaacaacaagagagatttggcccacgggccatagcttgctaattcctgatctaacgtatgtcaaggtctttacctatattactgctaattctgcctgtaggattaacagaacacctagatttataccagagaaaa

SEQ ID NO: 64758 - DNA, 1064 bp, Homo sapiens
taaggtagtgcaggggctggttccatattaaacatggtgatggggatttaagataataatgctaccatcagtacatctaaaattgtttaatgttttactgcaaatattttttagctagaagaaattaaacaagtggggaagattctcagaaaccaacacagcccaaaatgtgcagataaagaaccaaaaaataacgtagaaaggagcaagattataataaatatttttaatgagttaatttatttcctctttttaagtcttaacttgtaacattatttgaaatcacagtaaatgtacattttatttcttgtttcagccctgaggtgagtttatttggaatgtttgttttaaatggatttagccatcatggaattaggtcatcttggaaaaatgtgttttttctaaaaaaaaaaaaaaaaaatagaatgatgttctgtgtgtttgagagtaatttagaaaccactgttaatttccagtcctgttatggactccttcttcaggaaggtaagtgcttttgatgtgtttgaagcattttgtgagacaagcaaaacaatttggagcaattgaaagtgacaaccctgccccgagcacatggcttcattttcattacgttataacgcaggtggaatgcagatcatgccgggtcagttctctctctcagtatcatttattctacctttctgtgccttaagagcaaacttttcacttaacacaaggatgctatccatttggcttcttttttgcttttccagtgaatagccatttgcttatcgacttgtttttgaacttactataataagctttagtcaattttcttttaaaataattttttggctttaactcttgtgagatagcaataacacaaaaaagacatttattttgctttgaaactagtgctttttccagaaggtcttgtatcccttaacaatttgcattcatccattcatcaaatgtggattgagggcaatgtactgttccaagcctcggattactatggagaagcataaggtgggttcatctctgcttaagatgagtttgttgtttcgttatgcagtcattcgtat

SEQ ID NO: 64759 - DNA, 1009 bp, Homo sapiens
atataaaataacagtttagacataatcccatatcagttaggatttttatgttccatgcaattttatgttaagaaaagtcaacccaaacaatcttgtacaaatgcaatctattgtctccatattttaaaacttcaaaggtagatatggctttagagattttgatgtggccttaacatgtaacccagatactgtttcttcctttacacttctgagctccatttctcacaggttggctccatcctcaggcatgctgtctccttaggctttcaaaatgatggccagccacttcgcagaactaagctgggaggaaagagcaaaatccagagactgagcctgctggctgatttggctcctatgctcatgcctgcaccaacctccagggctaaaggggtggaatgcacaaatggccttagcctgggtcacaagtgccatcttgctgggcctgaagtgcagccacttcactgtggatccccaaatggaagttggggctgttggggagaggaaatggaggaatgagtataggaaaccaactaacaaatgtccactacgagctgtttactgggggtaggaaataaacagcttgtctttgaagctcattttctttacacaattacaatcatttggtgtttattttcttcagttgttatcaggattacattgcaattgatatttcaaaattgccctgagtggatagccgagaaaaccttcgtagtgagataaatctgtacaaagacaaggtggtagagatttctcacttcttatacccctgttgtaagtttaccatttgaataaaaatggacagattcaattgcaaagtcattgaactattgctgactcttgtttccttttaggaaaaccacaggttctttaggaaagtcaacttttctccctccaatagttaatgctgttttcccaactgttccccttctgtatgacccttttctttccagatttaaaatctcttcatatgtgccttttaaaacatcttgttaaactttccattcatcaa

SEQ ID NO: 64760 - DNA, 1123 bp, Homo sapiens
tcactgcagcctcaagcttccaggttcaagcaatcctcccacctcagacccccaagtagttgagaccacaagcatgcaccacaacctctggctggttttttagttttttgtagagatgggatcttatgttgcccaggctggtctcaaattgttagactgaaactgtcctccagccttgcccccgcaaagtgctgggattgcaggcaggagccactgcgcctagccttaccgcttaatttgagagacatattctgtagatatacccaaatgttgtgcacaaatggcgtgcactgtagctgggattgacaagaatcacgctttgactttagcaaccctgaaaaatgttttttttttgtcatttggttgcatgtggtttatagagattattctgagtctgggcattaaattgattagttgtccttcaaaaatccatgggttatggttctaagagaaaaagatagcaaatcaggacacatgtgcacccctgcatcaatggtagaaacttattcctgtgtcttctcaagtttcatttgttcattaacttaactaccatttatcgaacgcctgctcactgtaatgtcaggcacagtcctaggtgctgggaatatgggaatggacaaattaaaatactgtccccagaaaaccttattagcctcttagtaaaagagagagagaagtagatcatttaacagactgtcacaagtgctacagcaattttgtaagatgacttgggagacagacatgatgagcacccaattcagcttgggtaaggacaagcttcaggaagactgagacgaatctggaagaggatatttaaggcagaaagggcagcatgcccaatgagtagaagcaagttagaatgcaggacatgtgtggtaagatgagaaggtcataagggcctcatgtgccgggtgagagagtttggatggtatcctgtggttttggtgaaccatggaaaggttttaagcaggacaattatttggctatatttatcttttggaaagaactctagcagcaatgtggactaagatgaagggaatgggaaggaagtgagaccaggaatgttataattgtccaggaacaagatgttgaggatcttactttgaagcatcatcacgtgagg

SEQ ID NO: 64761 - DNA, 1037 bp, Homo sapiens
acacagaaggatttgagaggaggtcaccatgctacccttcacatagattcagctgctctgaacattccatcagccttaggtaactcatttccctctcattttgtactggaagcagtcataaaatatcttgcttagattagggtttctcaaacctccctacacatcagaattaccgtctctgtagaaatatagattttgaagcccttcctccagagactctgattgtccttcctgagatgaagcccagcagtttgtattttttaaagttacctgggcaagactgatgcacaggtggtttgaaagttactggttgagagctggcactagaattctcagaactaagctctggaaaacttgaaacaggtacatgtatccttggaggccagacaagaagcgtgtcaatcttgattgtatcagttgacagttgtcaggttttaaaggagttacttcacagtgtctgagcctcagttttcacatctctaagatggtgaagatgatacctattttagagggttatgataaggataaaataggtaaagtttgcagtggactgaagagaatatcggatagtttgcttagggtatgaattataatttttctggccttgggctctcccactaagtatttatgtgaacttaggcaagtcatttaggccctagagccagtttttttttttatctttaaaatgagaatgttagactaaatgattgtcaatatcagcaggttctaggactttttttttttttgagggtgtatatagagcaaaactaacctgtgtgtgtgtatgtagagcagaagaactcacctttactcacttaatacagaaaagtaccccagtccttcactaggagttgtggataggactggaaaaagacaagcagactgaattcagattggtcactttactcaacagtttggcttgtcctctgtaagttaaaaggttgagatattttctttttttttttttttttgagacggagtctcgttctgtcgcccaggcgggagtgctgtggcgcgatctccgctcactgcaagct

SEQ ID NO: 64762 - DNA, 1067 bp, Homo sapiens
cgtgtgtgtgtttaggtcacaaaaagttgtgttggaataaggccatggttgaggcaagaatgcttacaaataaggagttgctgagcagcaataaaatctctgggcagttttcgtggtctaaaaattgtggatattaatggcctgcttccccatcatttgcacttgtcagttgttacctgccatcagtgcaatgcagtagtgactactgtaagggatggggagtggacttttgtcttctttgtgtggactaaggtttatcacatctcctggtgccttgggattctctttatggaggaggctgaagcggaggagggagcatttccgctgtggtgtcttacactggtgctcattcctgcagtggaccaccgggctttcactccgcatcccctgccttctcctgggtttctggctcagccctgacattattgtaatatagttttctgtgtttaatatttcttagacctggtttcccattgcaagcatggaagaaaccctaatgcatgagtttcagaggagaaggtagcagtctgaacctgctgtgtggctccatcagcaagtgtgagtattaacgttagagctgtcaggacttgtgaaaattaatggagcctgacgggggacagactgaggtcagagacagagcttgccctgactgaatgtttctggtggttttgtagctgagtcaagtgagtgcaaactgtggagccaagggggatttctggagtatgcagtgggtaccaactaagtgctaagcattcttctaggtgccaggggtacagcagcaaaaagttggctctgcctcctcatagcttatagaaccccctccccacctccaggctggactcaggccttctctgctatcagcccccagtaattgccaaggaaggaatttagatgaaatgtctccttagcccatcctgagcctcatagttcttccatgctcctagcagttggtattacttttttcctttcatcttcctgcagaattttctgcttggccagttttcaagcccaggttattcttattcattcctcagtgaaatagagaggcttcaaaagttttaacattt

SEQ ID NO: 64763 - DNA, 1048 bp, Homo sapiens
ggggagatatatggggagtatggggggatagcagcttaagaaatggggagggagaagtgctgcaaattttagtataatgcataatgttgaaagaaattctatcccatcataaagattagcaggctgtgtaattcaatttaaaattggttggcgtgtcctgactattataaagcctttcctttttttgttgttgttttatcgccattccattatttgatgtcatataccaatacagaatggagcatacagccaacccatccatacagggtctctttccacatttgcatccattggagaaattgttggggaatgtaagagtttatcttaaaatgaattaagaaaatgcttgctcaattgaatgcctccttgttttctttctttcttctttcttttttttaacacaaaatgaatttcttctgggcaagcaaccattgagagtgaaattcttttaaaagcatttgctggacacaggacttggttctcaaaattccagcattagcacttatctacagtatcatgggcattacagtgccattgaaaatcaagatgcagtagcttatgttaatgcaagactgacagacccacatctgatggcaattacccatactggggggttaataaatgttcttagaattactgtctttattttctttattgcaagaaaaatgggcagcttcctaagccgtgcctcctgcttcttgctaccagccttggtgacttgataattaactgttttcattccagtgcttcatgggctcttctgagtttaatattcatgttagggaaatgctacgtcctttagccaaagtagtaaaaatattaaattaaattcagcaaacatttatccaagtaccctttaagaacaagaaatgaagacgtatagaaataataataataataacgagacttggatgcatcagaagagtgtctggaaaatgaatgcacactgttttttccttctagaagggagcgagcttaatttttattccttttctgaaggggtttcagcacaggtgtggcagagagaattcatcacacttgccagctc

SEQ ID NO: 64764 - DNA, 2046 bp, Homo sapiens
tgtgcccataaccccagctactctggaagctgcggtgggaggattgcttgagcctgggaggtcgaggctatagtaggctatgattgtaccactgcactccagcctgggtgatagagcgagatcctgtctcaaacaaacaaacaacaaaagaaaaaacaaccaacaaaccaaacaaacacaaaacattatgtcgtctagagggaagggatagaggagattcagatgtcatgtaaaacattgaacgagatgccccataaggtttagtcctgctttgggattttatgctgctatgtttttttctcatcttcccatgtcaccttgttgtcccccaggtgtactcaaacatatgtgcaaatatcactctaatatttgaatctggctctggggtttagattgccttggtaagatactcacttgctaggatatttgacacgatgccttaggggaaatgttaggtcatttgagaactcagcagcataaacagtaagtggtaaagttgtaaactaaggatgaaaatatagtgtgagggccttcacacaatatgaacagataggatcttccagtagcagttggagtctcccttagatgtacttttatagtgaaaatgtttggctgtcttgacttttccaggtgtttatcaaatgcccaatttgggaggagtagtttcctgagggtggtctcagttttaattatctccactggaatttgcccactctgctagaggtcttattttcaactctatgcctgtgggtggaaatgtcttcttcctatgagctccaggtgatatttgttgtaccatctcacagagtggctttggcatgttgcactgccttgtcttctgaaaccatctcttgctttgtacttattcctatggatagcaaagattctcagtgcctctgggtcaggatatctatataaagtctgcatctgtatacgcctcacttcccccatcccctgccttgaatcgatcttctgtgcattctccctagtgtctacacattatttctctttgatggcatcatggtggtggtgtagatgtgcgagccttctttgcttgtcttgctgtctactttggactcaaagctgagaagaaacacttactatttcagctcaaagctgagaagaaacacttttcccatttttactgtcccctctactcagctgttccttggactttgatatttaaatgtttctctgaaggaggtgggaggtggagaaagaggttgaagtgattcagaaattgcctagtgttccccataatgtcagaaaatttattgcctagtatgaagtcaagatgaggaaccaattatgtaccatgtgatgattggctactttaaagtgggtagattcatagaacagggaactatttacaacaagaggtttacatctgtgctactttcagtctaattcaaaataatgacaatgatgtctgtctgataagctgagatgacctcccaaaggattttgatgcagtagctgggtctgtagcttagctgagttacagaaaaggagaaatggggctgtgtctgtatgttagtattagaatgaaagctagaaaacaaacactagaataggtagatattacatttattcatatatttagagatgtagtggctgatttattaaattttcattcaaatgttggtgcattaagtataaatgcaaacagtcctattctagtgagcatttaactattggtatagggatattgcttatcacttttagagagtgacacagtcagccccagcagggaacagtcattcattctctgggaaaactacttttcaaagacaggaaatgttgctaagattgtaagcaccgagactgagtgtaaccaagtctcagtgatggaaaggaagacatcaaacatttttacatctaaaaaagcaacatcggctataatgaggagggtttccaggttactaatgagatcacagtggattagtgaattttctacgtggtaacagcatattaatttctaacctttctaacagaaaaaatccattaattttttgcggaagttaaactttctttttgggcttccaa

SEQ ID NO: 64765 - DNA, 1037 bp, Homo sapiens
caatactgtattcatttgttattggaaaaacaataataaatatggccggaagaggaatcagaatggaagccataatattatcatattttttgtgagtaaaaaaaccctaatatgtcaagactgaataaacaagaatggtttatttgtttgaatatgcagtgagatatgtaagcatttgatgatcaagcttcaagaacaagatttgaggcttggcacaaaacttggaaagttcattggaaaatggtttaagatgatagctcaggccttctctagaaaaatctgccaatttgttcagcagtgccacctccccatggcctgggctagcatctgtctttgatgaacagctcattggttcatgaattcacacagaccatgaattctgacactacaaagggagggattctccccagtgaaattgtatctgggaggaaatagccttctgaggacattagacatcttatcacacaaggaaaaatggaagaaactgtagctactccactagagtggagatgatttccggggattataatagattgttttcaaatagttgaagaactgtccaatggaaaagggactgggttcttattttcttgttatttcagagtgcagaactaggattaagaaggagggacaggcaggaaataaatatattaaagaccatggattccgctcccagtatatgctgggtgttgtgtatgtgatttcttttaattctcacaaagtccctgagtgagtggtagatgttattatctccctacaacagaaaaagagatggaggtcatagaagttaaatgatactactactaatagtagtaaaaatactattagttactagtaaaaaaaaaatactaacatttattgggtatctacttcatgtcagacactgttctaaatgctttgagtacattatcattttttattctcataacaatcttaggagataggtactatatttatatctgttttactgatgagggaaccaaggcacaagggttaagccccttgcttggtgttgcatgttaataagttgtggagtg

SEQ ID NO: 64766 - DNA, 1052 bp, Homo sapiens
agatggtgcttggcattgtaggtaccatgtttaacactcaaagaaccctttgaagtggctgcttatccctcccgcatgtggcttgaatcagaattcaggcccagctcttatcctgacaaagcccattgttttccattaagccatcctgactttcaacttgaagcagtttctttcctgtttctcaatcttattttaacaggaacggtgaagattttcaaaattccagctactgtgcctagaagtgcaaaaatgctcttttgtatttgcttaacctttaactgcttaaaacaaaaattcgtgtttgttgtttgtttgtttgaaccataagaaatgcaaatgcaacttagaagttgttctgtaagaccacacaaccatttttaaattcaaagacttagctttgaatcttggatttttagatgatggtcatacatgtgcatgagggtgttaaaagagccttggtaattgtgatttctgatttcagtgttacagtctatgactattgcaagttctacattgttttttctacctaatgcttgcccttctgccttcttttttaaaaaagaaaatataatgaacgtggtctgttatttaaaaagtgtgttttatggtgcagttcatggcaaatggtgttgagtggtgatggaacagtgatttttggaaataaactgagtagggcaagaggagaaaagaaggaattcacatctgcacccttggtttgcattggaacacaggcagcagaggtgggtgggaggtgtttgtgctcttccctgtgctcaccgtgggtggccgggcctgtcgagaacattattttatttatcctagaggagttgctgtaattgttgaccagaactactggcatttggggttcacacatcactggactcagggtctgttggcatttgaagagtaggactcatggtgattcttacctatcgtgaaaagtgatgtacctagttcccaaaatggcttggtttatgaccacaggcaggccccatccttagggctgtgtgtctagaaatcttgtctgggcctgacagcttaaaagcctttgg

SEQ ID NO: 64767 - DNA, 2053 bp, Homo sapiens
ccttctctttcttcttacattttctggcctatagggtcatatggcttaagttagaacaaggagaccagtcaaaaagagccaaggcagacaaggcaaaatctacagaaatgataataatagtaatgataataaataatatggctaccatttattgaatgcttattgtgtaccaagccaagtgttaattgttgtaatatattatatcataaccctaggaagtgagtggtgttattcccattttgcagataagaaaaccaaggctaaaagaggctgccaagggtgacctgggttttacagcttgtcaatgacacacaactttgcctgaatctataggccatgctaatctgtcaaggaagcagtgacagacttgtggattaaaggtttggatttgactattttattttcttttccaaacaatgttcatgataaaaccatgtggaattgaagtcatgaagaagcatgaggtaaatgcaatccagacccacaaacatatttttgggatagttccactgattgagattctatagagaagcatgacctaggatgacatcttcactcagaaacaaatatggaggaattcattgtttggaggttggggaatggcatggagaagagcatattgggttaagagtcaaatggtgtaggcctccattccttagtctgtaaaatgagactaatactggttagagaagatggtctccaaggatccttacatttcaagcattctaagcttttaggctgaagttacttaaaattctttgtattattagttcccggactttccactgaaaggctacagggattgatgataatgcaggagagagtggcaaatggaaacctcactctcgtaagtcatggaattacagaaggaacactcaaggctattaactttcagctgaacatctaaaactgagtggaaaaatttaagaaggaaaagattttctctaccttgaggaatctttggcctgtggaagaaagagatttcctaaaagaacatgtcagtatgggagtattaaaaaaatatgtggagactgggctggaatgaagaatttgagattccaggggaatgtgcagaggatttgtttttttcattggttcatagacatactcattgtattagtccattttcatactgctatgaagaaatacctgagactgcgtaatttatcaagaaaaagaggtttaatggactcacagttccacacagctgggaaggcctcacaatcatgacagaaggtgaagaaggagcaaagtcatgtcttacatggtggcaggaaagagagcatgtgcagggggtctgccctttataaaaccatcagatcttgtgagacttattcactatcatgagaagggcacgggaaaaacctgcccccatgattcagttacctcccactgggtccatcccatgacacatggggattatgggagctacgattaaagatgagatttgggtggggagacagccaaaccatgtcactcatctaagaaccatgtgaacagtagcctgaagtactctaggtctgaaaattcctagtttcagccttgccactgactcacactttgatattaatatctgggtctcattttcttatctgtaagatataaagtaagtttctaaaactgctttctggtgccacaaatctgtgatttggggtatcttgatatcactatagcaagagagtcacagtgttgaggtggtgtttggggtgcctggactgtcaagtggactgagtcctggctgagtgaccagttcagaggacatggactaaaatagtttccatgaggaggaagaaaaaaagtccaacattaggaaaataatttgtagttgagtgagaatagtttgtcctgtggggtgaattaagtagatgatggtaattctgctttcatataccatggcatctgggaaatggtggaggagacagaatagtctaaaccagcacagctgtggaatctgggagactatctgcatttggggctggtgtgaattgtgggtttggagaggacaagaaatcacaatgagcagtgtacttagagaactgatgtcagagaagcc

SEQ ID NO: 64768 - DNA, 1022 bp, Homo sapiens
tacaaagtacatataagtaaggcagttcttacctgggaatagctgaactatagcttttgaggaaagagaaagatataggatgatcccagaatttcagcatgagaacgactattgggtttgaagtgtgactataaaccactcagccagacttttctttctttttaataaatttaccagaataggtaaaataataataataaaatacatacaaaatatatacgtgtgtgtgtgtatatgtgtgtgtgcatgttctattggttgaccaattcctgcaataccaatatcactgaaaacaattgtgaaaccactttttgaggattgtccttggagccaggtcatgggcacataaagaaagagttcttcatattttccagccacagacattatctttactcgtatttatttatatcttcctagcaaggcccttaggttccagttcaacacgcccaaggaataaaattcattagtgagttctcacatttgactttctccctctgaccatgaggctcttcttaccaggctaatgtttctttgattggatccctcatggtcattgccatgaagagttctcacatacatattactatagcaacttttcacttatcttcaaatatgttggactgactgtcagaatgttgacccagcagttgatccagatcattctatataaatgggaatatgggagacggaaataattgcacattccattgttaacagcaccaaggtagctggttagagatgtttattgattggttatttagccagtagcctttccttaaaagaaaacaaaaggaaactaacaatcataatggatggacatgtgctaaatctcataactagaaagaatatttgtaaataaacatgaattatagctctgtttattatacaatagtgagagctaataatttgccttgacataatagctgctttcgagctatcatgagtcatgaataaatgaaaatacctataaatttccaaagtatatttgaattcttatattttgcattataggaaatgataca

SEQ ID NO: 64769 - DNA, 1048 bp, Homo sapiens
ggaatttgcttgggtgaaaatgttctcaagtttataggggttcatgataatagtgttggccctgaaataaagcaccatttctaaatattccactttcactatccttgtatgtcttctttctcagtgtttttcaaagagaacaggataagtgcttgggcactactttagaacacagattataatcagactttgggattaagacgtgtagccaatgtattaaattagtcacttagtaactgtttgagtatgagaataagaaactggagggaggagattgggagctggaaaaaaagcaccccctgattgctctcggggaggctgggaaaaaggatttaacactttggattttttaggagacattaaaactctgatgggatcaaattacttgactgcacatctgaaacatgaaactcttgccctaaaccgtgcaattgagttaagctcaaaattctaggcctgcccctaagactggcctctgggtaagcctcattgttgatcgcaaaatgatttcctttgagaggaacaagactacagtgaggtttttatggccaatttggtctgtgcattggtgccagccagacttttggcaagagttagtgccaactttggtgatctgtccaccgaatttttcccaaggtcttcaaaaccgtctggatttactgctgacattgaaggaaagatgcattataagtccagctttctaggcacacctcctgtattttttgttttttcaagtagagagatactgagaggtgccagagaacaacaggctgatccgtggccgtaaactttgagtcacaaaagaatgttgacagtcttcttcactaaacactattttctctctctagctttgtcccctttttagggagcccctgtccttctctctggattaggtgtccccttatacatactcccagaacctgtgagtgatactgtcctttggctgcacttatcttaaatatattcttgaattgttggtgaaatgtgtgtcttccactaggatataagctctatgagggcagtgaccttatctttttcgttttattta

SEQ ID NO: 64770 - DNA, 1540 bp, Homo sapiens
tccctagacttcagtcaacagggagatgagacaaaattgcaacttggctttctagggtacacgtgccgactcaatataccaatgaatctagcatatgaaaggatcaggatagcaacttttgatactttgacctatgttgatctctgagaaggaatgatttttgggataattcaaaacttttaggcttgtatttcaatattttttaaaaaatcatttgacaaatagtgaactctgaactgactttcgagagatgtaagactatctgaagttgtgatttcccaaggttcgccatctgttagtatctgggagacttaccatatgttgtgctcaaattctgacttttacaggttaacttgttttcactttattcttcacccatacattttgggtacagccggtagcattgaaacctttcttgactcaataaacttagagagaagaatggtgaggaaagaacaaacaggctaggaggtgttgactcctaaaggatattaattcttaattcttccataatgcaattcaaaaagtctaatgctttcttcatgtaaaatacatgtaaaggcttgggtatcctgtttggtacagtggtgtgagtcctgttctaacccctcttgcaactgatcctcctgagaattcggaagggaaataataatcccgtgggagtctgtttgctccacgttgtgcccctcggtggtggtggatggctcccctgttttgcatctctccatctcgaccccaccacgatgttaatggctgtcggcacgctccactgtttatcttggaatttgatcccatcatcttggcaaccaaactgggacctttactgctcagattgtttgtcatttgttgttaattatctgttactataaattttgcactttgagaaaaaagggaatgttttgaaatatttcctccaacatgtaagtggagcttcattttctgtggacaaaagagaacaaaaaaaaatgagcccttttgggagctggttttagggaaatcaagtgccctggtttttcagatgggctcagtgagatcccactagtgcagccaggatttgcactgaaagaacctttgcaattcagcagtggtctaagacagaccattagtgacaggtaccccccattggagggaaaaaataatttaactttaaataaggggttttgctttttatcccaatctctttatgccataattgcgttttttgtatgctagggcctgttcccttcagccactttttaaagattattaatacaaagcagtccagagtgagaagtagcttctgcctgcctgtctttatgaggggtttattttgtcaagtgtagaattaaaatgagctgtctagtcattagtggattttagttctggtctcacactctgcaggaagggtcgtgccatgttataaacagatagcactgttttgcagggtgctgtaccacaggctgcaggaaccatggttgagcttaacatcttcataaaacggtaaacaaaagaacatgaaagagagagagagggaaagaatgaaggtttgtattttagaggg

SEQ ID NO: 64771 - DNA, 1027 bp, Homo sapiens
cacacacccccccaccctggaatttacaaacgctaaccaaacaaaagggtctttccattgactgcctggatattagtgtaaatactaggatgttgctttgcaagtatattctggagagcgagtcagttacctatgatgagatttctgcaaagcagccgttttaaagcagcatgcttgagtgaccaaaaaaaaaaaaaaaaggaaaagacaatccttgtaagtggttactgctaaactatttgaaagaactttatacgttctttaaatgagaatatattcatgattatgaaggatcgctaacatgattttaaggaaaaatggataaagtttttctttgttaaaatagcttttctgaacaataaatatctgtttaattcaaatattctttttattctactgtttctatttacttgtttttcttcaaatatgttacaatatttgtgtaagccatactttagaatagcttcagttctgttttgctggtgttatgtttttgtattaaagaactacaaggaactttgtagatgctgtttccattcaagcaaaacaaagtgtgttttgcccagattccttggaaaatgactgctggggaacctcagcttagttctcaagtctgcagacatctgctcacttgttcttggcctcaagattccactggcgaactgtgaatgcacagagatattttaaaaatcatgtaactttaaagttgatctgcttttatctagccataacaaatttgaaggatcaaattatacctcttttgaaaaaaatggcttgaaaatggggcaacctagacagctgtgtagtgctttcaccagactcctgatcttggaatagaggattcttctacaggctagttccagtgtaccttttcacttttattgccaataagggcttcccatctgaaccctctgcttcagccacacagtttggctccctgtcatctgaacacatcttagcaccttccatcttggtgccattgccatcactgtttcttacagagcgtaacacatttacgctctgctca

SEQ ID NO: 64772 - DNA, 1048 bp, Homo sapiens
cagctttgtgctccggctgcgccccgcggccgcccccggggccgcccgcgcgcgccgctctcgctcggggctctttctcaccccgtccccgcgccccaacctcactctccgccgctgcctgggtctccgcgctcgcagcctgcggagcgacccggcgacccaagctggggtcgaggctaggcgacgggggacgagtaccgaggaaaagtaaccgttgccgccggatttcttctctacagaggcaggagtttctttgctatttacgtataacaaggttatctttgtaaagcctttgaattccggggttttgcggcctaggaggtgaagggggcatttttctagaggctcaggagccggttggaatccgtcagcaagaaaataaattaaggatgccccagtgaagttgatttataatagtacatcaccacccccctctcacacacacaccccaaattaagtgcaaatgcgggtcatgaaaaatgtataattgatttgagatgctgcaaacaaacacaaacaggtcgggggggtgggacaaacaaaagtttaagtgaaaaaagatgtcagaagagggggagatcccgtggcctccacacccccttccaacgctcgctggctccctcccttcctttctccgccgttccagggaaggaacctggcagcgcccaggcgtagagcagggaggaggcggcggccccgggctcgggctcagcgctgtgggttcggggatgccaacgcgcccgggaggctgaggtcggggacgtggggctgtgatgcccgaccgaggatggcgtggtgtcagagccattggccgccggtggtcatcaatcaatccagagctagggaagagggagagaaaaaagataggcgtccagcggagcccggggccgccagcgctagcgccagcagtgccagcaggagcggcggccgaggaggtgacggaggtggcaacgggggactgagcgagtaaggcgctggtgtttcaggaaggaaggggaagttgtagccgggaagagccagccgtgagcctagaagggcagggcgagtg

SEQ ID NO: 64773 - DNA, 1048 bp, Homo sapiens
ttaagaggcaaatgaacacaaaacacaggtgaatcttgcttggttctgagacagtgaaggaatttccccagtatttaaatatattcacataaccagttacatacatctaaatataaaaccaatcaccagtaagttttaagatggcattcaccatctttgtgaaaaggtgaaaattattaatgaagtctaatcatagctttagaaggggtaaacagtgatagcatttactgaattcgaattactattaaaattcaaaaactgaacatattcatttaaccagaagctagtcttagttttaaatcaggactgcccaacaaaatattctgtcagtcattcatgacctgaattctggtgtatgaaatctattaaagtatggtatacataaaaaagtcatgagacatttctgttttgtaataaataaggcagtggcaaattattactcatttagtagcttttttaagacaagctaacaagtctgccctttctgccttcttcttaatgccggcaaagatcatttttattctagggatgtacttcttgggactctccaaatactccatcagtgtatcctctccccaggtgatgcctttgttcttattggcatctgtgtaagtgaatacaatggcctgacctgtcttctgcccgaagagaccatggagattaggcccagtcttgtgcttgcctcccttttccacggtgtggcactgggcacacttttgaacaaaaactcttcttgcctttctcaacatcacccatatttaattccctttttcgtcacaacgaaggttcccgctctgaagctagacgtcccattctccttaaatttcactttctaattgtcactagcatatagaatttcactgaccttgtatcctgcaaacttgctgaatgtattccttagttctactagcttttatgtaggttctttaaggtatttgatgttcttatcacattgtctataaataaaatagtttttatttcttcctttcaaatttataccctttttactacttttttcttgccttatcacagggtagggcccccaata

SEQ ID NO: 64774 - DNA, 1049 bp, Homo sapiens
tcccactttcaaaggattctcctgtctcagcctcccaagtagctgggattaaggcgcatgccaccacgcctggctaatttttatatttttagtagagacagggtttcatcatattggtcaggctggtctcgaacacctgacctcaagtgatcctcccgcctcagcctcccaaagtcctggtattacaggcatgagccactgcacccggccgactcttttttttttaaatgaattgtagtatttgtaaatatatctctgaatttttatattcattttttcaatctgtattgtgatgcttcttaagccaatgtctgtaattctataccgacgtccggttaactcagtttataaagagtaaagaaccattatttatatagaatttgttgtctctttagtttataccagttacatcagtgttgttttgccaaaactattaatgttcattgtgagagactaactgtttcatcatcaggattgtactaatattcttactttaggtagtatgttggactaaatgaccttaaggtaccttttgccccagaagttttaaagtttctgtcagcagaatcaagtagactttattgaaaaatatcctaatattaaaccatccttgtacctcactcagttaattgggaaatgaacctggaaaagtagactggatcattctggttcttgtaggccatgctggcctttaattggccactgagaagcagtctgcacataatatgtagtatctgtcaaacagcaaagtaggtaaatcatttcacatatgcgctaacaatgtatcagagaattctggttgctctacagctttgccaatatttgatgttattggtctctttcattttggctattggagtttttgcaattttgccaccattgacattttgggcaggataattctttgttatttcggctgtcctgtgctttgtaagatgtgtggcaggatcctagatgccagtaacaaccaaaaatgccgcctgcatgtcaaaattgccacatcccatgagaatcactggactactctacagtgtctggtcataccccat

SEQ ID NO: 64775 - DNA, 1044 bp, Homo sapiens
gttttattaatagggactttacttattagtaaatcaattgtgaattgatttttaaaattttttttagttttctattaaaaacaatttgaatagtaatccattgctttgaaatggtctagggtccagaatgattagttatgttattcctgtattttttgcagttatgcatgtgaaaattgctatttacttaagagaaagcttcatctcaaaagctttgtcaaattgagaactgggggtcttttcccactgatcctgataatattacaggatacttctcagttggaaaagagttattgtgttggaaaattatatgcttctgttataatatgttctataatcttgaagaaaatccatgtaatttgagtcaggagtgtgcaggatggtcttgttgttaatgttggaagggtgtaaaataccacttaatacttacgtgggcattcagagggtctcatttgattagaaatggttatatatagattagctttaagctagttatgtcatccactttaatgtcttgaaaaagaaagtagaaaggggacctgtactatagtcagaagaaaattaccacgttggaaaagaagggagtgaagaacaattctttaaataagtcttttgagtacattacaaagcaaaagagatcttgattacaggaaaggtacttaggcattaagagaaattttgtgaaaaaaaatctaggagtgttgtaagtaaaaatctggaagatataacttgtcttgtagttcacattataatttctgttaccatagttaactatttagctgtcatctaggtattattaatatatagaatgcatgatacgtaacaataaatagttatgtcatagggagactctatcataaacaattctttttcgtgataaaagtggtaggaatagcattttaaatgaataactttagctaacatgtagcactgcgtatcagatactcttgtaatcacttcatgtgaattattcaactctgcaaagtgcaatatcattattatttctaatatatagatgggtaaaccaaggctcagagattaagt

SEQ ID NO: 64776 - DNA, 1048 bp, Homo sapiens
aaaagatactcttcactctagagactccaagggttttaggagctgtttgccaggaactaggggcagagaccaaatacatgtatttctcatattataatattataggttatattcatgaaacttcagatactgtacttcatggacaatttaaagattttcaagagtagttttgattacatgtaattttcacattgtctttggatctggacacctatgaaaactgttcttactttgtaagtgttcagttgcatgttgggaagttagtgctattaccagttacaggaattggaaagcaaggttgcacagaaagttttgcttgtagtttatggaaaagaaatgccccccggattgctgtattgtgaggaaaaaagggcaagggccagcatatgccataagtgtgggaaccacacctgatgcagcctttcgtcctaatgtaacagaatgtatctcctctgcacagctaggtgtgggactccgtttcagcttttttgttttctgttctaataatctgtccttcttcagtcagtccctctataatgtatgtaattatcttaagccaaatagggctatcagaacaaaagttcatttccagaataatttccagaataggcaaaatactctcagggcaaaaacaccttcagttctttgtctttgattgtttttccttcagttttggccttactatcttgtcaactctttgatgcttttacagtgttttataatgtatttcatcttcattttgtagttctcaatgaaaagaatagactagcgctacccccattgtaaataagaagccctcttctcatttcttcctattcagtggaggaagtctacctcccattaaggcacaactcaaagaacttcttgaactaatcattgtagttactcagaaagtctccccacttcttagatgttccattgatacatcataactctgttattccactgtccatatcctatctttactctaattgcttatgcctgtggctccctctcagctagaagtgaagttcttggaggcagggatcctgtcttagttatttttgta

SEQ ID NO: 64777 - DNA, 1085 bp, Homo sapiens
aacaacaaaacacagccaaagtcagtcaatgtgcatctcttgcctgtctaaactatattcagattcattagagaattacaactgcacggtcttaacagcatttcctcaccaactgtttaacagctgcttcaaaataacagtgatttgcaataatgaaaatcaaaaattatctcagaggatatgtgtttcttttttttttttattttcccccgagatggagtcttgctctgttgcccaggctggtgcgatctcagctcactgcaacctctgcctcctgggttcaagtgattctcctgcctcagcctcccgagtagttgagattacaggagcgtgccaccatgcccagctaatttttgtattctcagtagagatgggatttcatcatgttggccaggctggtctcgaactcttgacctcatgatcctcctgcctcggcctcccaaagtgctaggattataggcgtgagccaccacgcctggcccaatatgtatttcttggtatcctaagaagcctacttaggcctttatttcaaaaatagtgtattaagttcattgactttaactacagttattaaatgctttatttttcttcttttactcttttttttttccctgtcagtattaaggtcacctatcttgtttattgagcttcatttagttgactttctctcatcattaggtatttagaattaaggattgttaccacctctccagccttatgcatgtaatcccatcattaattttgaacacctatatatgagaatgttacatacctgtatacctatatatgttagtatatttcatttcacttgttgtttcctgtagcttataaagttaaatcagttgaagttttatttaaagaatatttgtacattttaggtccacaggaacatttctgcaaataaaagaaatagataacttttataggaaacagttttagcattgattcaaataagaggtagataaagataatctgtgacattttctttctcatatcttgtttactgtttttttcccatctcaggggtaaagcacccaagggaattcaaagccactgaactagtatcattaatatggcagaatgat

SEQ ID NO: 64778 - DNA, 1080 bp, Homo sapiens
gacagtatagataaaactttctgtgcaggttccctcgccccaacttacttgttgcaagatgactactcacattacttgctacttttacttgaatgcaaataactgtgcaatgaaaatgtattttaggatcatttctcattggttttgagtaaaaatttggctaccttcaaataatgctatagagacctataggcaagattacagttataattctgggacacttgaacagacttggtagttctgatttaatagtggagcagtctaagattttaggaagttttttttttccaactttaaccactctcccaactttccacttggttacttgacccaattgaaatcagtgggtccaaaatcaagactgaccgagtcagctttcttattttttcctcaaccttggtttcatattacactctgcttacttctactttgctccatttacagtcaatgaatcagaaatgccagttgacatttgttcttttttaatgttgtttcccctgtgtgagcttttattctcacaactaccacagtagtccatccccagattataaaacatacccagattatttccatagccactaattggccttccattctctattgctgccttctctcacagtactttacattttgattgatctagcagctttctttattctcatgcctctatttaagaacatttataactctataccctcccaaaataacacctacccattcacctggaatttaaatgggacagaagcttttaagcttgtccctgctactttttccgacttattacctatttcaaacctaatgtgaattttatcccctggcccatttagaggctcccagacacacgtctgtttatactgcttgttattaatcagaaccatcctcctgttctgattcttattctttgttcaaggttcaacttaggtccttccatctcccctactcccaacttcccaccacccaccagagccttctggtattctaatccatctaatttgtgctctctgaactaaagacacagaattgtaggtccgttttattgggacctacaatagcagagtacttcagacttcagcacttata

SEQ ID NO: 64779 - DNA, 1045 bp, Homo sapiens
gactgcaggcgcacaccaccacacctggctaatttttgtatttttagtagagatggggtttcaccatattggtcaggctggtctcgaactcctgacctcaggtgatccacccgcctcggcctcccagagtgctgggattacaggcataagccacagtgcctgacctggaaagcctcttatgacttcttccagttaccactaactcctcatttcccccaccatcatagggtagttttgccagttaacattttgtgtaacgggtaatcatacagtgtgttatatttttttgtcagatactggttttttgaaaccagaatccctacaggaacctggactgtttgtgcccatggtactgaataatcaggtcaacatacagatgtttagacagccacagaatatgaaaatgttttaatataatccttgtaactctgaccttgggcaaggtactaaccatttttgtgtattctcttttcatatttaccatgagatatggtctaactaagctaatttttcaaccaagaaataggtggctactctaaagttcctctgcatagggatgaagaaaagatagtaataaaactgaaaaagccacttttttgagtaagtagaataatagaaagggttgcacatgaaatagtaactatgtgagaagaacaatagcttcccagtagattggcagttgtatttgcaagtcagttctaatttattatttttaaataaaaaatggcatcatggatatatatgaatgggttgtctttttgtacaattagtatattacaggtgttcaagatagattagattaagaaagctgattcatcttgtcattatttctcttgtctgatttgctttgattgatttcaaaatttcttaaaatgtctataagataccctggaatacaggtgactttgttagaaatttattacacctgtttttaccctaaataggatttgttaaatgccaattattacccccattcctcacatctgaaacagtgtttaatctcccaattctagcaaacaaccctggtccttctgagtaagaaatt

SEQ ID NO: 64780 - DNA, 1056 bp, Homo sapiens
tggggtggggagtggattttagtagagtttttttttgtttttttcttttttcttcttttttttattctagaagaacaatacaagcatacaggaaatataacctgccttttaaaacaaagacaaatgcttcccatctttgattgccatctttgacccaaagaacacttgttttaagcaagagagtagatgctcctgttacaaagcttaggtggaattccaggcttccttggaccttccatctgcagcaaaaactttggaccaggaaacagcaatggaacatcaacacaatacatttgtgttgtggggttattgaaatactgaaataagtattcttttaagttacttaatctcttgcaaacaatcaaatgtaaaatgattaataggcttttacatttggatagagcattattttttaaagcacttttagtctgatctcatttgatatggagaacagctttctattagtctgcctcagctgccataacaaaataccatagactaggtggcataaacaaaatgtatttcttacagttctggaggctaacaagtccaagatcaaggtgctggttgactcggtttctgatgagggctcttttcctggcttgcagacagcctccttcttgctgtgccttcatatgctccttcctttatgtgtgggtgcgtgtggaaagagatcactctctaatcccttccctttaaggccaccagtcctattggattagaaccccacttttatgactccatttaacgttaattacctcctaaaagccctatgtccaagaacagtcaaattatgggttagggcttcaacatattaatttgagggggacacaattcggtcaacagcaaccctcctgaagcagataagaagagataactgctgttttagagatgaacaaaccaatacacctaatgttagaaagttagtaaaatattataactaaggttcagatagttatttttatctaagtccacactgctttcttagctagtttatctgacaaaagacaaacaaacaaacaaaaaacatttccctactgcttacaaaatagaagt

SEQ ID NO: 64781 - DNA, 1048 bp, Homo sapiens
acccccataggatttaaaaaaacaacaacaacatggtgttgtgtttatagacttaagtcaagattcttgaaatagtgtgacactagaagagaaagtatccagatgttgcatttgataaatagtctggctttctctaaaggatagacttcaggcaaaagcatcatcctccctaacagtgagacaggtagggctgtttttcttttccttcactgtaatattttagacaaatacattgttgaaaagaatgtaaaatttatatgaattttaagaaaacataaaacttcaaataagtttcatgggttacttctgagcatgccctctcctcccaaaatccttggacttttaattcatagcttcaacccatctcctctacagagaaagattctttggtagataatttttagaaacactgcccctttcaagaaatccagttctcctttaaatacattttatctttactgagcttctttgttttgttttacaattcctatggaataaactctgcaccttttaagggtattagtgaggtagttacttacaagtctttgaaagattattttgttttcttttgcaggtgatcactctttttatctgagttgcagatgtggtggaaaatacagtgtttccaaggatgaagcggaagaagttagcctgatttcttgtgatacatgttcactaattatagaactccttcattataactaaaattgttcacaacttgaaatgctttaactgtggtattgagacatgatgagaagccgttgagctttgtccattcaaggaaatggattatttgtcagcccgattatttgcaaagaaaatatacaattatcaagcagagaccacctcagattaatagagaatgaatataattatttatttgtatttataatttatatttacaagttgtcacaaaaatagatttgattatatttggtgaattcccatctgagaactttattatgtcatttttttccatgacacaaaataagaattttcttaatatgagcatgtctcctcttttcagtgggtaacagtatcatcatat

SEQ ID NO: 64782 - DNA, 1163 bp, Homo sapiens
tataaaatcatcagttgtaaaattaatgatggtgaccttctcctaaatgaaaagactatctcctataatgttctatgtataaactggtaaataacaagatttttactcagtgacaatcataagcatatttagaacagaatacattgttttttttaagccacctgcaatatgagacatttgcctatttctgttcaatgtaaactaaaaaacttactttccagcaacaatctttaaaattgctttttaaaagtttttattttacagttttgttatctaagacagttgaattattgaccagaccaaaatgatctatgtatggggaaggaatttattttcactattcttttgactggttttacttgtaaaccttttatgaagaaaaatacactactgggtttaataagagataatgcaacttttttttttaatcacaaattactttcttgaaaagtaaatgtatacaagaatgtaaaatttgaatttcacttacgtaagcgattttaagattctggaaagtcttatgtacaaatatttgccaaaaatctccaaattaactctgcgtttagatacatttaaacattaaatctatttgtagaaaaaggacataagtttactgaaagaatatcagaaactgtatgatcattcacttttattactggaactagtttgtccaagggccaatagcaaggccacttccttgctatctaataaaatagacatatgtgcagtgaagtgtaagactgctctagtaggaaagtgtgtacatcacagtcatcaaaaaaggaacaaaataatgaatttggaaaagccatatgtaattaacattctgaagtgttatttgataaagctataaggtgaacatctttcgtgtctaaatttccatagtttcttcctaaaatgtgttttttcctgagttctaaaaacaggtaatatatatgaataaataaaaccatgtagttatggacaccagtaaaagtaaaattaaaacattatgcaaactaataaggcaactatcaacaatctagggatatctttgtctgaccatcccattgaaccaggatcagtggtttctacattccatctcttcatgaagctttccctaaacttgcctgcccttaccaacctgattgtttccaatacttaacacacaaagtcagccttgc

SEQ ID NO: 64783 - DNA, 1047 bp, Homo sapiens
aaaggtatcattttttgccatatatattggcaaaaatctattagattggtgcaaaagtaattgtggtttttgccattaaatgtattttgcggcaaaaaccgcagttatttttgcaccaaactaaaatgcaataaaagtcaaatcatggcattactgcctgttggtttattctggtataaaatagtaaaaactgacagaaaagccaagcaggttaaaaataatattaaaggttataatgtagggccccaagcaaggctgactttgtgtgttaagtattggaaacaatcaggttggtaagggcaggcaagtttagggaaagcttcatgaagagatggaatgtagaaaccactgatcctggttcaatgggatggtcagacaaagatatccctagattgttgatagttgccttattagtttgcataatgttttaattttacttttactggtgtccataactacatggttttatttattcatatatattacctgtttttagaactcaggaaaaaacacattttaggaagaaactatggaaatttagacacgaaagatgttcaccttatagctttatcaaataacacttcagaatgttaattacatatggcttttccaaattcattattttgttccttttttgatgactgtgatgtacacactttcctactagagcagtcttacacttcactgcacatatgtctattttattagatagcaaggaagtggccttgctattggcccttggacaaactagttccagtaataaaagtgaatgatcatacagtttctgatattctttcagtaaacttatgtcctttttctacaaatagatttaatgtttaaatgtatctaaacgcagagttaatttggagatttttggcaaatatttgtacataagactttccagaatcttaaaatcgcttacgtaagtgaaattcaaattttacattcttgtatacatttacttttcaagaaagtaatttgtgattaaaaaaaaaagttgcattatctcttattaaacccagtagtgtatttttcttcataaaaggt

SEQ ID NO: 64784 - DNA, 1058 bp, Homo sapiens
tttgattacagtttagtaaatgtgttatttgatattgtggactgtttcatcagatttcacttgaatcaagaaaggtaacacctgtgtattgcctccacaaaagcctcttttgttaaatggacacccgcaggccatgaggcaattacatttgttgtttgtgctaaaaaggaggcacttaactagacctcagtaaatatagctgagaactagaggcttgattcttttgtccagccctgagattaggttttatcatagctcaggaagtaaacctagctcaggaagtaaacctctgtcgtagaaaggaaaaacaagaatgatttaaaggtccctttaatgccttaaaatttagctgtaaagttagctatatctgaggcacatggagaattcaggtttgggcaaaattaaaacagtttatggcattcatgaaaacatatattcatatattcagtcttatgcattcattcaaaatggcatagcatatttacaagagtacaaaattaatccaacttaaaagttttgattatgagacgtaatgaacaaagagatagaattaggcatttccattttgggccatttgtaaaacatttactataaatgtgtttattagagtggttttcagccttagttgtaaagttatcatagcttttaaaaaaacacattttattatctgtctctgtgagcacaaaaaaaggaaagaaaaatacatgttaatctaccattttatcctcttcatattttattattataatattgctatagaattcttttttctattatctggtttgaattttcaacttactgacaactagtaggttaatctaacagacaataactgtgtttaaagttagaaagaaaatgttctgttccttgcctcattccatatcaggaaagtcaggtgttgtgtttcagacccaaaccaaaaaatgtgttttactgtatgtttgtttaaatgtgttcttggctagagtaatattttagtcatctgtaggtttgatgacagtactgtgaaataaatgacaagtcatttacttgtactgtacaaagaagcatatcctact

SEQ ID NO: 64785 - DNA, 1049 bp, Homo sapiens
ttagattaggaagccacatcacacttggaatatattctccttactaccaacagagtttggagtctggttcagatgctttcactgaatacctgtgttacaattttgttctttaatttttgcaaatgacttttaagcaactttaaagtacagaagtcccagataacttgcagataaaaatacatataatattttcattttactcaactgtatcctgcctctctagattcataccaatagcactaactttataacttttgagtggttaaaatatttccaggtgagcaacacatacaaatttcaggacaacctgctactctttcaacagagatgctgatcttcatatatacatcttttcaaacatatacatataaaatatactactacaaaataagattattataaactccatattactgttaaactaagctcaaattattctgaaaatattcagagaacacatcagaaaacactttaagtctaggagcctcaaagattattctttagtgttgacatctgaacaaaaacacttcagacttgtaaacaatgagtgaaatttatcttcagaattgtgttagctatagaatgaaaaagtcacgtcacctccgcagtgaacttcactttagcaaaagagtaaacatatttcctccatatcagctgcaatcaaggcattagcagtatgccatgattgattatcctaggagccgttgctgagaaatggatgtgtagcacaggtttttatcactatagtctgcaaaaaacaagtcgcttgtttagatactctagttgtaataagtgacattattaggcagttcttctatttaaatgacataaggatttagtatatcagcagcttataatacacaagccctttcaatctgatgattcctctctctacagagaagtacttttttctgtttataatacaagtggtaatagaagaccagatggttgacttttagctaagggaaatgacatttaaacaaacagaaagacagcatttagaatattcagggtttcaaactataacctaaatacacagtacacattaa

SEQ ID NO: 64786 - DNA, 1676 bp, Homo sapiens
aataagagtttctgcatttctgtagtcatacatgtgccttttggacatattgaactactatacagataatttgttcttttggtccttttattggtttattggcttaacgatgggtaaagttgttacctgaagtttataaatttctccttctaggattttctgtggtttattgtaaaatgaagaatcattttttaagtctttcaattaaaaccttatttattgaattttcatgtcttaaccatagtagctaccctgtattgagaatagacatattaatagaatatgattatgaaaatttcagtgtattctgtggttagtgtggttagtggatagcagtcttttgctattgttacaggaaacaaatctgtacttattagaaaaatcatgtttttacttttatctgagggctaccaaagatatctggctatttaatttaaaggtttttggttgtctttggtaccatagatgtcagcattatacacaaaaggtgaaacattgttcaccaaatagtaatccattaccacagcagagtgatgggaggtgaataagtaatgtagttatttcttatgtttttctttgtgaattgtagagtatgttaataacatcatcattattactggcagaaatgtaagaagtagagacaattttacatttcagaaaggactgattaagtgttatcaggatgtactggtggtatagtgtattaaaatggaaatgtaacaatatggcaataataaagctgttttaccgtgtattagaaaatatttaaataaaactgatggacaacctaagaaacaatcttactaattagcattacaaaatggtcactttatatagttaacactaatagtcctttaatgtgtactgtgtatttaggttatagtttgaaaccctgaatattctaaatgctgtctttctgtttgtttaaatgtcatttcccttagctaaaagtcaaccatctggtcttctattaccacttgtattataaacagaaaaaagtacttctctgtagagagaggaatcatcagattgaaagggcttgtgtattataagctgctgatatactaaatccttatgtcatttaaatagaagaactgcctaataatgtcacttattacaactagagtatctaaacaagcgacttgttttttgcagactatagtgataaaaacctgtgctacacatccatttctcagcaacggctcctaggataatcaatcatggcatactgctaatgccttgattgcagctgatatggaggaaatatgtttactcttttgctaaagtgaagttcactgcggaggtgacgtgactttttcattctatagctaacacaattctgaagataaatttcactcattgtttacaagtctgaagtgtttttgttcagatgtcaacactaaagaataatctttgaggctcctagacttaaagtgttttctgatgtgttctctgaatattttcagaataatttgagcttagtttaacagtaatatggagtttataataatcttattttgtagtagtatattttatatgtatatgtttgaaaagatgtatatatgaagatcagcatctctgttgaaagagtagcaggttgtcctgaaatttgtatgtgttgctcacctggaaatattttaaccactcaaaagttataaagttagtgctattggtat

SEQ ID NO: 64787 - DNA, 1036 bp, Homo sapiens
agattgaggttgtaacttttttttcctgcaagtgcccttcttggtgcttcaatccagaggctaccttatgttgatatgtagtgttatgatgatgaagataactcagttaaagtggtgcctgacaggtttcacctctaaggttttttccctttgtaataaatattttgggagagataagttcagattatgtaaaattctatttctcctcaaactttgtccaataattttagcatccactggtaaattttgcctgtaacaattattactaagatgtttatgcagggttttaaaagtaactaaaatacatgaaatataacggctgaattgttcttgatataaacatttaaattctactggatgcccttttttcttacattcaaaatatgaataaacattattttcttttgtcagcactcagttaatgttaatcaattatgacaccaaaaataacataattgaaatgttacttacataactatggcttttaaagaaatctgatggactagtggtgaggattttgtctccttccaaaccaattactcttttacaaatatttgattttggatcacttgggctttttgcaatcacaatgtcacctctgagggggaaaagtcaaagaaatgtctgtattatttattaagcaaaaacacatgcatggcactgctttaatacttttataagacaacttaaacaaagccataacctttatcctctcatatacttactcttccacacatttactggctttgagaacctttgtgactgaatactttaggtgagaatccaacaataagagtgataaaaaggctatctaaaatttctgataatttcagaagattctaaactttcagataattctacaagaattatcttttgcattgtatccagtatgctttactcctgtgtccaaattcttagaaccaaaattgtggaaaaacaattctacataggccgggtacagtggctcacaactataatctcagcactttgggaggctacggcaagaggattgcttgaagccaggagttcacggttg

SEQ ID NO: 64788 - DNA, 1015 bp, Homo sapiens
aaccaatgtgaaacttgaatctccatattcctattctagtgatttctccattatttcctattacatggcaagaagtaatatatagcaaggaacttttattagtcctttgaaagagttactatcttttttaagcatctgccttaatagaagaaacaaccaagacatggaaggggacagactagtttataatctactaattatataattcatatgtagacccagtgacatttgaatataaactttggtaaatcaaaatatttagtggctacaatttgccatttaaaatatcattagaactgataacaaactcttggtttcctgcaccaaattgtattaggcacttagtacattttgggtgattgtaaaatattttacaatagttatttcttaagtgtttttaaatagtattgatcatgaaactttttgaaatttaccatcaggccaatggtggcagagtctacatagaactatgcttcgtggtgttctggggaaaacctttcgacttgttggctatactattcaatatggctgtatagctcattgtgcttttgaatacgttggtggtgttgtcatggtaagtttttatgttcaagaatattcatcttaaatatatactttctttcaaatggaaggaaagtgtgtttttccttttgaaaacctagttgaagttatttaatgactaaactgtgaaagttaaaacataaaatctttctaaatattggaataataagagagtgtgtttgaattggcactgatagaaggtataaggaccattacttaaatattttctgtattctgtttctaatgggcacaaagggtccttttgaatagtataacaataatagtcattaccatttattgaatcctatttactgtgtttcaggatatgtttgatgttttacacttactaactcatttaatcttttacacttctttgagatacttactagtaatccattatacacatgaggaaatgaactgagaaagcttaagtaatttacttgttccaggtccc

SEQ ID NO: 64789 - DNA, 1028 bp, Homo sapiens
tgaatcacgactgacattctcagggagtttgctgccggctaaaacagcagctgcatgtggatttgacttctttcaggtgaagcgacttccagtcatttggaaaggatgggatgaaaaggaaccttggtgataattttgatgtctgcaagatttagtaccagtgtaatgggattatcggtaacaccttcactgcagaaaaagccacctggcgctataactggcagcaactgagaactaatcctttcccatctcttggatgtcattcatgaagctcaaagctatttctgccctgctaactgtgattaattttataaacaacaacaacaaaaaatcaggtcatcaaggcaaagaatatgctctttattatttataatatgtaaccttatgttaagctatatgacttaaaattatgcaagacatatacaaactaagctatatgattcaaaatttattaagctattgaaatagaaaagttgatcaatgatgtcttggtttttttaattgaatggcaaattatttactattggtaacaattcatatttcagatcaaatattaatttaaatacttttatattcttttggctatagagccactatgaaattaatcaaaatgtctagctgtaaggaattgaaataatatgtttcgtcatatgttttacctgtttttgactgcttcagttgctactgatgaaatgtttttggtgaataaaacataatttgaaatatatagacacctatattttttgtaatgaaggtaatgctagctgaaactgctgatgaaagggcttttggtgaaatatatgattttaatatataaaagtatagagtaaataggaatactgaatgacttatttttaaaaatcagtgattcttagtaacttttcctttagatggaggtttagttgtgtgcttaaaaatcagtgagttagttaattgattttgttagcttttatttcaactaaaaactttatcaagtactttggctggaggtgttaattattttaatatttttttctaacacgatccaa

SEQ ID NO: 64790 - DNA, 1112 bp, Homo sapiens
ccccccatctttttcatttttccaattctggtgggtacaaagtagtgtaccgtaatgattttactttatatttccccaattaatgaagttgagtactttttcatatgtatattggctgtttggttattttcttctgtgaagttccggttcacttctttggcccacttttctgttagcctgtcatttcctttgatttgtgggagttctttatatattcaaaatatgagttcttcattgatgatgggtattgcaactatttcttcttctatgaggtttgtctttttactctcttaatagtgcttttaatgaacagaagtttaagtctttaaagtagtctagttcatcatttatgtttagtgctttttaattcttgtttaagaaatatttatctacttcaagaatgttttatcttcttagtttttcttcaaaagcatttttgctttacctttagatttaaaatttcagtctgtatttacatattatggagttttgcagtgcttttggactcagtttgtatctggagacagaaaaaatgaggtggacttaggccgatgaccgtaattatgtactttctataaaatactcccttaagaaaacagtgtgtttattcatgttcaccttatgtgcagttttaatgtactactttagttgtttgttagtttgcctttaaggagagtctactagagtattaagggaggaatttggggatgaagagataaatgttatgatttttaatattttaagcaatagtattcataaataagtttattcatgaaatacacaattttgtattcacagacacaatccctgttacttcattgggcatcatctttaaagcttaggattttaaatatacctttttttttaaattgagggaaaaattaggttttaacttttgtcaccaaatcaaaataaaatgctagctatttgaaaattatttttataaacttcttttaaattttaagtaagatttcttgtgcaagttatgaacatttatgaggtcttcagttattctttttattgttcaaaaatgcattcactatatgttctgattatgggctatgatgttgtagaaaagtgttttttcatgccctgatattttagtttttatc

SEQ ID NO: 64791 - DNA, 1033 bp, Homo sapiens
cagcatctaaaagttggaataactgtacacactgaaggatgcttctaggtggtgaacctttgaggattttgtaaattgtgtagggtttttttgtaatgtaagttagtttactgttaaatgttctgtaataatttccattccctgtacttttgtttttccaaagaaaatatctaaaactgccccagtataatttacattagacattgtataactatgctataatccagctatcatgttttctagtactcacagtgtggatttcatctgtagtgtctgtgacttgcctatcatggaccttcatgttgtatgcatagacaagtgctcccaaaattattttaaaatgtgtgaaagtcagaagtgtgtttcttcctaccttagggctaagctattgtattttttgaaatgcagcatgcctcaaattattacctgaatatcatttggaattaatgagcatgcattttcttgaaaagaagactgacagacagaaacaacatggagctgctaagccaagatctagcaggataactgatcttatattatttaaaggctgaaatctacttttaattaggattgtggagaattaggcatagtaacttatttcttccttattaaaatattgcattaaaaattagaaatgtagatcaaggaaattgttgatagcagaaaggaatccttcctttttataaaaatatattagtattattttagaaagtatataattataactttttgttgtaaaatatagtgatacaggaacataaatatataatacaatgaataattataaattaaatatttagcatacatctttgtaaccttagagtattactggcatcccagaaactcttgatatgctttcttttctttagaggtaaccagtatcatgactttaatggtaattatttatacaatttttaatataactttgtcactttacgtgtattcctaagcagtatgtttacttttttcgcctcattttaatctttatgaatcgtgtattctttcttcctttgctcagcattatgttttgaag

SEQ ID NO: 64792 - DNA, 1053 bp, Homo sapiens
ggggcccaggtgagaaaggcccacctgtgtcctggttgagggtctccagggttctttggggcccgaggtaggtaatatcacgtaacgttcttctccttttgagtgccttcattcacattgagttaaagaaaaggttggtgaaacaataaacccttagggcttatcaagcaattgctagcacctttctccgctgtgtgtgaggatagacttttttcctgctcatttatcttctgatttctgatagaaaattcactccgccttccccacgatgtctttttcttaattttgtgttatatggaaaggatgggatctcttaccttaatgagttggttgctgagcgtctgggcttagttcgttagtgcctagtggtaggtggtttggaattaaaccttagagcgaaaactcttgaactttgaggctatctggttttcctgtgtctgacaaactatagctctctgacaagttccgataagaagcttttgttaattttaattagtgtttctggaagtcttggatgtctttcctaagcggtgtaaatgacaagtgttactctgacaaccttgttcacacatttaattgtcgtttgctgttaaagcagctgcaaataacagaaaatacttagggtttctttcccccaaaaaactgctaggaagaattagaagtatacctactttattttatgaaccctgaatcgagagtttattactaaaataccaattttatgtgtggaaaaaacatgtattttgagttgtatttttgtatttaatttttttttcaaaactgagcagggacagtgggtaactgatgtttaaaggcaatcatgattgacaaatgtctaaattgaaaaggactcccaaatcattaccgcactactgagttattgactttgacagtgatctgtgataccttttaattagagccaaacctcattgaaattcttgccatcgaattgttttaaatctcactgacctgttgaaatttttgggctgattctgtttgataaattgaaattagtattgctaaatagtgactggagtttttcatttggggagg

SEQ ID NO: 64793 - DNA, 1096 bp, Homo sapiens
cagctcccttcaccatcactgtttttgaagatgctttagtttgtgtaagtccccaaactgaatatattatcatcaggttggttgactactgtggaatagaacaggacaagcatctttctgaacctagaaattagactgttaattcagaccaaaattacatttgctttttggcagttctgtcacatcattatcatttttacttgcccagtgttatggggattcactaaatagattaattaaatgcttattgtacaacctcaaaatttgtttcacaaaattggtaattttcagcttgatgagtttagtgtttttgctaatccctaagtaggtgatctccctattagtttttcctgcctcatatgattctttgaaaaaacagaagtgataactattatagaatatatgtgtatatgtgtataaaatggtgtgttttcaaactatagtagatgtggatgatttataagacaagatcgatttttgtttgttgttttttcctctaattaattctacaaatattaagtatatgtatactatgtgccgggcactagagatacaataataggatgcattctctgccataataatcttttagcttcatggaggaatttcaggaatgtttattaaatactactaggggttaagagggtgctccagagcacactgatatcttacccagccttgagtaaagcttcttaataatggtgccacctaatcttggtctggaaggaggtgagcaaattagttagccagagttgtgaaggaatttatacaagggtcctgaggcaaggagcaatatgggtggtgctaacaagtagtttgctatccctggaatttatgaaatatggaagggggaatgtattgggaaagaaggcaatacaacatttaaagaggcttatatggcttgctttttgggtgtttttcgactgagagcaatgaaaagccatttaagtttttgaaacgggagtgacaagattagatttgctctttagaaaaatatactcttgagtaatgtggagaatagattggagggaggagtaaggttagagatacagggaccaattgggaggctgatagtgagaggtaaggatgaattgaa

SEQ ID NO: 64794 - DNA, 1085 bp, Homo sapiens
ttgtttaacttttttggaaactgccaaactgtttttgttttgttttgttctgatttgtttgagacggcgtcttgctctgtcacccaggctggagtgcagtggcgtaatctcggctcactgcaacctccacttcccaggttcaagcaattctcctgcctcagcctcctgagtagctgggattatacgcatgtgcaagcattcccaggtaatttttgtgtttttagtaaaggcgggatttcgctatgttggccaggctagtctccaactcctgacctcaagcaatccacttgcctcggcctctcaaagcatggggattacagacatgagccaccgcatctggtctgccaaactgttttctaatgtagttatagtgttttgcattgcaactaacaatgttggagcattttatttgctccacatacttgtcagttgaacatcttttaatatgttttttggccattcatgtatctttttttgtaaagcatgtgttcacatcttttgctcatttttatgttgcccagtttgtgttcttactgcattatgaaagttgctaaaatatattctggataccagtcctctactatgtatatgtattgcaaatatcttctatctgtagtttgcctgttttaaatcttcctattagctgtcttttcaaaggtaaattgtaaacatttttatgaagtttaatttattcatttttttctccagttcatgctttcatgtcctaagaaacatttgcctactccaaggttgcaaagaaggcattttcttctaatagttttaattatttcagcttttttgtttaactctgtgatccatttcaagctaatatttagtactagtacaagaggtaagatggaggtttttgctgttttttgattgagtgtactatgaggcaagattgaagtttttatcgctttttgttgtttaaatatggatattcagttattgcaggaccatttgttacaaaaaaaattatttctccacctttgtcaaaaaccgattgtatggatttatttctggactctattcttttccactgatatatatttctgtccttttgctaattccacattaccttgatt

SEQ ID NO: 64795 - DNA, 1046 bp, Homo sapiens
tcaagttgaagatgtaatattactggatttggttttacagtatttaaaaccaaattatattaattatatctaatataaatgtatattctattaccatatttggttttatgatatttaaagaattattttcatatattttcacgaggcatagtctgtagctttctgtttctgttgtatcttgttctattttggtattggggtaacactggcctcataaaatgagtttagaagtgtttcatcctttcctcttttctgaaaagagtacatgtgggattggtattatgacctcctaaaatttgataatgatgtgtagttttgtaaaactctttgattttgatgttagagtaatgatgggcctataaagtgggaattgtttccttttcctttttgctgagtttaagtattggtattattttttccttcaaatatttaaatttactagtgaagttccctatacctgaagtgtgtatgtatgtgcagggggtaattttgtggatatcaaagtgatgtagtagttggagaatgatgtctggaaccagaaagtctattaaaagtacctagttctggccgggcgcggtggcttacgcctgtaatcccagcactttgagaggccaaggcgggcagatcacgaggtcaggagatcgagaccatcctggctaacacagtgaaaccctgtgtctactaaaaatacagaaaaattagccgggcctggtggcaggcgcctgctactcgggaggctgaggcaggagaatggcgtgaacccaggcagagcttgcagtgagccgagattgcgccactgcacctccagcctgggcgacagaacgagactccgtctcaaaaaaaaagtgcctagttctcattgactctctttacaagtctcttagcctatctatctatgcctcaggaatacgcagtttttgttccacctcatatacttgttttaaggaaaaaaaatataaaaacatatgagtgtgcttgctgtttgatagccatttgattcttttcttgctatatgtttctaactgcaacttttcctttttacagag

SEQ ID NO: 64796 - DNA, 1059 bp, Homo sapiens
tctgccaaaaaatgggacagttataagaatgaagttaaagtaataacccttaattgaccaaatataccattgaacatttttactttattaaactccaaagttgtaatcatatacagattcagaacaaaagccatacagtgtatcatgttataaacaattaaaaattactttctgaccgttggtatcagtcttctttgcaagatttagtatacttaataccttataaataatttttttccacacatttttacttttcctagactatataatggtatttattatatttccttaaaactattttagcactatatatcttttgttcatcatataaatacaactattaggagagtcctttgaaggcagagctataatcagaatattttcccttttttgtcaatattttatttgttcagaaagttatcaggctatctatacacttttcagtgcttactactctgaagtgttagttgagccggaaatttgctgtttgaccccagggtttcactctttttttttttcttcctggctactgtgagagcttatttaaaattctaagttctcccttggcagtcacagttagagcttctttggcaaagtaaaaagactaaaaaaaaacatgcaaaggctcagtactgcttccagtgacctacatttctagccagcttttaaagatggcatgtgcctgattttctagtaaggaaatgaaggataagataaaaattaaaatgtacaggagaataaaccgactctccaactctctatcactagctagtgagaaccattgctgctatattaatataaacacatttagcattgatgtttattcatcaatcaacaaaaggaattttgcatgcagaaaagttgtctaagtcatacagcaaaaatgctatgccctgtgataggacgtttattctcaagaaagtaaaacttatttggaatccaagcttagattttaatttctatgttaccacttaactagctgcaagaccctgcctaagtcacttagccttttatattaagagaggagtgatacttaccctgcctaccttattccggagt

SEQ ID NO: 64797 - DNA, 1008 bp, Homo sapiens
ttaattattaagtgatagaaccaggcttaatctgtcagatttatctttcttttttgcttcactgcttcagaagattttggtgtctttcacctttactttcctgtgtcatggagtaatgagcactgataaaagaatttttaaaatctggattcttatattgagttcatcctacccttaaccttgggcaaatcacctaaaatcagtgaaaatcaatatcttcatgtgaaaaattggaggtagggagaagaggaaataccacctgccttactagctcactaaatttttgttaagtttgagtgattatattgatttttatgtttcccagtttttgccacagatagagtcaaacatgcatttacatagaagcttgcgaaataggtcagggtaattttcccataatttttcaaataatagtaaagagtggaacccaggttcaaagtaaattctccctgattcaagtatctgtattagcaataatgccatactgtctccattaacagagtgcttaggaaaataaatgtaaaatgtatattatgtttgatgtatttaaatgaaaaataatatggtgttacttttgtgatttaaaaaaatgtattttaaggacaatacttttttttacaccagcaagtacagtgttattcttcatttactcaacagctgaggtaaggaggggattagcatgtgtcaaatatattttccaagtcaggtactctcccagacgtttgaatatgggataactcattaaattttgccaacaaccctccaagagaatgttaaccccattttgtaagcaatttcaggttagagttgctaagtaactctcctactgttgcaggctgtcagtgactgagctaacacccaaactcaagtttctaaaacctctgctctttttttttttgtaccgtgctacctccatttactgaggcagtaaatgtacacccaccaacgtaggtgccagaaaaattactccttaatcagccttgaggatataatcctatagtctttaaa

SEQ ID NO: 64798 - DNA, 1076 bp, Homo sapiens
actgataatgaagatggaggaagagatattggaggtttcaacaaaaaaagaaaaagagaaagtatgacattgtcatctaggagagtgaggatatgtatagtgggaatagccttaagggcttattgaggtttgtggtcatgaagttaaagtcataccagtctgtttctctggccatttttagctacattgaggcaagtgtggaatagacagagagttgtgtttaacaagaatagcagtaagtgtgacaaagcaagagaagagcaaggaagtgaggataaggattgaccatggattgagatggttaattaattgaaagagcttatcaaagcaggtgagtgaaaggtgtggtagacaatgatatagagatctcagcagggtcaaatgattgcctatgggtactaggtggaaagaaagtagtggttatgtagaggggtgtgcatgaaattgagattatagaggtatggcagttattgataattacatggtctaaaaaacaaccatggggatgatcaacttaaatagaatggagataagattgttggaagagagatcaaaatactgaaaggccagagtgttagaaaggtgagtcatgacccagagttgggtagatgacagcaacagtgaagggtagtaggagacatagtctaaaaccttgtttacatcagtaattaaaggaagtcagagtgatgtcaagctgagttatttttcatgaaggatcataacccctcttaatagtatccctgtcagaacctgcattgcttagaccatacatgtaatttgtgcatcctcatagttcttagtattttcctagctgtggctcagaggtttctgctggtcattgttcttcttggtgcccttaatacattcctacactttatatgttcttagttgaacatccatggtgaagataatcaaactcagtattcttagctgaaaatcatcagaggagaaaaatcagtaaatgacagccttcagggtaacagtaatgaaatttttaacttgaaaattacttgtgaataaacttcacggtctctatagtcacatgcaaattatatgctaatataactttaactcag

SEQ ID NO: 64799 - DNA, 1014 bp, Homo sapiens
ccaatatcccatatctgttgtacattttaagctgctattcaagctcggatctggctaactctaaaatttaaactctttaccctctgtcacactatatcctatgtgtcctgaattattaactacctttgatgacactaagtttctattaggaaaaaaaagttactggctaacattgtaattattccatatttattaagagaaaattattattgtaaaatatttgataaattagtacatataaaagattaaacaaaaagttccattctagacaagagagaaaaaagatgaaaatatgcttccttttgcataattgcaaagcaaagaaaaacaatcatgaaaaaaatatatgtacatatgtaactttaaattttattccaaaggggcctctgtgagaaaacagaaagaaagaaaagggaaacacttttttaaagccattttgttggtgagcatctttattacttaaggaagagattcccattgcggatttctgtgacagtgaatcctgtaccctctgtttaagggaacagcagattctatcagatgacctccaatcagcctatctagataactgattaaataatgagtgaatgatgtagtgatctggatgtctgaacctgaaacaatattttaactttgatactttacaggtatatttcagcccctgtataactggaagagagattaaatttatgcttcttaacatagcagtaaagagacttctttgaaatagacatagcaaaatatagggtcagattttggtaatgagtataaagttatatagtgtgacaaagaattaagacatattcctcaaaacagagaatgtctttttttaaaaaactgcacaaccttctaaaatttttccaattttcaatctctcattcctagacgattttgcaaagttatcatatagtagtcttctggccctaataccaattgagttataaaaaacaagtaaattttcccttgctctttgaacataatgtctgaccatatatttgtttttatatgaaaatg

SEQ ID NO: 64800 - DNA, 1047 bp, Homo sapiens
ttagtcttttatttatagataaaaggaaatctgaccttttgattaagaaatattgtcagtagcctttataaatgcttgttcatctgagggtccatgacaggagtactcttcccagttgagtttatcctaaaaatgaaatgataagagcctgctggttattatccatgattcttcttaatgggggagccacatggttattcttcatctcccacttgttctcaccctttactaccaacccagccacaccccacccccaccccaacattgttcagtactcagcacaatgaatcattttcaagttgactcattgtgaactgtatcccagctgttggaatgtctggcagacatttttgtttgggtgaagaataactggctgaaacccaacctggatgagtttgatataatggtctttggctaaagaaatattgagaggaacatgtttatggcctctgaagcccctgttattcctggagtaggaccatcccctgtggcacagaactgaaagtaaggaatcaatctggattattttctcaccattgaatgaaaaattgccttagaaaaaataggcatttccaaactatgtttttctatacttagtgtgcccacgtgattgaacatattaaagacaattaagaataattatttttactgattctttttaacaacactgatccaaaggctgaaacattccttgtataatgctgaaacattctttatataacacacattccaacttatgaaggagtttcaaatactgctctaggtgtgagttaaccagtcatttcaacagaatgtttggtgacacaggctactatgtgtttcataataccaagtcaggtaacattgaccagccctctttaatttttcattcttaggccatctttataaagggacttaagaaacaagaatattagtaagctcagttgtaatcatgttcccagaaaatgaaaatcttttattatatttgacctctttctaacaggggatatagcaggctgataaattttcttgactgttttatatttcccattctcttcttcaaagatt

SEQ ID NO: 64801 - DNA, 1109 bp, Homo sapiens
ctccagttttaaaaggggaggatgcttgtgtgtaaatttacaggattctgctataagactgtttaatttatgcatctgatgacaatgttttaaattttttttcttttaatttcttttccacaaggattgattcatatacggcagattcctcggcttaataacttgatctgtgatgaatcagatgtcaaagacttagcttttaaattaaaaaggaagctattcaccattgaggtaagagaatttttatgttttagtttacaatcttgagataaacttatttttaacttatttttactttattttattttcattttcacttatttttactttaatgaaattcttaggacatgttttatgctaagtatttttaagttcttctaatataacaataattttttagactattgttttatttttacaatatatcaagtatggcaaagatgattttcttttgaatatctattaaaagtaagctccaaacttacatgataaatatgatatgcatatttccatggctttgaaaagcatatttaattaagtgttaatgagctgcgcttacttgggtgtggaatgtgaatgctacccactattgtctgtggctaagaggattcttatctacattttaaaagcatttttctttactgttagtgaaattacctttcctcgtgtggaactaaacaaattataatttacactagtgtctttaagtacattttctaagacactacaactttttttgtgacccttacgtaagcaatggtgacagaaagtagtaggacaaaatatttatttcaacttaatcttcctaaagagcaaatgaacagagaactattaaggaattagaattgatgtatttattaatgaagtaaatgctcagagagagatggcttttgggtgatgtgatagttatcagtatagtcggtgcaatttttttttaacaaagacataaaacagccaagcagccttgacaaaccattttgtttaatctcttttcaaatgaaaagctcctaagcaggccacttgtcttaactgcttgaaaccataaaaagagagaattgccaccaataaattagcatatttttaacttcatcaccaaatgatggtcaatg

SEQ ID NO: 64802 - DNA, 1641 bp, Homo sapiens
aattggtcaaaaaaatagtgtcaaagtaaatcatgtttactcaaggttgtcttatcatactttgtccctaattcagaataggacctcagtacctctccagtcaccaagaactttttctcacaaaataattgaccaaccagtttttattaagtagctattattttttatgtactcatgtaatagatttattctcaagtattaagactagaatagaatcaatataagttagatttataattatattgccatataacttggtactattcagtaggattattcaataagattattatttacatattggaaaagcataaactcttaccaattacaggacaggggtgctagtagctatgataatgtgtaataatttggagtatttcatgatatgtttggtcctaggtttactttatttcttatgcttattttcagcagcctttctagtttttaaatgagaagtagaatgttgaatatgtttactgtatctagagatgggagcaggatggttaacttgcttgtcaactcacaattatgttactaaaataaaataatggaaatataaatgtctggcttgggagccttcttaagttgtagcatcatggcctgtagtccaatatactacaaatattgtttgctgtttcaactagcttttattcctagataacactgcagctagcagaaagaaaagaaaatcaaagttgaacataggcatctattcatttagattaaatcagttgtcaaaaataaacccaaattaacattttttaacaatggaaatctaattttttacatgtgtacattttgatatattcattatattatcattctcatgtttatgcttttattctcaagtgatatcagcatataatagcattacataggtttcaaagaatcatcagaagttggtttaatacttactacactttatatatttcacatgccatagttaacctatcaaaagtgcataccaccttaaggagaacacagttttgagaatctgtctaatcctatttcttcccactttggaatcttaattagaagagataagaaaaaaaaaaacatcatttaactaaattattgtcttgaatctgtagcaaaaggtataatccgcaattgggccaattagtgaaccccatagttagctatgctgcagcaaacaatttgattagatctgacaccatcctagttcccactgttgttttgccaggtatgatggtcagacttcaaagagcttgaggcatcagcagggcaaggtttggaggccagcttaggtccggttgttaatctctctgctaaaaccacagcagctctcacacaaaacaagcttacacgacacaatcatgcggtattaaagttagggttgagtcatgccaatttccctttgattttttgatgattgaccaaagatggctacatgactagacacatgctaaaagtatcctgattaggtaagttcccaaaatatttgaagtattttttaacttcctatataaatgttgtgaaagcttattccctttgatcaaaccttccaaagtaatagtactgtactggggaaaaatgagcatttcttaccggcaacctgaatatcaaacttttcacttacctctttatataaatttgtctttatattaataattccttaag

SEQ ID NO: 64803 - DNA, 1050 bp, Homo sapiens
tcaagaccttttcatgtcatttggattgtaaattaactacctcaacctcctccttagagaagtctgactggcctgtctgaagtgttcactgagttactcaccctcatgtactgttcgaattctcagtgtaatgtattttataattgtccattagtttatttgtttattttcccaacctcaccactaaaatgtaagctccacaagagtaaggacatagtatgtcttatttgcagctaaatcctgagtatgtgtaataggtgctccataaatatttgttaaattgtgaaactacagtttttaaagtaactcatgcctactgtaagtttctttaaaaacatatatttggtatctactttgttctaggtattgtgttgggtgctttcatatacattattatatttaattttaatcctcacaggaacccttgcatacatactatttcacatatttaataaaaagaaatatacaggagttatataaccttccttcccaaagtcatacatctgtggttacagccaggattaaattcagatcttctgaagtcatatgcagaataacactggaaagctaacatgttcacaaactctgttaattattattaattttaaaaaaaataagttttattacatgtttaacagaggcctaggactactgcaagtgcttaaaggcattatttcatagaccttacaactacccatataacattattatcttcattttacaaatgaggaaacttacagtttggagagatcaagcaacttaacttatccggagtcacaaaactgataactggcagaaatgacacttaaattgaagcctgttttattctaaagcctgtgctcttaaccaccaactatctgccatgccctaagctgtactgctatctcgtcttcattacataagccagaaagcctgtgtcctgaaggattcttcaataaaaaatgtttttttaaatctcagaaaatgtgttaatgtgatatatatatatgtaacattcatattaaaaattcttctgttccccagcatgcatttctactttttgtaaaatac

SEQ ID NO: 64804 - DNA, 1551 bp, Homo sapiens
tcaatgtagtgttttcagcctaataaaaatgttgtaaaaatacttgtaagcttggaaatcacactagctattcttgtttcaaattctgtttaatatattgttctgtatgattttataataaacagattactccttgaacaggaattaagaataaagctgccaggaaggggttttgttgtcagagtagttcccgcctcatgttttgtaagagatttcatggtcccattgtaaagagtagatgatttaaaacgtgttcccaagataaactttcccattgtcattaatgaggatggataatactgagtgacaagtgcattaggaatgacacagaaagagctgttagatttgtcagagcgtatcacttcaggcattgacacttgaggacattctttttgtggatatttggttggggggggagtctgatttaaagataccaaagtttgtgtttgctaatagaataatgtattttacaatttataaatatatatttttcagtgtttagaaaatatttggaaagttatttagattaggttcttccacattttaaattcatgcttttattataacctgatttcttcctgagaaagtcatcaaactgtaagacatttgaatattaaaatagtcccataaaactaaattcttcttctaaaaagtcttatttctggaaatatgcagctgaaggaaagatactaaaaattaaacaaatttttaaaaaacattttgctatcttactcctgtatctaaaagggtactccttactatgcatcaccttgagaataaaggttttgaaataagaaaatacatgtaattttattgtctctttgaaaatacattacagaaacatgttttaaatattaatcaatgcgcaattaataatgtgtgacttttctggtatttaaagtatttccaagctgtagtatgcatctcaatttcgattttgaacatgcaattggtcacttttttgctttgattcatcttttatgctgccaaccaaattttgcctctgtatacctttttgacactaataatgactgagtctctgttcatttgagttcaagatttcccaagcggcagtttggagctgggataaactatctatcatgattgcataccactaatctgtctcaaccaaaccaccctatgactgaaattatacttgacagtttacctcttcttgatgagcctgaggtgaacatagctacagaccatccctgggaggacatggcaactactccatatgctagggaggatccttttatttgtgacacaagacttaaactatgcctgtagcaaaagggaagtctctctccctctcgctctctctctctagtatttttaattttcagtagtattccttttgtactatgaagcttttttaacacaaatatgtttggtaaaactttctaccattacaagtacttcctataggttagcttcaccgtgtgtttaaaaactataaagtcatttttcaaagtatttatgctttctaaaatattatattattgatataccataatcatcaaatatcaaagattcctattagtatttgac

SEQ ID NO: 64805 - DNA, 1062 bp, Homo sapiens
cctccccagcctcacctcttgtctcaaacttcgacttgcagctttactctcacttgcagtctcctcaatggcccattcttctgtcacttccatgtcttttatttatttttattttattttatttttatttttattttattttgggatggagtctcgctctgtcaccaggctggagtgcagtggcgcgatctcggctcactgcaacctctgcctcccaggttcaagggattctcctgcctcagcctcccgagtagctgggactaccatgcccagctaattttttgtatttttagtagagacaggtttcaccatgttggccagaatggtctcaatctcctaacctcgtccgcctgcctcggcctcccaaactgctgggattacaggcatgagccaccgcgcctggcccacgtcttttataaatgcgaaaaatgctctccccttttctgcaatagatcaatcttgctcttcatgtagtcctccacttagatgtcacttcctttaaaatgatttttctgattcttcaagactaggttagatagcctacctctgtgctcccagagtaactcataagttattgtagcatctacaacattattttaatttcctgtttctttgatgtctgtcttcaccataccataaactagtggcagaaactgtctttttcttcctcagtcattcacccacagcaccttacacaggatttagcacacaatagatacgtattaaacatatgtggaatgagtggaaaactaatgtttaactctgctaaatacctgactgcatgtttaattattcccgctctctatatgggtctaggttgtctgtttcatggagaagggtattagtaatcagtcctccaaacccaaactaaactgtttagattttccctaattaccaaactatatattgtccttaaggatttatactttctgcttgggatatgcctccatatcaacctagaattgtttttcaaaataccttaacatctaactcagtctttccttcttagtgaagatcttgctagctccttcttcacacaactcatccttccctgccaatata

SEQ ID NO: 64806 - DNA, 1043 bp, Homo sapiens
ttttaattaattaaaatctgctcaataaataacttacagaaagataaggtgtttatttaaaacaggcttatatgactaaaatttatcagtttaatacaaatatgtgtttaaagtttcaactttgagtatactatgcatattttataccagattagactaacacgccacccccgctacagctgggaaggttaaacaacagtatgcaaatctgaattggatataacagctgttcaaatgccagggcgtactttacttaaaaatgtgaccatttagttctgttaaatataaactgctgttctagctatgtgtattattttccttaaaaaatccttttaaaaaaaaagcattttctgatatgtagtagaagcactactaaagttcaatgggtttttttttaactttttctttctcaactttctgaaaaaatgaatgagacaattctcttcttcatctcttacatcctattcatctcatcagctgcttttgttaatataaaaatattataaataatcattggaagagtggtatttcttttgatgagaccctgattgcatttcaagtcctcattttagacagaaacaagtttagacatttttaatagtggacaataattccaccctgactacgtggtatacatgttaaattatgagttgtgtaagtaccactctcaaggataaaatcaagaaataaagtcctgaagtttccaagaatgactacaaatactttatttacagaatgtcatcatcattaaaagtctgtaagattatttgtaaatgaaggaggtggcccgtttttcaatttcttgggacctagaattttagtaagatgattttaaacaaattgcttttgagagaagcctgcttaatctggtatcaaaaaaaacccaagaaacaaaaaagaggctttcctcttccattataatacagaaactgaaatgaaagccctgatgtagagaaaacccaattataatacaagaaatgtaaaagctaggtactagagctattattatcctactggaaatggaaacgaagacttagagataa

SEQ ID NO: 64807 - DNA, 1020 bp, Homo sapiens
tgtcaactgccccagtatcgtcaggacattcattctcctcccatattctcagtctctccaggtctttcatgttcttgacatttttccaaagatacagaaccttcattctgtaggctaatcataaacttagatctatctactatttcctcatgatcatgctttttgggcagggaaaccactaacatgatactctgctcttttcaaggctacacatcaaggtgatgtgccatacatgaagttgacccacttgtgatgtcaaccttgatcatctggtcatattgttcagaaaatttctccactgtcatgtcatcccttagtaactaactagtagtgcataagggagatattctgagattatgtcaatatcgttttcctcattaaacctcatcaaacccacaagccaggcctcagtctccattgaaaacttccatctgaattgaactatgggtgatgaactatgactgtcaaatggtgattttctatttttatcattccttcgaggtttaatagttggtattctatggcagggaagagatttcttttcctacctaactatgcatccatctatctcagtatgggctcatgaatttccattttatttaatgttttccattattaatttcgatgctcaaatttcccagactggctagtaggaacctctttgaattaaatcctgggccatgttttttcatgctcctactgttctttgagtatctccttactttctggcacaaattttagtctcattttataccttctgtgcctcaatcctagaattagctatcttgccaagaggcttccctcctcttcacttcttttttattttttgtggaggaagagactcagaaaccaatatttgggtacttggagtattccctagggttgtcattgcttctaggctcttcagaagagaaggttaagaaatacacacatatatagtacataaactcacatacagatacatctatttctacatgtatattgttgtgtgtgcttgagtgtgcatggtgtataatcatg

SEQ ID NO: 64808 - DNA, 1015 bp, Homo sapiens
accagtggcatagtcagcaagcttgctaagcaaggggaacagtgaaaagaagacagggggtgcagcatgccagtgtttctgtggaacaacctttattgcccagctatccccagatattctaaaacagttatgacaccttttcagatttagatcacctctttatttatatatactgtgactctgctagttttaagcaattataattgatcaaaaacattagccagtgtttttcaaagtatgagtaaaatatgaatatttttaacataatctatatactttgcttcatttatgagagaatttgaagcagttacctaatttgctcttattgtcaccattttattgaaatggaaagtaactagacaaaaagaaaccttaaaagattgtcgcctaaatctcttctcttcaaggtacaagttacccttaaactcttctctccaggtaccttacaccttagttgtgattatccagctgtcctagagcaagcctgtgatttctctattggtgatcttgtggcagtatttcacattattatatgtttttaaggaaatcaaagtgtttcctgattgaaaaataagaattagtgcaattgttttatcttctagttaatatgccttctcctaaagtaattctcaaattgtttgaaactgaaggccaagaatatggcagaaaatagaaatcatttgaaactggtaaacatttcaacttgaatatatatgtccaaaaaattaaaattcaaaaatgttatatgcactcacatattcagcactctaacttaagctacagcacacttctgagatctgatagtaacaatattgtaaagcttaattatatttttatggcccatgccatctgggcatttgttctgcttacaatagtaatagaatttaaaaaaaaaaaatttagtttgcagtgcaattgtcttaccacaaatgcatcaaggcaaattatctcttattatttcagatcctgttcttgtagtttggatttgtatctgtttgaaaatagaaaaacttct

SEQ ID NO: 64809 - DNA, 1025 bp, Homo sapiens
catttttgagttgagattgaaggaagaatgatgtgttcatagatatgaaataagggccgggcatggtggctcacgcctgtaatcccaacactttgggaggccaaggcaggcagatcacttgaggccaggagttcaagaccagcctggtcaacatggtgaaaccctgtctccactaaaaatacaaaaatcagccaggcattgtggcacatgcctgtagtcccagctattctggaggctgagacaggagaattgcttgaaccttggaggcagaggttgcagtgagtccagatcgtgccactgcactctggcctaggtgacagacagagaccccatctgaaaaaaaaaaaaaaagatatgaaataactaaaacacaataagtagacatgaagagtaagaatcattgaatttcagaagaaaagagttcattggcataaatggactttggatacctcttcagcatacggatgagaagaataagacacagagagcgacataatcagtattacaatccatatcttttcatgtaactatccaagcatttaaatactatatcatgtaagtaatagagcttacaatataataggggagactagaacccgtgactttaggctgttggttccatgaagtaagaaatagatggggaggtaactatgagcacggagtctaattaggaaacaattgtgacagtccaaatcaaaaatgattagggaaacaagatataaagcaagaggaatcttgtattatagttcactatgctcttttagattggatatgaatatttatggttacagtaaatatgagactctgttacactctaactgaaagtcttttatattacgcttggatgatacataaatgtaaaaaacaaagtgtactttatttttagagattctttatgaaaatgcaaacaggttccataaaacctagaggtaatcaaaaacttatctgggacacttttgaaaatgaagacactgtgtgtaccatgtggtagtgttaagtgcccttataacaaatcattcacagaa

SEQ ID NO: 64810 - DNA, 1024 bp, Homo sapiens
tgcataagttctagagatctgtgtacaacattgtagctgtagttcacaatactatgctgcacacctaaaaagtcattaagagtgtagatctcatgttatgtgttttttaccccaatttttttaaaagagaaatctagctattttgatctcatacaccaatattctcatgacaaatggggaatgttaggatgagacagatttgtattgaaaaagacaaaaccaataaaagtgtagtgacacaattaaaattctctgagactaaacatttctggaaagtatacatgactataattaattgaaatgcagcttttactaagtctgcttatatgttcattttcaaagtgtgagactgatatttattatggatgtcagaggaattgttttcttcactgtggatctatgttgtatagcactttttatttgtgatttgttctgtcttagggctatttcaagtatgattttcccatggtagacacgctatggaatttgtttccttgacatgtacaataatttcagaatacttcttccagtgttttttgttggtgtgtaaggttattaatagtgaaaaactttaaagtacaatctagtactctttatagttaggatttttattttggtaataatgattaatttacagaatctcatgttaagattcatgctatattgccattattttaaaagtgtgaaatgcatgagttttaaaagaccaagtttaaaataccaataagtagtgatattcatataccatatgtttacctacaaatatcttaggttatgtttattacacactaaacctcctctcaagcacaaagcaagcacacaattgtcagaccacaaggaagtccataatttccattactggcatcaacctttccatttatttcttatgtacagaacatatttacctatttatcagaatatttactcatagagtccccatttgcttaagcattactgccatcactccaattctgaagatgataatcaagaaatttttttctctctaaattcatagacatgcttt

SEQ ID NO: 64811 - DNA, 1091 bp, Homo sapiens
ttggggttattcaatatccctcttcaatgctcattttctgaagttgaaaacacttatgcatgtgctcacatgcacactaaactttgtcagagatgaagtacttccaaatggtacttgaatgtgattaagagaaccctgggcctgataggactcattacacaacacgccagatgtaacagtttgctcaaattttggttctaagaaaaggaaacatcttggtaaaaaatggctcatagaagtggaggtaatagtttattgtatttctatataaatgtgtgctcaatacatcattttaaaagaaatgtaacagactttcttcttacaaaatatacttaacattggaatagtgtctgtcatttctttggcattagacaaagaaatcaaagtctgtttgacttactgccatgagtttctggtctagagttatctatttttcctccctgatcattataattttctaaaacaattcaggactatattaaacaattttatacttaatgtcattggtgaattttatgtttattttcaagtcaaacaatgattaataatgttattttacaatgtggttctacagatctttcaacacagcttaaagttactgaattcagttttcaacttctaatttcagagcgtattaacaaccatcccatggttgaatttcctaccactaggtaaattcctcgaggattttttatattatctcagcctttaatttgtgggtcacactcatgttcgttctttatcattccagaaatggaatctgtttgagttgtatagcaatatagtgaagaaattagaaattaatggttgttgaaatcaaatagatagacttataggaacttgattgttaagcccaaggttttatagatgataattgccctgtgtttcaactggactagactattatgaccatggacgttgtcaacctagaaaattctctgcttttgcattttttgcccaacccaagttttgtcagatagtatatgtcacaatatattgtacaagacctcacctcacactaaaacattttatatgaaataaattctgttgttaatgatatgttgacaaagagggtggaacttttttttttt

SEQ ID NO: 64812 - DNA, 1048 bp, Homo sapiens
acatcgtttgtgccaaactagctgtgtgtgcttgaagacaacctttgaaagtctctgccgaccagtataatctaatgatttcacttacacctcccttatttaacactgtcatggaaagtaaggaataggccattcataatttacatgtcatttgctgcttcatattgtgtgaaatttaattacacagcttaaatcgtagccagtgctcatttgtctcagggagcactcacaataaggcattgatgtgagtccagcattcacccagagtccgccttttatcaaatcaccttctggtgcggccatcaaggccgcacagttgttcttttcactcttttgtaaggaaaatgagagaatttgacccccattttcatttaaaaatccagggcatcatataaaagatgctgcttgaaaagattttattcagtgctttaccacaatggaatatacagataaattttctgaaggtgattacagagcctggttgggtcctcccagagctgtaatagttttgtagaacttccattgaatcaagagaaaaatgaaatactaaaactccccacaggtgtcggttttattattttttcaacaaacacttctggtagaggggaacccctgatccacagctacaaattactaatcatgtgtattattcaacgttttagtccatttctgaaacttttcctttaaatcaaaaggaccgctctttagtaattgcaggctgcttggcctcctgatgggagactcatataaccgtaatccccctgacgactgctactggcacccatcccactcctcagcaaaacactaagactgaattaagaggatgaagaggataattattagattcaggaacagtttcccagcaaaatctgttttttattcatcaccatgaaaaactgtttatggttttggaaatactctgttatggtaatgggtatgaagctgttagaagaagtgaccttattctaaaatttaactgttaaaagttttttaacaaaaaaaaattgtatacagtacaaccaaaagcatacactttggtgctgcattg

SEQ ID NO: 64813 - DNA, 1749 bp, Homo sapiens
actgttgaaatatacaagacaggtaatagatttaggatgcaaacacctatagatactagtgttacctgaaaataaatatataatgaaaataaatatataattgaagatgcctgttataatttttcatttagaaacagaactactaagtgtttgtaatatactctgtaatttacaaatatttgattgggtaaatgtttgatgtatttgcttaaactgattttagagcaactaatatccctttagcacataagctatcttaatgaaaaacagaagaaaaaatgccactacttgatatatttctaaaggaaaaactcattttttcatcatttattaaatagcaaaacttgtcagtattgtactttagaaatcatttgatgaaaaaaatcatgctttcttttgctctgagtatctcaagaaattcttatatgtggttttaatactaaaggcctctaaaggaaattcaaaaatatgtatgtttcatttaacttagatctaaaaagcttagaaaataaccctgcataacaattacaaaatcaattccctccactatttcattttggagcactaattttgcaaatgccaaaaggaacattcccattgcatacctgcagaccctggatgaaatgacggcaaacttcagggtttctacttgaccagagtggctcttctggctacagtgaaaatgtgagacaggatttagccgattcggtgtatgaagtcattggctcttctctattttgaggatctttcagacctccttgtaaaaaaaaaaaaaaaattagctcaagggtagttaggtggtggggggaaatcccccacatataaaagcaaattactttttaaagaatagaaaataatcggtatgagaaattacttctgaattatccaagtggaaattaaacttagctcctgttaacatttctttagaaacatgcattttgattaagccaaacaaacaaccaaaaaaaaagaccctaagagcagcgtagtcatttatctatatactcacaaatacttttcttttttctgatcatcagtatttttttcttgctttatttgcatcatttcctttaactttatttcccattattcatagaaaagctttctatctaaggctgagttgaattactgcttacttccctctgtgaagtcacttcagcaaagagttactctttggagttaggtcctcatctctaatctgtatccctcagctgaagcacttggtctttggctgccctatcaccaccctaaggcacgtagaaagagggctctcgctttgcccagtctgttcaccaagatccttttcaaattggtgaggagggaggtttgtggaagggggaactagatgtatcaagcaactctgtgaagccagtgtaatttgtaaatttgccataaacttttaagtgagagttggagtgggggttttgagggttagcatgttttcagaaatcaaaaggaaaatgggagttttcatttcagagggctctgatacttaagatttttttttctaaattttaccaaagctattaattagcaattagtcaacataattaaaagatattaaagtattcatgacaatattgttatgctatatacttacacttaaatatataaataggcaaaacacacacaacagcatttatcaaataatactaattaatatcacctaggtgttaatttaaatttgaagcaagtgaaatacacactgcctaggagagtgcacctctatctgtccatgaagagtgagaa

SEQ ID NO: 64814 - DNA, 1062 bp, Homo sapiens
ggtgggaagagaaaggaggcatgctgtaggccaattctccgtgtgtttcatgttctggagtggagccctgatcctaagtttaaacttggcttttcagggaggtatatgtgtgaaggaagatagaacatatttaatagtttgttggcttaataacttaaagtatttaggcatataataattatgtggtcctttatttgcattcttgctctaggctctttgaatgttagggatgaatctaacttccctcttcccacttgctgaaatgtggacttcagggtaggtgctaacacagtcatcctggaccagaaaatggaagctatttgctgaggagggcatagcaaaaagacagaatgggtacaggctctctcgacaccatctggccaccagaagagtactaggtcatctaactgggctttatgtgagagatacatgaacttctacattacttaagccaccgtgtttttggatctctgcaataacagcctaatctatattctgtttatatagtttggtacctgacaagtgaggcactgaagttctaccacctacctaaaggtatgttggcttagtggcttgaagataggcagtgaggtcaagtattgcaaagtagaaagctggtgagccttgttatgcttgtgatagcttggagggcaaatttcctccctcctaatcagaggctctatgtggaacattagagaaattcagaatactagtgtgttggtagcttcttgccactttaagcaaattcatttataaaagacagatgaactcatgctagagttatagaatctgcaagaagagatggaagggactacctgcagcccacaagctaaactgactaacaatttggcaattggggccccatggggttgaaaatacccaactgtttctacacctgcactccaagacagacaacctttgcagatgtctgtgcccctaagccttcgttaaataccttcgttaagtggctggtcagaaaatgggagccacctcagagaaaaaagattaagggtattgccttcccactcaagtctattattttagatggcttcaaggcagcta

SEQ ID NO: 64815 - DNA, 1027 bp, Homo sapiens
ttaaaccttttaaaaatttctgacatttcctgaaaagtcacaatttgtattgctcaggatcacagaaataagcattaacatttcagaatactcctaatagattttttcatttttctttaaaacattgccaatttaaatgaaaacttgccaggcacggggtagctcacacctgtaatccccacactctgggaggccgaagtgggagcctgggagttcaagaccagcctggacaataaaatacagtgagacctcatctctacaaaaaaacctttaaaactttagtaactgtctcaaaaaacaaacaaacaaaaacaaaaaacaacaacttataaataccttagaacacacaggttctacattggtcccttaacagaggtggccaggacttgtgggcactggacacagaggcagagagtgacagtttgatacctgcctctgtcattcactctccacgtaacctcagaaaagtcaattcagctggttaagcctcagtgtcctcatctatcatgggggaatgattcttccctcataagactctcgtcagaataaaatgagatgtgtaagtgttttgtgaactatcaagttctacactaatttatttatctcttcttgcttcaaaaatggatctgaggtggttcataaaagtacatatggtataacaagacaaaaacaagtgagtttattaggtcaaggaaatcaatctacaaatataacgaacaaatataaacaatagcaacagcacatcagacttagccaccaggtctcagtctgcctggaatctgagtatttagtataattactctctactgcggctccttacagacatataaagcaaagtgcaactgcagtccctgcttctgaggttttaaaagtctaaatactttccctcatactgagtaaggtaggagtgaaagtggggtatgtaagatgcctggcttctgggccagtgtatacatgcatggctgtattaaggaggcaatttagggtgcattttatttttaaaacctgtattttgcacatgtcttca

SEQ ID NO: 64816 - DNA, 1060 bp, Homo sapiens
aaatgctacattgtaaagctagttgtatattcatgccctttgaaaatgcccaaggatggctcttggaaatatgtgaatctatgtgtgattttgcctgcttttgttgattattacttgaatgagcttactatgcaatctaaattctcaagcagtgggttttgttttctttctttctgagcctccccctgtgcgccatgtcagtgcgatgtgaaacagcgaggaagaacgagagatcaggttccaggcatgccaggtgtgtcagggatttttcctttgaggcttccaaagcatttacacacttgacatgtaaatgttcagatgctgctgtatcccagatctgtcttctgaaaaaaaatgctgcaagatactctgcatagcatggtgacctcctttagacttaaaactacagggctgtagggtatataaacttttagacattgaggtttcactgagtaatggtttaaagaaaaatcagaccacaaaaaaatcatattattctcaaccttgaaaaccaaatcaaggtattcatatttctcattttatacctggggttctgaagcaagggccaaaaccaaaaccatatcttacttcttgagctgaaatttttccacttgattttcttttctcagattctgggaggaagagactgtgtgatgcaggagatggatagctggctggctggctggctgcctactttttccattaatgccttgtctaaaacaatgatttctgtgtaggcaaacggatctgggaaaggtgtgacaacttccacggttcctgcacaggccagggtgatttgctgtaatcccactggatcaacgctgcaaggagggaaacagtgaggctagcaaaacactctggcagattatggagactcctgccaaaaggcacccttaggcccatgggaagcccagggtcataataaggcagcagcagcagaagtgatttgctctgaggctccaagaggtaccgaggagagctggactttgagattctttcccctctacttgcctctccgtctctttgttgggcttagccactgtctatattttgttccttc

SEQ ID NO: 64817 - DNA, 1048 bp, Homo sapiens
ttcttctttcttctttttttcttctcctgaaatcttctgccatagcgactgcatttgcctccagacttgtcagacacagtgagccgctcaagcaaaatggatctggcagaatccgccaagcggctgggcccaggctgtggcatgatggccggaggcaagaagcacctggacttctagggattcctccttagtcgctgcatgcagaattctatgacactctaattatgattgctaatagcttatgtaaatatttttcttaacaatttgaccctccactccttgaaaaacacaggattataaaatggtgccgccatttctcattttttaactttttacagaactagcacagcagaaatacttttaaatttttccttcatgctctagagaaaataattttatttttaaataaacgccaaaaaatgtcaaaatctcaagattcctgacagtggtcattcgtgtgtgtactaaggcatttagtgtcatggtaaagtgcatgtcacagcaggtagcatacaaaacatgatgaaattcaagattgtatgtgaaaacatactttctctttattacagaaacagtcacttgccaccaaaaatgctgttttttaaatgaaaatgtgtttactaatatataaaataaatttgcatttatgtatccagttattaaattgataaagacaaagtaatattttgggatttagattccactagagataattagtctaccatagtagttattaaatataaagaacttcagtgataggaaacatagaaaaaagaagtggatggtctttagtttagtaatcctaaacaattgaagtcagtactatgaaattatgtcaacaggcatcattcaggattgaaattcaaactgacagctacattaatgctaggataccaggagaaaaacatatactgaagcttgttgagagattttacagaacataggtctgagacaaagtgaaaaaatgaaactaactcagatttccattgcatcacataaatattttgttaataatgaacattggttgagtgtgtaaatttctaaccat

SEQ ID NO: 64818 - DNA, 1028 bp, Homo sapiens
atttccaaaatacattttcaaatgtatttaatattttgaagcagttataactagcatttttaagcagcttgcttttaatataccacaaattatactttatttgttcttgacaacattgtagaaaacaaagactaggtttttaaaactgtctaaccaatatgatgaatgtcagtcacttaaaaaaacccactgtagcataaacacatactgtatacagcttttattcagaattagaataattgaatcaatgacagtgatttgccaggatgtcaaatctctccatcatatcctgtcactaccagtttattttttgtgatcaaaatcaaaaagacaactattttgtcacccgctatttcattagtactaaaaatcaggtttcttattctatttttttagaatgtcgggtttatttttttcatttcttttaattctaaagacacagattcttccccattttcttttcaaaataaagtttcagaattgatctgtcagttaaaattaaagggctttatattaagcaaaggtgcttttaaattttaaagcaacttcaaaaaattgatttagtccatagataataaataatgttgtgcggatactccacaaaagctctgctatgtcctttgaaagcattatgaacattctgaataaattcaaatgagtattttagtcagtttattattttaataactctaacctttttcttaccgtgttgattcattttatacaacacacaatggaacaattacatagcatttgacttgctgaaaaagagatacgaggtcatcagatatgtaaattgcttgtcaaaatacttaataggtcattgatatacttccctggctaccatgtctataaaattaacagccaattactagttaatatatgctttgcaaatagataactactataaaaattgaatatgcatatttgaacccttattttaaatataaaagaaacttttcaaactcagtaaaagtgcattttgaataataagtgtacctgggctttccaaaaatcatatccaagtg

SEQ ID NO: 64819 - DNA, 1041 bp, Homo sapiens
tttttttaattatcagcttgactcaaagatataaatacttaagaacaatgccaaacgtaatatctgaaatgatatcttttaagtgtttctagtatatgaacttcaaaaccctatatggtactcatttcttacactagatttgcctttctttaacatgagataaatattttgactactgcagtttgctcaggtgctcgggttctaagactttttgaatttccttttagtagccaccatacaatatctacttttctcttccatttattccttatgtccacctccaggatctttaaatactaacagtagacaaaataaaactactttagaaggaagcgacactctgcaatcaattccctgtccatcttttaacaaatcagacacacataggcatacaaaaggagagtggggggacccccctattcatttgtttaagcccattattaatgtcatttctaagacagcatgttactgctttccaaagatagtcaccgtcaacattattgaaataagcagtactaaccctaagtacttacactttgaactttaaaaccgagcagttgagtcattcagtaccaagccaaaacacagaaaaacaaaaaagcagatgaggtttattcttgagaaatgaaaaagagaagaatatatatttcgccttggtgagccaaacatacagagaagaaaaggctttttaaaatcttactagtatgagaggcccagagtaaaaagaaataagcaaaagaatatagacacaatcctaagatgacattcacagaacaaagctgaatcttcaaataatactgtatgagtgaatcttaggaaacctagtgatgatagtaagaagaaatggcagtgagctgtagcaagaaaccagttgttcaccatttaagggttaggaggcatagctttgggggaaaaatattctagaaattcattgcagtaaaatgcatttttttacttagagcagtttgaacgtttattacttaaaacattcagctcttattctattcacctggttttcccaagtcagtcaagtttggagaa

SEQ ID NO: 64820 - DNA, 1051 bp, Homo sapiens
tcccaggcactgctaccacacagagcctgccatgctgtccccaagagagtgcctggagctctgtttggaaggacagctcatgtccctagggtgtgggcagaaggcaaggcagccgttcccatcctgccggaccagagggcttctgcagctgagcagccgcttcttcagactataccagactgtgctactttgccctggcaatcctgaccttcagagcacacatatacgtgcccaagtgcacacatacagaccctccgctcccacgtcactccttttctcccattcccacctcttgcacctggcgtgcgacatccgggtctccaaagtctctgctgtctacacaacagaaccgtgggccggaactggctgcctgaccgtggtggaaattacagccagcgagaaggaagaagtaagccagccagcagctgtggcatgcactcccacatagcccttctctgacagttccctcagcacacagccctcagggaatgtaggctgcaaaatgtcaggaggtagaaatgtctgcaccggcaattgtaccaacagtgcgtatgtgtgctcactcccctgcagaaatgtgctgctgtgcagtgcaggctgacactgaacaaaactacatgcacacatacaaaaactgcaacttaggaaggtgtctccaaatgtgcagcaactctggtggaataaaattattagtatatttcatgccggagcaatgaatctcaattatctgttcacaagtaattccttaactaaaaaacagtagatattgaacgagaaggtcatgtttaaatccttccattaatttctacatttctgatcatttgcttttggggatttttttaaagcagagtataattcagtggaagtgtgtctttgtccccagaggtttctgcatgtgcaagcattttaatctagactgccagaacccccaggctttttagtgaagtttgcagaggaagacttatctgtattgacttatatgttgcacagaacaaatgaaagtctcagacagtccttttttacccaacaaaggcttatttttttccatcct

SEQ ID NO: 64821 - DNA, 1008 bp, Homo sapiens
gcctgcggacctcattggctgtgtctgcacccttgagagcttttcgcactacagtgattggcttgaccagtcaagtcggagacagtcaatcccatcacttttaagtgattgactcattaattcatgccctaaaaaaatgagtaataaaaatctgtccagttttgtcaggttgatctgccttttattatactgttaccttgataatgttgggtggtggtggggcatgttttgggtaccagggagccttgcaccagaaagtggaaataatgctggcacattatcagatagcagattagtagtttaaaatttgggtttatattaatgtgtttgtatgctaaatatagaatctgtgcacgcatttggggcattactttgggtatatgtgataaactagtgagaaagaaaaaaggatcagaaatgggattcatatttacatggtgagatatacataatataatgagaatgctagttttctgtctgtatctacaataagaaaaggcatagcaggtatttgctggaaatttagtgtgtctttgctgtgaatggtgtgacgagtttgtggccctcctagctgcctgggaagcttgatgctattcacttggtatgacagcctgcctctcctcttagttctgtcccaaatatctattagcccctacatttagaggtcctgcactaggttcaccctttatgatgtaagttggataaggcagatggtttgtactagacctttgttgctggatggattcttgataggaaaaatgtctgtcttctggtaggcctttcccagtggttttcctagaactcctgtttgtgcaacaattagagatattagatggtacgatattggccagcatgagcctctgctggaaacagttctggggctacactgattgtttattctccattgaacattttttgctggatttcaaatccaaataacagcaaaataaatgtttcacagtcttcagactaatataggagcagctagataagcaacttcagaggaat

SEQ ID NO: 64822 - DNA, 1034 bp, Homo sapiens
cgctttctcacggattaggctggaaggtgaacggcacccactgaaggcccctgctttgcgcggctccgagggggcgccttttgaagaagatatcttaattgtccaccacttaggtttatcgtgggggtgggggagtcgagatccaacttctagttttattttgttaaaagctttaagagtggaaggcaaatccactaaagtggggggaaatgtacccattttatgtaagagcagccgctaggtcaccgcctggctgcaaacagttgccacttctaaagtaatgaactgtctccgtgccgctctccccgcggggtagagaagggatcctgcagcgacaggtttctttttgctgtggaattccaatccccgcttcccatcttttttttttttttttttttttccagatttaaaattgagctctactgtccctgctgacttttctctcttaagtgtcagttctggaggcagcacagggcctggcggcgatcgcgtgctgcctgtgtaaacccgtgtgtatgtttgtgtgagacagaacatggataagaatgtgaatctccatgttttaaaattaagaaaatgtcaaagaggcaaatgagagcagagcatgctatcggcggggttcttcggaggcagattcgggcaactttgtttaattggcgagatcgaatgtgccagaaaagggaccgagatggggcccctaggaaggcatgggcatgagtggccatggggagatgggcattgtgttctcctcagtgtcccccaccccataccagatgtgcacagatttttgtctgttttccaaaagcaataaccctccggcctttctagttggccaaaaggagctatttccagtcttccttcttcaccaaacccgaaaataaagcgaggggtgggggtggtcgcttcatttcttcccttgaaaaacgctttgaaaagtccccggaaacttggggcagtaaattagcacagacgcttgtgcccgcacacgtgagcggagcgcgtctccctcagctaagtagccctcctcgaccccc

SEQ ID NO: 64823 - DNA, 1013 bp, Homo sapiens
ttagcagactgggaattgccgtggctatgcccgaagtttggaaagtctctctcggtctctttctgggacagcctttctttttccgggaagcttcctgtgcctagaggtggggctctgtagctggaggggtagatggaacttgcgaagcaaaggaaggcaataaaaggaagttaggagaaaccggaaacgtgggccaggccttgctctgttggagaagcggtgtccccgcaaagtccctgcttgcgctggtcccggccggagcccagatcccccaaacgcctgtcacttctcatcgagttgaggctccggcccccacccgcgccttggtgagggccccccctcagccccaagccttcggctaccctgaaaacgcggctcccctcgaaggggaaacaagtgcagttcaatctcgtctgagtgatctacaaataaggacggaaagggtcgttttatcacggtcccgtttgtcgtgacgatgcaatttcccggagcggagcactgtcacaaagtgacaaggctgccacaagcgccccgactgatcttttcaattagccttccatgcatgatccggagcgacttccgcctatttccagaaattaagctcaaacttgacgtgcagctagttttattttaaagacaaatgtcagagaggctcatcatattttcccccctcttctatatttggagcttatttattgctaagaagctcaggctcctggcgtcaatttatcagtaggctccaaggagaagagaggagaggagaggagagctgaacagggagccacgtcttttcctgggagggctgctatctaagtcggggctgcaggttggagatttttaaggaagtggaaattggcaattggctttgtgtgtctgtggtttttggggagggggactacaaagaggggctaactccctctccctattctctaaggttggaccacagggatgaggttgtgagatacaaagataaaggagggatggggaacactatgatgtggtatttttctttt

SEQ ID NO: 64824 - DNA, 1048 bp, Homo sapiens
gcaaaatatgtaaaacacattcagattccgccagaaagagtcactaattatgatatgtatttgcatatgtttaatcacatatatatcttatttcattttgccatttctgcagggcccctcgcttcagggagggggtccttggcgctggttcagcctgcactcagcaaagttctctcaagtgagcattctgctcccacgctgttagttttttgcgttatcttttccaatgaaatttgaaatttacaatttttaaatgacgtgtgtgaaattatatgactctattatgtcataatattatacatcccaaaatattggtaaagggttctcccccttcatcaccaccctccccaccagagatcagagcattactgagaaaataatgattaacctttaaaatcagattggcatttcttttttctccaaatctagaattaatacacattttttaatcattagtgtaatgttcaggatgatacttttgttcttttgcctgttgaactgttacggctgctagtaacccttcaaattgtttgcttcattcaagcattctttcctgaataattcattaggcattattatccaagcgtggaacccctcatttagcactgctgatcttttccttatgtgtagctgacaggcaatcaaagtttttatcagtgcagaaaatttgcaattcagaaatgtagttgcagcaattagtagctatcaggtagcattggaaggacagcttcataaaaagacagagttgaatgagctccactgatgttagcacaaaagtaatgggtaaaactaaccagctgtttctaaatttaccaaatggaacattcccttcttctcagagtggaggctttaattaacttggagttctgtgtggcttcccagagggggaagggagtgggtgaggacccttccttcacaccgggctggtgccgctctccttccactgggcaccgatgggagggagctctgagcttccctctaagccagtcctcatggcagagagggcaggtgagggacacttttgccagaggactccagacggggaatg

SEQ ID NO: 64825 - DNA, 1051 bp, Homo sapiens
agatgacccttcagaatagcccttgccatttatccttcattcacttattaatatttgatagatacttattgtctactaagtaccaggcactgctccactgaacaccaggatacagtggtgaataagacacataaggcccctattttcacaatttatattcttttgggggctagagagaaaataaacaaataagaaaatatgacatatagcactatgggctatgcaaagaattataataaagtgaagtgatatggtgctggggaggctgttttataaagtatgtagtgtgtggtggtcttaaagcaagtcttcaggtacttcgatactgttctactagtaggtagagtctatgtcccttccccttgcacctgaggggcttctgtacctacctggaagaataggacacaaaggaagtggctatcagtttgaaaaggccatgcagcttctgctgatttttcttggaacattcactctaggtgccttcagctgaatgtaagaagtccagctatcatgaagtctccatgtggacagacaattcagaggaatgagagagagagagacctgagcagctagcagtgccagcacctagatgtttgaatcttcccagcccagatacatgatggaaaaaacttcaagatgcccattggacagcaaccacatgaaagacctggagtgagaactcctaagctgagatctcactctttcagactccagagccaaataaataattattaatgtttaagccactgttttggtgtggcaacaataaaggcctggaacagggtgatacgggaaggtttctttgaggatatgatgcttatgctgaagacctcagtatcatgaaggagccaggggagaaagaacattctgggcaaaggaaatggtgggaagatcctaagtcagaagtggatttagcaagttcaaggaaggaaagcaggccagtgaggctgaaatgcaacccagtaagagtggtaggagatgagtgaaggcgtgtagtagaacttcagtttgtggggagggtgtgcactcactcaagtaatatcctacagta

SEQ ID NO: 64826 - DNA, 1050 bp, Homo sapiens
aggcgaaacacgagccccgcgcccaccaccccagctggcgacgtggctccgcggccccggcttcccccggcagctcagcgaccaatgggcgcgcgagcggggccgcccgcagcttcccagcccgaggcccaggcgcgcccctctgctccggctcggggcgggcactggcggagggactggccagtcccctcctccgcgccggccccaaccctgtcgctgccgccgcgctccgagtccccattcccgagctgccgctgttgtcgctcgctcagcgtctccctctcggccgccctctcctcgggacgatggcgcgcggtggccgcggccgccgcctggggttagccctggggctgctgctggcgctggtgctggcgccgcgggttctgcgggccaagcccacggtgcgcaaagagcgcgtggtgcggcccgactcggagctgggcgagcggccccctgaggacaaccagagcttccagtacgaccacgaggccttcctgggcaaggaggactccaagaccttcgaccagctcaccccggacgagagcaaggagaggctagggtgaggccgcggccagggccccgtggggggcggcgcaggtgtccgagggccgcctgggcgagagccacgcgggataccaccgccaaagcgaaagcgaaatcgcgcgcgcggcctcgaggatggggccctgcccaactcggcgctggggctcaggctaacttgctggagggccccgggaccccagcttggagatcgccgccgccgcgccccggccggggtggtttctcgcggggaggcgagaacgtggcagcggccgcgggagccaggacggcgagggcccgccccctcccccaggttgcatcagaagggaggggagagtgcacaaaagaagagtttgtccacagtggcctgttagtgccatgagttcctccccactctctcgcagtttctctctgatcccccactcccggggagaagggcttgagacactcgctaagaaaatctcagggatgaacataaatggataaaagatgaaggggcaggcgagcgac

SEQ ID NO: 64827 - DNA, 1939 bp, Homo sapiens
tccagccggggctagagtgagactccatctcaaaaataataaaaataaaaataaaataaaatctagtgtagggatacaaaaatccggttgaaaagggacacgcagtttccgattggaaacacgagggagcaggaatggaaacggttcgcctgaaacgtttctgttggcagcagatgtctgcagaagcactcagttctttggcaactgatttgtttggggggcaaaaagctggagggttctcttggtggtggaggattttgacttgggctgttaaaggcagttgagtcaggaaccaaacccgggaaacaaaacttcggcgcattttagtacaccctccccgggtcccctgaggaaacacttgggcactgtgcggaggtatctggtggtccttgcacagaggacccagcaggcagcctggtcccagatggaggcagggctggggaagaaaccagcagtcctgcctattgggcaccaggtctcagatctccctgaacctgattcctgggggtggaggatcttcatgttctgccacatgaaagagaacacagccatccctgtgctcctgggggcctccaaaggccaaagtgtttcattggaatatgaggataaattatacctattgtgtaggtgcaccatttgcctgctctgataaaaagacctttgaacttcaaagtcacctccaaacaattaccttttatcttgcagagtactttctcttctcagttaggacttaacaataggggccattgatgagttcagtctattgtattgctttgaggcacttggagactgatttatcctggagccctgagtggcagccacattgtcactggagaggaggcagggagaggttttgggatttggaaaactttataaggtgtggtcatgcagcttccagttaatgccttcattgtgacagttcagcctagtagtgagaaaaagtgacggtgaagttggtctggatttgatccttgtatcaacaccttgacttcattcatttattcatgcaacaaacatttgaatggctactgtgtaccaggccccagtttagataactggcaggtacaaagatgaaaccttatgctctgggcgtcgaagtgcttgtaagcaaatgtggaggagagaagcacagacaaactagccattatgcacaattgctgcaatgatggcctataaaacctactgtgagcacattcaggagaaggagccgccaaggctgcaggttagagagaggggattggggctgtcacctgatcagagtttgtaggatgacttggaggttgccaggtgtacagcaggggaaggccttcctgaagagaaaacagcccatttctaaagggtttgaaaagcgttctggggcatgaggggtggtgagtctgcaaaggggcagggaagggaagtgagaggtgagaatggaggggaaaccaagggcagagcaggaaggaccttggtgagatggacatgagatgttatcctgtacattgtcaaaatgtcataatccccaaaactcattgggaaagtcaggctggcaggagggcagtacacagagaacataatcaaggcacagactagaccagtggcagggagaggaggtgaatgccaaaggggcttggtctctccggattccaggaggggatgaatctagacaccagtgggaggcagaactggcagctcttgctcttgactcaatgagggggagaagagagaggtaggaatcaaggggacatccgggtctctggccttagccaccagatgggtgatggatgcaccattcacttgtaggttaaatgtggggtagaggcggggtaggaggtgctggaaattatgggtcctgtttgggatggggctgagtgtgagaagctgcccctctgtccaaagcttctgtttcagtggtcccctccaagattgggctgaggaggaatgagtgtggctggatcta

SEQ ID NO: 64828 - DNA, 2076 bp, Homo sapiens
cccacctcagcctcctgaagcactgggatcacagatccagcctatcttttaggattgagacctgttaaacttgcaaatgaaggggtactttcaagctgttggtgatgtttacaccttcctgagaaagaggagcttgggttcttgggttcaggtaggaggtggagacattgattattcactcctccccttctcgtgtacaccctcccccacctaaaaaaaagttataggagattttctctgtcaaactatcaaactgatgaatttgtttcccattttttattaattaaagattaattgccactcagaatgtctgttgacaagaaagttttaccactgaagctgttagaattccagcccaaaacaaagaaagaaatctagagttagcctgtatgacctcctcccagataaatggactacaagggtgaaacttttttaaacactggggatagcttggaggtgtttttgaagttccccactgggatgctgtcctggtttgggaccatctggtctagagatgacaaaagtgggttcccagcctgaagtttgctctgggctagcatttagggtacctcagtggagttcagtgggaaatttgtgaaacctaggccagctgtggagctggtataggagtctttaccctaagagcagagggtttaaggttcctagagcggatcagctggtcaagttttgtgaatagattctatgatgtcaaggctccttcagccctgacatttgtgctgtgtccaccatctggtgtcttcttgctttacgtttcaagtctttgtatccatggtggtgggatttaaaaaaaaaaatcacttatcttttgatttacatacagtttccactttttgccttggacctaagccagaagacatgagttctcaccccagttttaccaaatactggctgtgtaatcttagaagttattccatttctctgggcctcagtttccgttactccaaaatgagggtgctggactacagcagggaagattaataggtttcatcttacagatcagctctgatccgttgataatggccatcaccagagcacagtgctgagaattctgagagcacctctaggtttatcaggacagaggggcacgatccattagcagtgtctgccatcagcactggttgggggaaagcacatcaaccttggaaggataaacttgaagattccttccagcctccttggatcattgattctgttgtagttgtatgtgcattttggattgtgcaggtgtttgatcttttgctggaccagcatcacacaagccttgataatataacagccttgtgcctgtgtgtgggtttctttttttttttttttgtactgcaggaagattgttgatcgaatcgacaatgatggggatggctttgtcactactgaggagctgaaaacctggatcaaacgggtgcagaaaagatacatctttgataatgtcgccaaagtctggaaggattatgatagggacaaggatgataaaatttcctgggaagaatacaaacaagccacctatggttactacctaggtaagaggtgctgcaggagcgatgacacagtgggggcccagatcacaagctttttgtagactctctcttctcttatcatatccactcccttcagggagatgtcacagcctcctaagtagaacctgcttgtataacaccctcctctgtaaactcagaatgtactgagttgcttacactgaatgaagttacaggtgggagggaagggctgtgagggctaataaaaaaaatcccttagattgagaccccatctcaacttcgtctcagatgcacacacggagaagaaagcagaaaggaagtgtgtctgtggtatattttcaaaatgctgcctaattctggatagcaaggattgagtgggccggagcagtcagggaaggcttcctggtgtgggtggtttggaaactggagccttggagaatggatttatatttggagaaggtgggtcaactggaggggcaaagatgcagcaatgcatgcagtaatgggaagggtttagatccaagacaaacaagatcgggagaaggaaggagaaatgagatta

SEQ ID NO: 64829 - DNA, 1022 bp, Homo sapiens
tcggggagatcttgaaagccaggcacggcgttgagacaagatgttttgggtaccaaagagcctctgtatgttccagatctaagaatgagatgatgaaagtagagttctgcaaagagaagtatggcagtaatatagtctaaagcctgcgctcttaaccacttgcagtaattcccctaatatgccatgaggcctagattatggggtggcttgaagggactgatattagaggcattctgacatagaatgttttaaagaactcagtaggtcgggaccttttttccctatatgtaccatttgagcatgcaggatgagtgatctggcaggaaacgcctttcttgaccgcacggtttaaaaacatttctgcatacatacatcctgcaggaaaccccgcagagtttcatgattcttcagatcatcacacctttaaaaagatgctgccacgtgatgagagaagattcaaagctgcagacctcaatggtgacctgacagctactcgggaggagttcactgcctttctgcatcctgaagagtttgaacatatgaaggaaattgtggttttggtaagataagtgaagagtctgggctgggaagagaccagggagaaaactgcctccaaatcttgtctcttccaaagagagaagatttttcagcctgaagggaattggagaaggactctgaagtagagtttgttggaatccccgtctacccagaaaattagtcaggtcaggctggctgctgtaacagatagcccccagttgtagccatttaacactagcaaagcttgttccagccagatggacctcctgggctgttctctgagcacagttgggtacccagttctcctctaagcactcctgcttgtgctctgccatcttgtagcttcaaagtcatcctggcaacacccagctggctgacaaaggaaaagagagggaatgagaagatacagtctttgtttactcttccggccagggaatgacacatccccttcacgtatgttccactggtccctcctagatatgaag

SEQ ID NO: 64830 - DNA, 1968 bp, Homo sapiens
aggagtttgaaaccagcctggccaatatgttgaaatgctgtctctactaaagatacaaaaaaaattagccaggcatggtggcatgtgcctgtaatcccagctacttgggaggctgaggcaggagaatcgcttaaacccaggaggcggaggttgcagtgagccgagatcgtgccattgcactccagcctgggcgacagggtgagactccttctcaaaaaaaaaaaaaagaaagagcaaatggcttaagtgagcaactagctagtctctgccccatttttcaattttaagggacttggaaaaagactcagaaatggaatgaattggattgttaaaactgtatggaaatgtaaagtaaaaattatggctggaagagatgctacccttagcgggtgggtctttggagggtgggtggatcaggccctaggctttgaggaatgactatgcttgtaaggcctcagaatgtagttgctttccgtagtgtcttgttgggtcccaaatgtcttcattttccatgacaattaaataaatgccatcacctgttttcctgggcagatgcaccaacccagttccaactgtttcaatcctgggaaacagatggctagagcttttgtttacacgagctgtggatggttttagttatccaggtggtggaagggtccactcatgcttcatcctcctgactgccatgactgtaaggactgggcagtggctccaagaatcatttctctttaccactcaacattcatgtagtgttagctaatgtggcagaggacagtgcaggtggtgaatgatcccgagtagactacgagcctttgggagtggctctctgctctcaggttggctctttggtttgacccaggatgcctctgagttgctgtgccaatgaacagtaaactcatttaattattgacccaatcaaaaaatactgaataagaggtcaagtatactaaatacagagcacaatacatcaaaaagtcagatatacttttattttttagttgcccactgtttcacatttctcttgacaccaactcagtattcatagtcctgttagcactagagtctattcttgtggtcatctaatccagtggttctcacactgggtttctcgcatgttccccagtgggtgttttggctggatggtggagttagttggcctggcagggcctcctgatatcgtcagagcacctctggggttacaggtacatcttgcttgctttgaagaaagcattctgctctggaaactggggtgggggattaggaacagaaactattgcctgttttttacagataaaaaactagttcccagggaagtaaggcgatgagccagaagtcaccaagcattcagccgtaaaagctggacaaatgaggacaatagaattctcagacttcttagagcacatggccatcttgcattctgttttaccttttgcttcctaggaaaccctggaggacatcgacaagaacggggatgggtttgtggatcaggatgagtatattggtgagtactgacctagagtcttgctcagctgtcctgactgggccacatgaccccacccacacgtctggctactttccccagacgtctcttttagcaacagctgcaagtctatacgtcactcctgggagcttccagcctgcttgtcccatcagccctagtgatgtagtatcagggaagtattattaggcctcattcagtggagaagagatgaaaaggctggccctacacaaggctggccaacagttggccccatgactctgagaggtgcccttcatcacactgcctagttttacctttgcaaaaggacattggagatcccatagatttacagtgaagatagaggagacagtgtcagggcaaagcctctaaaactggactgggtcaatggagcctagaaactctgagtagatgcagctgtgattaacagaactgtttatgtgtctgagcactttgcagaaaggcattct

SEQ ID NO: 64831 - DNA, 3469 bp, Homo sapiens
cctcattgttttcatctgtaaaatgggaattataacagcactcactttgtaaggctgttatgtgaaaatcaaatgaaaactgtgtgtagaacactttatacagtatctggaccatagtgttcaatgttagtcattattattagttttcgcttatgtagtgccagtttgggttgtagagggcttttacatcaaaatggcacatttgatcataatagccccatgatttataaattatcatctccattttacagacaaggaaacttcaggctcagtcactgaactaagtcaaaagccgggatttatcttttggcttctaaactcagttctttctactccaccacatggccttcatcatgaataaattactgcatcattatccccaagaagctgcctaccagctgtttgagttaggtctctggattggttgtcgcctttcctaaagctcaggaggtcaagtttgttttatgggggtgggggaggtttaccttcccactttcctttgtaaccaacaataaccttcccttctagcggatatgttttcccatgaggagaatggccctgagccagactgggttttatcagaacgggagcagtttaacgaattccgggatctgaacaaggacgggaagttagacaaagatgagattcgccactggatcctccctcaagattatgatcatgcacaggctgaggccaggcatctggtatatgaatcagacaaaaacaaggtatttcccattcttctggaatcactgattgaagggagacagtttacataagatcggttttgtttgctttttcggcgatagcattgacccatgtggccatgtctttattgacttttccttcttgtcctacagtggagacctgtaaacttgagctaataccgtgataacccacagtaaaattattaggccccaactttcctggaaagtcagctgtgagccacagacttacattaagtcacatttcctaagattgcagaactttgtgggcaggacacgatttaagaagtataccccgtgttgccctaggatcagcttatttatccattcattgtcaccaaatacttatcaaacatctgtgaggtgtcaggaacaaggaagcccatcccattaaagcccagacatcctcaggcaagctcaggtttctggctttaatgcctagtacttcggtatctattgataaacatccaaataaacaaatcaatacatttagaaaaatgtcctgcctattccccactttgctgattgcccccaaattctcaggttatgccaacagtcagtttaggcagcgaggctgtaagaggaaagtggcattcttgagggcctattttgggaagaccaacactgcttgtgggcacaaatggattctagcttctgaattactcggggacttccctgacacgttagcacggtttttatagcaagaggctgttccgatttggagttttgcaatgcagtcatggtagatgaaggaggtgcccagtagcttctggattactaaatatagtattttaaatgttgtacatcagtgaaatgacatgaacatcatacagaactagtacagttaccagagcttccatgacagtgctctttgatctcttctataggatgagaagctaactaaagaggaaatattggagaactggaacatgtttgtcggaagccaagctaccaattacggggaagatctcacaaaaaatcatgatgagctttgatagacactcaccagaatatggcagactgtcataggcattctgttattgtcttggattgttgctacaattgtctaatttacagcagttgtgatcccacaaaaagcaagtttatacctcagattggggtataaaaattgtttttcgctcagtatttactggaaaatggacatcactagtctttcagtaagatttctctcaaaacacgtgaaaaccttggtaaattgcaattctttctggggatatattggtacaacatgacttaaaacttttttttttctattaaaacttaaaggggaacaaaacttgaaaaagccctgttcttcagaaggtgagtgggttgagggaggcagtaatatgaagtgactgctgtgtattttaactaccagattttttatatttgccactgttaaatagttggaaaggggaaattctgattaagcgaaagtggtatcatcctaggtaagcttatttcagaacaagtctaatatttcagattctttcttttcgactttatactctgagttattacttactgtaagtggtgtatatgaaacctccatgcattttccagtatggatctgctaatatgcacagtaaatccatgtctttgtttgtttttctattaaaaagcaatcaagaaagataatgtgaaaaagaaaggaatttagaggtagggaaaagatgaatgtcagacatttgaagaactatagtaaaatgataaacactaaatatacttgagaaaactttcttaatatgccaatgaggtaggcctgatctttgaaatagtgaataggaatacaatgcatttcctcagtgatcactgattagaatgagttggtgggatccttgggaagccaaacggagcggagttctggatcatgtcccatccagtccagtgaatccacgacccgcagacctgtccccccgcaacagcttataccatggaatgaggacaaggtgatactctgagctgtggactgaactggcagacacaacctgtacagattgaaatttcaccttgtaaggaggaagtgaatgaaataaaggatccccctaaggattttctactgtgtcctgtggtgtttgacttcacagatgctatttgtgacattattcatatagcataaaacagtggggttggatcccatgaataacattataaaggttctggggttttttttcatccaattactagaatgttcagaatagactcatatttactaatttaataaatgtatgtacttaatgcctttacttttctaggtcattttaactataaaatcttcctgaaaaaggttgcacctggaaaatctggacttcttccctgggcctatgaggcgctgtaggaggaggcctatgggatctggcccctaccagcagtagcatcatctccttaccactgtccctttcataccgcctatagtctggccccagagactttctagtcctcagacacaccaaggtcattcccaggttgggccctttgcacttgctgccccctcacattcagaatacccatctctcacgccctcgggtaacacatggtacttcctcaggggggctttccagaccccactatttaaagtaatcccaactcgaatctcggtttcacatccccattttattttcttcttggcatgcattactatttgtattcatttccatgccttctgtccaaattgccacaaagtgggggatttacagtgacagaaacttacacggttctggaggccagggtctgaagtcaag

SEQ ID NO: 64832 - DNA, 1045 bp, Homo sapiens
ctggaaaagtcctgggccatcatcccctgggtaagggaggggtctgaatatcactttacatggagaggtaattagagataatgggagcatcttcgagctccactaactggaagcctctagacctgtactgtccaatacagtagccagaagccaccagtggtgatgtgctgtaagtgtaaaatctaccagggatatgtaagactttgtacaaaacaaaagagtaaaattttcatttacacattgaagtgaaaatatgtggatatattgggttaaataaaatatattattcacattaatttcacctgattttttttacttttattaatgtggctactaatgtagaaaatataacattgcgtacatgactcacgctctattggatagtgctcctctagaaaattgagatcacatattatttgctttgcatgctaatggcccagagacagttttccatgttgttttttgagtgtatgaatcatgactgacagctgccgttgagagcaccagtcagcaagtacccacagcctgtgcctctgctgtgtgtgaggggcctttctgtagatgttgtatcctgatgtggtgagtctaaggaaggccacacccttgagaataaaagacaatgtttcccctgtacagagtgacactcctagagttgaagtccaggaaataggtgccctcagacaagaaagagggccttggaagggaggccttggtaggttggagaggggagtcccacccatctgtccctggacttcaaccctttggatctggacaaagagggttctagagatggctgaagacacttctggagtgggtatagggaatgtggtttctgctacagaggcaggctggaagcagatagggaaaagatcttaggcatgagacaccactgagcctcacagtctggatttgcctccgtgcgtgttactctgtgttaatgtccttaagcaaagtctgatctacccggtacgacctggctttggttgggtgaggacttctagtccaggctgggttgagccaaggtggtcacagcagcagagcttag

SEQ ID NO: 64833 - DNA, 1048 bp, Homo sapiens
ttcttcagcaggtaggaaactgagtcacagggtacctaagctggccaggaatcagccctgcaaatctgagggcccagcccacagagtctcccatggctttctggggaaacgattgacgttatgggagtgaaatgggaacaactgtggcccatcagccccgtgtgtttagggacagcccctctgggcagcctcctttccagaatctcccacggatcctttgaccacaaagccgtgcacacggtcatttcattcactattaatgtgcgcccttcccctggcgtggctggctctttcttaaagttaaccagtaactggtctttttgttatccgatttctgtgagaggagccctgccaacaattctcaccaagggagcacttctgatttttgtttcctttctctttcgggtctgcggaaaacctttcatgtccctttgtgtcctagagaacggcacgccgccacccagaatgtgccagcctacttggctttcctcagcactgccgacggcgctctaaaccattcccctagcatcacattcctgacttcaaacaggccagggagattgagagctcctcgaataagtgggactttctggagattctcttgggaaggagtgacaggcagagagcaggaataattacactgaaagtttgttatttgcttgcacagttttcttcctttgtgtggagtttattcccggaagcccaaagaggggcttgataaacagcagaaaggctacagagccaattggctggaaaagaaatgacaataaaagtcgcacagaatgaagtcttctgtcagcacccatttaagttaaacaggtttacatgttgcagcagagaattaactgtttgatttgctagaaaccaagagaattttcagcacttggagtgagaaaaaaaaaaaatttacttttaacttaggtcttcaaacctccctcccctccaaaaccaggacctaattgcaatgattttcccatatgggtcaaagggatcattggaaagtccaaaggcaaggccctcggccctaagggtctgtagtttgcagcct

SEQ ID NO: 64834 - DNA, 1044 bp, Homo sapiens
ggaagcccctccccaggggcgggtgctggggctgattccatgtctcatagcctctgcttctcttgatccctttctgcatggaggaccccactctgggctgccctttgtcaggcagtgattgtgcccctggctgccatagccttggtttccttcgcctaagaggatgacagagttcttggctgttgcgctttatgtggacgttggcctaggggatacagtcaccgtctttcttgtgatgactcctggtggtggctgcgatgactcctgggctggttgagcaatttttaatttcaaaacatcacaaagctctgccctctagtggttctttgggaaacattcatattccctgtgcggggtgcgggtaggaagagaacttttaatgcaaactgggttgaaacagaacagccagagagcaggatgacttagagagagctgaatcctgtgttcgtgaatccgtgaattcacagccgaacatccctttctgtctcaatcgcctcttcctggccattgataagcttgagaactgtccggtccaatttagactattttaattaaaaaaatgaaacaacacatccctaaaaacaaaattcagtttggattccttgcttttgctcagtgcagtgcctctaaagccctttaacttgtaactgttgtttgttcacattactgataacacagttgattcatggattgcatcaacctgcctctttattttccttatgaaacatcccttcggcattcctcatcccttataaaagtattcctactttctcgcttgttgataagaaaacgcctttagtaacatacccacctcaatatttgactttttccatttcttcaaagtgaagacagatcttaatttaatatggcaagatgaactgtgtgctcccttcctcaagtttttaactttacccttaagttgactcttgcctactcagtgacctcgcaccctaatttttccgtttacttcctgtactgcatttgaagtgcctataaatcacatcttaggtcaaccctttccttaacatgaataatatttgtatt

SEQ ID NO: 64835 - DNA, 1066 bp, Homo sapiens
tttcagcaatgtgaaggatgagagactcagagcagagggaccagttaggaggctactgcaatggtccaaataggatctaatgccactctgaagaggtaccacagaaaatggagaggagggaatgaacttgggctttaataggacgccagcaatgacagaatctctttcttgagtttcacattttattcttgtaaagccacagtaacatttggtgagctttgaatggaagtgttcatactcagtggacttgctttataagaactaagattgattcactcgtgttcacatgctgattttcccccgctcttctctaagaaaatagtttaaggacaccagctagaccatactgtttggtctcagctttggtaattttgccagagaccaagtcctgtgttagggcacactattcctagctattctctaaatctgccatggtagcatggtgtttggagaatggcgttacaatatgtttcttttttttaccattggataaaaaaccagaggaaatttactgaattggggcaaacaggatttggattagacctgaagaactgatttcgagggtgagagacactggcactgtatgatcaagggggcttcagcatgctgttttatggccattttattttatttatttatttagagacagggtctccctcccttgcccaggctggagtgcaatggtgtgatcatggctcactgcagtcttgaacttatgggctcaagagatcctcctgcctcagcttcccaagtagctgggattactggcttttgccaccatgcccagctaatttttttttcttttttggtgcccaggctgaagtgcagtggcactattgtggctcactgcaacctccgcctcccaggttcaagtgattctcctgcttcagcctcctgagtagttgggactacagacatgcaccaccatgcctggctaattttttttgtatttttagtagagataggtattcaccatgttagccaggctggtctcaaactcctgacctcaggtgatctgcctgccttggcctcccgaagtgctgggattacaggtgtgagccactgt

SEQ ID NO: 64836 - DNA, 4256 bp, Homo sapiens
tttgggtagaagaatagctgggtcatatgctgggtggatactgaactttttcagaaactgccgctcctctgcaaagtgactgcaccattttatgttcccaacagcagtacaggagagtttcaggtctacacaaacccatccatacttggtaagacccaacaagcttaacatttcaagggaaggtggacttagggaggcgccagcgggaggcaacatcaatgcagttagctacacgggcctgaaaactggaggccgcgacaagcgtcgctgagtggaggcccagtaagtcccacccactaggccagcccgagcgcgtctgccacgccctgctgcattccgcggcgagagcgcgcgataggattggctctcaaggccccgccccaacaggtcgccgctcagggtgacccggaagcagttgcgccagcagcgtcgcgcggcccagttcccttttccggtcggcgtggtcttgcgagtggagtgtccgctgtgcccgggcctgcaccatgagcgtcccggccttcatcgacatcagtgaagaagatcaggtgtgcttcggtctacgggtgccgccacggtggggtgggggatgtcctagtagcgcaagggaccgctgccgagcctgggccgggcggccggggctgacacccgcagctgttctacacgcgagaatggggaggccggtggctggggcgcgcgttcctggcctcgattcgcaccagctcgccggccggcggtcccagcgcggggcccgacgcttcaccgccagctccctggtcggcgtcgggactcatttctgacgacatagtacttttagactgatgaggaatgatgtctgcttccgtccgtcaaatgcagccacattcggagtgggaggtggtgaatctgtagttagcataagcagggtagggaaaagtaattttgtgctaaagatcaaaatgccgggccgggcgcggtggctcacgcctttaatcccagcactttgggacgccgaggcgggcagatcacgaggtcaggagatcgagaccatcctggctaacacggtgaaaccctgtctctattaaaaatacaaaaaaattacccgggcgcggtggcacgcgcctgtagtcccagctactgccgaggctgaggcaagagaatcgcttgaacccgcgaggcggagtttgcagtgagccaagatcgcgccactgcactccagcctgggcgacagagcgagagtccctctcaaaaaaaaaaaaaaaaaaaaagatcaaaacgcccgtattactgtgcgatcacaggcgaagacgacccgtattttacacttgctttctattcctacttgtatgagggtgagagttgttctgtaccccggaagtatggtatcagttcagctcttaaattctgtgaggcatacacctgatggaccatcctgatatttttaaatttcccgtttggcgtttgctctttggtatacagggctgatggttctcattttccccataacaaaagtttaaccttatttggtaggagttgaacacgacatcgtattctttaagttaattttgtattgctgaaaattcttctgtgaagtcctaactttgtcgttttatttctgttactccactaacacggaagtaacttccaaatgattggatatcataaacttcgcatggaagtttacttgtctaagacaacttacagaattgcgggagtgagttccccctctctcctccccccgccccatggtaggaatgcagttccgatgctctgaagagcaaagtaagaagggaaaatgcaaaaggcggagaaaaggtcaaggatggggaggttaagcacagataggaagatatgaaagacaaaaagatacctgattagaaatggaagcatgttaccaacagttggctgttaggttaactgagaaagtgtttggaatttttttttttttaacatacaaagtgaatggaggaagttcttgtcattgatcgtatcttaaagtgtcttttctcaggctctgcttctgttcttgtaacatcagtatcgctgtagacagtcctttcagggaaatatgaaattgctcaggattagtttaactttggtgaaattctcagcttgattagagttaaatggaattctttatctttttttgttttcctttgcttatgctgcttccacaaccacttgtggcagtgaggatgacagaaaaacagcaaacgtggttcaatagttcttagaaaaagtttgctgtgtatctgtttcctccatagagaagcatgaagcatgatttctggaggtatttttgttttctctgacatggtgacagtttgttttctttttttaattttgcttataataccaactcttctatgaagttactgtgttcttgttacctgaaaggatagtaccgtcagatctgcaggtttaatactttcctgaggcaactaaatatacttgggggtttaaaaatcttgatggctttgaattttttttttttggcttggtctagaaaatgtaatgcctgtgcatttactaatggtatcctttcatattcctgttgcacatcctcattttattatctttaaaaccaggctgagcacggtggctcacgcctataatcttagcactttgggaggccgaggcccgtggatcaccggaggtcaggtgtttgagaccagcctgacgaacatgatgaaaccctgcctctactaaaaatacaaaattagctgggcatggtggcgcatgcctgtaatccctgctacttgggaggctgaggctggagaatcatttgaaccccggaggcagaggttgcagtgagccgggatcgctccattgcactcatgctattgcactccagcctgggcaataagagtgaaactccatctcaaaacaaaacaaaaaaaaactgcgtttgtttggctgccataaagagtcccagaagaaaaatggaataaatatatataattcggtagtagggtaggaaatgtccaagtgactgaatgtgctattgtagttgtgtttttataggtccgaagatgcatgctgactcagatatgcatttttaattttaagagattagttacataacagatccagttcgatgtaattttaaggcagcattcaccgcattgcccttttgtgaaccaaaatgcttatctcaaatagcttctcaactgattaacaaatgattacccttttgccaaggtaatgtctgtaacttttctagtagctgtggttatgtgtgtacttgagagcaatactattgttcatttctttcaaaaaaatgaaatctgccaagtcagattgatttcttctccccagcaaccacacccccaccaaaccctttgggttatattatcaaaaagatttttgctgtatgctggaagtccagcagggtgcagactacatgagagaaattctgaaggtgatccatgggggctgtagtgtgtctaaggagccactggacctcatggaggaaaacctgtggctcttgtgggattgccaagatggatgaggtgagggaggggtcttcaacattatttgaaatagttgttgaatacagtatttccgttttagtttttcagaaagaggacagaatttgagattgtgctttgtcattcgtagtcagttttataatagagcaatcctcaacaggctgctgagcttcgtgcttatctgaaatctaaaggagctgagatttcagaagagaactcggaaggtggacttcatgttgatttagctcaaattattgaagcctgtgatgtgtgtctgaaggaggatgataaaggtttgtttttaatttttttctaatatttcctaataaaatcttttaaatttttcttgtgaattatagagtcgtccctcattatctgaggcaaggaggatttggaaccctcagatacagaaggctgactgtatttatatgttttgaatttcagactacaggacttttaaatagataggtagtggttgtatgtattttgggggcacaggtgatattttgatacatgtatgcaatgtgtaattatcaaatcagggtaattggaatatcacacatcttttctttatgttggaaacattcaacagttctcttctagctctttcaactatacaatacattgttaaccagagtctaagcactgttgttttcaatcttaccttcacacatgctttcagtttgtgtaatctattatacctataaagtaaacctattttgagaaaacctttattttatacataggtgtatttcttaagtgttattacactaaatgcttatagtctta

SEQ ID NO: 64837 - DNA, 7350 bp, Homo sapiens
tcccaactgagctggatcaagtgagttactgtgtggaatagttgttctgcttataagaaatgtactttttttttttttgagacggagtttcactgttgttgcccaggctggagtgcaatggcgcaatctcagctcaccgcaacctccgcctccagggttcaagcagttctccttcctctgcctcctgagcagctgggattacaggcatgcgccaccacgcccggctaatgttgtatttttagtagagacggggtttctctatgttggtcaggctggtctcgaactcccgacttcagttgatcctcctgccttggcctcccaaagtgctggggattataggcgtgagccaccacgcccagccagaaatgtacttttatatgttatactttatatgtgttactcagttttctccttttgtcaatctcttgtaggttagaaaatggatttctgactggaatctcaccactgaaaaaaagcacacccttttaagactactttatgaggcacttgtggattgtaagaagaggtattcaaaagtaatgaactaacatatcacttaacagacagtataagtaggtggggatgttttttaaagagaagtagggccagtaattttgctttactctgttctccacagagttgctataaatctatttctataaatttgacctaaagttaaagataactataaagattaaaagtagttttccctcatctttgaactttttaaaaagtgaaatttggctttttttctaaaaaaagaaaggtggggcctttccaacatgggcttcaacctactgctgtagcatgagcttggtgaatgtggtgaagcatctcatcatttttggatggtgcagtggcagactacaaaaaactttgtgttaatgtaaatattccatctctccacccatgtccttcctcttgcttatcacactctagacccagcgagcctatgtcaggtataaaagcaccatgctctttgccagtctggaccaggagctggcactggttcttctatagcccgtgtactaagaatggttttaacatttttaaatgattgagaaagaaaatcaaagaaagggtaatatttcatgatatgtggacattatatgaaattcagatttcagggtccataacattggtattacatccatgcctattcatttacatattgtctgtgcctgcttttgccaagagtttagttacaacagataccatatagcttgcaaagcttaaaatatttactctctggccctttatagaacgtttgcctaccccttgtctaagtagtcttactatagtcagcttcatgtctctgccagaaacacccctctcatatttcggttagtgcctcccttttacagcaccctctacttgtatcctagcatttaacacccttagttgaaagtaaggttgtaggctaagtgaaggcaaggaacctcatctgtaaaccattgcattcccaagaagatagcacttattgggcactgagtggataaatgctacccacagtagggaactggaaggggatacttgtttaaacacgacatttctgacattctgccaatctaaatgttgagagttggttttcttctttagaacacataaaatacatattttaatcagtaaaattctgagattttacctagcagttaagtaaaaatgcttcaagtttatgggtgcccccttcatgactttatttatattggtggttgatgcacatggtgtttgttgtgcttttttttttttatttgagatggagtcttgctctgtcgcccaggctggagtgcagtggcgcaatctcagctcactgcgagctccacctcccgggttcatgccattctcctgcctcagcctcctgagcagctgggaccacagttgccgccgccacgcccggctaattttttgtatttttagtagagacagaatttcaccgtgttagtcaggatggtcttgatctcctgaccctgtgatcctcccgcctccgcctcccaaagtgctgggattacaggcgtgagccaccgcaccaggcctgttgtgcattttaaagggtgttactggtaactaagcccttacatgtcagacaccatgctgtgtgcttcaagtggattaaaaagatttctttagctgagaaggttgaagtatactgtagttgctaaaactggaaaatgacttgcacctgtgcttacagtgtggcacaagataactaatgagtaagatgtggttttttaaaagtttttctttgaatttttatagttaagtcattatactttttaattttaatttttattgcaaagttaaaaattccttagttttttattcctggtaccactacactaccataatttacagggtaacatgcctgatgtaatgaaaagaaaaaggcaaaggtacaacagataaaagacctcaggaatgtacatctaattgacactacactgcattaatcaatagtgcactttttgcaacctgtagctatgacagtcctgaacaagaaggctttcctgtttaagctgcagtaacttttctgactgtggatcatcattcctctgtggcagatttttacagttcctctaatgcatttggatgattgcctcaaagtaacttgcagcttttctgacttctccttgcttgcactcctgccaaaaactgtagcccttttctgctgtttttagaaccttgtgctaccatatttaccaccatagagactgcccaagctttatccaccaaaactgccccctttcatgcatgggtccataatttggttgtcattgtccactgtaatatccaaaatcattatagttcccaccaccaccgtaattaccactccccaaattaccttcttcattgtaaccatcatatcctccactgctgccaccatatctaccaccaccatacccgcctctactatcaaaaccaggacaactgcggtagttgccaccatcaccttcaaatccattatatccagcaacccctcctccataactacttctgctgccaccaccccagcaccatatcctcctcttccaccagagtttctacccatggccaaaactaccatctccaaagtttcctccacaacccataaagttgctagatccactccacaactgcatctgttgtttaaaaagggcccttttcacttcactaacgcctgttaatagagtgttatttctgaaccacaattttatcatgatcatcaaaagttacaaaagcaaatcctctcttttttccactctgccagtcctcctgtaacttctgtggtttcaatcttgcgatacttttcaaagtagtctctcaaattatgttcttctgtatcttctttaacatcaccaacaaaaattttcttcactgttggatgggcactgggctttacagaactctctctagaaacagctgtctttggttccattgcactcctcagccttgtgtggttgagcacacattgctgcatccacctcttcaacacaagagtaagtcacaaaaccagagtttgtggaacattttgtttgggggtctctgattaccacacaacctgtgagtgtgctccatttcttaaaatgttctctaaaactaccatctctagtttcaaagctcagaccaccaataaacagttttttttagctgctctggctcctttggatcatggcctcttccaggttgagttcagtattaattttttatttttagagacagggtctgaccatgttgcccacactggagtacagtgggtatttggctgttcacaggtgcaattgtagtgcattacagccttgaattcctgggctcaagcaagcctccttagtaggtgggactattggcatgcgccactgtgcctaggcatttatatcactacatttaagatgcgggttaccacttagccatgcctacagtggtatttctgaatcttagtaaaccttagttttgaaagaagttttagatagcatttaccattttaaaataaatgatacagttcctgctgattttgcccaggctaaactcagatgtggggagtaagtatttttagaaaatgaaaaaaggaaaagaaaaacctcttcctcctagttagcaaagctttctataagctgaagattccacagtttaaagaagtcatgaggagtaaagataaacattttctaaaagtccagtttgaatgactgcatttatttattttgccctatttactccagtgaaactgatgtatataactgtaagaataatttaattggaagggtatcttaagtagagttatttaaatatttggtattgtctcaacttcagccatactgtcctaacagtttctgggacacaaaactttttttgcgcctagggcctttatacttggttttccctctgcttggaaagtcatcttaccccacctttcatgaacccagctcttttcatggccaagaaaaggatattttacatcattttggtctcagcttacttgccatctcttctgagggagactgctttcccactgtacataaagcggcctttccgttttctgcccttgttgctttgattaaatcaccatttatttccttcatagcacttattagttacttttccttagttgtccatctttcctactaaaaggaaggttttatgacttttcccatagacagggactttgtctctcttagtcaccgttataatgtcatcagcacagtacctgcctcttaaaaatattttaaatgaatgaatagcagtaatgctttcaagttcctaaagcaatatttctttttagtgatgctgcttcaaaagtcatggtggaattgctcggaagttacacagaggacaatgcttcccaggctcgagttgatgcccacaggtaatgttaaacgttactctgatgagggtttgacagcgatgtagaggtaagctacaatattaaattaagtaactgaaatcatgtttgcaactaccagtgatccagagccatttgatagtgtgtatttcctggtgattctaatgtagatactaaaattcaaggtttgatattggaagaactgtggattgaatatgaagtagctgcatggcgtttacctggcggggggggtattgctggtatggggatgatgatcccaacccaagaattagaacctaatcttgggccaattgaccctaattttaaggttataggtggaaagttgatggcttgccaaaaattaacccattgctaatgagtataagggcttttaacagtcttagatctaactggtaacaagaatagaatcagttttctaaatctatgtaataaggattatgaaacttctttttttggtcattgctttgtgtggacctctacatgataggagttggtaaaaagggaagttggtggtaaagatccttgactttgaggtcaggctgcctccattcacattcttactccacctcttaatgagcacttctgaactgcttcatagttgataaagggggcagagtaatactgtttgtctcctaggttgttgtgaggaataaatgagatgtaaggcaagtgaagcacttagtgtcttggcatgtggttctgctgctgcttactatttgattaccttggtgctttctctccagctatgtttttatctacaattaatatatttcattttgttaaaacagatgaacctgataaatgtgttggcctgtcttaacccaatcctgtagcttttttaatgttgtttatatgttttggactgttagatattttgccgaattaagtatattttatgatctgcaaaaactcaatgaaaagccaggatttcaaaaccctgagcttacatttttgttctctaattaaggtgtattgtacgagcattgaaagatccaaatgcatttctttttgaccaccttcttactttaaaaccagtcaagtttttggaaggcgagcttattcatgatgtaagtagtttatcctttaatgtgaaaaatgttctcctttcctaaattttacatactgaagcaggactctttttctttgcattaataaaagtgactaatggcaagatatggaaagattaagaactatgtattctttttatatcaggaacagacatatttaggaccagcttttcttcatccactgagcagagtcctattcttcctccctttcttaatttcttttttttttttgagactgagtctcactctgtcaccaggctggagtgcggtggcatgatcttggctcactgcaacctctgcctccctgatttaagcaattctcctgcctcagcttccaggagaagtagctgggattacaggcacatgccatcaggcccagctaatttttgtatttttagtagatacagagttttgccatgttggtctggtctccgactcctgacccccctgaccccaaatgatctgcccacttcggcctcccagagtgctgggattacaggcgtgagccactgtgcccggctacctccctttctttcatcttctcacttactcatcattatagacttagataatacaagtttcttttttattacatatatattgttcctagccccacttaggaatataagtctgatatttaaaaacacatgaacatttttcaaatgcaagtataaatatattttggactgttgtgcatctggactatgccattagccatcatctttcagtgtggataatttagagctcagtgtatttactgattatttcattttaaaagtgagccatgtgaaagcagatggtttggtaatttgatgaaacagaatgatatttctgccttgaacaaaatgtaggagtcagtatctttaaaataatatttacaatatcttagaatatcttacaataaatctgaattctgtattgatggtatcttttttgtctcttatctgtatagcttttaaccatttttgtgagtgctaaattggcatcatatgtcaagttttatcagaataataaagacttcattgattcacttggtaagttttggggtttattctttgaggcacagaggtgggaacatgatacactaacagttatgtactatgtgttccagcaagtatggctgtggccttatttgtagattatcctaaaaggagtcgtgtatgatagaacagcacaaaaataggtagacagtttaaaatattacttagaatgaattgagaatcagaaaccaagaaggtgtaggaggtggcatttgtgatagaaagagaatgaaactgggagtatgaaaacaactcggggcccagcgcggtggcttagaggtataatcccagcactttggaggccgaggcgggcggatcacgaggtcaggaggtcgagaccatcttggctgactaacatggtgaaaccctgtctctactaaaaatacaaaaaattagccgggcgcggtggcgg

SEQ ID NO: 64838 - DNA, 1028 bp, Homo sapiens
atggtaacaaatagttttttcccccctactatactattttatgcttggatacccccgccattaacaaattacaaaagtatatagtattgccagttagatctgaaagatggaattagaaatggaaatgtaattttacatgatagtaagacttttctaactacgtttgttgaaaacagcatagtctttattatttttatctttgaattttcttgtctagcgtatcagttcagtaaatgtttgtcaaattgaatcaaatcttattcatccttattgagcaaaccctacatatgttcaatattttaatttccttctggagcatgtttttaacatactaaaatacaaagagaaaactcagaaaatctgcagttgaacaggttttaaatgttgtaaactaccagtttctttacactggagtcaactgtgaaactaaggtgctttgttctcctactaggcaataatcaaaacacattagagattgattatattttccatattaagactgaatttttttttgtttttgagactagtcttcctggttcttgacgatacagatgaatgtatggtctattttgatagtcttcaatttggtaatcattaatgcttgtcacctgtaaattgtgtgcctccattggaattggggaagattgacttattctgaacataataaggcatttgaaatacaccaagataaagtagatgtaagtgtgtttgtgtagaaagctttgccaggtgcactagacccagaaaaccacattctgtcccagttaatttgttttgtggcatgaagctatgtgatggaatgttaatgtcagcaacctctttatttacgcaccaaggaaaaaggagtagtaattaacactttgacactcccccattgatgtgtaattgactgtttcaaaggagcactggttcataagctattgcatgcattaaaactgggttttctatattgcagcattttaagacaggggtcagtgacaatgcagaaattgctcaatgatgcactttttttattactgcattaaggt

SEQ ID NO: 64839 - DNA, 1050 bp, Homo sapiens
aaaagtaagtagtctcatttttgccatattctgttcatgtaacaggcctagaaaacagaatagtgaagcctgatgagtgttcatactaattaaagacctgcacaattacatctcatgttaagctgtggaaattatttttacttttgtaattgtggaaattattgtttgagcacttatatagaacaattttgacaaagcttcttatatttgcaaactataaactgactccacagagtattaaaaacaatttttctatagtaccataggtgatagattcaaagttaagaatcggccataaaatgattatttttagaccctaaaagttttgcacattttacatttttaaatagttatacattttaggagataaaatctacaaagtacatttcataagaacaatttctatttagttaaattacctaagcttatttttcacactaatagctcttcatttaaacacagaggatttcttatctacttattagttttttctgtgttactattactggtaaacctgaagttttaaaatactttcacaaacattttcagttatgaaaacattccattttgcttcaggtcactatttaaaaatcaaaactacttacaaaccaaaactgtcaaagtgtgtgtgtcatttaacatttataggccaatacagttagtactagatataattaaagaataccattaaaagtgatacttgttctttataagacaaaagtagaaaattgcacaaataattcaaattttgcattataatttctaatgaaacatgctgttgtaattattcaaataacaacaatgtgttaggcctagaagaaaacttaaggaattacccagtcctgatcctttcactttaaaaacaaaactgaggagcaaagagattaaatggggacttatagtcaaaaaatagcagtgctaggcctagaataggttcatttctaaaataaagggctagaaattttaaaaattaggaatcctaaatatataacctagtcctaagtaggagcagaattctaacataatatcatatatacttgttttgatgct

SEQ ID NO: 64840 - DNA, 2667 bp, Homo sapiens
gtaagtagttttgatttttaaatagtgacctgaagcaaaatggaatgttttcataactgaaaatgtttgtgaaagtattttaaaacttcaggtttaccagtaatagtaacacagaaaaaactaataagtagataagaaatcctctgtgtttaaatgaagagctattagtgtgaaaaataagcttaggtaatttaactaaatagaaattgttcttatgaaatgtactttgtagattttatctcctaaaatgtataactatttaaaaatgtaaaatgtgcaaaacttttagggtctaaaaataatcattttatggccgattcttaactttgaatctatcacctatggtactatagaaaaattgtttttaatactctgtggagtcagtttatagtttgcaaatataagaagctttgtcaaaattgttctatataagtgctcaaacaataatttccacaattacaaaagtaaaaataatttccacagcttaacatgagatgtaattgtgcaggtctttaattagtatgaacactcatcaggcttcactattctgttttctaggcctgttacatgaacagaatatggcaaaaatgagactacttacttttatgggaatggcagtagaaaataaggaaatttcttttgacacaatgcagcaagaacttcagattggagctgatgatgttgaagcatttgttattgacggtaaggcagacagaacattttcatttatttctagaatttctcatctactacatggatcatagtaagatttttatctggaaactgagccttacacaacaaagatttgtttatagcagatgtgtatttagtagattagtggatatatttgttgtagggtgaaaatttagtagaaatataaactgctatattctatcccttgaaatcacgtagaacaaagacgtttaggcaatacaccactgtggttaagagcacagattttagtattagatgtggatttaagaccaggcccttcctttgtgaaacaggaatgtaggggttcatttgtggttgtaagaattaaatgaattaatacaggtaaagcacagtgcctggcacatagtaagtgatctttcaagtgttaaccattaccagtttttttatgattagcctagaaacaagaacttcttccccaacaattagattataaagcaacttaactgctcaggaattttttctgagctttttaaatttgaaagttgggattatgcaattaagattaataaaaggtacagaactattgaccttttttcccctaatgctctaagttttctatgaagaagtaataacttagtaggaaattagtttattcccctatatgagatggtaggggaagaacacctagcattctttaaaaaaaaaaaaaaaaaaaaaacagcaaaaaactgtatgcagtatttatttaatatagattgtcccagcagccataggacaaatgcatgacctttcttttggttgccccatactgttttgcttattagatttaaacagtgtataatgttggaaaacagtataaagttttattatggcttacttggtcacagttttcataccttagctatttttcttggaaattttccatataacatacgatataaaacatcttttttcagccgtaagaactaaaatggtctactgcaaaattgatcagacccagagaaaagtagttgtcaggtaagatatttaatgctttgcagcattttatagaacgatttagtttgttccgattatttcacttaaatgtttagagaaccaaggtggtgttatcacttgactgtagttaaatagttgctatttatcataattttattaaagttcagactgaatgtgattagcttatttaatgaaagagtcctattttccagcacatttcatttaatggctgagcattggctagaatactaatgacttttatgtctgctttatatagttgctcaggagaattagaaggcttaggatcaatatggtaaagattttttttaaataattatgtaattcttaaattctcttactattctaaattaggtatatttaatcttgcttttaactggattcaaatctgtagtattataaaagaataccagaggctaaaaggttgactaacactgtgtttaatttttcaatttttagtcatagcacacatcggacatttggaaaacagcagtggcaacaactgtatgacacacttaatgcctggaaacaaaatctgaacaaagtgaaaaacagccttttgagtctttctgatacctgagtttttatgcttataatttttgttctttgaaaaaaaagccctaaatcatagtaaaacattataaactaaaaaaatttgcctagtctggacagttattgtctcaaatttatactaaaatcacaaactccagaggatatgaagtaataaattacaaggggtcacaatgtctgtcatacaatacataaattctgttctttaaaaaaggatattgaagaagcaatgagcactttaaagaaaggataatatacagagagaagacagaagtagagtaatacaatttcttcacattagaaaaacttggaaaagcaaagacaaactgtagagctttaaatacaacagtcattttattctagtaaaaactataccagaatttcagttacataatttcactactgaaa

SEQ ID NO: 64841 - DNA, 1039 bp, Homo sapiens
gtctcttctgcttttcttttctttggctggttgtcattttctaaacttagtaaattttcacttttatttagttgattcgtaatgaggctctgccagtcatcatcaccagaagtatttttagtcgtcttgattgcctgcaaatggctttgtagtggagttgatatcagaggctttgttttcacctgggaaagataaactaattttaccttcgaaattattatacaaaagattttaaagagtctgtaaagcctctgcagttatgagtatgtggtaaaaccaccatctcttggctgatttccactaccttagtagttctggcaccagaaaagtatacaatgtgaatgtgtaggcttatgtagtagatcttcaaaatctctaatatataactgaagtaaagtgtacaaaaactgccttttactacttcatgtttcctcccatgcttcagaacaccattgttgaagaaacaggaagggcagtgagatatttggaagttggcatgttttcaagacactgtattgggtaattttaaaaatagtgtgttaaataactttttcattttaaggttcttttctgatgttaaaatacttactggaaatttagaaaatagagtaaagtagaaagaaactaaaaatcattagtaatcccttatccagagaggcttgttgacattttggtattatttgctgctagcgtttttttctatttttagcctatttgatcattctatagaattttatgtattttcctctgtgagcagtttcttaggtcattaaaaacaattgtctatggctgcaaaatactcccttttatggatgtttgatatatctcctactactgaatgtttgtttccagtttatccctaccaaaaattaattcgagttaatttcatgcaaaacaatctttgatgtttttgagagattcccagataaaattttctcttcaaaaggaatactgggccaggcactgtgactcatacctgtaatcccagcactttgggaaactgaggcgagtggattgcatgagctcaggagtcgaaaac

SEQ ID NO: 64842 - DNA, 1047 bp, Homo sapiens
attagcttcttttagttcccagatgctattactggaaagaataactagtaatggataaaaacctacataaatatttcctattttgccatcaaagtgctgggttcattttggtgtatttggcatccaagtacaaattaacagtttcccaaaatcctgattctttgacttttttatcttgatgatggaaaggaaggacacgtttacttgctttagtttctttccccttaactacccacttgctgagaggggtaggagcagggattggctttagagaaacaagatacagtgtagattagctaatgtttgcgcttaacaaaacttgtcctgtttaacttacctgagggttctgcagcctaccgcagtaattttagttctagctgttttcagatatattgccttgtatcttcgttctttcgtctcctatcctttttagaaatttatcacctgtttctctttcagcctgacttacaaaatctaatttttggcctaaaaatttcccctagcttggtactagtccttttatttctgcctgtgattatattttaaaattaaacttaaatgaatctaattcattggatatataaaaaaaaaagtaagtggcttgctttgcttactctggttttccatcctcattcctggatataatcaagattgcagtaggctaacaatctaatgctgaaaacaagaatgaaaaacataccatcttttcaagttactttggacccatagagagaaagtggattggtacttaataccttccctgaatttaacagaattgatgtggactgtacataaaatatgttgaaaaataaaactatttttttggctataagtcttcataaaattcatttataacagaggttgataaactttttccaaaaagtgccagagtaaatattttcagctttgtgggccaaatggcctcttacaactgctcaattctcagtgccatgccaaaacagcctttacaatatgcaaaggaatgggtgtgactgtggtctattaaatttataaggagatctacttttgaatttgccccacattaca

SEQ ID NO: 64843 - DNA, 1137 bp, Homo sapiens
attctttccatctcagtttccaaaaataatgtgaatttacttaaggattattaaaaacaattggacttgattagcttacttttagacataaccttttattaacataaaattttaaatgctcaaataccactatttccaaatttagatgagtaagaaatagaagtacatatccgatgcctcacactctccttccccaaacaggctggattgtatctatttgatttatacactgtgactttttcctgctgttttctatcaaccttaattgtgaaaaatggtgccatgttgccctcttgatattattttggagatcagttaggtcttaaagcatccagatgcgtacagttctacacatatctgtagaattagctcactaaggtctgctcggcaatatttttaattgacttacatgttctgtgggaaaagaggaatcataaaaagtctttgccattgcattcttctcttcactgggttctcccttgggatctggatggatactccagttattcaaagtgtcagcaactctgttaatgctggtagtatctgattgataaagaggaaatggcaacaactgaatttttctctaggtactcattttagtgactgaacttgtttctgatcctatgcttttgtatttaaaaagcaacaaatttctattttaatgttgaatattttgcagttgtcctagactttgctcttaaattaggcatttcatttctgaaaacaaacaagattttattattgctactttctaaaacctgattactgtaattccacattaaaagcagtgaaagaaatggtataaataccttctaaaacaaaataactcataaaatgttatcattattcccctggttactgtatttcccacacatgtaagcatttgtatagtgaatattttaccaactcagattaatggaaaaagtcagaaccaactacataccagatttataaactatttaaagaaattggccacagtgagaagtccaacaaagggctgtttagaaggggtcacattgggctttaataaattgatagaaatgagttagagaagtatgtaaattatgaaggttaaaagatactgatggcatatttaagagtattttacaagttgaatttctacagaattttagatat

SEQ ID NO: 64844 - DNA, 1093 bp, Homo sapiens
ggaagtttttaaggatgaatgaagagcatatagaaagaagagcaataaatattcacacttggcagaagccttaactacttcactgtatttgctctaaaagttaaaaacaaaagaatattaagttgttcctaatttaaaataagacgaacttttaaaacaaaatttacaaaatatgactgtacacatttatcaagaataagtagaaaaatattttgagaattaaaacattactttgttttcttacctggtccaatatcctttccaacatcatccacaccaatatttttacaaagagccattgaaatgatctttttgttttctgatggatctagtggtctctccttcagcaacaaagaaatgcaaggggtcgaactgctcgctgtttgactttcaatgtgatttacttttgaccaaggaccggggtctgaaaaattcatgtatactggagttttctcagtttttttatctgaagttgaaagatcaaaggttgaccttccgcttctgtttactaaatctccagatggctctatgtgaaatgaatgtgattcctccagctgtccttcactgaacatttttcctgaaacaatgtcatttaatgattctgttttctctgtattatttaacaatgtatgctgtctttcattaatgctcacaaaaaggaagaggtcattttttgtggcttcagttacctgattctcatcaatctgattctttttattggaaaactctgtttctgtgcaagttttcatgtgaacagcagttttcacatctttggcttgtgaagcatgactattctcattgttaagatgaagatgggaaatgttcacattagtgttttctaagtatcccaaacagttattaaattgactgttttgcatatcactcatatttttacacatagtttttcccccagggcttgagttaggtttcaccaacatagacatactatggacatttttatctgagttcttcagaagtagttttgaattagcactaaaagcagcatatgaaacatggtggtcgattactatatcacagggaacagttagttcagatttctctaaagtatcattacagacttgcagaaaatctg

SEQ ID NO: 64845 - DNA, 1047 bp, Homo sapiens
aaaaatactgcttcacctggcatggtggtgagcacctgtagtcccagttacttaggaggctgaggcaggaggatagtgtgggcccagaattttgaggcttgtcgtgcactatgatcgcacctgtgaatagccactgcactccagcctgggcaacatagcaagaactcatctcttaaaaaaataaactactgctcaaaacaatttgcctgccatgtctatcttgtttttagtaatggggtggttcttctattacatataatgtggtattatataataatgtggtatgcatgtttgaaaatgtataaagatctccattttgcttaaatatgatagactatataaaatgaatgtaaagtgatatcgttataaagagtatggtatattaaacttactaaaaaatcatttgactttcaaatagaaattgctgaatggttgaactgaaacacagattccacatttatcacatttgctcaaatgttttatacttgtaggcaatgtttttaaaagaatctcttccattttacactagaatgttccagaagtaaataatgaaaacagtgaaatgtcaactgaaaaatcagaaaacaccattatacagaaatataatactgagcaagaaataagggaagaaaatatggagaatttttgttcagatactgaatacagagaaaaagaagaaaaaaaagaaggctcatttatagaggaaataattatagatggtaaccttaaaattatattgatattttctaatttgtatgttgatatttacagtaaatatttttgggaaaattacattctgcctcccctcttcatgacttattcctagtctttttggattctggtttctgccttcactgttttgctgagaatgttcttggagtcaccagtaaccttctgatgaccagacctagggcatttttcttaattcagataacctttctgtaaccattggaataatttattaattcttccatcttgaaaaagtgttgtttaaagctgatactgattggaggtgttcaaactcaggctgaacaaccacttggtgga

SEQ ID NO: 64846 - DNA, 1909 bp, Homo sapiens
ctagtggtttgctggagccagcttttgccagtgggggctggttgttagatattaaggaattttgtgaactggttgttaaaccaatggtagtttgaaattaactatgatgtgaatatttaacatgaatgaaaatggcaaatgcctcaaatcaggctttttttttttttttgagagctagtttatcagtttactactacgagtatgatattgacaagaggttggaagtctgaattctaaatggtgagaccttccagcccagtatcctcattgagagggcaactagcctaactctctggcagaaaaatggaagattcctttcaggggaagctaacctgcccgagagaaaagactatagctgctacagttaagctttcccagtgaaatagctcagccagatcaatccacagtgaaacctaccatttgacaaaactttcagccagcattttaatacctcatttttaaatatgaataggtagttaaggattactggacatttgaagaaagcctctgatatggtttagatatttatccacccaaatctcatgttgagatgtaaaccccaatgttggaggtgggacctggtgggaggtgtgtgcgtcacgggggcagattccttatggcttggtgctgtcctcaagatagtgaatgatctcgttttcacgagatctggttgtttaaaagtgtgtggcacctgcctgccttgctcttgctcctgctttcaccatgtgatgtgcaagctcccacttcaccttccaccatgagtaaaagcttccttaggcctcaccagaagcagatgccagtgctatgcttcctgtacagcctgcagaaccatgggccaattaaacttcttttcttataaattacccagtctcaggtatttctttaacaatgcaagaacaacctaatacagcctccaatatgaaaaacagacaaaacaaataggataatgaaaaaaccttgtagaaactaagaaagtatgtttagttaaagggaatatgttaatctacaaaacaagaattttgagtttataaagaaactcagagaataaacgagagccctttagataaatatattagcagacataaaaagtacaaaggaaaggttggaagataatactgtcttctaaaaagtagaaccaaaagacaaaaagatggaaaacaggaaaggaaattggggggtcagttcaagatgtctggtgagtgtcagagagagaagagagaaaatagagggagaggaaatgaccaaagaattaatacaaaaaagtcatccaggcctgacagatgtaagtttatcttgcccaataccaatgcatatcattatgaaattttgtacaacacataaagaaaagattctaaaattgtacaagaaagtaggtaatatacagggattaagaatgagagtggtaacacaaggtttcagacttctcagtggcaacactggaacgtagaagacaatagaaccatgccttcagatgttgggaaaaaattgatttctgaagcagagttgtattgtatttagccaaacaaattgccgagtattggtagaatcaagacatcttcagacatatagggtctcaaaaaatttaccaccctatgcctcctttatcaagaagtagtagaatgtttgtgctaccaagacaagggagtaaaccaagacaggaaactatgggatctgggaaacaggagactcatgacagaactgaaaaagggtatcctcagagataacctaatttgtatagctgacagagagaagtaggtcaaaattgtaatgaaaggatggatgtctccaaaaaactgaaatcgagagaatacctgaagtaggtagtttcctttagatagagttattgggtgcagacaagaaatgattgatattgctagtgcactgttttaagagcatgatgttcttggcc

SEQ ID NO: 64847 - DNA, 1064 bp, Homo sapiens
ttttaagacgttaattactgaaacaactagatttatttttatatccttcagtatccatagttgttttaattattatctcatgtttttgaatatttttccacagtggaaattatgaattcaataagttattttgttcaataagttaagtcaaagaccatctggcctatggacttgaataattatttattatacttgttttctactgtgtacttgcatctgaacttattcaaaatttacttattttaaactcacagtttagggctgctggttacaacactgaaggtttttctctagccataaaatatgctgttaacatatttaacataatgtttaccactcaccgtctactaacctttattttggcagtattggtaataaaactgcacttgtctgttcacacttaaatcagaaacatctatgtgtaacatggtgatgtaaagggctgtggttgttaccttgaatggagtaaagtagctagttcaatcagtgattgaactgtcactatacttacacataccactttctaagcaaccttgctaattgaccatgaacctttgtgtcattaacaatagtatgcttgagtgatatgactgctctcatcaagtatttttttttgccatttacttttatcctgagtaaatccaatctttgattttatcaacttttatattagacaaaggtaaatcgcatttttctttatatcatgttcattactcttttctacttacatttattataatttgtagtttctcttagatctttgaatctattaaggtactacaggatatttaagtatgaaacatggtgcattttcttgaggagcttatggtctataggaaagcctttattgttaccggctatgagataattaatcttaattatttaaatacataaaggaatacttaaatattcatgccatttattagtacttgagagtactttattttaccagtagggaaaataattctacatcacagtgcagctgtagcaattacagaatcccttgaattcggcttagtagaagtaataggtaacagtgccttgcacgtggtagatgctcaaat

SEQ ID NO: 64848 - DNA, 1055 bp, Homo sapiens
ttgctataaagagctacctgagactgggtaatttatgaacaaaagaggtttaattaacttacagttctgcaggctgtataggaagcttgactgggaggcctcaggaaacttaaaatcatggcgggcggggaagtaagcatgtcttaccatggcagagcaggagacagagactgctaagggggaaagtgctacacacttttaaacaaccagatctcatgagaattccgtcatgaggcagcactagggggacggtgctaaccattagaaactgcccccattatccagtcacctcccaccaggcccctcctccaacaacgtggggattacaatttgacatgagatttgggtggggacacagagccaaaccatatcagtacccctctggtgggggatgttaataattgggggttatgtatgtgtggggcagggagtatatggtatatctctttaccttcctctggattttgctgtgaacctaaatcttctctaaaaaattcttttaaaaatcattctcagtcctacagctttctaaattgaattacaataatttttattactaaaatatttgtgtgttttcttttcttataatttaagagttattttgtgacgtgaaaattaatatattttttgggaacaatttaagtcattatcacttcaagtattaccttccccaacgagtctttatattttctcctttcaaactcctaagaagatatattttgaatcttctcatttatcctccatgtctttataccttatatactttctatttctttatgcctgtgagcatcttatgtaattttctttctttttgagatggagtcttgctctgtcatccaggctggagtgcagtggcgcgatcttggttcactgcaagctccgcctcccgggttcatgccattctcctgcctcggcctcctgagcagcttggaccacaggcgcccgccaccactcccggctaattttttgtatttttagtagagacggggtttcaccatgctagccaggatggtctcgatctcctgaccttgtgatctgcccacctcagcctccca

SEQ ID NO: 64849 - DNA, 1041 bp, Homo sapiens
catctcaaataaataaataaatagttcatttactttagtgactggcttttttctcgttttatatcattattatttattttctgaatctgaaaataacatattcacattatttccatttcaaacaatatagatgtgtaaagtgtttctttagtctcagtgaccagtatagatcactgttaacagtgatccctttattttaatttttaaaattgtttatcagttgcagatgaagatgtgtgccctggaagaagaaaaggtatttataatttttttaaaattttctgtctattaaaaagtatttacttttacaaaataatttaaaacatagctagatgccttttattatccattgtttaccataagagaaaagagcattagtaacaaactaatagagatggttaactgcttaaaatcttagaaaggacccaagataatcatgttacttcacttccatcatttacagttcagaatatagaggcctaacaagattaaatgacttgccaaaggtctcactttgaagtggcaaaattgggactagaacccagatctcttcaggccccaaattaatgttcttcccattccactgcagtgtttctattaaccatgatgtttttagtgctttttcaatggaactactgtctttaaaaaatatggaaatgacttgcaactgggtgcagaccaactggcaaaggggataaagctccaacaaacctagaaatttatctgacgctaaatattttctctagctatttaatagttaatacattttttattatatcaatgaacataccattaataataatcacttatggtttatttttagccaaaggtcttctgtaaaaaattctcccatatttttatattcattagataaataccacctgtatcttattaattagaatatatttattctagttgtatgaattaaataattataaagtgtctgcaagttctcaggtaggatgctctactgataaaatgatttgtcattataataagacattctatttcatgataattgtaaccatataaaggccttat

SEQ ID NO: 64850 - DNA, 1053 bp, Homo sapiens
agcaatcccagatcatataattcatgtttatatgtttttagatcatattttgattgttctgtatcttttttactctacacatgcaccagcttgtgtataattaatgggtataatttttcacacaaagattcactttttgtgacaaatgccatccatattttacatttacatactaaattaataattatgtatgaaggagacaggcttataggactaatttgccattcttttcaagttatgagagtattcacaagaataaaagacaatatgatgaaaccaacttatgtgatatttaagaaaaaagcaacttgaaacttatggttctttaccaaataatttttttgggaaaaatgtttttgttactgaaaaatcgaaaattttttatagttgtaaatataaaaaagacaattgtgtttatattctttgaatgttttagctaatgtcaaagcctactggttgttattatgtgaaatgatagtgtgaaactgatgctgttatagtataacaataaggacgtggctcatgtattttatgtacacatgcattcaactgtagtgacaaatggcttcatgctgtgtgattaaatgcatattagcgtttgccctaggcatttggttattaccatctttacttcattacattaccacactgtatggccatataatttataagataatacacatcactttgttgctgataggaattattctgttttatggatggtgtcctttaattttgcctttcatggattataaaattggttaatatctgctgaagtgaatcactggagaagcaaataaagatgttggcctcaggtcaaagtgtcatttgtgatactggcaaaatcttacaggctcatttatccctgtacatgattgataacagcatgggttaaatggagaaagctttgcttccattaaaggatcatcatgaatgaagacctcccacttaaaagtcaggcatgatgagaagacaagagactatctacaggtcaaattaaataacttaaataatttaagtagaatgacagtgtaatttgtccattctgtgtta

SEQ ID NO: 64851 - DNA, 1087 bp, Homo sapiens
cgggggccatccagaccctgcggagagcgaggcccggagcgtcgccgaggtttgagggcgccggagaccgagggcctggcggccgaaggaaccgccccaagaagagcctctggcccgggggctgctggaacatgtgcggggggacacaggtacgaggcctggcggcaggacctcggcggggagggggttacctggaaggggccacctcggcggactgggttggattcgaacacatagcgagggttgcccgcggcgacaggtgcccgatcagccctcggcagggtcactgggcacggcgtttgtcccaggcgctctcaggggctgcttcctgggcgcgcgtcgggttccggcgaccgaaaccgcgcgccgggcgctcttgcgcctaggctttgagtacaacaggttggtgattcagttcgacagaaactcaaagtgctgagctaggggccttttttttttaatatttttttttgtttgttttagtttgtttgacagttgccagactatgtttacgcttctggttctactcagccaactgcccacagttaccctggggtttcctcattgcgcaagaggtccaaaggcttctaagcatgcgggagaagaaggtaagcactaaaacgtccctggaacccagagccgcatagcacagatctcagtgagaaagtgcagtatttgaaattacatacccccagcaatcatagaaacactaaaatatcctttagtttaatttgtggcatatttggcaaggttgtgtttttttatgttctttaactgcaatttatagaatttgatgtctgtgagtctcctttaataagtatatacgtaagacctagtttgtggttaattgaatggaaaacctatttcagcttctgaaaatcagtgagtgacatttctctagatgaagctgtgtggcgattataataagcataattacttgttcttcctggagaggcgaacggggagtccaggatctagtctggacttgcgagaccctgggcgagataacttaatcccgtttggcttgaatgtcttcatctgtaaaagtgatgcgggtggggcgtaaaatgatctctgaggtcctttt

SEQ ID NO: 64852 - DNA, 1052 bp, Homo sapiens
tagtctggttttcttaagtaatgtgtactagagctgggagaaacaggaagacagaggaaaaccaacaaggatgctagcatggcaattcagatgtgaggtaatgagtttgaacctgtcttcaaggaaaaagaagtcgtagaacttgatgcctgattagaaagaacttggggccacacgcggtggctcatgcctgtaatcccagcactttaggaggccgaggcaggcggatcacgaggtcaagagattgagaccatcctggccaacacggtgaaaccccgtgtctactaaaaatacaaaaattagctggacatggtggcacacacatatagtcccagctactcgggaggctgaggcaggagaattgcttgaacctgggaggcagaggttgcagtgagccgagatcccgccactgcactccagcctggcaacagaacgagactctgtctcaaaaaaaaaaataaagaaagaacttgggaatgttggaacaatatgacttgaacctaagcttctgtgctgaagaaatatatgtatggaagctgggagcaagaaaacaaaatttggatttgacaggacaaaatggttcatattttatttatttattttttttgagacagagtttcgctcttgttgcccaggctggagtgcaatggcaaattacaggtgtgagccactgcacccggccaaaatagtttatattttaaagatagctcaagaaaggataaaacaacaaagagactaataacccacgttttttttagtgaaggacttgaatggacatttctctaaaaatatatgaatggccaacaagcacttgaaaggtgttcaatgttgttagatattaaggaaagggaaattaaatcaaaaccacagtgagagccaggtgcagtggcatgcacctgtaattccagctattctagaatagctggaataataatttttaaaataacaagtattggcgaggatatggagaaattggaacctcatattcacattgccagtaggaatgtaaaacggtacagccactgtggaaaagtttgacagttcctcagaaa

SEQ ID NO: 64853 - DNA, 3099 bp, Homo sapiens
tttgttttaatggttcaaaaaaaatctttcttataaagagcataggtagaattagtgaactctttggatcctttgtacagataaaggttatagatttcttgtgttgaatattaaaaaagcaaggatgtctaaccattaagattatccaaagtcaggctgggcgcagtggctcacgcctgtaatcccagcactttgggagggataggtgggcggatcacctgaggtcaggagtttgagaccagcctggccaacatggcaaaaccccgtctctacaaaaatacaaaagaaattagccagacatgatggcgggtgcctctaatcccagctactggggaggctgaggtgggagaatcgcttgaactcgggaggtggaggttgtagtgaggcgagattgtgccattgcactccaacctgggcgacagagtgagactccatctcaaaaaaaaaaaaaaaaaaaaagattatccaaaaagatattggacctactctttcttaggatttttttggcggggggttagaaatacttcacagaatttgacatttcagtataaatctgtgaccttaatataatcacttggttttatatgttaaattattgcacagcagtcatcatattttgcagagtttagttcttaactcttgctgtcagtcatgttttattataggtagtggggtcagtagttttcttcttctaaaaaatactatttgctatgaagttagttcttcagaagatacaagtttgcaatgaaaaggatttgcaagggttgttatgctatcaaataaacagacctaaaatctaggagacactagaacttaatgaagttgcccctgttactgattagtaaatactcccatcttcgttgcaaaattatctctctgtataactacatatgattattttgaaatttgttaaacttcataagtaatagtttgagaatgtggaaaaagtaatttgcttttctgctcttaaaataatattgattaatgttaccagaaaccttttgcatctcttaatatgtctgaacacaaaaggaaaacaccataatcatataaacccattctttgtctcttcttctaaatcatatgtataaccagtttttccttaagaatgtagcagcatataagctataaatttctggagtatatgcacacaaatttatctgggtgggtatgtaggtatatgtgagtttgtttcctcttccaggagctcaagaaataacatactcctgaaaaatagaatagaaatttctgtgctttatgtttttgccaggctattacattttcttatcatttaggatcacttataaaatgatcattgtttattttgttttataatttttacaggagtgagactgcaaacccacatgtttgatagttcctaccaaattaaaagtttagaaagcataaatcatattacagtgcatatgtgagtgtatgtctctcttttaagatgcatcatcttaaggcagataaaagtaagtccttaatcattacagactgccaaagactttatccttttagattctcagtctctttgttgcttgttgcaaataaatcatctagcaacatttacatttaattaggaaatctaacttgcttttaaaagttacccacgttgcatataaaaatcttgctattccttgtgtcttggctttacataagcacttttgctcatgtgactttgcactttgcacttattttaatcctctttaaagggctacaggcaaattctactttgccataatcacactaaggcatggaagaacaacttgcccagaatctagcaggttggtgacaactgggtttagaatgagtgagcacacttttctagtcccatgtcatgcctataaaattacactgcctcgaattatgaaattcagggatcttgtacataattctaagtttgggacagaaatttacaagcatttctcatatatacatacatttatatatgtacatgttacatatatttagatgtattctcatatacatatgaaaatatttatgatgaatagaattataagatatgtatgtatcttgcactgaatcataatttgaaatatttcatgaattcatttacttctattgactcccaaaattctaactgcaagctagcttcagaacctgtgagaaccccaccccacccaagcagctgcctagatttgtctactgctatcattttgtgtaaagcagttgctctaacttgaatgagtctagaattcatcattaagattgtgatatttatagagcatccaatgtggagatcatgatactttaaatataaaaaggaaaatatgatagaactgttattgacaaatgcttataatgattgaagggaaagtatctcaacattgtatcagtcacatatatttctgttgctttcaccattttctattcctgttgtaagtttggtggtagatttagttttgtttggtttatctgttttgtttgtgttttgtctcctggcaattgattagtgttaatcattaaatctattttgacacaaggttttatatataattagatcagttttccactttattacaattaagaaatgagtaaaatatggatataaaaggagaattggattgaaaagacaaatacacatttacaaggtcatacctttggtaggacagacaattccatatagaatattctcttttgataatgaaaaaaattaaagagagcacaaactttgactatgtcaaagtatttttatttttaattttttgagacaaggtcttgctctgctacccaggctggagtgcagtggtgcaatcacaactcactgtagcctgaacttcggggctcaagcaatcctcccacctcagcctcctaagtagctgggaccacaggtgcacctcggtacacctggctaatttttgtgttttttgtagagacagggtttcaccatgttgcccatgctggtctctaactcctgagctcaaggaatccacccacctcggcctcccaaagtgctgggattacaggcatgagccaccacactggactgctgtgtcaaagttttgcatcttttttttttttttttccagaaggagtctcactttgtcacccaggctggagtgcagtggagtgatc

SEQ ID NO: 64854 - DNA, 1033 bp, Homo sapiens
aggtttcaagtttgcctctaaaattctaatccatatttttctacttctcagataatttatgtgtgtgtactcttcctagacgtacaagagactttttaatgctaaatatttgtcagtgcttaacaaaaactcaatttcacattactcatattgtttttgttttaattgaatgtgaattaaatttttattagttatttgatttggaatgttatgtatgccattaacactattaggggaatctctagcatttctgtatttttaaagaatttgattcttttgtagattctgcctgtgtggtcattttaaaacatgtgtgacatatatcagtaccttcattcttctatattttgtgtctcctccaacctccaactttttttgttttttgaaaaatgtttctctaacacctcaacagtttaaggtaatttagtacacatatatcagtatttttgtgatctgaaaaagcaacccattttctaaattcatatttttcctaaaactttactatgtttttattttaagaggtttcctgttatatacactttttacacatgcaaataaactttataccaagtgagtatttattgcttgtttcatttaagcattcttcctcatataatggcatataatgaaatatgatattatattaattaaatttgaacaacacattgagtgttttcaaaacaatatttatagcatgatgtcaatgtatatctttcacccaatggggctagcattctatttagacaatttagttgcagttgtgaaagtggtattttctttaacaaaatttaaatatttaatatagtgtttgaggcaaatatattactccttaatactaaagttattttttgagctatatctatacataattgaaaaaatcagtagtaatgttatgctaaattataagagtaatatagcaagacttccagcttaaaagaagtaatacgaagtatcatacacataagtgaacattgattattattcagtattatttaatgttaaacatttagaccaccttaaatttttttggatc

SEQ ID NO: 64855 - DNA, 1064 bp, Homo sapiens
ctcactatttgacccttcgggttattttgagggactccagtactcagttccctgatcgcgatttctttctctgcgccccaatccagaaacagctgagcgagctcttttgcagttccgcttactccctccccaaagcttgctgggctagaggacccttttcctgctgttaggggagatttatattcaaagagattcaaattcaaacgtattattttccaatcctcgctgaaagggcctttcccaagggctcttattaactgtccccacccccaccttggggatttttctcgctctgggtttcagaatcttctatcccaagatagataaccacctcttcattgattaatccaactaccatctggatgactttaattacaataaatttaaactcaccatgcactctgatgttgaggggttttgtttgagacttggaacttcagcaggactctctccccaaacatttcctatctgatctccaagctgcttggtgtgcggtaatttaatgactatttgcggttcttctgttgcatagcagagttgtatttcttgtaataactcacaagtattgaaactagggaatcgtacaaatcatcgtttggcccttgggccataaatttaaaggttaaaataacagtaaaatttctatttaatgaccacctccttttaaaaatcaatattggtttaacacctattatgtgcttagcacagaaatctatccctcaagataagcataacataaaggtttaagcaaatcagccgtagtgaaagacctaataaacttgatacgctatctctgatgaccattgaaaaagtttaaactttggtaataatctggtgttggatctgctatgccttgcgagattaattttgttctggaagatcctgttttcctcctggcgcctacatccttttgttcctattcattcctttttgcaagtctttctgcacctgtgatgcttggagcctggtccccgggtggggaagcaaggaagtgagtagtcgttatttacacatgaattcaaacgtgtaggcacagcgactttgccaattttatgttaattaca

SEQ ID NO: 64856 - DNA, 1583 bp, Homo sapiens
gcagcagccccagcctcaaggccaggtagggagggtgggcggcggggtcgcggtggaccaggaaaggccggggatgcgtttggggccttcgctcggttgcagcgccgcccagaggtctgggccgggcggggagccctccgctcgccctcggccagctcgggggaggcggctgatgactcctacggggtggtcgcgggtaggtgggggcgcccggtgcaggattcgcgcctggggacggcgggtgaaggaatagctgggcgggagtcgtggggctccgtcacctcttgggtcctgggctctcacatggtgaagtttgggctcgtggctgaactcgggatctgtgagacccaggattggcgccgggggtccgaagggggcgccggagagtttggggcagtggcgatccattgtattggaacctgggtggccgacaatgcggtcttggggactccggcgtgtgagggttgcggaggcgggagaggaagagtcgcggaaccgcgtcccggagacactggggggcccgggagggctgggctacgggagaatccccggggcgcagggcagaagagggggcccggcagggcgcgaacgcggctccagggccgggtgacatatgtttgcgctggtggccaagatttaggcgatttttcttccacgcgttcaaagttgctcttaggtttcctccccttttaacaacagcaggaagtaaggaatctttctttgccttctatgcctcggggtgactgagagttgggaagaaatggggcgggggttggggtgggggtagtgaaggccgtaaaggttgaagaaccaaagcatgcttctccatctcggcctttaaggtccgggtgcattatgtagcgtggggttcaagagttcatcttgcatgaccaagggaatctaaaattttgactcctacttgatatttaagctcgcgggaaatgtgtagtagtgccacactgtgaaacggtcccatttgaatgataactggaaggcgtggtctggtttggagaattggtgagcggggtgttttaaagccacctctcccgaacaatacagaatctggtaggtgcagcttctgattacatggaccagggaatcctgggttgctaatgacttcatcctcagctaccaacaggaagcttcgtggctttatgatctcatcagatttcttcattatttttcacgacagaagtgaacttttgttttaagtttatacattaccgtgttccaggttatcttctttgtttttacgaaagttctacgttcatgattgagcaaataagtgtgaagggtagctggtctttgtcttagattgtccattgggacgattgtgaaagaatgagaaaaatttgcttcaagaataggaatataagctttctcagaaaattttaggccctttgttttcaagacttgggagttaacaaaaataatgtgatgtgccaatttggagctaagtaattaaatgctgaaacctttcagaaatagccataattttgtattacatacaagtaagccattttaaggagtttcatgaaagacgtttggcacttcacccattatttcttgctgatggtaatttg

SEQ ID NO: 64857 - DNA, 1018 bp, Homo sapiens
acaaatgaaaattactttctcatcattgaacagcatgataggtatttgtgccgcattttttatcttttaaatgaaaaatatttattaggtaaatggaactgaaatactacctagttacttcttttagtagaatacttctgaggcaagaaactaaaatctacttgtcatattttccaaatgttatttatcagagtaacacgaaatgacttcccaaacacacttgaaaacagtaagtagattcacttggcacacataatctaaaggagatttattttctgtttactagaagttattgaatcttaaatattacccctcatgccctctccccctgcttttttaaaaaataagcggtggggggaatcagctaaaatacagcatagaaaatgcaggtttacccccctcccccgccagcctgctttgttaacatcttgtattgggatcaggccatctgtacagagttacacttctgaattatacctcattttattcctcaaactgtgcaaatattccctttgatttcagttatatcaaaaatggcaaatctgaaatatgccttgtaagtctaaatattctacacttcagaagcttatttatatttttataccattttaaaaagctttttcataatgcacatatcagttgaatgtttttgttcccctttgtggcagtttcttgtgaaggtgcaaatgagtactagttgtgatgatgtaatatggatacttatccataaagaattagcctgtctgtcaccttgtttcctgtaacctattcagaagctgacagatggtaatgacattcagttgttgccgacagggatctaacatcctactttatgccttcttggtcttgaaatacatcattttcatcagttgatgggaaggtacatgataaacagcttttcatgagtttgaaacaatacttttttgaatacaacagctctgttagttattaggtagttttattgtactaacagtggaaaaatagagtgggaaactccagcattataccttaaatgggg

SEQ ID NO: 64858 - DNA, 1014 bp, Homo sapiens
aaattttctcctagaggaagtgcacttccctgagatctgaggaagcagcaagtgcaaatgtcgcaaggcaggaacaagcctggcagttcccttccctggcaggatcttgctgtagctcagtggtacttcagaaccacccagagggcttgttgaaacacaggttgctgggcccaactccagagtttctgaatccataggtcttgggtggagctcaagaatttgcatttctaacaagtttgtaggtgattcttatgctgcttgtccagtgaggagattttgagaaccactgacctggatcttgtcagtgttggcttcttgacattcttatctccttaaatatcatctcttcgcaaagaacttccttgagcaccagatctaaagtcccaccaggtttcctttgttccaacgcttctgttttccccaaagtatttttccttagctgacaagaccagacaggtgagtttaggagtctgactggacatgtgtatagagacaatagtggaatctcagagattaaggtctttgagggtgaagaatgaagggctgagaactgagcctttgccattgtaggtgatagtgtctattacatgcctactatgtgctgagcactggcctaataattttatagtgttatctcatttaacttctcataataattctagaatgtaggtactattgttagcccgttatatagacaaggaaactcaagcaaagagagatttattaatttgtccaatatcgttgctagtaagtggcagaggcaggatttgaacccaggaggtgtaacttcagagaccgtgctattaatcataagctttcagggaaaaatccttttgggaagttgagggtataggattaaatagaattggcaaatgaagtcagaaagaggtttaatgatagaatactttgaagaaggatgttgggtctttgggatttaacatttatgctgggaggttatattttccattatttaaaaaattagaatcattttcccagagcatacttttgccaaaa

SEQ ID NO: 64859 - DNA, 2003 bp, Homo sapiens
aatcaataatttctgaaagggagatctggatgtatatagtttgaaaaaactaaccaggcgatgctgatgagcatcgcctggttacagaccattctttaggccaggcaaagtggctcacgcctttaatcccagcacattaggaggtggaggtggaagaatcgcttgagtccaggagttcaagaccagcctgggcaatatagggagaccttgtctctataaaaagatatttaaaaaactggccagacatggtgtcgcacgtctttggtcccagctactcagaaggctgatgtgggaggattgcttgagcctggaaggtcacacctagggtgagttatgatcacaccactgcactccagcctgggcaacagagcaagtccctgtctcaaaaaagtataaatttaactcttactaaaattcttgagaggctcttgattcccttgaagataaaatgtgagatccttattttggtatataatattccatagtttggttcctgtctacctcatatccctgttctccaatacaaccatgctgaattactacagttctaatgtgccatcttagggatatttctaggtcttcatatatgtgatttttatcttcttggaaccttcttttcttttgctttccctggataatttctcctcttcctttttttttttttttttttttttttttttaagatggagtcttgctttgtcgcccaggctggagtgccgtggcgcgatctcggctcactgcaagctctgcctcctgggttcatgccattctcctgcctcagcctcccgagtagctgggactacaggtgcgcgccaccatgcccagctaattttttgtatttattttagtagagacgaggtttcatcgtgttagccaggatggtctcgatctcttgacctcatgatccgcccaccttggcctcccaaagtgctgggattacaggtgcgagctaccgcacccggtctttcctcgtccttttaatactcagttgtcatgtcctagaggaagtcttcccagattgtgttatgtttatttacttatgctcttttatttctctagttcctagcataacacttggcagtcagtaaatgtcagttgtataaatgcagaacttacctttaggtgcaacaatagtagcattgattcagcattcattatgcgccagttgctggactgtgctagttgctgctgaccgtatgtgctttattgtttactctcacaacaacctgatgaaggtaggtgttactattacccatattttactgttgaggaaacggagacttggttaagtctaactaattgtctgtgtggctagcctctaagtcacagaatttatatagaactggatttgaatcctgtggcctgtttgcagagctatgcttttatacagctgttacacagttgtttcaaagttccctcgtttattttttcaaattcatgataaataatttcttaataagagctgattattcttaggctacatgtttttgcttttaaattatcaaactggattagctaaaacaaagattttaaaatatttggcatttaggtatgaatgggataggtatatgctagagttccacacagatttaattcagtggacttagtgtttatttctattcggattttataccaaagaatactgtgtgctaaataaagtaaaaatatttatcttaactgagaatattagaactacaaagaacattaggctttataagtaggaaaacaagtattctacaagattatgtactttgctcaaagtcttgtagcatttatttgcagaatcaggactggaatttggggctcctaacttccaatccagaatgtttatctttctcaactatgaaaagctgatatacctaaaactgtaacaatattttcaaagcttaaagagaattctatttttattatattctaggtatttgtgaccaaattatttaacacaaaaagaacaaagtgatatgactacttaaggcaaaatcatttattcagtgcttaagtaa

SEQ ID NO: 64860 - DNA, 3648 bp, Homo sapiens
ccttacatagttatctatcaaattcaagtgtagttaattttcaggaaacaaccaggcagtcatctttatcctgtagcccaattggagattccactcaggtgagcaacggaggattacaacagaagacctcccaggtctcagtggaacttgctcagtcttactcatctgcgattccatcatcagggtatcctccttctactacaaaaataaaaagctgttctacagaacaaccactgacatcaaccaagacccctaaacctcaaagtataattcctcctgtgcaaacactaagctattccaaacctttacataatcagagttctgtaatatcgggccaagcacaaatttattctacagcgcagctaccaagccttttatcagttagtcagtcccaaaattacggtttagtacagccacataatgtgccatctattgttcattcacaggtttataggtccagcaaggttgagaaattgccacccttgtataaaacattgactttttctgggtcatctcagactgtaactcctgaaaatcagacgcttaattattcatctaatcagcaagaggtattgtcttcagttacaaatgagaattaccctgctcaaacaagagatctgtcttcagtaagtcagtctcaaagttactcatctggtcactctcagggtttatcaccagttagccagacacaggttagctattcatctcaatcacaagttttgtcagttgttagtctttcagaaagctatgcttcaggggagtccctaacattaacagccccttctctttcttattcttctgcctctcgggctcagaatttgccagactctagcccgacccagaattatatttctatgcattcttcccaaaatgttcagactcaagagtcatcatctccccagtcccagaagtttttgcctgctgtccagtcatcatcttttgcatcctctactcattgtcagacattacaaaataacataacttcccctgacccaaagtcttatgctgaaagaaagcttgactcagatgtgtatccatcttcaaagcaagaagatggttttccaatgcaagagttacaggtgttgcagccacaagcatctcttgagtcatcaacccaaaggctatctgatggagaaattaatgctcaagaatcaacttataaggtgtcaaaggcagatgacagatattctcagagtgtaatcagaagtaattcccgtcttgaagatcaagttattggggttgctctgcaagcatcaaaaaaagaagaaagtgttgttggttcagtgacacaacttaaccaacaaattggccaagtcaataatgcagctacccttgatcttaagaactcaactaatttaatacagactccacaaataaggttgaatactaaagacttaaagcagcaacatcctctcatacttaaggtgcatgagtccaaggtccaggaacagcacgatcaaataattaatgcttcatctcagattcaaattccaaatcatgctttagggcatggccatcaggcatctcttcctaatacacaggtccttttagattctgcctgtgatttacaaattcttcagcagtcaatactgcaggcaggtttaggtcaagtaaaggcatctttacaagcacagcgtgttcaaagccctcaacaaatagtacatcccttccttcagatggaaggtcatgttattcaaagcaatggtgatcattctcagcagcaactccatcctcaaaattctgaagttatgaaaatggacctctctgagtcttcaaaaccattacaacaacatctaacaacaaagggccattttagtgaaacaaatcaacatgattcaaagaatcagtttgtttctcttggatcgatgtgtttcccagaggcagtgcttcttagtgatgaaagaaatattttatcaaatgtagatgatatcttagcagctacagcagcagcttgtggagttacacctactgatttttccaagtcaacttcaaatgaaaccatgcaggctgttgaagatggtgattctaaatctcattttcagcagtcattagatgtcaggcatgtgacttcagattttaactctatgacagctacagtaggaaagccacagaatataaatgatacttccttaaatggaaatcaggttactgtgaacctttcaccagtacctgcccttcagtcaaaaatgactcttgatcaacagcacattgaaacacctggtcaaaatataccaactaaagtaacttcagcagtggttggaccaagtcatgaagtccaggagcaaagttctggcccattcaagaaacagtctgctaccaatcttgaatctgaagaagacagtgaagctcctgttgatagtacattaaataataacagaaaccaagagtttgtttctagtagtagaagtataagtggagagaatgctacatcagagagtgaatttaccttagggggtgacgacagtggtgtgtcaatgaacccagctaggagtgcacttgcactgttggccatggcccaatctggggatgcagtcagtgtcaagattgaagaagaaaaccaagatttaatgcattttaaccttcaaaagaaaagagctaaaggaaaagggcaagttaaagaggaagacaacagtaatcagaaacagctgaaaagacctgcccaaggcaaacgccagaatccaaggggaacagatatttacttaccgtatactcctccttcctcagaaagctgccatgatggttatcagcatcaagaaaaaatgagacagaagatcaaagaggtggaggaaaaacaaccagaagtcaaaacaggatttattgcttctttcttagattttctgaaatccgggcccaagcagcagttttccactcttgctgtacgaatgcctaacaggactagacggccagggacccagatggttcgtacattttgtcccccaccacttcccaagccttcatctacaacacccacacctttagtgtctgaaactggcggtaacagtccatcagataaagttgataatgaacttaaaaacttggaacatttatcttcattttcttctgatgaagatgatcctggatatagtcaagatgcttataaaagcgtctctactcccttaactactttggatgctacttctgataaaaagaagaaaacaggtaaagttttacaatttagattcataattattactttcttctatttttccagctatagcccacattttaagcttttttcacttaaagcaggtctgcaagtacattttcaggacaaaatgtataggtaggtatcttaaggacttattttttaaatttttcttgcctataggaaaggtctatgttttaggttaagtagttctgctttttcttggctttttgccaaaggcagcataatctgtacagtatgccatctaatctgagacatcttgaggtaattgaggcactgtattgtgggcattgctgtagtataaacctggtacattttcttagtttgccaattttatctgaagattaacattttattattaaatatggttatgtttaaatatgttgcaatagtccaggtgacaaatgatagcttttttcagatgaggcaacagggatgttatagagttaaaatctgaaccattaaatgtggttatgtgcagc

SEQ ID NO: 64861 - DNA, 1044 bp, Homo sapiens
atcttaagttatttaatttgttggcatacagtttttcatagtattactttataatcattttaattttgatagcttctagtgctgtttcagaatgttttgggtttttttttttcccacatgtatttggtttttcatcttctatgaagagtcacagttttggttggccgacccttccttatcttctatcactttcatgtctttatttttattattattatttttttaagtagggtcttgttctgtcacccaggctggagtgcagtggcactatcatagctcactgtaacccttgaactcctgggcccaagcaattttcgcatctcatcctcctgattagctgagactacaggcacacaacactatgctcggctaattttttatttttttaatagggctgggactacaggtgtgagccactgtacccagcctcttcttttaaaaataattttgctctacttacatggaattggcagcgggaggataggtagatagttgcaggtttgcagtctacttgtcatctagacttaattctcacatctttgattcttggaaattaacatctgttgtctaatttcttcctgtggttttgtttcaaccagtttgattacaaaataatcaagtctttctttttaaactgttttgagttttacacaaaacaagtgtttaaatatttgtaatactgatttgcatttgcttggttttgtttcagaagccctacaggtggcaactactagcccaactgccaatactactggtactgctactacttcctcaaccactgtgggtgcagttaagcaagaacctctccactctacttcatatgcagtaaatattctggaaaatataagctcttcagaatcctcaaagcccattgaacttgatggtcttccttcagaccagtttgcaaaaggacaggacactgttgccatagaaggttttacagatgaggaggacacagaaagcggaggagaaggccaatacagagagcgtgatgaatttgtggtaaagatagaagacatagagacttttaaggtgatgtcagtg

SEQ ID NO: 64862 - DNA, 1719 bp, Homo sapiens
ctgaaataatcattctccatggataggattaagaaaaaaataaaataccagtacttgtagttgaacttaaatatgatgtgataagtataagctaatttggcgattttctttttttagatttcttcggtgcagaaaaaaaatgaagatttaggacaggaggaaattgttcaactttgtatgaaaaatgtaaaatgggtggaggacctctttgaaaaatttggagaacttctaaatcatgtacagcagaaatgttcctgacttttccacaaaaatcccatctttttatagcactaatgaaatggcagatatggggtggtcaaagataatcagatgtcaagtagtggccttctgcaggccggccgcttccatcatggaactgtcattaccacctctgctgaaggacagtggtgcggcctttaggaacgaagttagtcctctggaaatggacctaaatcccaccacatttttaccctaatgaatgatttttctattttgtaaaccattgggtaacttgagtcatattttcagaaacattttttgacaaatgatgaagcatgcactaagtataatttttttttattgctagagaagtaacacttaaagtaacgattttttttttctgactccggctaaacaccagaatgacagagaagtggcagaaaccatatgtttgtactcacatctggccacaaaaccagaaatactgtacattatgtaaagaggtctggtgtggtgtgacatcctgtataagaatatcatcaatttaaaatataaaatttggaaactattctgctttacagactccttttactcttaacatgttcaggaaactggatgtggaattggtgcaattctctgactgctttttgtgtcaaattatattgtgataaaaaaacaatgacatactattttccctatcgcaaagaaaagtattttcgtttatactgttttttcctttggaaaattttcaattgtacattttatttcactgatagttgtatttttcacaaggaaaatgttgtggttataattacgtttgatatatctctacaacaccttttgttattttcagtaaatcttagttatatgttgaatttctaatgtgaattctatcttgaggtaaccatttttttcatacagatttgcttcagtgttatccagaatatgcattcagtactagaattagtttagctttataaatagggctgtgttagacactgcagtaattttctaattcataaaataaacttcttactaaactagcacttgattaacttgttgaggtaaaaatctaactacatttacattttgaagaataaaactgataattagactatttgcagtgttaaacacagcttccttaactcttagaactggaagttgtagagctctccttttggtgcctttccagcctttatacacactattgtagctttcttaggtttgataggtagcgtttcaagtagtttagctgagacagtgaatgtattaggttcaacatgaccttgtgttttatttgtgtttgccaacaggatgccttatttgtttgagaaaaagatgtactagtgtcattctaaactatctccttttttaggattctaaagaagttaatcatcatccttttgtttattttaccaccatttagtgccttaaatcctatcaagaaagcagtgttactgctcaatgcccaaataagacacgcggatattgctattgtct

SEQ ID NO: 64863 - DNA, 1054 bp, Homo sapiens
agatgcatcatcttctctcatttgatccatagagcataggcaaagatgtcaacctcaggccttagagaaaagtggaaatgttattatgacagccgtccatgagttatcgctttgtatgaagttaaatacagtcatgcgttgcttaacagcagggatacattctgagaaatgcattgttaggcaattccgttgtgcgaacatcctagtgtacttacacaaacctaggtggcatagcccacaacgtacccaggctatatggtaaacctgtacagcatgttactgtactgaatactgtaggcagttgtaacacaatggtatttgtgtatctagacatagaaaacatacagtaagaatatggtattataatcttacgggaccactgtcaaatacgcggtctgtctttgaaaagttgtaatgcggcgcatgactataaatacctagctggttagcatttacattccttgccagggagtttgaaatttatactatagaaataactttaggttttaggtagagttaaagaggtaaagcacatgttgccacaacccaggaaagtatttttaagaaagattggattttcctacctttagagatctaaaaaaaatttaatataaaaaatcattttgtgttggtgtttattactagttcagatgagtggctgctgaaggggcccccttgtcattttcattataacccaatttccacttatttgaactcttaagtcataaatgtataatgacttatgaattagcacagttaagttgacactagaaactgcccatttctgtattacactatcaaataggaaacattggaaagatggggaaaaaaatcttattttaaaatggcttagaaagttttcagattactttgaaaattctaaacttctttctgtttccaaaacttgaaaatatgtagatggactcatgcattaagactgttttcaaagctttcctcacatttttaaagtgtgattttccttttaatatacatatttattttctttaaagcagctatatcccaacccatgactttggagatatacctataaaac

SEQ ID NO: 64864 - DNA, 1052 bp, Homo sapiens
acctgcttaaaataaaaacatggtaccctgttttctctaatagctgaaataccaattctggagctttgggcatttgtgaacaggttcttagatggtgtaaggaagtatgtattcagaaattaagtagataactctctaagggaagagttgaagtgctggttatcaggaatcaaaggaacactgtcctcggcacactagctgcagtggacggagaggggcccgctgttgttctcactcgttttgcttgctaccgctggaatcccgacctggtaacatttgttagcctttctttcaccctttagttgccttgtcatagttccagtgagcaaggtagtgggagcacacggttattggttctttgccattctctttctgtgtgctctggcaggcagctttgtacttttgtttctccaccgattagtaactctcacttaccttaaaggggctgtaatgaccagggacctgatttatgtacaagaaatgagatctatatgccagtcttcagccagtatgtcaaaaacacttgtcttttaatacgacaaacaagaaagtagtctgttatcctgttatccctttatactgtaacctaattctttgagtttgcctggtatcacttttccagggagctcaaagtacttcccatatgctgtctcattaatgtatgtgaattaaagcagagaccaatgtctgcttttgctgataattctcgtagatattgtaaatttttcttgttggtagacttcttttacctacctgcagccttcttttcagaggcaatcgcagtcttcagcatgacgcctctaatgccaactagcaggaaaataaactttggactaccagaaccaatatccagtaaaagtgttgtaatcttgggatcatagtatagaaaatttttccactcagtcacaactgtcaagttttaacaccataaacacaattctctttacatttatctattaatattttcatgaggttttggttactatccaacaaatgtcctttttctttgttgtcttgacaattctttgtgtgagtaatattttaaaacctct

SEQ ID NO: 64865 - DNA, 1003 bp, Homo sapiens
tttggcacatttacttgtcaagtccagggtacattgtgtatgaaagcatctgtatgaacatgagctagtttgtgggtggtggtgcttgaagggaaatatcccaggatgcaatggttgggaattaatggtcagtgagaacagaggggacctgtgagggctgcattgtatcatgcctggaggactctggaaacctgtggttcacaggtgtctactctcctgctctaactagttctttaatcttttatgcagtgttatacaacctgcagaacctcctgatttcccacaagttaatatggggaaatttattctttacctcttaattcttctgtgaagattagccttttctactcattgaggccaaatatcccctctcaccgccctcttcagctgtcttactgatctgtaattaataagtgactcagccttgtcatttaggatttgtgtgctaacctacttatagctcaagtgttatgacttatgtgtttcatctttatattatcactagtccaaaagtctgtctcattggttcttaaaaggcagtctgattgaagtttgaatcttgcatgtcttccttttcctgtcttaccctgtgtactgtggtagtatttattacagaatttatgatatcctgccttattttatgagtagtgactactgtttttaaatagcttggttaagggttcttagagtttgttttatctcttggctctcttaaagctgtttcacttaatccaagtttccagtgaaaggttaatgcttaaacaacttatctgatggctgacttttcatatatttatgtttaagtactaggaaacactagtatatatttatcagctgtgtaactgtgggcacatttaactcacagagcctcaatttcctcaaaataggattattaataatcattttgcagagaagcttatcagaattaaatgcgagaagacagagcctgtcatagtgtaaatactcaaatgttagctattaataataaagatttgaaaaatta

SEQ ID NO: 64866 - DNA, 1092 bp, Homo sapiens
gacatcccatttaaagtcgcattctttatcttatccagctttatttttcttctcagcattgatctaacacgtatggattgtctttatcttcctacaaagtcttaagttcctgagaacaggaatcttattttgcttactgttgcatcttagcatatagaacagtgtttggcatataagtaccaaatttttaaatgaatcgctattaaaacagtatttcagtaagctaccctcataattgctccttatcaataactttggaaattaccacatttttgcctaaggattgcttagaccttattacaaatgaacaaggtactaaatcccagtttctctatgatttttctccttctaggtttcagtgtagctcagaagccatttggagccacgtatgtatggagcagcatcataaacactcttcaaacacaagtggaagtgaaaaaacgaaggcaccgtttaaaacgacataatgactgctttgttggttcagaagctgtggatgtcattttttctcacctaattcagaataagtattttggtgatgtagatattcctcgagccaaagtggtgagagtgtgtcaagcgcttatggactacaaagtatttgaagcagttccaaccaaagtctttggaaaagacaaaaaacctacatttgaagatagtagttgcagcctttatagattcaccacaatacctaaccaagacagtcagttaggcaaagagaacaaactatattcacctgccaggttggtatataatgttagattatcacgggaatattggcaggattttgtctacctttttatgagatgcctactggctttatattacatttttagcagtaaatgtggctaaaatatgggtctgtgggtaaatttgataaagtgcgatgaaattttgttagctttattgggtgtctcctagtcatattttatatttagcagaagcagtcaacacactttgattttcctgcttcaggttatagttgcagtgtaaaaagtgttctcataccacttggtatgagaacatagcgaaggcaggcagagagaaacccagattgcggtgggagagaagaaggaattatttaaagggaaa

SEQ ID NO: 64867 - DNA, 1050 bp, Homo sapiens
ctcttagaatttggatttgttgtgtttttgctctgaaatgcataactctgtagaaaactcttagctctcaaatactaaaatatttctgtgggcttagtaaatgttcatttctgaaataaattcattttaggtatgcagatgcattatttaagtcatccgatatcagatcagccagtttagaggacctgtgggaaaatctgagtttaaagcctgccaactcccctcatgtaaatatctctgcaaccttgtctccacaaggtaagctaaggatgaagcaaagtaagaagtagaagacaaacttcaaagttatttaaaattttttaatcttaatctttattagattttaaatattcaaagtacagagaaagagtgcactatgtattaaagctgtttatgttcaattttaacagaagtctattatctttaacaaatagatcagtgttagaactcttgaacactgacttttgtccgatcagctggcaaaggttcagatctgagatgttttgcatgcagatttgtattgaaaatatgctctccgatgtttcttttcctaagattttattaggtcaagtaaaatttgaaaattacattaaaacattaacagaattcttcggttcttccttgtctgtagcaatggaatatagtttaatgactttaatttccaccctttcccccattccagttgtggaaaccctgagtggaataatctgcaaccaatagtttcaaacaagtttttagcttgaatgaatcattctttcttccagagtccttattaacatgttacatgacttgatctcttatctctgacagattgctttttacagtacaaagaatgaaaagaattcctgttgtccaaagcctattctcctacactctaaacaaatcttggattgttttactttgttataagaaagcacttcgtaaggttgactttttctttctttttggccacaaatttactagcttagacctgcttagaaaaatattatggtgagcatatagtaactattaattgttacttttcaccttgtcatttttcctgtgtagtta

SEQ ID NO: 64868 - DNA, 1050 bp, Homo sapiens
gaactcagatctgagatctagtcctgcctgaggcctgagcaagtaacttggagtttctgggtctccatcgtaaatgtgaagagcaagagtagagtttgaatttgtacgctcttttcacctctgtgttgtggtggagagtttgttttcgtgaaaaaggaaaaagtaaagggaaaacattaagctgaatttgtaaatgtgatacgtgatctagctatatattaaaaagaactacacatatcttttaagctcatgtagaaatttatcctgatggcttgaaatagctactgaattaggtaccatgtgtatatttgttattctttgccttttaaataatcttcccttgccttttaaataatcttcccctctcccctatagggaagatgagtggctctcggcagcaattgactgtttagaataccttccagaccaaatggtggtggaaataagcagaagctttcctgagcaaccagaccgaacagacttagtgaaagaacttctgtttgatgccattggcagatattacagtagtagggaacctctgttaaatcacttatctgacgttcataatggaattgcagaactcttaggtaagtaagatctaactggatactagcatttatcttttggaggaaacaagaaaaagttagttctcaaactgaaccagaatagtactactacaagctgggagtggatctggattaattcatggaaagtatgtttgttcaaaaacttctaggggtcatttggaaagaggctttaacaagctctaaagttatgcagaaacttctggttacccaggagtataatgctgctctcattcaccggaagcttaagcataaagcagcaattctctttttttagaagagttatcagcaccaccattactcccctttcaatctcttcaaaatggcagactctctgctttgtctctctaccaatgagccacataatttgttggaaacaaattggaggtttcagaaaatttctcttatttttctcaaggagagttggatacatgagtattgtacacatggtatactcccaaatgta

SEQ ID NO: 64869 - DNA, 1056 bp, Homo sapiens
gatcccatcccgggatgtcgggggcaggcgaggaagaggcggggtccgcgggcgggtggagctcacccctcgaggctgtcctctcggcgcgcccgcgtcctcccctactcccggccctgccactccctcgctggcctgaacagctgtttacaacggaatccggacgccgggcgcgagtggagctcagtgccagaggaggggattcccggcgccgggggacagagccccttttttcttttgccgaaagaccctttctgctggggagcctcttgtgtccagcctaggcccgcgtgcagcgccgacggatgaccgtcttcttggcaagtgcgaggatcctcctcccctcggctctctttttagacacagtgggggttgaatggatgcgcgcgatataagcaaattaaatggttcgtggccgcatcctagagccctttaattagagttaccatttgtagaaggcctgccgtgcacaatccctcgtttcatctccccccaaaccgagcaggtaggtagctgtgttttacagaggaggacactgaagttacacagctagtaaagagccagaattggggcccaggtatgtctgaaaccaacgcccagcctcccagatacagtgacatcacagagatgacgtagggattcatctctatcaacagatacttgtgggtgtctatttgggggatatacagatggagcataagtggggaatatgactggtcctggctcttaagaagttcgaaatctaggtggggaattttaaaataaaaactagcacttttaccatctggccccaacgcatctttccatcatctctagccacttccttttctcattttcttgtgccttggcttctgccctctgagtgaaatgccctccttttcacctcctctccccctcctctccccctccagacatgttttaactaggtgaaatcctactccttttaaagatcagttcaaatgtcatcttttctgggaaggttttctcaatctcctcccaggcagagttagtttcttcctctgctatattccctgggcaatttcataatgccactta

SEQ ID NO: 64870 - DNA, 1041 bp, Homo sapiens
atcaaccctttagcccagtgtattcacttgtaagcccaattaaaagcattatttccaaggagtttacctatctgctcttaggaatgaaagtaaagaatttaagattgaatcactgattaaaattgtagcagcaggtagtttagagtgtgtcttctaatagtttaaggccctgtattcttgaaacatgctacttaggagtaggacaaaaatattccaactaactactacgtgagatccagaaatctgataaattacaaatgtcattttacaagtatctgtttagtcattgaagtagaatatagctggataagatcttagcaagctcatttattctacaaacgagaaaactgaaacccaaagaggttaaatgatttgccctgagtcacattgctagttggtgacagagctagaatacttttagttctttttttttgtttttttctttcctaggaaagtgaataaacttaattgagaatgtctgaaaaccttgacaagtccaatgtaaatgaagcaggaaaatcaaaatccaatgattctgaggaaggcctcgaagatgctgtggaaggtgctgatgaagccttacaaaaagcaataaagtcagactcctccagcccccaaagagtgcagagacctcactgtaagcaaatttgactttggttagatgcaatattgtcattgttttcaggtgacggttttatgaggcctccttgtgcatgtggccgtgagctaggttctaataatataacattgccaatgtagcatttaggaataatagcagttcctcagctggcagcctagctacttgtggattttcaattgcatgggaaattaacaatttagaataatgtccagaacgttcctgtctttctccagcctcagtgacactccagtctctgaagtgctctgagaaataggagggtggagtataaattgcagcttgtattgaaagagtgtttgaaaagtctgaggctaattccagccaggactgtgcttgtgcaggttaaaaaaaaatgtgagtaagttcaccacaccctaattctc

SEQ ID NO: 64871 - DNA, 1974 bp, Homo sapiens
actcagcctttgggacagagaaagctttaggtggagggactgtttttgcagcgcctttagcagtagcatcaaagaagaaatgtatgcatggaaattgtcatcagctatggttggctcacaggctcacattaataaacatgcttttcttttttcaccattaacagttttttcttctatccatttaattgctacctagggcttaaatggaagcttaagtagctattgtaaatgatttgtaaacatgtttttctgtaggtttgttgaataagaagtaaaatatgtgcaatattacgtagcaattgagaagcccttatttggatagttataaattacatataattagaaatgatgtctaaagaattttgattaaacgtagctgtgttctcttgtagactctcttatctttcttgctgcctggtcatactagactgagaaaccagataacagaagtcttggatctggatctgataaagcaggaagcagagaatggggcgctagacatttccaagctggcagaattcattattggcatgatggggacactgtgtgcacctgctcgagatgaggaagttaagaaactaaaggacattaaggaaatagtgccccttttcaggtatggaaatatgttaatcatactccgtgcaactacaattcagaggcattttcttttttttcttttcttttttttttgagacagagtctcactctgttgcaaaggctggagtgcaatggcgtgatcttggttcactgcaacctccacctcctggattcaagcaattgtcgtgcctcagcctcctgagtagctgggattataggcacgcaccaccgtgcccagctaatttttgtatttttagtaaagatggtgtttcactacgttggccaggctggtctcgaactcctgacctcacgtgattggctgccttggcctcccaaagtgctgggattacaggcgtgagccactgtgcccagaccagaactattttcaatttaaacttcctgaagtcttggtactcatggatttaaaaaaaaaaaaaaaatttgtaaaatgcagaaaagtaaaaagaagacatttactcataattttacctctcagaggcataatcactcttatcattttgatacatagatatattttttatacattaatttccttcaacattttcttttgaaaaattccaaacctacagaaaagttacaaaaacagtacaatcaacactcacaagcccttcatgtggatccatcagtttttatcatgttgtcacatttgctatgctgcccaggctggtctggaactcctgggctcaagcagtcctcccgccttggcctcccaaagtgttgggattacaggtgtgagccacgcgtctggtcctcttttcctttaatgctatgtttactttacaaatgcttgcttctaaatccttttttctttcagagaaattttttctgtgttggacctaatgaaagtggacatggccaactttgctatcagtagcatcaggcctcatctcatgcagcagtcagttgaatacgaaaggaagaagtttcaagagattttggagaggcaaccaagtatgttgaatattttgtggtactttttttgttgtctgtggtttttcattttagctgccatagcttgttgcataatattattttcagaacaaaactaaaatttagtaggagaatagtctaatttgaagaaggaaaagcacaaaatgttgggactacatctagagttgttaagcattgaaaagaaaacttaattcacaagcaaaaggaatgtgagtaggctatgagaatagaaattaaaaacaatgaattcctaaattataaatggttttttgatgaaaacaccagtttgaagtaaaatacattcttggtcttgatttttgaaaacatgacagacatcctgtgaatgttaattcacttttcttctccctgtgtggcacagcaggaaatttaactttgcttttgttc

SEQ ID NO: 64872 - DNA, 2050 bp, Homo sapiens
gcttgctttccgggaggctttagattgttctctgtcacttctactctctgtgcttcctgtttctttctcttcctctttatttactcgccagttcttacaagcttcctttgtgctgggtgctgagcggataccaagatgaataagtgtaggctctgcctgcaaggcagtcctcccttccattgctctgggatttttgttgttgttgttttaagatggagtctcactatgttgtccaagctgcagtgtagtggctattcacaggcataatcgtagtgcactgcagcctcgaaattccggcctcagtgatcttcctgcctgagcctcccagtagctgggactgcaggcacccaccatcgcacctggccttccattgctctgtacagggtgactggctgtcctagtttgctagggactgagtgagggttcacaggacttgggaatttccatttgaaaactgggacagtcccagacaaactgggaggagttggtgaccctaggtctgtgcctcattatacttttcttcctaacaataagtataacttttatttatcgagtgctggctctgccagccactttatatgtagcatctttcttcagctttaaaacagccctgtgatgtgggagtccccattctgcagaggcccgacaaagttggggatgcatgcatgaggtcatgctatttttttttttgagaaggagtttcactcttgttgcccaggctgaagtaccaaggtgcaatctcagctcactgcaacctctgcttcctgggttcaagagattctcctgcctcatcctcccgagtagctggtattataggcatgcaccaccacacccggctagttttgtatttttagtagagatggggttttaccatgttggtcaggctggtcttgaactcctgacctcaggtgatctgcccacctcggcctcccaaagcgctgggattacaggcgtgagccaccgcggccagccggggaggtcatggtattaagcacggagcctggctttacacccaggcctgtctgtgttcttagtgagggcgctatactgcatccttgctcaggaggaacggctctgagatagaggggttatttcacaccagactccctcaaagctctgacacactagcgcaaaccctgagggaagctgcagaggcaggtgtgggggctgtggcgctcccgccctctgctggccaacctggacctgcagctcagcgatggcctcttctattcattacagacagttttaatggaccagtctcgcttccacgagctccagttgcagctggaacaactgaccatcctgggggctgtgttgctggtcaccttcagcatggcagcgccaggaatttccagccaggccgactttgctgagaaactcaagatgattgtgaagattttgctaacagatatgcacctgccgtaagtggaactttgatgcgtggatgggacgcagtggatgtcagagagccgactggagtctcccagaggggtctcccactgtaaggcagagcccagggccactctctaggaactgagaagaaaccttgctgtctcagttggttcacttggcgaagaccccagcagagtttatttagggtcatagggtcaaagttagaatctgctgcagggttagcagagctctaggatagtggcttcaaaatgtgtgtgactagccgagtagcctgtcgggccttagaggccacaccaaggagttgggttattgtcctaagagcagtagggagccattgaaggatttgaagcaagagggggaacgtaattagatttatgcccttaagtttaaattttggcatggggcacatagtagatgtgagggagcatttaggaggcgagagaagaagtggctcgggctggggggtaagccatgagcagggtggggagcgctggtaccaatggttgcttgccttgaggaattggagatcccgggcttagaggtcccgcggccctccattccctgttagcatgctcctcccggggcctggctcggtgttgagtgccatcaactcatttgttctccctacgcagggagc

SEQ ID NO: 64873 - DNA, 1116 bp, Homo sapiens
attcctgccacttaaaatgaagccacattattcaggagaaattagaaatctgtctaggttccttttccaacttctccacctagagtttatcctctctaaggtaagtctcatgttgaccacaaagaagcagcagctatactaaataagtaaaaactcaaaaatgggcttaaatactgaagtgataggtttataatttactttgaaatacttaagcaaaaataagatgaagcaaatatggcaaaatattagcaatataggtagtggtatataggtattcattatactattctatttttctatagtctaaaaatctttataataaaaagtcactttttataagttaagggaaaaagagagagcttaaggcgtttttgtaaatgaactccctgccctaaacccagaataattaaagtattgattgtatttcttttcttgcagagaaatctgggcccgatttctagcatttgaaagtaatattggtgatctagctagtatactcaaagtggagaaaagacggtttacagcattcaaagaagagtatgaagggaaagaaacggctttactagtagatagatacaagttcatggatttatatccttgctctgcaagtgaattaaaagcacttggttataaggtatgtacttaggatcaagatgtggagtgtcctcacttttccagtgttttagaagagttcattgataacctgcactctaaattctgaaatgtgaatctagttttagaatagatttgcaggaagcaagaaaaaagttcaaagattttccttgggtttaggaaatcctgagtgtcaaagtagctgaacaaaatgagaattgaaatgggatttaatagtttcattctgtccctgaaattgtcagtgccttatatcttatatctggtgggcaagatggagggagtgtggagggaagaaaaacaaaagaaaatctgaatgtcatcttaggtattacttttttttcctaatagttcttatcaaattgataaatatgttttgacagatcttaaaccaaatgtagttcctgttgcatattttgtaagatataatgaagaaatattacagcttgttaaatccataaagttccttgagggatttgtattctt

SEQ ID NO: 64874 - DNA, 1242 bp, Homo sapiens
caggtaaagaaagataaatgcattattccaggcagagagcacaacacataggcaggcagtgtgaaagttctgtggaatggtaaaaagtgtgtctggagcaaagcttgggataaaacagaaaaagataaaatgtaagatttgtttaacattttttaaagtataatatgttaaattgaagagagaagccaaaaaaatagcgccatcttctttggtctaatatatttaatttcttggttttattttgcttatggacatgtaataaactgaataactactctcaggcaataaaaaacaactcctctgctgggttaatttttcttttgaacagctttattgaagtataatttgtatactataagtccatccattaggtgtacagttcagtggttgttagtagtagattcaatggttgttgttactgttagattcttaagttttaaaagataacttagagtttagcaagaagtgtcattttcccacttccagatatagaggacctcctgagactcttaaaatttaatacacctctgtcaacaattcttaattcatttacatttccatagttacctgccaacctagatattgtacctctgcaagagttaaagtagctaaatatagcatagtcctggtgcctcaaaataagaaactcaattatttctaagtttgagtttgccatccttccatgttcaatgtatttaaaaaatagcagtagtctgactaatgtcagcagatatgtacttgtcattatttttaaaaggcaaatgggatacctggttcagacggcactgttataaatggttttgcattagaactgcagtatagtagaggagggctgaactagaagggaaaaaaacatggcttgcagttactgctctgctactcaatcaccaagagccagatcaaatctcttaatctttctgaagctcaagtttcctcatctataaaaatcaagtgtgataatagttaaacctttctgcataggatttttgtaaggatgaagtgagataatgcatatgaaaatattgttgcatcgtaaaagtgaattaaaaaaattaaaatctttttcaatatcctagaggacaataatacccgagttttgtttgaacgagttttaacatctggaagccttcctcctgagaagtctgggtaagccattgtgaaaagttgttgatcaggttctaaagacagctttcttacctgaattgtggtctatggggtgaatgtttgcttgagtatgagttt

SEQ ID NO: 64875 - DNA, 1052 bp, Homo sapiens
aattttttgtatttcagtagagacagggtttcaccatgttagccaggatggtctcgatctcctgaccttatgatccgcctgccttggcctcccagagtgctgggattacagatgtgagccaccgcacctggccacaagatttttaaaaataagccagatgtggtggcacacgcctggtctcagctacttgggaggctgaggcaggaaaaccacttgagcccaggaggtcgaggctgcagtgaaccatatttgtgccactgcactccagcctacgtgacagagaccctgcttccaaaaataaaaaaaattaataagtgatggatagatggagggaacttggatggatgatggtgccagaaatcactaaagctttttatttctaattatcattaatttttgaggagcctaatttggttatgatatttacattgatagttttacaaataataattattttaattgaatattgtttgttaatttcttcccttagttatgtttgcttatgaacagtgcctgcttgtgctgggccatcaccctgatatttggtatgaagctgcccagtatcttgagcagtcaagtaaactgctcgcagaaaagggagtaagtgttccttccctatccccactttgatatttttgtggttttgatatagcaattatttactgaaaaatataactgaattttggtaataaagcataagtattgaaaatttaagtttacgttcatatgaatcttagtgacactcatataattagacctccttagaattaaaataaactggcagttttttaacgtatcaaagtaatgaatcatttagagtacttgcatggttattttgtaagttaaaataatgaaaggagtttttggaatttttttagaatccagaaatgcatatgtgtttatgtatgtgtgtgtgtggatacatatatatgtgtgtacatacatgtatgctttcttagacacataaataaaataaagtagatgtaactttattaattttattctctcacaactatattaaaattattgaagatgagctttcttttttttct

SEQ ID NO: 64876 - DNA, 1050 bp, Homo sapiens
gggattacaggcgcacaccaccacacccagctaatttttttgtatttttagtagaaacggggtttcaccatgttggccaggctggtcatgaactcctgacctcaagtgatccacccaactcggcctcccaaagtgctaagattacaggcatgagccatgtcatttttttttcagtagaatcttatatgaaattattgagccttttcaaatgattctatctttaaaagttcctgataaatggaaacttactgccagctcataagacataagcacatcctccttgatcttggaaatgtataatgtgattgaaccttttttccctgcttttcatgagctgtatgaacctttattaaacaagaaatcttttaaaataaaaatttaaagttatttagtaaatgaataaattaactgtattgtactaatttttaagaaactatacttaattttaaaatatttttgtttttttctagggtatcaatattcatttagctaaaaaaatgattgaagatcggagtagagattatatgaatgctagacgtgtagcaaaggtatggaattccatcaggctattttaatgattattatgagtctgttgtttacagcagagctttccctgtctggtattactcttgatattttcagtcattagcaatcttaacagcaattaattgcaaagtctgaggagatgacatatttgaaatgaaatctctctttgtaagaacaaaatataataaattgggtttagaagaaattgttttttaaaatatggaaacagaagacatagagagagacaaggctctacttagaattgatgaagtaattcttttccctctattatttgggttcatctgaatattgtattactctgtggtctaataacatagctctcagggacacattttgattgtgtgcatacctttccattcattgacactcttggaagttaggaaaaatagcctattaatacaaactattgaaattttaaaagacagtttctccaaagatggcaataataatgccaccagatcttcaatcctattgatctgtcaa

SEQ ID NO: 64877 - DNA, 1061 bp, Homo sapiens
taatattttaagtttgcctggaaggacttttattaagatgatagttcataaaagctgcaaattaaggtagaaaagactataagttgatgtgcaataaactaatattagacgtttgagggaagcaaatcagcaatctacttgattaccattctggctgtgcagtatggaattaatgtcattttttgttttttttttttagatcagaggtttatgaacttgatttcttgactttcctgatagctggagcgtctcaaatgattgtacacatttcttagtctcaattttaattaacctttagaaagatctatgccactcagcaattttgaggagagacaggggagatgacctaatgggaggtagagtagcaaaaccaattgagccatgaatgttaactagtgattttgatacttctggctaaattactcacttttctcaaaaagcaaataccctgctgtatttttcttaccccaaaattacagattattctttgaaaggtaatgtttggcatgctgttgacaagttatttacagagtttagatgtttattaagtaaagtaggctgagtctataaatgttaagtgatggttgttgatagatgccctatatattgggacaaaatcaaatctgagccaaggttttacctttgagattcttgactgaaattagtattgtctaatttatctagcatttatttaactttttaaatcctcataggcctggctaagaatttgagaggatttaaaagtagattttaaagtggggatgtttatgttcagagaaaaataccaatgaattactccgaagagaaacttaccgttcaaaatcagctgtaattttctttctcttattaaaaaaaaaaaaaaatccctaatctgtcatgagattagagataaaaaagaaaatgttgagttattttttaaaaatcccaactctctcctttgtgaaattgatatgaaaataaaatgtaactgagacagaaaaattgtctcaatccttccagtgaaaatagttttggtcaacagttattgtgtgcatttcttcctactcagtatatattttttg

SEQ ID NO: 64878 - DNA, 1129 bp, Homo sapiens
tagagcttcaattattcctccattttagtctgaatttactgatagtattatacttagcaccctttctaaacctttttattgaagtgaggttttaaattaatattttaacaaggattataggactcataaagacctttctgtaaaagttatacatttacatttttcatttcccttgatatttaagacagtataatctaaaacctatttttgaatgaatatgtgaatagtaactggtagttttatccacatttatttagcaattattattgaatgtctgctatatgttaggctttgttctaggtgctgtgaaataaaaaacgttatgcctttgtggaattttttaaattatgttgactcgcttgttttctgagtaagcagaataatacctagatggactactgagaaaatacacttaacctaaatacatgcacaaataatatttttggaattaagtggttgaattttaaaaggcaagcataatgaagtaatatcaagtgattgaaacctgagagatgggagggaaagtggagtttgtcaagattgttacaaaaaggaaaacatttttcttatttaaaagggtaatatatgtgtttattataagaaaaaaactctaatggagaaaaaaaccatattcccactacctttgaactataacttaatcacagttaacttttccagatctgtctataaaaccttaactttttgtagcttgttttttccacatggtagcatatttttgtgttatttagtctataaaatcgcttttaatggtggcacagtagtacatcctagatacatgctgtttagccagtcctaattatcatttacagtgtttccagtttttgttttataagaatctcttgcatgaatacaattttatttcaatatttttacatagtcataattgtttctttagattgaccttttagaattcatattttactatcaaaggttgctgttgctggtgtgatcttttgaattgagctgggtaatgattttttaatctttcagaatttaagtaaatatgaccaatgtgtactttgttcaagaatagagaaacagggttgaataaatatacaattttggggaaaacgatgattatttgataagcattttctaaaaaggaact

SEQ ID NO: 64879 - DNA, 4330 bp, Homo sapiens
tttataagaggatatttttatgctttgtaatgtgacattgcatctgaggactttattgttcatgaattaagttaggcatgagatttttaaaacagtaactttagttcactgttgttttttttccccaggcagctgagtatgtcccagagaaggtgaagaaagcggaaaagaaattagaagagaatccatatgaccttgatgcttggagcattctcattcgagaggcacaggtttagtgatataggattacatttccttctctatgggtccaatcacactacttggttctgcagtgaataatattttcataatcctaacattgtaaatgctgtttattggttttcaattttagaatcaacctatagacaaagcacggaagacttatgaacgccttgttgcccagttccccagttctggcagattctggaaactgtacattgaagcagaggttactattttattttattttttcttatatcagtattgcagcattcactgtagtgatagaaaacaagttaggaacatagccaattaggacaaggaggatttaaatgtgtcttacctttattttgtaaaataggtataaaggagtaattaaaatgaatttttgaaatttgggtcttttacaagctgatgattgttgcattttggagttgcaacaacattaaaacagtttcaatggtattggagtgctttagccttttatttacttgtcatgtgtcaatttattgcctcctgtgtcatttatttagaactcatttttctttttattcctacttacaaactaatatgaatgggagtatatgaaaatacagaaatgttaacttagtttttcatagagtattttgagtgtctggtgaaatgaaacattttaagagaagaattacttcacattttaattttgtgaaaatgcatggtttatcaatgtaagcacttcaataatttaacgatttttctgtaagatagtttatattatgcaagaataagctaatgtgattcaaacctatttaatcctatttaatcataattttacccaatgatactttgatatttttttcttgctttttatatcttgaaatttgaacccaggcatgtatattttaaagagtaaggaccccattcatgattatggttaggaggaaaatgttaatttttgaagactggaattagtaaaaatgataataaaagttttaatgtgtcaataacaattggcaccaagtagtcattttcaggttattaatataaattaatgatatggaaggggtaagatgtaaataactgatatccacattaagctgaaaattatacgcatttctttttgtaacttatgcagtactcttatttttaatattaattttgtgatatagattttcagcataatcaagtacactgcagcctcaacataacattttctgctgtacctgaaatttgataatatttaggtctgttttggacctattcaaagggctttggtcatcagcagtactgaatatacttcagcacaacacagtgtcatctgtgatatgtcctcagaatggacccaaccaatagcagatttaaatagaggctacagtgtactcattgtatttgtgctatagtttagattgtattacttggtggggagggaaattactggataatagcaggaacattgtgtgtgttttatttttgtgtgtgtggttgtgtatgtggtatgtatgtttgtgtgtttgtatgtatgagagagattgtgccttatgtggagtctggtagttttggcccatgaccataccttaaagtttcatcacctatcctctgggaccatttctttccttaatatatttaaatcaccaaagtagcttggcacaaaacaggtgaggcctgtctgaaatatgctgaagcccgtgctgctttgtattaactcattaaaacaaggaacctggatcacctgcacctgatctgcattctagtctggctttagaaacacattagacttaaattcaaacgcaccagaaatgaaaataattgatatataattgtttttgtatagtgaagtagaactttctgagtttttgaaatttccttgtttctcaattattcaggcattattcatgcattttattatagcgtaagttaaactgaaataggcagttagatactccattctgtaactctgaacacaatgggtttgtttctccaatttcctagctgtaagttacaaactgcatcctaaaaaaaagtttcaggaagaccagatgttattccaaggggctgaaagttgtctacataacaggctcaattcatataatgaaatgaagagctgctagcagttgcctgatttatttagttggtaatatttgcagttacttcacacacacaaacatacacacgcgcacaaataggtatatataacatgtattaagaacaaatggtaaataatatatatgtatattttttaaaatttatatttttggtttaggaattaaggttttaaattgaatgctggttttagaaatgcatatcctgagctgtgtttttctctttcctggtttgctgtttattttttattttcacattctatatttttgtttagcctgtgagaggctaaagttttctttgatcatatcactcaatgtggccattaatatttctggagaagacacaaacctatttataatactttttaaaaatccgaagtgataataagaatgtttttacattgaaagtaatacttaagtgtttacataacattctgtatgcactcaagaaaataaagttttgttaatacatttgttgtaactcagtacttcatggtgggaaaattgtaatgttcatttctttatattctgctaagccaacttgtgtgactccaaatacctttttttaatagaaaatacatacatctttagtaacggaagataatttgcttccccagagaaactccttgcaaatcctatttaagtacaaaatgtcaaaggaaaaaagtattaaactttttaaaaaaatttgaaacatcagttggaaatgagagcatattaattacttttaaaaaaggttaatgatgctgctatatgagccagtgcatcagatttgctcataactgagagttgagcagtatctatttagctatgtaaaatttggatttaaaatgtcattctgaatttgtcacatgctttcatttttttgctgtagtgtggaaattgttggaggtaaaattatcttgctctagtgaatggcatttaggacaaacttctgtgtattcttaatatataatttcaaaaactaggccaaattactttggtgttatatataatacataggagataacattttgcctccactccctgaaatacattgttctactctttattccaaaactgctaggtcacatgatttaacagtattattataagatgagcaagtcattaattgtatgactattcttaaagtgatagttatcaagtataaagtttaaatatcactatgatatgaaagtacttttgtgacttcttagtttcaaataaaggaaacatttaaatatgtctccagctatttaatcggataaggatatcttaaatgcagtttagtatatttttggatttaataaatgagaggttttaaacacttgagttaagtggaatgccccagtcagagcctcagtgctctttaaagaactactttttacaatgatcaaaaaggtcactaaataatcacaaaattgagaaaacctacagaattttgacatattcttttaaattgttctgccccacccagcctgtggtttctgtagcttttcatgtaattaggtgatgagtgacaacatgtaagctacaatatcttattgttagagaagtaatttgttttgaatcgggccacattcataaggaatttttttactgaagcatgttttttattggtggctgaaggagaaatgaagaaggtaatgctgctggtaatagcaacgatgtatcttgctgtctgtgaaagctgtatttctttaataaaagcatatagagaattgattgttttatttaaaatttttacaaaagatgaattcttttctctatacttggtttttccttccttataaataatgggttgtgtagcatacatttcagtttttcaaaatgacctttcttcttggaaaatggaagtgaactcaggatgcaacatgagtgtcctaaattgaaataaacttttccactgttgatactgttttaatacctttacatagcaatttaaattactgtattataatgttttctttctgttgagcaatgtgattttaaaatgcagatacaattactgcattatatagattatggtgatttctatacttcagcttgcagcc

SEQ ID NO: 64880 - DNA, 1354 bp, Homo sapiens
aatatttgcatttcttttgagtctttaaaaagttaattataaactgttcatatgctttgcccttttttttatttttaaatttttattaaaaaatgtttttttgacacagagtcttgccctgtcacccagtttggagtgcagtggtgcgatcatggctcaacctcctgggctcaggtgatcctgccacctcagcttcccaagtaggtgggaccataggtgcatgccaccatgccccactaattctttgtattttttgtagagacggggtttcgccatattgctgaggttagtctcagactcctgggctcaagcaatcctcctgcccacccaccaaccccaaagtgctgagattgcaggttgagcctctgcatccggctgcattttctttttgaaccactggtggtttattgattgtactttaataaatttagtatttttgtcatgtgttggaggttttttttacgtttgtctttttttattttggtacttttctcatgcgcaaattttaacttaccatgtaagtttactctttaaaggcttttttttttttaaagacagggtctggctctgtcacccaggcccgagtgcagtggcggcaatctcagttccctgcaacttctccctcccgggctcaagcgatcccaccgcagcttcccaagtacgtgagactacaggtgtgtggcacacacctggctaatttttgtatttgggtagagacgggattctgccgtgttgcccaggctggtccagaagaacgcctgagctcaaggaatcctcccgtctcggcctcccaaaaggcttctgaagagcttttccaatgcagaaatacatttaaccgtattctgctctagttctgtcttgtgttttgtttttaacatttaaatctttgatctctcttaagtttatttgggcagaaagagtaaagtaggaattcaactttattttgataaaattgacttcacagttattctaacagatgattatatagttattctgaaaccatttattgaaaaattcaccattctgatttgaacatgccacctttattatttgctgattttccatttgctgttctttctgagcctgtagtttcatatatgggaagagccaatagtcccttataaactttacagctttagttccttgagcaagctattcataaagttcttatatgttaggaaagcatcctaattttaattttgaattacagtagtcaacatgtctttttttctaaataagtaaatgcttaccagtggtgcaagctaatttattccaaagaaaagagtttatttctcctaggtaattaaaaaaatctgaacagatactttttttaaacttttccaaactggtgttt

SEQ ID NO: 64881 - DNA, 1050 bp, Homo sapiens
ggaatcagttaggttactcctctatgaaagtctcagcacggcaccgtggctcacgcctgtctgtaatcccagcacttcgggaggctgaggctggcggatcacttggtcaggagtttgagaccagcctggctagtatggtgaaactccgtctctactaaaaatacaaaaattagctgagtgtggtggtgcatacctgtaatcccagctacttgggaggctgaggcaggataatcacttgaacccgggagtcggaggttgcagtgagccaaggtacagccactgcactccagcctaggtgacagagtgagacttcatctcaaaaaaaaaaaaaaaaaaaaaaagaaagtcttacggagtgctactccggtctacttttaattttgaaaaaaagttaaccacagagagagacttaagacttcaaatatatagtatattcagttttcttaatattttagcaaaaaattcacttggaatgacaggtttgttgccaccttatttttaatgaaacgtgacatttggaaaacatttgtggaacagatagatgaggtggtacatatttcttaaagtggagcccatggcccatttatgtcataattaggtgcgttataaaagtatagatacgtagactctgatttcaaacctaactgttcagtggggctgagaatcttcgtttgaaacaggtaccacagtggtttttatgtcaataaaagcttgcagaccacagagttagatgatagctggttgttttaaaatatattcttgataaataagtggatgaaaaaatggcagatatttgaggatggtattttactgatttttcctgcccacctgctccccacccccatatatttagttattaccctgaatagcgagaaatactcattataaaaccagggttgaggctcaactctgctttttctgttggtcatagtaaaaagcttacatcgtcttaaatctttcagtctaccatctttctccccctctattcatacttttgtgttatcactttaactgatccctactttaacttaatttcagtatggctcctaa

SEQ ID NO: 64882 - DNA, 1721 bp, Homo sapiens
aaaaaaattatttatttactatttaggtagagacgaggtctcactgtgtttcccaggctggtcttgaactcctggacttaagtgatcctcctgcctcagccttccaaactgttggattacaggtgtgagtccagccatatttcaccttttaaataatgtataacttatcctagaatttggaaggcctaaaatacaagccaaatgatcctcagcttggaaaagctacatgattctaagaagcgcaaattaattgctggtagttcttaacaaaggagcatttaggctcataaatacgtgtttttagtgaaaaataattttgggaagatttagaaaataatgaagagtatgtgtcctattatatacttattattaataaggaaagaaaaagttgaaacacccacagcattgaaacctgaaacctggtttatttcgttaggtaaacattagtacttaagctgtttagaagtaacagtatcgccaattttagtcaaggtgcatatatgtgtaggggttagaagaggcagagaaagagccaactatgtgtgttggacaatgtgtttttttggatttattttttccaaaatctttctgtaacagcccttcctagttttctgcctcctatttttagtgatgcttgtttggtgtaacagttttgggcaggcaaattgatttgatctttattgttgatatttcttaggaaactggagcattatcaaatattctgtttggggacagttgttcctaagagaagttgctctgtgcttaaagaatgagaattgggtttttcttagagatacagcagaaaggtactgtgttaggtgatactgcattccttcaacattatttcagggaatgtaggcatttacatcccagatagaccttcagaagggcaaaatctgtatttgggtgtttttacctattggacaattacccataccaattcatgattttaagcttttttttttaaatcttcgatttggtgacggtgattttaagcttttctaccatgtctctgaatctttctctttagataggacctacctgtgaatttgagtctttttgttttgttttgttggacagttggtaatggtgtgagaattgggctaaaaaagggatttgagttggcagttgtttaaactatctttagattaatggacaacttaggatacatagtaaatattgaataaaatcagaagggcaaagcttctgtgtgtcctaattaatgtttttctaatgtttgacttagtttatttagtgtattaaatctggattattcatatttgaaagaagtctcatcttttaagttccaaacggttaagattttaatttatattttgtagctatttgtttcctaggggatgaatatgcaagtttactaagcagataatggtaaatataattatttgaactaatatgttaagccaagatcttttttttttttttaatttttttatttttattttttcgagacagagtcttgcactttcgcccaggctggagcacagtggcgcaatcacggctcgctgcaagctccgcttcctgggttcacgctattctcctacctcagcctccctagtagcggggactataggtgcccgccaccacgccctcacgcccagctaattttttatatttttaatagagatggggtttcactgtgttagccaggatggtcttgatctcctgacctcatgatccgcccgccttggccttccaaagcg

SEQ ID NO: 64883 - DNA, 1944 bp, Homo sapiens
attttttttgtagagacaggaattcaccatgttgcccagcctggtctggaactcctgggctcaagcgattcacccacctcagtgtccccaagtgttgggattacagacaggcacgagccaccacgcctggtccacgcatgtttatttgaaagtattttgacacattgcagccccaagtatttcagcattctcttataaataagagcaaaatgttgttacataaccaccataccatttccccacccaagaaaatagtatttctaaaatctagttctttaaatttccccatttgtcccaagaatgtgattttttttttaaccagaatcaatctagatttacatattgaatcatttacttctgtctcttaagtagtctcaccattcttctcccctggggctgttgtctattcgaagtgtcaaggacacttaacactgcttttctgggtgtatttgttttttgttgtttgtttgcttgcttgcttttggtttgggggttgatgatgtcatttaacttgtcccttcatctgtatttcctgaaaactttacagttaggtctatactcagccttgatatttgggttaagtatttttggatagaatacttaacattatatcattacattagcaggtacttctgctgggttctgttaggatggttaagtttgatcacttggtttagggtgatctcattgttaagggtcatgttcccctttgcagttaataatctgtgagttgataaccgttttctttaaaatcaccttatacctagttatcaattgataaatcttgactaaatcagctcttacattggaagtagcaaatggtggttttgttttgtttttaaaacccacaattctgttggtctgtgtctgtttactggctcatactttctgcaaaaaagactttttttcttcctaaagattaagtatcgctatggattcatggatttctcttagtgtgttagtatcagtgatagccatttttcttttgcacactcaacttgtccaaacctttttggtggttcttatatcttttccttaagtctgaaaggcaatttagacatctgattatcaacaaggaagtcatcttcatatagccttttctttaactttttaataatacatttcaaacatgtaagaaaaacagtataatatatgaagtacctgtcatagagcttcaatttatggctaatcttgtttcctccatgacttcatttgcttctctcacccccattacttcgaagcaaatcctagatactgtattcagcttcaactaaaataaccattaaataacaccttaaggatggaaaatatgaatgagctgtaccttgcttgatatttaagacaatattgaaaatctggaggaaaagagagtatccaaaataacctgaaatcatggatgagaaaaataaactcaatgagactaaagaataataagaaaaaaattaaaaccattgaatcatggatttgctttggaaaaatgccaagggatggggtggacaaagagtcctacaagatgcaggtgtagatttagccttttagtagcattgaagttcaagtttgtagaataaacctgatactatcttaaatttattactaaaatatatggatagtcatttttctcttggtgctaagatttgtgatttgtgccccctaacagagggaaattattgcagacaagcaaaatcactgctaaaggtttattgctgtgatttttttttcaactctagtagggaagttcaattttgcatgtagagagctattggaattaccttatagtgttcaaggatctcttctgaagctccttgcttattgtttttgccagtttaatggtgaaaaaactatttgcatataggtttacccccctaacaaacatatgatttctgtgtggaattatggctgtattatttatttcatggttttgtttttttgtgtttgttttttgtt

SEQ ID NO: 64884 - DNA, 2127 bp, Homo sapiens
ctcgctgctttctgcacgctcggaataaccagagtcgcgaaattagccccgcccactgccccggaagttaatgcggaagccacacacctcctcctcggccggcaggggcgcagccattttaattcatatttgagtgggcggtggcgattggtgttggcggtctggctcagctgggcagggggtaactttactgatttgggggtggtttttagtttaatttttcttttctagcttcccatcgacggtcagtgcgcacgttgtaatcagctgaggccatgtcaggagacggagccacggagcaggtgaggaaggagagtggtggggcctcgtggcgacctcttctccacgtctgttcctccgactgctccagacatgttcggctgaggaaggaattgggtctagtgaacccgggggacagggtatatagaagagtggtgggaatggggagcaagatctaagatttaatttttttttttttacttctctctcttaggcatgaatacgagtaaatacttgatttagacaatagcggtaggctgcttcgtcctatttagattcatgggactactccagatgggatgctttcctttgatatcgttttggtattagagtggataggaattattttaacgtgcacccgacgttttagaaaaacttgacagtgtttcttttaccccgccaaatatactgtacccagaaataggttactagtttgagaaatatttgagacaaagctaatctggagaattaagacttaatgagagcgagtgaagaaagaagcaagttatgctgaggttttgggaattttgtggctttctttcgttttcttttcttttagccacatttcgttttcatttttccagctacataaacattgcaggtataagttgaaaatgagaagtctgttttggccactgtaaataaaagcatctgttttaatagtaaatatgagtgacaactaaatattttaaaattcacacttttaggttagatcagtgtgatttgtttcttttgctctttgtattcagaattttgtaggatagtatttaccttttagtgtgaaagaggaagctaaatagttatgaaaaatgccattaaatgtgtttttcgatctaagtcctggtgtgtttagataaatacagtttctaaaatggaggctaggtagcctgcagtctcaatttcctgaaatttcccattgccatagcaacgacatgcacttaggttttcgtttttcaggttccctagcttataacgtggaagatgttattggaggttggcagagatgaggcaaaataggagcgttctattgcatagtctgtaagactgtagatttcattatgtcggcagtttgattaaattgttttgtgtttgcccgaggactggtttcagtccagaaatcttcgcactatttacattttacatagtgttagcatgcccaagcatgcaaagtcttaaaattactgtatcaaaactgtttaccccttttctgatctagtatttgttatctgaaagtgaaggactaatgaactgaggtttcattgaaagttttcgaaattcattgttaattcttagaatttatctaaaattacaaagacacggaaatgttaccatgacctcttgaatgttttagaactgtggtgtttcagtgggacagatggtggtgaaaatttatagaaaaataatttctcccaaaggttttattgtgcaaagtttagaacatagagaaaagttgaaagaaaagtgcagtgaacacctgtaggacaactcttcgcctggaatcaacagctgaaagccttgccatatttgctttatctccccatgctgatagattgagaacagagtctttgtcactcacactagagtgctgtgacgccatcacagctcaccatagcttcgacctccctgcgctctgtgatcctgccacctcagcctcctccgtagctgggagtacaggcgcgcgccaccatgcccagctaattttttttttttttttttttttttttttgagatggagccttgctctgtcgcccagactggagtgcagtggcgcgatttcgccttactgcagcctccgcctcccggttcaagcgattctcctgcctcagccaccccagtagctgggattac

SEQ ID NO: 64885 - DNA, 2056 bp, Homo sapiens
cctaatactggggaaatccaaggcttgaacatactacttctgaatccaggtagtactcttttagtagcacacactagaaatgtatacacatgattggctgatcttgataaactttcagtgagaggggtcagaaacgggaaactctgatgcttacagaggccaggtggtggctgtaaatgtgtgtggcaggtctgggtagctaagtgcagagtaccaacctccttctgacactattcaacagcagcctgggattttatcgtttaattatttcatgccacaatcattgtgtatgcagtaagcagccactctagggaaaggggtactagctaaaaagacacattcttgaaaaaaaaaagacaactaaacatagcgattttattctttgcagattctaaggggaagtcaggcacgtgacggtggatgagtctcccacaaaggatatgtgcatgataatggcagagacagctggattacaggttcgtcttaatgctctgtaccctcagtgtgtaaacagtgttcatacttattttcagagatagaaaggaaggggggtgctaaggaaactaggtcagatcataaccagtcttgggtgggatgaggttggggaggaaccccaggaaacagagctggtggtgacagctgcgaggagtggaagaatgagtgctgaatcctttgggagctggctgaaagcaagaaagagacgctgagggaggttagaatagaggaatagagctgggacttcttaacagccttccccatggggttctgggatggcacccaatggtaacattttaaagcaattaaattggagaaatgatgaaattgtacctgattgaataaaagtagttatataaaagtcacaatattgtagctggtataaatgtttaggtcatttagtttaatttgcccaaattgactctccacagacagccacattttgcataaaatcatcttccacttttgagggtacatttgcaaccaagtaagaaatttcaactagaatagctcaactattattttctctacttaagaggcagtttgtcctaaatgtattttcttcctctgctacatatctaaaatttttgctttcatcttaatcatgcccacaataagcttctaaaaataaagcaataaaaagtcttagggaggaaaagacagaaggttataaaaattgttagctttataaataaacaaacgagactagtaacagaaaaagtttagaattttacatttcaatactttaaacctattttacagggttttatttgcttcatgaattctactataaactctaggaaaataagaatatatgcccaccgaagttattttacttcatatctcaccatttggaaacaaaagttttgttatttttaaacgcagccaagaaagaactttagataatgaatgatgtcagaatcagttcttttattgcggaaacatattgatttaatctatcgtatatctaacaaattcaaagaaatgatagtgacataatatcaggtaaaaatttctagtaggaaagaaaatctttgtatttttcatcagcaaaaaaaatacagtggacctctaatagttaattacatataagtagatttgcctaataagtcctcagcttctgagttatctggaaggttttatacaaattccttaggtcttgggagcccgaggctggaggatcactggaggtcaggaaatcgtgaccagcctggccaatatggtgaaatcccgtatctacgaaaaacacaaaaattagctgggcatggtggcaggcgcctgtaatcccagctactcgggaggctgaggcaggagaatcgcttgaacccaggaggtggaggttgcagtgagtcgagatcgagccactgcactccagcctgggtgacagagtgagacttcatctcaaaaaaaaaaaaaaaaaaaaaaaaattccttaggtcactccaaagcacagtaagatttattaagtgattctaattttctaaacagaagttaaatacattgtaatgtgttaccgaattatgtaatatatacggagctggcttaaaaaaatgtttctggc

SEQ ID NO: 64886 - DNA, 1072 bp, Homo sapiens
gccggacgcgggggccgtagcctccgggaagccgcgcctggccggggcccgggggcctcggccccccctccccctgccaaggttgcgcaacggctcttcccagcaaccgaagttttgtttagtcccacggggagcctctcttccccctccgcagtcctaggccgtaactacggagatccctttcctttcattaaggggaacaaacaaacgcgcaggcacgcagcttgagcaccccagccgatggccgcgtcccgggctttgtggccccgtccccagcgtcgcggagcagcgggtttgcagggtgtcaactctggggacgtgcgtgcgtgtgtgtgattgttggggaggagaaatgtgatccgcggctccgcgtccccagcggcggcgggaggaaggcgtggcggccgcgcggcggggctgttgccggcttctctcgttacggtggctgccgcccgcttcccttcgccgcactgggagaactggcggaaagactttggatgaaaatgtctgtttctctgtcgggagggagacggctgttgtaaaatggtatgtggctctcggggaatcctgttgttcccgtctcatctctgcttgaggaattgcgctgaagagtgtgtgcgtaaattaccttggacttgttacagagtagtcgtaacacgttcaggccttgaaccgtgttttcacaacctcttactgccctgttagggaatttgtttttccacctgtcagttggctgcttctaattataataaggggcttctattagcaacagcaaaaaatttcagtttatcgtccagtttagagggaaagcgcatggttggctctattgtaaactttgttttgatgtctgtctggtacagggccggaaaagttagctggcaaaccagtctgcgtgtgcttttgcgtactttctagtagtttggagatctgctgacactttttccctttttgctattttaggtatttgcttttagctgtagcttctgaagtgggagtacttatattcattcaaaccatctcagttaatttcaaagttttagttgctgggctctttaaaatttttaaagaggtt

SEQ ID NO: 64887 - DNA, 1028 bp, Homo sapiens
agtcaatgaaatatttcttggtgtatttatggctgcattcataaagtgtagaggacttttatttctgaactataatgcttaacctgtttgagatttttcttttttgaaatttacttatttaaaatttatgttaaggcagagatgtgttgaaatatttgtgatgtttgggcatgtctttttttttttgtacttatggaaaaatttgttccttaatccccccctctgcctcccgccccccgccccaaggggatctcttttctaagaaaaaagtatttgtggagaaccttagattaaaactgttgtaaaaaagtaagatgagtttgaaatctagaacagaactggccattaaatgtttcaactttatatttgggcattgctgactacagtagctaaacatacatattaggcaagcagatcataacatgataagtcagccttacttagtttattgtcaaaatatattttccattgaactagtcattaccttgcttataaactggtcattggcttttgggcatgggattttagagtcacattaaaatggatggtttatatgagatacttcttcttgtaaacatgtttgaaaagaagctgtagatcatactcttaactttttggataccataaaatagggtgtaaattacagacgtaggttgctgttgcaagtatggcgtgggcacataggtttttatgtttaatgcaagatatggagagcctccctgcaccccctgcaacttaaaaaagcagcagctatcaaattaattttttgattgaacttttgtttttaatatttgatgcatgaacctgaaagcatatggaaaggaggaaagggaaaatgtaaatttcagaatgccgcaatattatttttcagacctgattcacatccatttcatggaatgcttgtttgcatgttattttttatttgaatgctagtacgacttatcctggtaacttttgaagttaactttattttaccaggtaagagagttaacttattaaatgttattttcatagcaacagtttaccaa

SEQ ID NO: 64888 - DNA, 1048 bp, Homo sapiens
ggctggtgagatagaatttctttttattttgagtaattgtttatgctggaacaccttttcccatccaagtactgatgaggtctgaccctgcttagcctccaagatcaggcaagttccaagatcagaaacttttccatttctaatctagttggaaaaaaaacagtttagatttgataggcattgaaatcaatagagtatgaggcgagctcctcaccctaaacattttgtagcttttataaattatatttgatttaatatggattaccaagaaaattgtcttaaggatgctagaaaataaaaacttggctgtatttggctagacagttattttactgtggaaattttagaaagtatttgatttgctaaaaacaaaaaatgtttatttcaaattctttaacttccccctacttggttgtatattatttataagcatacaaaatattttagagtttttaaaaacaaaatagtgaacttgaaaacatttgcaggatataactttgcttattaaatatttcctaccctataaattggcatataaaggcctaaaagtgccaattttaaaatctgtttcaactttttaaaagcatatttcaattacatgttatctctttaataatacagagagtctggtaggtttggtaaactatacaactttagatatataatgctacagttttaaatagttaatgagatagattagagtgataacattgaaaactgaacctgactttctagacatttcttccaaagaatgacttaaattaatacttctgaaggctctaggtatgtaatttattacactttctattgagtttaaatagggtgtagtgacataaaatcacaatgaaaattacaggttatgctgctatataacctatagctatgatgctgtgctatattctcaaagccaaataagaatgttttgggccaacttctaataagacattttcaatggagacagtaagatgtctctgcagtatattggttgtagttttgtattttaaagttaggtaagaataatattgggttcaaaaatagtggatttgta

SEQ ID NO: 64889 - DNA, 1064 bp, Homo sapiens
tattgaacaccaactctatatccttggcactttgctttagatctagtgtgaaagacagatatatacactgacaattacaatataatgaaatgttgtaatcgcaaaatgagaagaatttaggaactactgtgagagcactgaatgctaacccctgcctagagggtgagtttatatgtttcaggaaaggcttcagcaagaagatattattttactttgattgaaatctgaaagagtttttaaagtgttcaatagtagatgtgagtctgggtgcagtggctcatgcctataatcccagcattttgggagcctgagatgagaggatcactcaggccaggagttggaggctgcagtgagctatgattgtgccactgcactgcagactaggcgagaccttgttaaaagaagaaagggtagatgtgcagaaaaacattaagagaacataatgcaaagttcctgtatctggcttctcagcttatttttacacttgatcatttgtattaggattttaccattagggaaattccaagataattttgtgcaagtagaaaacatggagtattacttaaagtgatgattctgtcaaatggtggttttgacgtacacgtttatatattgttgtggcagaccaagtagatggaaggcagatctaacacctgtgtaattatcagtttttctagctatggtactgaggattcattcttatgtgtgtatatgttttgagttcctatagataggtcagcagttgctaggttgatttcatattttataaattctaatttggtaaaataaggtcataggggagaatattaaatatgccagaataaaactggatcctctttcatatctatgttatatctgaatcaaataatgtttataaaatcattatacatttaatggttgtgtggtaagaatgttggctatttcagcctcaataaactcacatcctttttggatgcaggcataaaataaatagaatgtcatttagtccttgagaaccttagaatgattttaaatctgtttttcaaatatgatttgaaatttgatttgaaaatatgatttgaaaa

SEQ ID NO: 64890 - DNA, 1023 bp, Homo sapiens
aagccaacatatttatcagttaatgacaagtgctatagagaacagtcaagcaagataaaggaagaaaggcaagtgccatgtgttggtgagggtttactcttctatttaagatggtcagggaaggcctttctagtaatatgactgttaagcagtaacacaaagtaagaggaagggatcaagtcttgtattctctctgcctggaactctcttctcccagatatttttaaatgcagaggtcttgaggcaggaactatggtttgaaacagtaaggagactaatgtggctggaccagagcaagcaagtgggagaatggtaggaagtttcagatgtagctaagggctgccccttgtaggccattgtgaggaattgagataggaagctatcagggttttgaggagaagagtgacatggtctaatttatgtattaaatggatcactcaagctgctagattgagaatagatggcagagggtaaggacagaagcaaagaagaacaggaagctcttgtaataacagatggaggtgatggggggttggattagagtggtaacagtaaaggtggttacattgtgaggaatttgacttttactgtgataggaagccagctgggattttgaggagtggagtgacatggtctgatttgtgtactaaatggatcactcagactgctagaatgagaagagatggtagaggataaggacagaagcaagaatagttaggaagttcttgcagtaatccagatgagaggtgatggtggtttggatcaggatggtagcagtaaaggtagttacattctgttaatagatacaccatattttgaagatagagtcaatggaatttgctgatgtgggaagtgagaaaaagaggagttaaatttgattctcacaggttgtgggcctgagaaactgaaaggacagaattgtcgtttactgacatgggtaggactgtgagagaagtgagtttgggggaatcaggagtttttctgaacacattcagtttgagatgcctaataaacattcaaaaa

SEQ ID NO: 64891 - DNA, 1035 bp, Homo sapiens
atcttacatgcttagatggtagacttgaatgccaaggggcccaaaacatgttactcagtttttaaatggctacagagtccatgctgtttttaagtttttcaaatgaaactgattctattttcaacctttcaggaactaaattgcatttgtcgttatcaaaattttaatttacctattcgttctttagtaaaaaagtttttgctttgaaaggaaaaatcctagccaacagatttccctatatttcattagaaatggatatttgtttaatttttaaaaacttcttttatgctttgaatcctatttggtacctcaacacattttgaggatttgttaatattatttgttcttctttgttttaagataattgtagttccctctcctctcctgtgttgtgatttttgttttattttttaacggtggaatttatactactctctgtgacttatttttacttgatggcttgaaattttgattttcttaggtgaacacagtgatggatttggaaggaagtgatcttttggctgagaaagctgatagaagagaatttgttagtctgttgaagaaaatgttgctgattgatgcagatttaagaattactccagctgagaccctgaaccatccttttgttaatatgaaacatcttctagatttccctcatagcaaccagtatgttactttaagatcttttaaagtggttctaaaaaaaaataagtctgtagaaaatgactgcatcagagaaattacttttcttcattaaacacaagtaacctgagtcaaaagaggctaagctaacttgaccaagttcacatacaccagtaagtgtcagggaactagaacccaagtctgaattgcagtccagtgttccttctccaaaatgcgatactaaaaataagactgagtggttttgtttttattatacatgactttcttaccttaataaccaggcatatataaaaggaaatgctaacagttttctctttaaagtcacatttcagttttcctacactgtaggttctatcatattttgagtcgtgc

SEQ ID NO: 64892 - DNA, 1050 bp, Homo sapiens
aggtaagaatgtgtagtaattaataacttagggtctttttttaatgattgcgcattttacttttgatatatacagaagtttggtgtcagttgttagaatgtacagtgctgtgaggtcttactatacctgtttttaccaaatctcttaaaattccaaggtaataattggaacatatctactccgattcactttttgccattcctctcttcattctctcaatacctttcacctgcccttctatgccacaactctaccaaaagtagaggtcagtagaatcggtttttaaattttaatttcggcagcttgtttttgttctcattttctggacacattttaatagtagaattatgatcttaagaaatgtgtttgaattctatttatacagcgtgtatatttcatttagaagactgctctatataatgtgctcgttgtttcaggcattgaccacatctgctcattcagttgtgcaccatggaatacctctgcaggcaggaactgctcagtttggttgtggtgatgcttttcagcagacattgattatctgtcccccagctattcaaggtattattttatttaaattttgctttgaatctaggcatgctttattttaaaataagtttaggaatctgttcattaaatatattgtataatttttgctgcatttagtgctacatttgaatttaagctgttcaggccaagtgtggtgtttcacgcctgtaatcccagcactttgggaggctgaggtaggcggatcacttgaggccaggagtttgagaccagcctggccaacatggtgaaacctcagctttcctaaaaatacaaaaaattagctgggtatggtggtgcgtgcctgtagtcccagctactcgggaggctgaagctgggaaatggaggttgaagctggaaagtggaggttgcagagagccgagattgcgccactgcgctctagcctgggcgacagagtgagactctgtctcaaaaaaaaaaaaaaaaaaaaaaaaatttaagctgttcaataagccttcagaccagtgacactcatttcttgac

SEQ ID NO: 64893 - DNA, 1326 bp, Homo sapiens
tttatcatcaaattggtaaataggttagttttgcctttcctttggaggttgaaatgagtgtgccatcccggaattttcatccattatgtgaaccattatgtccattaaattatgaagttgtgatgtatttctgttttggtgacaggagcataagattctatcacagttttaaagaagaagataactaagcatagctaaaagtttgtatgaaaagaagaaccttcacctgctaggttgtcagcatactaagccagattcttctttccatgttctttatcatggtgactgaactatttaaaaaggaaaataaagcttcaatagcaaacttcggagatgagaagtttcaagaaaattaaatcgttcaactttgtagtatgcattttgaaacagaaagggaagctttatgataatttttggaatgatgtatatcacaaagtagacaagaagtacctcattttgctactagattgctctgttagtgttatgaaaattttatgcagagaatggtatcataactccacaatcagggctgggtgtggtggctcatgcctgtgataccagaaatttgggaggccgaggtaggaggatctcttgagcccaggagtgcaagaccagcctgagcaacatagaccctgtctctaccaaaaattaaagagattagctgggcatggtatatgcctgtggtcccagctgctcaagaggttgaggtgggaggatccacttgagtccaggaggttgaggccacagtatggatcatgccactgtgctccagtctgggcaacagagcgaggccctgtctcaaaaaaaaaaaaaatctgtcagaatctaagcaattcttgacatttaaaataattgtataagttaaataagaggaagattttttcttttatttgataactattctgtttcacaggtattcctgcaacacatggtaaacccaccagttattcaataagggtagataatacagttccacttgtaactcaggccccagctgtgcagccactacagatccgaccaggagttctttctcaggttggtaataattcattctttgccatatatcagcttgtgcttttgggaaatagtgaaaatgacctggatagggatttaatccattttgtaggttatggactttaatgtttataattgttagctgttacttttagatagttttgagtttaagatatggtaaagttcaattacttataacttgttattttctattgttttgctttgctgcaagcagacgtggtctggtagaacacagcagatgctggtgcctgcctggcaacaggtgacacccctggctcctgctactactac

SEQ ID NO: 64894 - DNA, 3260 bp, Homo sapiens
gcttatattcctactagtgttaccagtaatccattcactctttctcatggaagtcccaatcacacagcagtgcatgcccacctggctggaaatacacacctcggaggacagcctactctacttccatacccatcatcagccaccctcagtagtgctgcaccagtggcccacctgttagcctctccgtgtacctcaagacctatgttacagcatccaacttataatatctcccatcccagtggcatagttcaccaagtcccagtgggcttaaatccccgtctgttaccatccccaaccattcatcagactcagtacaaaccaatcttcccaccacattcttacattgcagcatcacctgcatatactggatttccactgagtccaacaaaactcagccagtatccatatatgtgaaaaacagtatattggggaagctcaatgatacaaacatttgattaaaaataaaaacatggtatttaatattagccatggcacaagaaaattatttttgaatcatgtagacttgggtgcaatttaaacaactttgagctttaaaaactcacttttgatgtgttttgcacatttggtataacttgtctttggtcatgttatcttcttatgtagtaactctagacaggtgacttatgggagcagaagtccagttttgctcctgctattttttataaattgccttctaactagtgcaagacacgtctacatttgggaagccattctgtgtacagacttagagcaacagatgcacatatgtcagaattacagcatacaagtgaattgtattatccgtgtcttagtgtataaatgttgggtcacttacctaagaaattgagctattgttctttacatttgcatgtgtcttttgcatgggcaaaatgttgcctagactttgctcttaaatgttgttctaataatctcagctgcattgtaaaccgttcctacacatagtgccttaaatatttgaggttgttaatgttattacctatatataaatgttgaggactgcagcacttaaaattcagacctactatttagtttccttttgatagcgtaatgttcatttttgtttttgtgtggtatgatttcaggtagtagctgtttttttccttattaagagggcagcatgtttgctatagctgaattctgctgtctgatttttcagaatgatctagcttcaagaaaagcaagcagttagtagtgcttaagaaaaattgattcagtatctaatggatagttgataactgtcacagcacagcattttatatactgttaagtgaaactgcaatacaatctaagtttattttgagagtgtttgctgtataattggacttaataaaatgtttagaggtacagtaggcatgactttgggtagataataaaatgcaaaatgctcattgattcatgatgtggttttatcttagcttgggcaaaccatgcagtatttaataaatagtagcagaacttttactattgaagcttgaaaagatgtgagttctttgtgtgcaatttttgatttatgcatgtgagagggttttttttttttttaagtatttttacattgcagtacttgttttgcttgttggtgatgtttgcttatttaatacattccgtcagggacagaaattacatgcttttttttctttctaggaagtgtgttgagttccccccttccccgacatttttttcttttttgggtggtggtgatggtagtggttatgtctgtttaaatgaagttgcttttacagcaccaaagacttaatcatccatttcctatataaaggtagctactttttgcatagacctcaagtatattgtagtgtaaaggtggaatttaaggaaaggtattaaattgaggctgtgttttagcttacaggcaagtaataaattgtatcatttatcttgaatgtatcatagataagctgctatataacgattgccacttcagatagctgtgaaattaggtgattaactagttgttatttagccttctaatttctgtataagtctaattacatgaatagaaattggggttttgattttttactttgcttttctgtttggagtgtcattgtaactactgtattgtaaatggtggaaaataattgcatttgttactttggggtgtgttatttgcatcagtattttatctctattaatgtttgtgctcatcactgcatattaaaaaaacttggatgtatcagtgtaacttaattttttattttcatactggcattgtagacacttgagaaagctgtatcttgcaggcttgacttaacttttttccttaaaaatctggaatataatcttacagcatttactggaataaacagtacaaagcattggagtgtaaaactctagatgttttggatttacagcgtttctttgataaatgaattgtataccactagtacagctctagtacagcgttcacaataagctaataatggataagttttcttcactccattaacacaagcagtgttttatttaataatcatcaatgaaataaatgtgcctgaaattgattttaaaaattacagtattagatcataaagtaaaaaccagcagtacatttttagtcacactgaaaatgaaggacttaattttccccacaagtttcagtgtttttagtaattaattctatgcattttatacaaatagaaatatatatatataaaaaattaaatgtttaaaaaggagtagcctaagattaatttaaaagattatttacagatgacacatttatggggtcactatttaagtaaatttgctgccctccacagccttctaattttatttatatgttccagcagattattaggatctgcttacttcttaggaaagaatcaatgctggcaacacattgtttcagaaacaccaagtgcaaaggattgattgtatcacaacaggtacaaaactgacagagttttctttttgtttagggccatgtttactaccctgaaatgttgtattttttgtctttaatttccaagacttaaagcagtcttgttaaattgacataaatggtaaacttcaacattttcataatacagtattaatgtttgataaaggtatatcccagttaactacactgctctttaattgcaatcatgggcattttaatgtattttaaaataaatttcaaaattctgctaaattcttaatttagcatattgacaaagtaatctggatttataccttttaaaaaccattttgaccagttttcttcggttttaatgctttct

SEQ ID NO: 64895 - DNA, 1058 bp, Homo sapiens
agcctctctctctctcttttttttttttttgtatatttttgtgtttttttgtattttttactacttatttttgtttttctttttgtatttcaattttttttactacttttttttcacttcaaaattttttaaaaatagatttctttattttctggaatttttctagccatggtaaccccaggcctttttaatcagaatcttcattttagcaacatccccatgtaacttatgtgtacattcgagtttgtgaaacttgggcctaatggacagctttacctggatgctccttttagcacttgtttttttcccccaagcctaattttcctgtatctatatttcctgtattcccagatacctatcttccttcctactttccttccttctcccctacctcccctccctttccttcccctccccttctcccttcccttctcccttcccttcccttcccttctcttccctttccctcctcctcttcctctttctcctggtatcattggttactccctgtcaaatccttcaacactgttcctgtctccttaccatcctcattgtgctgcctcagttcagacctggaacttatccaaactaatacttttatctgacttcctggctttgagtccacccccactcctccaaccttcctcattactttccaggtggtctttttaaaattcaattttgaccaagacagtagcagtggaggtgccaaggagatgcttggagcaatagaaggggcaagtaaacataacctaagtgaaagcagagctcttcttatcaaattcagcttcaagacgagtcctggaccagtttcctcaaagcttctcatgaaaattctgaagttgcctttggatgccagcctgctttcaaattttcactgtcactgtcaagatgatgtccaatctcttggaggacttttcggaggacttttcttttctttacttttttagagacagggtcttgctgtattgcccaggctgggcttgaactcctggcttcaactaatcccacctgggcctcccagtgctggaattccaggctcgagccactgtgcctgg

SEQ ID NO: 64896 - DNA, 1005 bp, Homo sapiens
tggggaagtgttccagatagcagggcatgaaaacttagagaggtacaagtggctgaaaatcgagtttttcctctgtctttaaattttatatgggctttgttatcttccactggaaaagtgtaatagcatacatcaatggtgtgttaaagctatttccttgccttttttttattggaatggtaggatatcttggctttgccacacacagttacagagtgaacactctactacatgtgactggcagtattaagtgtgcttattttaaatgttactggtagaaaggcagttcaggtatgtgtgtatatagtatgaatgcagtggggacaccctttgtggttacagtttgagacttccaaaggtcatccttaataacaacagatctgcaggggtatgttttaccatctgcatccagcctcctgctaactcctagctgactcagcatagattgtataaaatacctttgtaacggctcttagcacactcacagatgtttgaggctttcagaagctcttctaaaaaatgatacacacctttcacaagggcaaactttttccttttccctgtgtattctagtgaatgaatctcaagattcagtagacctaatgacatttgtattttatgatcttggctgtatttaatggcataggctgacttttgcagatggaggaatttcttgattaatgttgaaaaaaaacccttgattatactctgttggacaaaccgagtgcaatgaatgatgcttttctgaaaatgaaatataacaagtgggtgaatgtggttatggccgaaaaggatatgcagtatgcttaatggtagcaactgaaagaagacatcctgagcagtgccagctttcttctgttgatgccgttccctgaacataggaaaatagaaacttgcttatcaaaacttagcattaccttggtgctctgtgttctctgttagctcagtgtctttccttacatcaataggtttttttttttttttttggcctgaggaagtactgac

SEQ ID NO: 64897 - DNA, 1303 bp, Homo sapiens
ggaagtgtctggagctctctgttcggggacctcagaccaataccttcctctccctgctcacttgtagcagttccttgtatactggagccctgtctaacctgagtctataaatcacccttcctactcagaaacccctgaaaatggggaaccaagcaagccgctggcatgtgctggagcccaggtctcctgggaaggtccacatgggggatggtgtcccgtagcaggctgtaggtttcagagcccagcgggtggtggggagccctcaatttgtaaggaaaggccagatgacaattgtctttcttcctggttcctcacatatcataaaaccacctctttctcatctccaccacccccatctccaggcttgactcactgattgttttcttttttggacaatgtcagaccctgcccttttcctggaacttctcagtcctccactggcctgcgtcagcaaattcctaagtagcagatgaccttcaagatgtgtgagaaggaagggacaggaatgattgtcaggattgtcagttccccagggaactctgcatttctgacttagggagggtagatgactcacccttccaagaacccatctgtctgtccgggcctgtggggctctggagaatagaatatggagtaccctggtttacaggcactgccacctccttatttcaggatgggttcagggatgtaggattggagttgggagatttcttagttctgctatggatgctttgtacttaggcaagttcaaaacctccctaagctttggcttctttactgggtaaagtagggttggaggcatttcaggctttccttcttctcacctgatgctatcactacacatctaggcattcacgtaatggaaacttacaaagttgctcaatacctctcttcatgtccccaaagagagcaagcaagtgtccccattatacttcttacagtgaggagccagagcttccaggtatgctaagccattgctccctgttccactgctgaatgcatgctggtgccttccagagtcacccctttggtctgattcacttagtgctgtggctccgagaagtggccctctctttcagccagcagcttggggtggggccagtagagtgggaaccacagtggctatatgagtcaatttgctcatattgtcatttgactcactgaccctgatggggaagatagtgttattcccacagtgtggtagtacacactggggcttatagggactgagcctactcaagggtatatggtgctgtgggtcagagctggggcatggcccagggattcagtgtgccttgactcc

SEQ ID NO: 64898 - DNA, 1571 bp, Homo sapiens
agatggaagaagaggaggaggaggaagaggaggaagacgaggatgatgattcagcagatatggatgaatcagatgaagatgatgaagaggagagacggaggagagtctttgatgttcccattcgcagacgccgctgctcacgccttttttagcaagccttctgctgatggaagcactaggatgattctaggctgttaaatagatttctcaataatgtaaataactaaattgttctctgcatatagcaggaaaactagcatgaaatattgtttcaggccctgggttctatgtgacactacattaggaattggattgtttgggtttgctttgtgtttttgaggtagaggaagaaatgggaatcttttttttctcttccaggagtcagtggaagaatagttctctagctaaggaatggacatacctttgttttaaaatattttatacttacaaaaatctagaaatggagagggaactgttttgaataaggatttaaaatacctgcacaaggatagagagaaactatgtgactcattctgtgaaaagacttcttgcagttgtgagttatttagaaatgatcaaaatttgtaattaggctaatccatttagtgattcctaatattttgtactcacagagaactaattgactaaacaacttgaacgctagtggtttgtccttagacaatctgtctttgaatttaaagtctttatcgctaagaccttgactttaaatttttcatcactacaaccttgaatttaatttcaggtcttcaacatgatgaccttggatttaatttaaagtcttcaacactatgcgctttatcatattattcacagatgcatttttgaaatgtagtatgtaaaagtatgtaacgtgctgtttattaacaaaagattgttcacaacatctcatgtagtttaaatttgtaaatactgcttctgttttgtttctcctttatacacttgactgtctttgtgataagtgacatgaattttatgttaggattaagtatgttttcctgaaacttggattttttttgtaattatataattgagagttaagaatgaaatccttcaagtgttaaaaactcacattttaaaagcaaattttggttccaattctgtattttgtataattgcttattttccataaactaatattagtcagcatttgcttttaaggtagaagatgggatggattcttgctgacctgctgcaaaagtagcaggtccactcaaagtcatctcctagctttgactgtactgtcttgtgtgccccaccatccattttcccccaagaacagttattttatagagaaaactgtaagaaaacaagtggcattcaaggctaagcagctgccattagggaacatgaagacaaacttatcctttcattttcacacatgtcaaggtgttctgaaatagactaagtcatttttcatgtttacttttcatttaatagagtataatcaggctatcaaatcctattatggctatccttttttttttttttttttgagacggagtctcactctgtggcccaggctagagtgcggtagtgtgatctcgacttac

SEQ ID NO: 64899 - DNA, 2347 bp, Homo sapiens
atggacaagtaaatgaggctccatagtctctaaccagagaatttctgctgttttaaagattcaacttgtttttcactgttcagtggcctaaatgtagattatgagaaataccacattagaccagtagaatcagctttaagactgggaaaacaacttcttacagtgtttttgctcaaacttccaatttaatgtcaaataaacaaatattccataaagatcattataaagaaaatttaatgtgtggatgtgtacttttggcagtctctctgggatcatttcttaagtcaactaggtatattttttaaaatctcgtttttagggttaccttatgacaagtgtaacagtaactccaaccttagagactataacatgattaaagaaagttatgaagctccagttatacaatggggataaaatatgaattatatacccagaatgcaattgagttgtaggtgttgaatctttggaaaatgccctctagcttctggaatgaccctgatggatgggtttaagtttggaaagatggacatgatattaatctgatccagagctgacacattttcaactccagtttgaaaagagaaggatgataatgagactttgggccattacctgtgtggcatatctagtgaaaagaatctacagtgtgcgtttggaagtgaagatttagatttcttcccagtggaggaatgccagaaactgtatttccagtactgggaatttgctgctttgcataacagaattccttttttgactggcccagtatctgtatgagtttggaataatcttttccctaaatgtttgatatgattcatcactgaagttatctggggctagagttctgtttgtgggaaaattttgaaatttgaatttaatttctttaatattcatattttctatttcttcttgtttcagttttggtaatttgtgcctttcaaggaatttgtccattccatctaaatgttgaatttattggtataaagttattgacagtattcccttgatatccttttaatggctacaaaagccatagtcacttgtcctcttttgttcttaatattgttaatttatatcttctcttttgttcattgctttagttaggggtttgtaatttttattgatcatttaaaggagcaacttttggttttactaattttctctatttgcttattttctatcgcattgatttctgcagttatctttatttctttccttctactttgagtttgcttttcttctagcttttttaaggtagaagtttatattagtaattttagaacttttctctctccaagcactgttttagctgcatttcacaagttttgatgtgttttcatgaacgcgtagttcaaaatagtgtcagatttcccttgtaatttaattttgatctatgacttttctagaaatgtgttaattttcaaacatttgggggagttttcagttatcttttggctatcgattttttaaatttattgtggttagagaatttgctctgtattttcaatcctaaatgttttatggcccaaaattatggtttatcttggtaaatgatccttgtatatttgaaaataatgtacattctgctattttggggaatattactctataaatgataggtcaaatcggttgacagtttttttcaagtcttctgtatacttgctgattttttttttttttggtctttgtcctatcaacaagtgagagatgattgttgaaatctccaaatataattatagttttttgtttctctttttagttctgtcaggtttgcttcatgtattttgaagctgtataattatatgcaaatatgctaaggattattatgtatttttaatgacataattctttcatcattatgaaatctccatctttatcgctgataatattccttgtcctaaagttcaaagagcattgaggtgtgttttggcaggcagttgagttactattgggtcgacttgatcctttggaatcttgtttgtttttaatgtttgttagggtgggtgtaaagttgtctttatttaaggacggtggttgtcaactttcagtctcatgaccccctgaaactctaaaaacttattgaggactccgaagaattcttgcttatgtggattgtattaatgcttaccatatcagaaattaaaactgagaaataagtaaaacaatatttacttattagttccttttcaaatgacaataataaacccatttcatgttcagctctctcttaactatgttctttcttattagttttcgtttccttctaaccacaaataaacatataaaatcttgacctgccttgtggaaaatgttttctctcaaggatgagaaataaaatgagaattctgga

SEQ ID NO: 64900 - DNA, 1024 bp, Homo sapiens
accccaggcatccaagtttttgaaactttggacaaggtttaagctgctttacatttatactgtctggttgcatagggtaagctaaaggttgtatcaagataacagcatcagagaatttacttctttaaacattaaattggccacacatacatggctagcaaaacaccagcaaatcaatatatcatggcaggatagattgttgaaaacagtaaaactgtatttctttttaaaacattgccatttagacatttaattaattttcaatttaaatcagaatcttttttccaatcaaaagagtttgaattaaatatttagaaattatagtgctttgggtattcctgatttagaattgtcatgttaattagtacttataaagttgtgagtgggaaattattattcatcagaaagatgaagcacagctctttggcactgccgtgtattacatgtttgagtctgtatgctcctcaggttattgggaagcatggcactgtctaatcactatcgttctgaagatttgttagacgtcgatacagctgccggaggattccagcagagacagggactgaaatactgtctccctttaactttttgcatacatactggtttgagtcagtacatagcagtggaagctgcagagggccgaaacaaaaatgaagttttctaccaatgtccagtaagtagaacgtgtgtttaaatatggcattaagatgtgttctgatggttgtataaatgcatgcattaggtattttcaggattgtagaatgggtatagaatattatgcattttagttatagacctctctaactagagttaatattctgacataatggcatggaacccaagagaaaacttgacagttggacataaaaaactggtgtatatacagaggaaaagctgcaatttgtcttaaggtattttaaggaaaattaatgaggagctttttgttgaagtaattaattgtaatatgtgtttcagactttccaaaaatttagcctttgaacatcctttgattcatgctttgagt

SEQ ID NO: 64901 - DNA, 1074 bp, Homo sapiens
tcagtcagaatcctagcccaaaaaccttgggttttaccaggtccctctctcctttgtggaccctgaactctgtttgttttgccctctagccctgtggtactgcctaaagctttgctcagcttcttggccactcaacctcatatttgctttcagaattgacagcaattcttgtctaaagacaaggtggcttccgatgcctggcccacctctcagtctctctcttctcctggacccctctcccctaccgttgtgactcttcgaaagtcttcaagccaattttttgttttcactattcagcaagaggtttagtccaacaacctggtgggctgctgctgaatgtcgatctcatctcttggtatttgtcattatttcccacttctcaaagctagaatatgtggcaagtttacaaatatgcaaaatagagttcaagttaatggcctcctcacacatgaaccataccttatgtcctatatttcccattaagagtcaatgttaaaactcttaaataacatcagtttagagaacttccaggggttttgctgtttttttttttattttaaataaagcagtatgaatattttagatttaggaaatttagaggtttgtgttataatgtgaaaacattattgtggatctcattggtgcccactttccatgttttactaagtgccagtgttttccctgttgggaggaaactaagaaatttgctttctcagtgcttcaaattagttttcaattcatttccttctatttcagccatatattttggacagaattcactcattccaagattgtttcattagttagcagatagattgcatttcttcttagatttaaggctgtttcttcacaattcactcttttttgtgcctttatagagggtgctcgagaggaagacctcgatgctgtggaagcgcagattggctgcaagcttcctgacgattatcgatgttcataccgaattcacaatggacagaagttagtggttcctgggtaagatattcaatgttttggttatttttaatgatgcaagttattttttagaatgaaagtaaataaattgtatttgtagtt

SEQ ID NO: 64902 - DNA, 1060 bp, Homo sapiens
agtctctgattcaattgcaaggttatagaggttgcagataaaaaggaaaatcagaaagcagataggcattggacttggagaaatttttatggagcatcttgaaattaagatatattgttgtcacatattttcaaatctcatatttaccttaagttttggcttagaattttagagttggaaggcaacttagagactgtttagacgaggggttggcaaactttttctttaaaggaccagacagtaaaattttaggctttgtgggacacatggtctctgtcacaactcttcaactccgctgttgttgtggaaaagcagccaaagatgatgcataaataaatgagtgttgctgtattccaataaaactttattcattcaaggaggcagcaggccaggatttggagtgtgggctataatatgcccatcctgatttatgctagtaagttgaagaaacatacccggagagtttaagtgactcatgcaaggtatcaaactagtgaccaagatacaactctaatctaggcttcttggctcctcataactttttcactgtttccttctatgagtaggttaaggggaaaagaaagtaaataaatatttactgagtatgagtaaagcactttattaatcctcactgtaattctctaaggtaggtggtattatccccttcttgaggatgaagaaacaggattaaagaggtgaaatagcttgctagaaatcatgcagtcagtgtgtatcagtccattcttgcattgctataaagaaatgtctgactctgggtaatttataagacaagaggtttaattggttcacgattctgcaggctgtacaaaaagcatggtggcatctgcttctggggaggcctcagggagcttttactcatggggaaagcaaagtatgagcaggcgtgtcacatggcaaaagcaagatcaataggaagagggggaggtacggcacacttttaaatagccagatctcatgagaagtcactcactatcttgaggacagcaccaagggaaggatgctaaaccattcatgagaaaaaatccaccccatgatccaa

SEQ ID NO: 64903 - DNA, 1054 bp, Homo sapiens
atagacagattgtagattgattgctacttacctgctttaccctccaagtttttttcagatttctacactgaaaggcattgtatagatgttcggttttgctaagctaaaattggaatcagttcttctcaaatattttcttccctttagaactaaagactcttttgaaacagtattccttttgcattttgtgtttcctctctaatttcccatgcaaatattactttcatacaaatcacggttgcatgacgaggtgcttgaaactgaattgctaaaaggtagaagaaagaatgatttggcagaaagagtagggctttgaaggaaagtacccttgattaatattctgaatagctccttttcttagaagaaacgaataatactatttacttggtatgtagggtcgaatatttcaagaggaaactaaatctgaaaatagatatttggtgatgataaggtaagggcttacagtagctattattaattaaacacaaagctaggcactggctaagtatttcttgagtattactccatttaattgcaaaagtcctatgggataaataattactattctcattttataggtggattacccaaggcatgaaaaactaagtaagttgtggccaggcgcggtggctcacgcctataatcccagcactttgggaggccgaggcgggtggatcacgaggtcaggagatcgagaccatcctggctaacacagtgaaacctcgtctctactaaaaatacaaaaaattagccaggcgtggtggcatgcgcctgtagtcccagctactcaggaggctgaggcaggagaatggcgtgaacccggcaagcggagcttgcggtgagccgagatcgcgccactgcactccagcctgggcgacagagcaagactccatctcaaaaaaacaaaacaaaacaaaaaaaaaactaagttgtttaaccatcacaaaggaaaggcaaaaccaggatttggatatagagcagactccagggctatgatcttaacattggctgaagggagacaggacctatcctattatgtttggaatgtcttaga

SEQ ID NO: 64904 - DNA, 2293 bp, Homo sapiens
tcctttttggactatcgggatctaatcaagtaatgggacgacacgcatggcaggggtgggggcatggggagaggaggcggtgaggcagggggaaagggggtcggggccgctgacaggacccgagcttccgcgacaccagaaggtgacgccagggccgccctcatcctgcggagccaccggggaccggggcgagacgggggcggaaagggcctcgccctgagtcttcctcctgtcctgggcccaggtatgagaagcgacgagatatctctctcccaggcctcggtgaggcccacttgcaagagaaggaggtagtggccctcgtgccgcaccgccgcgctccgcggacccccgctggccccgcaggtgcccgcccggttggggtcagtccctgctgctgtgtaaaagcccctgtcccggccaggcgctcttctctgctgggtccggggcctgcggagtctggcgccggggtgggcaggtgggtgagcgagaggagaagataggcaaccccttactcccctggcgcgacttccccagcgccagaatcgctgtccgggctcactttcggacttcagtgcgtgagaattgttttgctgtcagcattgctccttacggttcgatgttggattttatgttttggtactgacttccggtgatgccataccggtgactatcttttctcctggacaccttgggtttcccacattactagcatctgttccagaaataaacaccggttgctgataagggtggttcaatgcccagtttcttcagaacttgggactgtctggggtggtggaagaaatggcgctgccagcccgccccccagctgtcaggattgtttacacccttgacagggggtggcatggctgtgagtttcctgtgctaccgtatatatttgcagaggatgcaaagtcgccctcttaggataggtgggcgagatttgttttgtgtttggattaaccattagattctagccatttgatgattgtgccctgtgttattagaggtctttttataaatacagatttcttggagctacagatagttgttggcctagctaagtggtgatagagagatacctcaagtttttggtcactacctgtactggtcgctacctgtacctgctagcaattttatttttctagaaaatacttacaatttaactaacagtctccaacttttgattgctgccagagtaatctttccaagacacatctggttgtcattctccttaaaacctgtgacacccctatgtttatagactataacctaaacttctggggcattgaaagctcttatcatctggcttgtatatctaaggtcctccaggacttatttctccaccactatcacatttgcaccatccattctaaccaaatcagacctctgccagcatacaacacacttgcactttctttttttttttttttcctgtggctcaagctctcgaccttgcctggaatgccttgcctacctcttctcaacttggcaaggtggagaagatgccctctctaccttcttcctgcagaattgatttgccatgtcaggtagatggcgtgcttcttgattgtaagggctgccttgcttatcttcctattcaaagatttttttttccccgagggcttgctatgtgccagtctgttaagtgttgagggtacagtagtgaacaacgcagataaggcaactcttatggagcttacagtccagtgggcaagcgcataattgcaagaggtactaagtgctgtgaaggaaatagattgctctgttaaggaataggaagtgagaagtgatcaaatcggaaggagctgccatatatgaagcagggcatatgcagttctggcagagggaaaagtatgttcagagattgacgggactgctgaacggtactgttcaacagcatggcctggtggaagatacagaaggctggcgttgctggaggtagggagtgactcacagacagtgatgagatgagggtggtgagatcatgcaggaccttgggaaccaaggtgaggaagtaagagtttactttaaatgctttaggtagtaatcacaattttaaacagaagtgacatgatccctctgtaaatgtctgtggaaataaattgagttgaataccatttgaattttatctacagaaaagtatccagtgtattgcagcttttttcctgcaccatacagcccaattttgtcaagggtctagtctagtgataagctctgaagtttttggtattatttgctgaactggattgggttggattggattagtacactggaatcatgtagcatcagttgc

SEQ ID NO: 64905 - DNA, 1050 bp, Homo sapiens
ctgccttaggggccattccccaggcctgagctccccgggaatcagaacccacgtctctctctgtgcacttggcaggcagtctctaatcctgctgggtgctgccgtatcacccactctgcccaagggctttttgtttgtttatttgtttgtttgttgagacagtttcactctgtcacccaggctggagtacagtggtgcgatcttggctcactgcaacctccacgtccggggttcaagcgattcttgtgcctcagcctccctagtagctgggattacaggtgtgtgctaccatgcccggctaatttttgtattattagtagagacagggtttcaccatgttggctgggctggtctccaactcctgatctcaagtgacccgcccaccttggcctctcaaagtgctgggattataggtgttagccactacacccggactgcccaagggtttttatccaggacagcccctcatgagcttcactgaatcatgcatatttcagcctcagtcaggcttctgggaggaaaacacccatctgtgctcctgggtgggaatagcatttgcctagacaaaggactctgccctattactggaacccttgagtgggccctgcaactgccttgaggtgtgaatggggctgggctgaagcagggtggggttggcctgccttggaccctgccttgcagaggttggaaccaaagcagtgtggctggcagcatgtgtgagctcagagtcagaagtcttgggctcatacctgccacttactagttgtgtgctcttaggaaagtcacttttcctctcagagcctcagtttcttcatctggtaaatggcgataaaaatacctctctcagagcactgtggtcaggatgaaattagatctgtatgcaaaacacttagtgtagtcactagcacgtagaaaatgctcaatgctcaatatatggtagcaaaaggaggtaagtttgccaaagagagcacgaaaccccactgacaggctctcagccccagacagggcagatctcgcactgccccagaaatgcttctgggacccaatgtg

SEQ ID NO: 64906 - DNA, 1831 bp, Homo sapiens
tggtataaagattttttcacccaaaggagcttcacttgtttcagtttctggaattgcctttgaagctgactccttggttttgggatgctcaccacaatggatatcttattcatttatatacaaggctagtaatattcacccattaatcttgaagaaagctgtacagctcaccttaagtttgcatgctcatgctacacactgagatttttgtattctgctcagtaacgcaaattgagctttcctttagccagcctgcacgcctttgaagaaggtgaagaaatggctttcttaaattttagtgatttagattagaccgtttagcaactatagggaagcacagtaaactatcgtgattgcctcattgcatggtgaggtctgtgtttaactctatgagaattcaagggtgataactgttcctgcttggggcaaacacttctatgttgagcaaggggtgaatgctagatgtttttctgaccagttacccccacaggtcattgctgagggacgtggtgatggcagcagtgaatcactagttcctaggactgactaggtagctgggtttcaggggtaatgacgtgcaacaggcccaacagacatcaccgagaatgggcacctgtgagattctaagaacctcaggacaaaaagacttcctgcaagtccaagtcctgactatgacgagatatgacctatgttatactccaaactagtgaaatggaatatttccatccttttaagacttatgcttttttattattagcttttttttttttttgagacgaagtctcgctcttgttgcccaggctggagtgcaatgggtgcgatcttggctcactgcaacatctgcctcccaggttcaagtgattctcctgcctcagcttcctgagtagttggcatcacaggcacctgccaccatgcccggctaatttttgtagttttagtagagacagggtttcaccatgttggccaggctggtctctaactcctgacctcaggtgatccgcccatttcggcctcccaaagtgctgggattacaggtgtgaaccaccacacctggcctaaaattgttttatttcaataaagcaccaatagaattccatttgcagtggtatagtgtgtatacctttgtaattaacaacaccaagtagatagataggcttccttcacactgtaaaacattatttattttgaaattattaaagagtcacaggaaattgcaaaaatagtacagagagatcccttgtattctttattgtttgtttgtttcccatgtaccctttactcagtttatctcatggtaacatcttacataactatattggtatttttcaaattttctataagattttataatagaaaaagaaagtctttttccagttattgaaggtttttgttttaaacttttgttctgaattaggtctctatccttgctatacatacttcatctaatctaactctctgcgtatcaccagaggtgatattcgaaatatttaaagatattgaaaaattagttctgctttaagtatgtccagttggaatacagcctggttccaagaactaaaacagagccctgggcattcatgcttcagctcttcagtctctagatcatgaagatatctgggaaagggaggtagggaaggtggctcttgatcaacagtatggacatgtttcagcatctggaccatcatgcagctgtgctggagagcaccagctcatacccagcccatattttcctgtaatgcattcatcccattgctttgaattcattggattatccttatttgcctcctaaatatattatcagctctttgaaagcaaaggcatatgcttaatt

SEQ ID NO: 64907 - DNA, 3492 bp, Homo sapiens
gggaagagggccgctgcgcccgggtgtcctttatctccggacccgctggagcttccgaggggcttgcccccaagtccccccaccccaccccggtcatttcccatgcccttctctgcccccaagccccgacctctctctttcctcccttctccggaagccggcaaaagccggccctccccggtagggaccgttgcagtggccgttggcggccggcgcggcgatgccccgcctccggcgcgagcctcggagcccccgggctggtaggccgagccggcggctccgcgggggaggggcgggtcggggggcggtgcgaggcccagccgggcgccccgctggcgggtcgcgcgcgcgcccgcgcactcttcctgccctcgaggcgcgccgcgccccctcccccacccgctcgcgtaggctaccgctcgctgcgcgttttgtcccgcgtctcgccccgtccgtctcctgactggccgctcttgtccttcctcccgctttttcttctctctccttgcggtctgaagatgccctcggccaccagccacagcgggagcggcagcaagtcgtccggaccgccaccgccgtcgggttcctccgggagtgaggcggccgcgggagccggggccgccgcgccggcttctcagcaccccgcaaccggcaccggcgctgtccagaccgaggccatgaagcagattctcggggtgatcgacaagaaacttcggaacctggagaagaaaaaggtgccaggagttggcggggaagggaggggtggctgcggccgggctctgcggcccctccgaccctggtcgctggagccttcgcttcttttcgtctcgggagcgttactaggtcccctcctcccaccccctggcccacacgccccgtctccacgttcagcgggagcttcgtgcccagaaaacgggctcttggaagaggcacttgtcacctgactcggacgcggcactgtaccccaggcctctttattactcttccgctgtgggtccggctttttggcctttaggagtgggacatgtgagggtgggggcctgtcgtcaggacttcactgtatggtgcccttctttccgtctctgaggcccgatttctctgacgagggcccaaaatgaagaggtccctgcgcggggggctccgggttcaaccgaccgcctcgtggagttggggcggcctgcgtcctgcagccttggggtctgtccgctcggttaccatgcactcgagacctgtcgagcgtcccctcttcttccgtaggagagaagtgtgtttagaatcttaaggtagaactgcctttccggcaggcccattttgaatgggtcttcgatttgctacccccgcgcccatgcgatgggctcccctgcgtttccctctttgtttcaattgtttaggtgtccccccgagcctcaggctcagctcaatcgcgagatgattttctgcagcgactttttgttcctaggggactgtgaaggggcgggggactgccacgatttagattcgttgggggctgggtcctggggagactggagaggatggctgggactcggggcacatggagagagcgtctaacatggcggcggctgcggggagagggaagcgctttactggagctgcattgtgagcacaaagcgaaagcagagggggagggcagagaccaggcagccgccccgactggcctccttaggcccccctctaaaaaaaaaaaaaatcgagccacacccacgattttttggattcaatatttagtccttgtagatcaaactactgaggtatatcttcatctgcaagtcagccttttgttttatgctttcatcgcaggacagtgtaaactcttgtttagaggggcgtgtgtatgtatgtagagaaaaggtctgggcagagtgaataattaaaatgagtaagatcagaggtggaaggggagaaacaaattagtcgtttgtaaaaacgaggtaattacgtctgtgactatcatgttaacttgaattttaccttataaagtaaaatgaagccttgataacttctacttgtctgcctctaggaaaacatatttataacatcttgaatttccaggaaatcattttgcagtgtttatgtggccagacacctaatagtgttacttgaggtgctgatatagtaactggctaaaacttgggctgtgggaaataagttgaagaaaactggtgatgtttaggtcttattaattttacttatatattttacattttgggagagttttaaaacatttagatttgatacttccctgtttcatcttcggtattgaaggttggaagttttacttgaatttcatggacttgggatttcttttttttcccaatcctttattttgataaatgtatgttttattataggtaattggaatagtaaatgtagttacatcaagaaagtaacaaaagtattttaagtgtaaggtagctacattcaaatgttgaatggaataagcatgcccaaggccagtatcttctgagtctgacacatgatttagtttaccctgttgggtatcttcttaaatttttttttttttgagacggagtttcgatctttttgcccaggctggagtacaatggcgcgatctcagctcactgcaacctccacctcccgggttcaagcgattctcctccctcagcctcccaagtagctgggagtacaggtgcctgccaccacgcccagctaattttttgtatttttagtagagacagggtttcaccctgttggccaggattgtctcgatctcttgacctcctgatccgcccgccttggtcttccaaagtgctgttacaggagtgagcccctgtgcccggcctctttttaaaattttaatgcagtaagcaagcctgctgatctggctgctacttgagtttttgattctttagaatttcttggaaatgtttttttctaggacagtaattgaacataaaatattaatgattgtgaacattaataatgtgttaatactaattatgaacattaatgattagtgatataaagtgtagagacattaatgactgaaagataactcctcagagaagttaatataaaggtaggtgctgattggcagccaatttagttgtgaggtggctgttagaatctagtgttcaagtacttctgaaaaaaaaatataaatctagtttataagcccctcctgaggacttgaaccatgactggtcattaaatgtgtataggtgtatgtgaattactatactctgtcataccctaccctcaagtgattttgttattttatttttattttttgagatgaatctctgttgcccaggctggagtgcccaggctggagtgcggtaggatgatcttggcttcctgcaacctccacctcccgggttcaagtgatcctcccgcttcagcctcctaagtagctgtgattacaagtgtgcgccaccaccccaggcaatttttttttctttgagaagtctcgctcttgtccgccaggctggagtgcgacgatgtgatctcggt

SEQ ID NO: 64908 - DNA, 2360 bp, Homo sapiens
gctgggattacaggtgtgagccaccatgccgggcctcccctaaagtcataaaggagaaaataatgtaattattacataggttattaactaggctaatacatactgaaagattgccgtgttaataatggagattcaacaaactgcacaaagtaacttttttttctgtcttctcagtgttttaagtggtagatagcagcaaaaaggtcaagttacagttaagtcttgagactttgataagccacagactgaactctacctacatgttaagtagttaagttggcagtattgatgttgacttaattgctattaaaactatatcttttgccctttgaaaaacccagggcatttggatttgccctaaatttaagcacatctggtttttagtttaaatcctttttatatttagatgatttacttgtgagaagacttaactgtttttaagtataagtgagcatttctaatgcactaaaataggattgctttacaaatcagttttgaattcctctttagaaacccttgtggagtaaagtgaggtactatttacaattagatttgttttgacttcagtccatttagcaacttacatttgagctttatttcaatcttgacctattcttatcggagccttctggaccaaaatgctttttttatggattttaaaatcaaatatcctggcaaaaatgactatggatatgtagtattgcttaaattaaaacagagaattgaaataattttattgtactttaaaaaacaaagttgtttatttcctaataatttgagccattaaagaaaaagctaagcatctgctcattgagaatgcatgctcttaatgttgatgaaatatgatcgtgttatgtaatgcaactaaaaggcttggtgggtttttaaattcaggcttataaagagtacatgaatgtttagcaaagagaagaaatacagctgtgataatcaagtgtaaaatccatttgcaaatcttacaggtaatattgaattgaatgattaactgcctagttttctttatcagttcattggtgctgaactgggccctaggctatgcaagatatttcaaaaccaagtcttaattttaactgaagagagacctcatttgatattattagatgtaatcagttgtgatatagaataaaggatgttttaatagatgacatttaaaattgttatattctttgtgaatataataggtttagactctagtgactttggtaggtgaaagattaactaatgatcacttgcgtaaaatgcaaaaatagcctgacagctttttaaccactaagtgaccaaaactgatagccagaagtgtagtgtttttaatactttttcctgaaggctttctgcacttcatctttgcagttagtagtattctttaaaaagaatgctgttgttgtgagggtaacatttctttctagaacgttgcagtgtgtctgtgcttagaattttcattgcagctgttgtgcagaacttatgtgttcagtgttttaaaataaaaacattcttaactattttataagtaaaatctttccttgaggctattacctgaagccttctttgacatttaagatctcttgatgtgtttgcttttccatgggttgcaagaactattcttctgcaatgcagagggcaagattattttgcattcaccttgtcatagaaaaaagctgtaatgcttaatttgtttccctttgcttgactgtgtgtgtttgtatgtgtagcactgggaagtatttaaagctgtgaattcccccaagtgataatgggtacctttttctagggtgagagtcgaagcctaagtattacattgagaatgtattgttttaacgtggccaaattagtgtactctaggatactacccatgtggcagatatttgagaatgcattttgtgtgacttacagattaagcatacaatttgccaaaattttatgtaattaatttcctagtttacatttagggctagatgaagactagtactgtttcatcttttagaaaaactaacacttttcctttagtaaaagtgttaatttttgcaatacttttgcaaaaggttaaacttatagcaattttgtcatagctataatcttacactgttataaaatttagaggatttttaatttttatttattatcattatttgagacagttttgctctcgttgcccaggctggagtgtaatggcatgacctcggctcactacaacctccccctcccaggttcaagctattctcctgccttagcctcctgagtagctgggattacaggcgcccgccaccacgcccggctaattttttatatttttagtagagatgggatttcaccatgttggccaggctggtctcaaaacgcctgac

SEQ ID NO: 64909 - DNA, 2047 bp, Homo sapiens
gttagcattcttatgccattcttagcgttcagaaatccagcattcctgacaggtgttcattcagcctctgctttaaccagtcttccagggcctggtagagtgctcgtttctcaatgaaaatttgtttcattggtgtgccactctttaagttcttggtggtagaagtatatccttaccggccgggcacaatggctcatgcctgtaatcctaacacttttgggaggctgaggcgggcagatcacctgatgtcaggagttggagatcagcctggccaacatggtgaaaccccgtctctactaaaaatacaaaaattagccgtgcgtagtggcttatgcctgtaatcccagttacctgggagtctgaggcaggagaatcgctggaacctgggaggcagaggctgcatgagccaagatcgcaccactacactccagcatgggtgacacagcgagagtctgtctcaaaaaaaaaaaaaaaaaagtatatccttaccaccactgtttaatagtctttgttttctggaacagcatagactcccgctacatgagcatgctttcaacatttgaagaaagctgccatggatcagctatggattgtagtgtatgttctttctaccctgcttttaaaaattgaggaaacttttgcttactatcttttttgtcttctggggatttcactagctaacaatactcagttgaatttgtggagggcaaataggagacagtcagctgcctaccattgtgggcaaagtcaaaactcgtaattgtctaagtgaagaacagagaatgtggggattggggacttgaaataatacctggaaaaactggtaaagattggaccgggcgcggtggctcacgcctgtaatcccagcactttgggaggccgaggcgggcggatcacgaggtcaggagatcaagaccatcttggctaacacagtgaaaccccgtctctactaaaaataaaaaaaattagccgggcgtggtggtgggcgcctgtagtcccagctactcgggaggctgaggcaggagaatggcgtgaacctaggaggcagagcttgcagtgagctgagatcacgccactgcactccagcctgggcgacagagcaaaactccgtctcaaaaaaaaaaaaaaaaaaggaaaactgctaaagattatggaaagttgagaggaaaagaaatattttgtttttgcaaaagttggtacagtactctagaagtgatttatttggcctggatacataaagtatagctaggtgctcttaactactttggttattttaggcttcatttttaagtattccctctcagtttagacatctccttatttgagaataggagttacgaagttttcctggaaagccaagttagtttttttcagatgtttcctcctaatcttccttctgactatttaaaattgtctagttgaagaatttttagggttttttggagtttatcatctctctttgctatttatttttaattgcataattaaaaatttcttcttaaattttttatttgtggaatttgttggctataacaataaagaagcaaagcccaggaggacatctatcatggatatccctcttctggcaccctaatggcacctactgaacttaatttaaaaaatccatttcaagaaagtaactttggtggtgatgaaaaacttcttgggaagaatggaagatctagatgtattgcaattcagcacaacataataatctgattggagaaaggaagaaaacagcagcagcagaggcagagctggaatgtagcaacagctggaatccagaatgacattctaagggggagggttgttaaggcacaaatgatttttctgggatttaagaccttacttaggtaagttatttaactgtgtctttcaatttacagttaggtgaaatatgattgatagtaatgcctccctgataggtttagctaccttttaaatttgaatgtctgttacatagtgaatactgtcaactattaaaagcagtaaagaaacaggatatagagcgagactggatagcacttgttgggataattatttccca

SEQ ID NO: 64910 - DNA, 1103 bp, Homo sapiens
aatacacttaggatactcagctgaaaaggaactctaaattgaatttcaagttagaaaggatctaagagggcaggtgtgtgttatcaacattgtaacgtagtaggctttctgatgaagatagtttttttttgagatggagtttcgcccttgttgcccaggctggagtgcaatggtgtgatctcagctcaccgctgcctcaccctccctagtagctgtgtttacaggcatgtgccaccatgcctggctaattttgtatttttagtagagacggggtttctccatgttggtcaggctggtcttgaactcctgacctcaggtgatccacctgtctcggcctcccagagtgctgggattacaggtgtgagccaccgcgcctggcctgaagatacatttttatgctaggaaaatggtttcattctctaggaaaaatacttaatatcttattttatttgtttcatgagtagctgaccaatttattgttacctcttctgctgctgttagccatgttccagcccaggaaagaataaagctgtgtctgtctggagccctttattactcctatcttaccattctgttcttagtataatgttggatctgtcaatgtgacaagctattccttgtatattcgcttagttcatgctgtaaattttaacaccagtggacaaattttctagttggactttaatgtaaaccatttgaataggaagtgacaataggaatgaagccacttaagatggcatcatttttctcttgagtagtctgtgctttcaaagattaggcaaattgtatttggagaagtgcagataccatatccttttccttatcatggaaggccacttaaggagtaagctgagattgcaagctatagtaatctttatagctatagtaatagctactttcattttgaaaagtaaaaaattagaccaattgtcgtaagaggctttctgtttatagtgtacattttggtatttaccacttagtttaacttctgaggtgtcagctaagaatgcaagatttaacaaaagtactacttacaaatggcagtggtatgcctttgttttttctctctcacctctccttctcaaaggtggtaacccctaagt

SEQ ID NO: 64911 - DNA, 1042 bp, Homo sapiens
taaactggtctagaaatccagccacagttcaagttttctgggttgtttaaagtttcaactttaaagtttattaaacaacttacttccaaattaaagctgctgtataatggtttttttttttttttttttttttgagatggagtctcgctctgttgcccaggctggagtgcaggggcgctatctcggctcactgcaagctccacctcccgggttctcacctttctcctgcctcagcctcctgagtagctgggactacaggtccccgccaccacgcccgactaatttttttttgtatttttagtagagacagggtttcaccttgttagccaggatggtctcgatctcccgacctcgtgatctgcccgcctcagcctcccaaagtgctgggattacaggcgtgagccactgcacccggccccgtataatggtttttaaggtcactaatcataccatatgtttgattcagaataatttatttccaggttctactgggctattacaagttaattacaatgtatttgaacgagatgagtgtttctcaaacttaagcatgcatcagaatcacccagaagactcaataccaactacaaattgctgggttcccccagccaccactgagtttctgattcagtaggtctggggtagtgcctgagaatttgtgtttctaacaaggtgccagttgatgctgatgttgctggtttggggcctacagttttaaaaatcactgacgtaaaccaacatagggtctctgctctgcagagatctgattatatataatagtgaaacaaagtccttcccagctcagattccatggtgataaagttctttgtatacctcaatagctgagagatcaggaaatcctatattttactgataagggaaaaactagtgccttttaattaagtttttattgtcatcctgcagttttcttaataagttttggtatttcctcttatgagtgctgtttcttagaaactttgatcagacttaggatcctgctttcctgaagcttaggcaaggacaggggataggatatttataa

SEQ ID NO: 64912 - DNA, 1013 bp, Homo sapiens
agcaaatagaattttttattttaaaaatttttagcttcccaagcttatgagtcttcccttttcttcccttttaaaaaagagaatgaactatctgttgatcctcagagtattttgtgaggtaattggacacatcttctgcacctggggtcaggtctgtcatatcagtgtaaaaaaaaatttttttccctcaaatcagtagactgaaattttatacctgtttatttggaggcttatagatggtgtgaaatagttcatctaataataaaattgggtactattaaaagcctttaatgtcttagtgattatcttggttttatttacctccagtgttaggaaggaattgtggtagggttttcaatttggggtagaatggctaggcaagttgacatttgtttatggtacaaagaaaatagatcatttgacctaaaaaaaaaaaaaaaaaagaaaaaacaaaacttattaccattgcttttaaactggcttctgtggtttctgaatgccctttattagaatttaactttgtactttgtttcacaattttattattggtaagggggtaaggaactatgtatgttcataatttattgggattaagtgttgtcctgttaatttagatttatcctcattcactgtcctcttgacctttacaataataatagtttgtgactctgttgcattacctgaatatctgtggggtcttacttaatagtagcctgggaaacctgcaaagttttaatcttagcaagaaaatgggatcttaaaccagatgttagttttctgtcctcacccttgaactaacaaagcaaagctgttgacttgtgtattagtgaggtggtagctatcttgttcaagataaatggatgaagtacattaaagacaatatgcccatgagtttattcagaaaaaaaatactttttttccccttggggtggggagcagcatctcacgctgtcgcctaggctggagttttggcattatttcagctaactgcagccttcacctccagggttcaa

SEQ ID NO: 64913 - DNA, 1238 bp, Homo sapiens
gtgcctgtaatcccagctactttaggggctgatgcagtagaatagcttgaacgtgggaggcagaggttgcattgagacaagatcgtgccattgcacgctagcctgggtgacgagcgaaactctgtctcaaaaaaaaaaaatttatgtacttaaactggaatatatcttaaaagtttatttaagtcaaaatttgagacaaacttagaggattgtgagggttttgtcaagcatgcttaagctggtatataccttcaaaacggaatgtaattcttttttttcttttaacatagggtaagcttgatgattaccaggaacgaatgaacaaaggggaaaggcttaatcaagatcagctggtaaagatgttatattttttattttagacctaatgctcactattttaaagacaaaaattaattctgtggttttttgtctttccagtaaagtttgggttctttgtcattttaggatgccgtttctaagtaccaggaagtcacaaataatttggagtttgcaaaagaattacagaggagtttcatggcactaagtcaagatgtaagtaaaagaaagtatacatatttatgaaatacttttgttgtttctttgggttttagtccttccattactattgataagctctctgcaaggtgagacagttgtatccaattatatctaagatgccttcacattctgtaaagtaaaatgtaacacctgaaagatgtcttttaaaaatactaagtttgaaattgggggcggtggcatgtgcttgtagccctggctcctcaataggttgaggccaagagttcatggctgtggtgcatatgattgttcctgtgaatagccaccgcacttcagcctgggcaacgtgataaaaccccatctctaaaaaaaaaaaaaaacattaaatttaaaaatttttttaaaaggaccaagtttgagatttgacaaccatgtatagtagctatgctaaaggtctcattggtttaaaatgttagctctgcaaatacataaaaatcagatagtcattagaaatacataaatgttttttatttatcatgttccttatgtctaatgactcacaatttaaactgtcagaaaataaagaggctcgtttatataattggtaattattctctgctttaggaaccttaaggggtatggcaaactgatgtgctcctatatcagcactcgatccaacttaatagtgggtttttgatgtgacaaaaacctttgggaataag

SEQ ID NO: 64914 - DNA, 1028 bp, Homo sapiens
tttatataaagaacagaaatttgtttctcacacttctggatgctgggaagtccaagatcaaggtaccagcatcttgttgcattactgtgtcctcacctggtggtagaaggcttaagggcaagagagagtgatcatactcctgcaagctctttttatagtagtattaattcattctaaatagctcccaaaaggcccaccctcccaacactattgcgttgggagggttaagtttctaacacttgaattttagggggatgcattcagaccatagcaccaaaggagagatttattccacttagcttaatgaaccctgcccaatttctttttcttgcttttttaaaatagaagcaggattgctatacagtttaatgtaacatctattttggaagttactatcactgtgtaatgaaaatacctgtatccttttttgcttctcttgtaacactggtattttcaggacctttctctgagctttaacttcattagcagagctgttatttatctttgatcctttggtatactgtacacaattattaaacatgctttttgtttagcattcaagaacttctttagcctggctccagcctaccttttcacctttttccttcttgaactgttcatttcatacagaatagctttctttcttatcttcttttgctttgttaacttcctttcatattcctgtccctcttcctgtgtttcctgcctccacctacctataaagaccttcctgggcagggtgtggttgctcacgcctgtaaccccagcactttggaaggccgaggtgggtggatcacctgaggtcagaagttcgagaccagcctggccaacatagtgaaaccctgtctctgctaaaaatacaaaaattagccgggcttggcagcacacacctgtaatcccaggaggctgaggcagcagaattacttgaattcgagaagtagaggtgtcagtgagccaagatcgtgccactgcactcctgggcaacagagtgagactccatctcaaaaaacaaacaaaaaacaccttcc

SEQ ID NO: 64915 - DNA, 1468 bp, Homo sapiens
ttattgttgctgtggttgggtttcttttttaattggcctaggcctttacatttctgtataatttctaaattcattaaatttttactttttatatgcataatgaaaaacttcagatatatatacctaactaaagaaaacaatacaatgaaactctttgtacctgtacccagcttgtatatttatcatctcatggtcaatcgtatttcatataaatccacattcatttccttgctccctttgccctctagattattttcaaacaagccccaaacacattgtttcatcagtaatagttcagtagtaaaataccttctagggaaagagctgttctgaatttttaacaattgcttaaaatagattatgtttaaaactatttgtaagtcaggaatcatccttttgtgtattgaggtcatatctcactcattgagtaaaacatgttttatttaagctggacctgaaatggattgaactaagttttatataactaattttggtgttttacttttatattgttttgcagattcagaaaacaataaagaagacagcacgtcgggagcagcttatgagagaagaagctgaacagaaacgtttaaaaactgtacttgagctacagtatgttttggacaaattgggagatgatgaagtgcggactgacctgaaacaaggtttgaatggagtgccaatattgtccgaagaggagttgtcattgttggatgaattctataagctagtagaccctgaacgggacatgagcttgaggtattagtggtatttgataatagaaacttctgagtatttaagttgacaactgaaaggttattaattagctatttactattaaaaggttgaatgaacagtatgaacatgcctccattcacctgtgggacctgctggaagggaaggaaaaacctgtatgtggaaccacctgtgagtatcactgtgataactttgattttataactaggaatctttaaaaactaattttcttatgtttatagttcacttggaagaaaaaaattagtttttttttttttttggagacagagtctactctgttgcccaggttggagtgtagtagtgtgatctcagctcacagcaacctccgcctcccaggtttaagtgatttctatcacctcatcctcccaagtagctgggattacaggcatgcgccaccacgcctggctattttttgtatttttagtagagacagggtttcgccatgtaggccaggctggtctcgaactccttaccacaaatgattcacctgcctgggcctcccagagtgctgggattacaggtgtgagccactgcgcccagctagttttcctatttaaaattaatattaattgaataaaatttagaaatgtatacatagcattcatctgctatttactgtttggtttatttcttttttgtttctttgtatgtttaatctgtaatgtggaaatcagaacaccagcaacaaaca

SEQ ID NO: 64916 - DNA, 2505 bp, Homo sapiens
cgggcatggtggctcatgcctgttaatcccagccctttgggaagccaaggtgggcatatcgcctgaggtcagaccttcactaggcaacatggtaaaaccttgcctctactgaaaatacaaaaattggctggacgtggtggtacacgcctgtaatctcagctacttgggtggctgaggaacaagaattgcttgaatctgggaggcagaggttgcagtgagctgagataacgccactgcactccagcctgggtttcagagcaagactgtatctcaaaaacaaacaaacaaaaaccccgtaaagtttaatataactacattcttcttgttccctatcattctgtaatacatttctgttcttggtgaaatgtaatctttttatgtgtatatgtgttttagtaacagttattttttaatcacaatattttatagaatgttggatcttcttcaagccaggcatcctcagataagtcttacattataattcatgttctttttcttagataaagttctaaaggaaattgttgagcgtgtttttcagtcaaactactttgacagcacccacaaccaccagaatgggctgtgtgaggaagaagaggcagcctcagcacctgcagttgaagaccaggtacctgaagctggtgagtattaggtggatatcaactttagtttagggtcctggttttatttgattttgctacaaatttaaactatacacttacttagttttcatatatgtacactagattttatttttaaagagactttaagcatgacaaagtttttttttttttttttttttttttttttttttttggagacagagtctcgctctgttgcccaggctggagtgcagtggcgtgatctcggctcactgcaagctccgcctcctgggttcacgccattctcctgcctcagcctcctgagcagctgtgactacaggcgcccgccaccacgcccggctatttttttgaatttttagtaaagacggggtttcactgtgttggccaggatggtctcgatcccttgacctcgtgatccacccgcctcggcctcccaaagtgctgagattacaggcgtgagccactgcgcccggccttgacaaaatgttaagacagattatcaagagtaattcctaccagtattcattatatttgtcttagtagtcatttgtcttactagtcttgatcactattataaactgatagatagttcttttgcagtagtattgatgggcaggagtatgggtgagggccagctgttacaaggattttcaaataggtttctgtctgacatgcccagatttgctatttactatgccagtgcattggaggaatagtatgagttgcttttgttttgttttaatcatggggagattatagctccataatcttgaactataaattcctccaaggcaaggggtcttttccagttaattttatcatgtagcacaacactaattatatagctagacacttaactgtgaatacttttatgataactcttatgttgatgagtaaaattctgaatacaaggaaacattggagcataagttttgttagaatcagagtgcctgaatttaaatcttcgcttcaacacttactagctctgtaactttgggcaagttaatgaaactcttgtacctcaggttccccgtttagaaaatatgtcaagtgtgtatacagtgcctgacacgtggtaagcacttagtaactggtagctagtaggttgaaactagaagtgaagattgtacattggtggagttaatagttggagattaatataaggcaatctttttccccctcttaccactttactaagtaaagtaagatttttaatctgtatgctgcttcatactactacttatgagacgggagagggcttttaatatagtagctctttatttgcattatacattatctgaaatagctactgttgaacctaaagtaattctggaataaatggtaaagaaaactttctaaaatataaaacactgttaattaactttataaataagtttgtaagtaaattcagattatgtgatggcaaactatttacttatttggaatttaagttgaattcttttttttttttttgagacagtctctgtttgtcactcaggctggagtgcagtggtgtgatcctgactcactgcaacctctgcctcccgggttcaagcgattatcctgtctcaggctcctgagtagtggggactacaggcgcatcaccacaccaggctaatttttgtattttcagtagagatggggtttcaccatgttggtcaggctggtctcgaactcctgacctcaggttatccacccgccttggcctcccaaagtgctgggattacaggcatgagccactgtgcccagcctttttttttttttgagtcagagtctagttctgtcgcccacgctggagtgtagtcgcatgatcttggctcactgcagtttccacctccaagggtcaagcaattctcctgctttagcctctcgagtagctgggatt

SEQ ID NO: 64917 - DNA, 1451 bp, Homo sapiens
tgagccagcgcgcctggcctagttgaattcttaactttaaaaaagatttattacactttatggcatcatttctaaaaatagactttatttttattttttatttttattttttgagatggagttttgctcttgtttcccaggttggagcacaatggcctgatctcggctcactgcaacctccatctcccaggttcaagcgattctcctgcctcagcctcctgagtagctgggattgcaggcgtccgccaccatgcccggctaattttttgcatttttagtagagttggggtttcaccaggttggctaggttggtctcgaactcctgacctgaggtgatccacctgtcttggccttccaaagtgctgggattacagacatgagccactgtgcctggccgactttattttttagagcagttttaggctcacagcaaaactgaacagaaggtgtagagatttcccatttactttctaccctcacagatgcacagcctccctcattgtcagcatccccccaaccagagtggtacatttgttaacaatggataaacccaaactgacacattattatcacccaaagtccatagtttacatatgggtttactcttattgttaataattctctgggtttggacaaatgcataatgacgtgtatctaccaatatcacacagagtagagtagtatcactgacctaaaaatccttttgttttgcaccattttttaacctcttagaacctgagccagcagaagagtacactgagcaaagtgaagttgaatcaacagaggtatgattttaatttaatgctgcctttactttgctgcctttcaaacaaatgtctcaaacatttactttgctttgcagtatgtaaatagacagttcatggcagaaacacagttcaccagtggtgaaaaggagcaggtagatgagtggacagttgaaacggttgaggtaagagttctctgtattgcaaagttgttgtctttgtcttcagttagtaatttttatctctactgagaacaaattaagattgttttttgcattattagtacatttattataataacagactcattacaccagactgttacttccaaaaaatgaatgtttatccctgtggatgtttaataggatccctgctttgctgaaccaatctaaaaaaattattttatacaaagttatctgtggattaatctgttaccatgatttgtctcttactgaaattaggttgctctgtaaaaatctgggctcccacactgatagctgtgttttggggtatcatcttgcactcctcctttaccctaatgctgtttggtcaccaggctgtagacttcctctagcgttttctaatgctgtctctcaactgataatgatgatttttttcgggtcctcatgtctagttcagtgactctcttcatattactcctctctgactgcctccagaccatcctat

SEQ ID NO: 64918 - DNA, 1034 bp, Homo sapiens
taagtaaatcaacatgaaatgctacatagtggtcttatggaactgaaacactgtagaagtgatgacatttttcagaatgttaaatttggcataaatgtaattcatttgggtaactgcattaaagcccgttctgtttatagtatagatggtttatgtagtgtgggggacccatcatggtggtagtgagtggagcttttttgctctcctattccttctaatccttttttttctaccttaggtggtaaattcactccagcagcaacctcaggctgcatccccttcagtaccagagccccactctttgactccagtggctcaggcagatccccttgtgagaagacagcgagtacaagaccttatggcacaaatgcagggtccctataatttcatacaggtatgttcattttagtcagactctgtaacagaaagtttaagtgtttatattatttgactttattctatcctaacttaacctgtaggattcaatgctggattttgaaaatcagacacttgatcctgccattgtatctgcacagcctatgaatccaacacaaaacatggacatgccccagctggtttgccctccaggttagtagtggtacatttttatgtgagagagaaatataaggccagtactttcaggttttaaaaagattgtgaaaataaattttgtttattttaatgactgtttaattttgactcttaggtcttttaatttgatagaaagaatgttattgttcctatgatttgaattaaaaatgtagtttataactgtttatttttaaacttttcattggcatgtagatatagaaaaatatacgcaagtttaatgagtttttataaactgaaaacacctgcagctagattaagaaatgaaacattaccagtaccccagaaacctacgttgtttcctttcaatcactagttaccctcacccctagcgatagcaaccacttccgtacttgtaactgtaatagaccagttttgtctgtttttgtaactttaacaagtgaaattttgcttggcttttaaaa

SEQ ID NO: 64919 - DNA, 2493 bp, Homo sapiens
tattaatttctcccttctttagcagttgtatctatttcttagccttatgcgtcttagaggtaacttgtttttttaacagtcaattttgtaagcaggaagaagcttttatttctttacttatgtctaggttcctttggtatcatccacaagtgaggggtacacagcatctcaacccttgtaccagccttctcatgctacagagcaacgaccacagaaggaaccaattgatcagattcaggcaagttctgttaccgggtcacatacatttgatgaggcacttactcatgaattgaacagatgtacattaccattaatataatgattcttctttttggacctactttgctttcatgaaatatttgagtttgttaatacatataagtttgagattaatttaccactttagtacatctgttcactttttgtttggctaagtttagtttaccgctaaagtgcatctattcactttgtgtttaggcaacaatctctttaaatacagaccagactacagcatcatcatcccttcctgctgcgtctcagcctcaagtatttcaggctgggacaagcaaacctttacatagcagtggaatcaatgtaaatgcagctccattccaatccatgcaaacggtaagcaaattaactaacattaattgcctagtatgtaatatgaatcatggtagattttcttttcttttttaaaggtcttcatttaactgtgcttgagtctgcatctttcattaactgtagggtatatttaattgaacataaactgattattccagagattaactgatactaacggatattctagagataaattttagccttatgagtgatgtgcctgtatcatcttaatttgtagttttacccttttgatttgattaacaaaagcttaaacattcagagaaatagactaatataacatccatataatcattacctagatttaatagttgccctgtttgcttaatcttttattttactgaagtattttgaagtttcagatgttatgctttaccttgattcttgagcaagcacctttagagaatttctagaaaataataataatactataatctgtggggtgcagctaaatcggtgctgagaggaaagttcataagattaaatattaaaataacttttgattaatatgttaataaaaatgaaaaaacattcaaccctgttaaagttcatagaacaaacttctgtaagtggtactgcatccaggagtttgtcttatttatttattttttgagacaaagtcttgctccgtcgcccaggctggagtgtagtggcgtgatctcagctcactgcaatatccgcctcctgggttcaagcgattctcatgcctcagcctttggagtagctgacactccaggcataagccaccatgcccagctaatttttgtatttttagtagagacggggtttcaccatgttggccaggctggtcttgaacttttggcttcagatgatctgcctgcctcagcctcccaaagtgctgggattacaggtgtgagccactgtgccaggccagagtttgtcttttaaaaagatttctcatatatgtaaaagcatttccaaggctgctgattgcatgtctttttattttttttaattccctacttccatttcacagcatattatactcccctttaagtactatatggtatatatgtctttttccacattgaatcacttggagggatttttgtatgtgtgtgtgatgtttttgtgtttgagacctctgtgatgtctttatttatgtctgaggtaaaaccaccattgagtttggccatgttataaaccagagaataaaaggatgaactaatcatttactttatttactaacaggtgttcaatatgaatgccccagttcctcctgttaatgaaccagaaactttaaaacagcaaaatcagtaccaggccagttataaccagagcttttctagtcagcctcaccaagtagaacaaacagagcttcagcaagaacagcttcaaacaggtacgaaatccagtgtcacctcattggctccttgctttccagcacagttattgacagtgttaggacagtttagacttcagagtggtggtgtccaagagtttctgttttagtagcagaccatatgaatttttcatttcagatcatgagttaaattgagtctgtacttgtatatgtgaattatgtgcaatttttggaggctttatagccattttccttttgtcactgaacttacataatatccctgttgcattgtataatttatatggaattaaatttgttacttgaattaccataaagtgtacttttttttttttttttgagatggggtctcactctgtcacccaggctggagcgcagtgccgtgatctcggcttactgcaacctctgcctcctggacacaagcaatcctccctacctcagcctcccaagtagcttgggaatacacgcatgtgccaccacgtccagctaattttttgtatttttggtaa

SEQ ID NO: 64920 - DNA, 1809 bp, Homo sapiens
tttaaattttgggaatataataaaaggcaatctatgtaaaaagatgacaccgatgtagttggtttactaagtaattcaagaggagcagtggctctctctttttctctaggtattccctagtgctttcatcgtaaaataggattctaacaactattaatgtatttggagtttcttaagggtgtaaaataggtcaagtaaagattttcaagagtcatacagctgcttttctctctgccccaaaaggggagatttgggttggccagcagcttctgacccttgttgttagtgtgtgggccttcctttgttctgttgccttcctcacctcccaaaggtacttttagcaccctatttttttctcctctttgaattataaacattgttctgtagtattgaatttttgaaaatttctagattctagaactctgtccattgtggatggagcttgtatatatgttagtgtgtaccttagtctagaaccttcaagtgggttgagtgccaatgtgagtaccatgtgattgttttctaaattggctatacttgccattttaaatactttgaaatggaatttggcattaagggctacaagtcgaaggcctctgctgattaaactatgtagttgatgacatattctaccatctagctgcttaaatatgagagagtggttttgtatgttttactaagtaaaaaaaaggatatttaaaagaataagaaaacttctaccactaaggagctttataatgaaaagaagtaattaaatggtacaaaatggtaatgtactaagagtaaatcttttgagttattttgggtctcttgtgctaaaaagtagatgcctttcagaagacgttaatatagcctttcaaataatttgtttggaaggatcaatcatgcaccctgctttcaaaggtttggaattgtggttggagaattttacccccaatagctgagtctaagggtaggagaaaggtaagagactttattcatgtgtagtttttcttatcattgtatgcaaatttaaggattaaactttaaggagactgtataagacacttcttaaactagaaagtgcgtgggagaacaaacggtaatgagctgtttatgtatatatctttttcttttttaaattatagtggttggcacttaccatggttccccagaccagtcccatcaagtgactggtaaccaccagcagcctcctcagcagaacactggatttccacgtagcaatcagccctattacaatagtcgtggtgtgtctcgtggaggctcccgtggtgctagaggcttgatgaatggataccggggccctgccaatggattcagaggtaaaaaaataaaaaaggaggttctaatgaccttttactagttcaaattattttttgatttgtaaaatatatcacacagtttttgggaaggatgtatctgcattagcctcctatgtgcaatttaaacaatgtatattttggtacaatttgtgtatttggtataatttgttatttaaataacagatcatggaatttttgttcatttggttatgtcaaattaatgtctaccactatctcctggaggataagtattttccacattaccaaaacttacggggattgtttattatatttgtacagatgtgtgtttacatgcatagatgggttaaaagtttatcttctgaggggcagttagtacttacagaaatttataaacagattggatcaagataggaaattggagattaatttgattaactagcctggcttataatttctagttcttcccgtcttcattaataaaaaagtaaaaattccttgtgaagat

SEQ ID NO: 64921 - DNA, 4323 bp, Homo sapiens
tgtctaaaagattaaggaagaattctgtattgagtgttagactgaaagaatagatgggtaagcattttttaaaaagtaccttttcaatactaactagcttgtcttttaggatggatatcagcagaatttcaagcgaggctctgggcagagtggaccacggggagccccacgaggtaatattttgtggtggtgatcctagctcctaagtggagcttctgttctggccttggaagagctgttaatagtctgcatgttaggaatacatttatcctttccagacttgttgctagggattaaatgaaatgctctgtttctaaaacttaatcttggacccaaattttaatttttgaatgatttaattttccctgttactatataaactgtcttgaaaactagaacatattctcttctcagaaaaagtgtttttccaactgaaaattatttttcaggtcctaaaacctgctaaatgtttttaggaagtacttactgaaacatttttgtaagacatttttggaatgagattgaacatttatataaatttattattcctctttcatttttttgaaacatgcctattatattttagggccagacaccctttaatggccggataagccatagttaacatttagagaaccatttagaagtgatagaactaatggaatttgcaatgccttttggacctctattagtgatataaatatcaagttatttctgacttttaaacaaaactcccaaattcctaacttattgagctatacttaaaaaaaattacaggtttagagagttttttgtttttcttttactgttggaaaactacttcccattttggcaggaagttaacctatttaacaattagagctagcatttcatgtagtctgaaattctaaatggttctctgatttgagggaggttaaacatcaaacaggtttcctctattggccataacatgtataaaatgtgtgttaaggaggaattacaacgtactttgatttgaatactagtagaaactggccaggaaaaaggtacatttttctaaaaattaatggatcacttgggaattactgacttgactagaagtatcaaaggatgtttgcatgtgaatgtgggttatgttctttcccaccttgtagcatattcgatgaaagttgagttaactgatagctaaaaatctgttttaacagcatgtaaaaagttattttatctgttaaaagtcattatacagttttgaatgttatgtagtttctttttaacagtttaggtaataaggtctgttttcattctggtgcttttattaattttgatagtatgatgttacttactactgaaatgtaagctagagtgtacactagaatgtaagctccatgagagcaggtaccttgtctgtcttctctgctgtatctattcccaacgcttgatgatggtgcctggcacatagtaggcactcaataaatatttgttgaatgaatgaatgaatgagtactggtggaatactccattagctttactcttcttttagctaagagaacatgagcaaatttgcgcatgacaacttccaggacaggggaaacttgaacactgaagaattgacctcttaagcctaataatgtggtgacaggctgcccacatgcttcttgacttcagatgaaaatctgcttgaaggcaaaacaaataatatttgaaagaaaaatcaaatgccatttttgtcttctaggtcgtggagggcccccaagacccaacagagggatgccgcaaatgaacactcagcaagtgaattaatctgattcacaggattatgtttaatcgccaaaaacacactggccagtgtaccataatatgttaccagaagagttattatctatttgttctccctttcaggaaacttattgtaaagggactgttttcatcccataaagacaggactacaattgtcagctttctattacctggatatggaaggaaactatttttactctgcatgttctgtcctaagcgtcatcttgagccttgcacatgatactcagattcctcacccttgcttaggagtaaaacaatatactttacagggtgataataatctccatagttatttgaagtggcttgaaaaaggcaagattgacttttatgacattggataaaatctacaaatcagccctcgagttattcaatgataactgacaaactaaattatttccctagaaaggaagatgaaaggagtggagtgtggtttggcagaacaactgcatttcacagcttttccagttaaattggagcactgaacgttcagatgcataccaaattatgcatgggtcctaatcacacatataaggctggctaccagctttgacacagcactgttcatctggccaaacaactgtggttaaaaacacatgtaaaatgctttttaacagctgatactgtataagacaaagccaagatgcaaaattaggctttgattggcactttttgaaaaatatgcaacaaatatgggatgtaatccggatggccgcttctgtacttaatgtgaaatatttagatacctttttgaacacttaacagtttctttgagacaatgacttttgtaaggattggtactatctatcattccttatgacatgtacattgtctgtcactaatccttggattttgctgtattgtcacctaaattggtacaggtactgatgaaaatctctagtggataatcataacactctcggtcacatgtttttccttcagcttgaaagcttttttttaaaaggaaaagataccaaatgcctgctgctaccacccttttcaattgctatcttttgaaaggcaccagtatgtgttttagattgatttccctgtttcagggaaatcacggacagtagtttcagttctgatggtataagcaaaacaaataaaacgtttataaaagttgtatcttgaaacactggtgttcaacagctagcagcttatgtgattcaccccatgccacgttagtgtcacaaattttatggtttatctccagcaacatttctctagtacttgcacttattatcttttgtctaatttaaccttaactgaattctccgtttctcctggaggcatttatattcagtgataattccttcccttagatgcatagggagagtctctaaatttgatggaaatggacacttgagtagtgacttagccttatgtactctgttggaatttgtgctagcagtttgagcactagttctgtgtgcctaggaagttaatgctgcttattgtctcattctgacttcatggagaattaatcccacctttaagcaaaggctactaagttaatggtattttctgtgcagaaattaaattttattttcagcatttagcccaggaattcttccagtaggtgctcagctatttaaaaacaaaactattctcaaacattcatcattagacaactggagtttttgctggttttgtaacctaccaaaatggataggctgttgaacattccacattcaaaagttttgtagggtggtgggaaatgggggatcttcaatgtttattttaaaataaaataaaataagttcttgacttttctcatgtgtggttgtggtacatcatattggaagggttaacctgttactttggcaaatgagtatttttttgctagcacctccccttgcgtgctttaaatgacatctgcctgggatgtaccacaaccatatgttacctgtatcttaggggaatggataaaatatttgtggtttactgggtaatccctagatgatgtatgcttgcagtcctatataaaactaaatttgctatctgtgtagaaaataatttcatgacatttacaatcaggactgaagtaagttcttcacacagtgacctctgaatcagtttcagagaagggatgggggagaaaatgccttctaggttttgaacttctatgcattagtgcagatgttgtgaatgtgtaaaggtgttcatagtttgactgtttctatgtatgttttttcaaagaattgttcctttttttgaactataatttttctttttttggttattttaccatcacagtttaaatgtatatcttttatgtctctactcagaccatatttttaaaggggtgcctcattatggggcagagaacttttcaataagtctcattaagatctgaatcttggttctaagcattctgtataatatgtgattgcttgtcctagctgcagaaggccttttgtttggtcaaatgcatattttagcagagtttcaaggaaatgattgtcacacatgtcactgtagcctcttggtgtagcaagctcacatacaaaatacttttgtatatgc

SEQ ID NO: 64922 - DNA, 2795 bp, Homo sapiens
gctgtaggtgaagaagtgctactggtgtgaagagaggaaaaggtttataaaagcaatctgatagcctcatctaatacacttctcagcttctgctactaatatcctacttttaacaagctgttctgaagcttaatccagttacataagcagtacggctgttttgagtagaggcagtggaagatcagcagtttgttcctgatcatctagcaaaggcatttgtgtattaatgcttatttggaaataccaattttaagtactgtgtttaatagggagacacactgtattaagcaactaaactaaggctttattcagcaaattagggtatcctttgcccagcatcatgccaagcactaggcatttagtggtgacaaaaattactgtggtttctgctttcattgaactgtctaatcaaagactgatgacaccaaagtgtagcagatgccatgatggagcaatgtggttgatggcagatattaaagccatgactgagtgtataccctagttaaaatgatcaggggagacttaactgaaaggggtaattgagctagatttgaaggatgaggagtagcagactagtcaaagaaagggagagaagaacatacctaaacatctgatcaccagtgactgagaaagttatcaggatcaagtggaaagagaaaggactagcagagttacaggttagagaaacaggtaaaggctactatggacggcataatagttgcatcccatgttttgtctcttaagaacagttgcaaactattgaaggttttaaagctgtgtgttgggccgggtgtggtggcttgtgcctgtaatcccagcactttgggaggccgaggcgggtggatcacgaggtcaggagtttgagaccagcctggccaatatggtgaaatcccgtctctattaaaaataaaaaagtagccaggcgttgtggcatgcgcctgtagtctcagctatttgagaggctgaggcagaagaatcgcttgaacccgggaagtgaaggttgcagtgagcagagatcgcgccactgcattccagcctgggcgacagagcgagacttcgtctcacaaaaaaaaaaaaaaaaaaaaaaaaaaaaaaaaaaaaaaaaaggctgtattgtttggggtggggttggtggctcacttaataaagttaccatttaaagaacattcaatgcaatgaacaacatatatggaccaagagatggtaaggaggcttgttggagtggcccatgtgagaaatggattccaacttaaggtgcggatggggtggtggtagtgaatggattctatggattccctatctcactggtcactactcagtatcctttgctgatttctccaggtcttggatgtcagacttcatctctagctgtgttcttccctgggtgatctgatccaatcccatgattttgaatatgatcagcattttagtcctgaatatttctaggccccaaacctctcaaaactcatattcaacatcttgatatgaatttctcaatattccaagtcaactccttgattacccaacaccagttgttcattcatccagttgctcagagcaaatgttttgggtgccatcttcaatgtacttttataacctgcatctaatccttaagtgagtccacgtggttctaacttgaatatccagagttatcttatacttctaactactaccacaactaccatcctagcacaggtgactacaatagcttataattgttctcctttttctacttttgccttcctgtgatttagtttttgcataacaggaagccttttaagagggcaaagcagattttctcatttccctgtcccccacaaactccagtggtttctcatcatgactagaattaaattctaaatctggtccttcacttgcccactgctttggccacactgactgctttgccaggactcccccatcttggagcttttgtatgtacatctttggcacggggaagtttttcactcatattctcagggctcattctttctaaatttcaggtccttgttccatccagtgtcaccccgtcagaggccttcagtgttcgtttctaaaatagtatccttagtcactttactcactggatacttctgcttaatagcatttaaaacttaacctagaattaaccacgaggggcaggaacattttggacactatcccttgtgagcagaatagtgcgtgggcatattcacattttgctgaatgaactaaaaaatttcatgatggatgttggattaaatgggtagtgctgctgatgacattaaaagtgtatctggggaaggggtttggattcagacatttgcggtatccaggaggaaacatcaagcagttgataatgttttttgaagttcagcgatctgccccaaagtcaagaatgcaacactatgtataggttgtccctgtagtcatgttcttggagttcactggaagcccagggggagtaatttcatttgacgaccatatacaggcctaatgggagcctgcaaagtacagcggccgcagtcatgggtagattacaggattcccatctgtaagatcagtactgtgggggtggagggccaagcgaaaccaataaaataggtctgttggccgagtttcctcaacttaacggggatcggttaaattgaacacaaatcgttggatccgtcgcgtttcgcgtaaccaggctgacgctgaaaaccctggacctacgtgggcaggccctggggtgcggacatctattttgcccttcttagccgaggtactttagctgggatatgaagagtgaagaggcaaaccgcagccaacaccca

SEQ ID NO: 64923 - DNA, 1266 bp, Homo sapiens
aggctctgcatccggacggatacctggcctacgccgtttgtcctccacccctcttttggggcgctccaagataacagaatcacctctccaatacgcagccgctctcggcgcgtgcttctcgagcgtcctcggggatttgcgtggctcgataaccacctctaagtagtgcctgtaactggggagtcggggtgaatgggtgggtgacaacagttgttttccgtggagcttgcccgcagtgcctggctgcaggtctgggcattatacttagggtaatctgattccagatccttccacgttcttaaatccttcactgtgcacattcctttatactctttattcagcagtcacattcaggacttggttttgtttgccagtgcacctaaaatggtgcctgccacatagatgttatgtgtagatagacgaatgagtgagcgaaaaataatcatctccttcaaggccttccccatccaggccttccatgacagcttcagcccatagtaatctcagcccttccttcatctgaccggtccctcagtatagctattttttttttttttacatctaattttacctgtgttcttgttcctcatctcattctcttaaataccttcttcaagaagaatgcaagcttgaagtcaagggccttgtggtactacttctggggctcccacagtagctagagcaaaaggcagcccccattaattagttgttgattgatttttgcgggatctttatgtggccggcaacacaaggtttacaagttgggaagattggcgaactgggaagagctcaggctttggagtcaggaagacttgagtgtgaattctgtctgtcgtttttctgcctcgggatatttgaattctttatactttctcctttacgtataaattggggtccttgacagtgacttagtgttttatagtaagacatatgctaaaatctgtttggattggaaggttagaagggacagttaaggtatggtaagtttcagtaaatgagctttatgtttataatgcagtaggtaccagagtttctaagtagcatgtcacttttacatctaagtagcatgttacttttacagtgatatttctgatggtttttttgatgtatttattgggatgatgcagtattttactgtaggtaatcacagaacttttttttttttttttttgagacggagtctcactctgtcgcctaggctggagtgcaatggcacaccatctcggctcactgcaacttccgcctaccggattcaagtgattctct

SEQ ID NO: 64924 - DNA, 1472 bp, Homo sapiens
gaccatcctggccaacatatgcgcctgtagtcccagctacctgggaggttgaggcaggaggattgcttgaacccaggaagcagaggttgcagtgagccgagatcatgccattgcactccagcctggcgacagagtgagactccgtctcaaaaacaaacaatgctttggatatttggatatctccttatgtattttagtcattcttctacttttttgaatatacaagtttctggcttttaaaaaatatttaatagaggtgaattacaggctttccaggctgagggaaggttttctcacctcccaagcctaaggtttcctgagtttaaaactagaggctgatgtcttcctgtggagctcgtagagggttaagtaagacaatacttatagatatgcctagcacagtcccaggccccacaaaaggcagccagctaatgttccttagacaatctagtgcgcatggccagttgtatttctttctcttttagtaataatttttcaccatgcatcggaaaaaggtggataaccgaatccggattctcattgagaatggagtagctgagcggcaaagatctctctttgttgtagttggggatcgaggaaaagatcaggtatggcctggtaaatgcttcctgaattactttttatcttgtccaaagaatcagcatgtttaagcactctgctgtttcaggacataatggcattaagatctctttggctggtaagatgcctagtgggaacctttctttatttcctggaagtggtgaattctctgtatttagattgattcgcagacaagctaataccttttgaagcctggggtggtgggttgaccacaaagtgaactgtatgtgacctggcttctagtccaaacctggtcattgctcgccttagaaccttgggcacttcccttccctggccctcagtttagtttccacatccgtcaaatgaggtcttaagcctggcggtctctaaagtctcttttgtgcctgaaattctgtgacttttttgtttggcaggtggtaatacttcatcacatgttatccaaagcaactgtgaaggctcggccttcagtgctgtggtgttataagaaagagctggggtttagcaggtaagctgggctcttcatgtgttttatccaacttacaattcctgctcattagttaaatgccaggaaatgattccttcacatattttttaagggtctttagtggaggtgctatctctgaggacaaatggagctgatatcctttcttcattcctgaaaataagtttcaaatcattttcatgctttttaagtcaccaatccaatgccttgccttctgcatatggttttccttcctgcttttctaggctgattaagcccatctcattgcaagttccttcaaactgtctttcctacctcaaatttattccacttttcactctctctctttttctccccttctttcatggagggggtatatgcctcatcc

SEQ ID NO: 64925 - DNA, 1329 bp, Homo sapiens
accagttcactgctgtatttgacagttggctatttgaagctgtggtagtcaagacttttagtcatagataacatactttcaacacaaatacaatttggcacaaagggatttcattgaggtatatgggatatttcctggaatccaaggggataagatttcagctctgctcacgggtgatctagagtcacagtactaatgctcccagctcagtttgtcatctcagtgtatctgctctatgcagaccaactttctcactgcagaccagctttctgttttctgttgtccccctagcagaaacaacacttgcgttttccttgtttcaggcccagccatgtggaaatcagactttttcccaaaattctggtggaaaaatgcccacacctggccagaggagggtggggttggtcatagcataatacaaagttggaagttctacctacaactttgtgtttggagaagtttggatggggtgggtagtgctgttccttggcagataaccaccatggcatcacctaagaaatagtctccttttttggcttcagtgtctttactcagaccaccttccggagctcttctctttctctggatctcgtctccttactctaaacctagctggcttgtgcgattctgtccttgagcctcttctaatttccaaatgtgctcatctccgatctgactctgaaagcctgtctccagctctggttgctttatgctgtgactaacctccctccttttctttgctcatgctgtctcctctgcttggaatgccacttccacctccccggtatcacctattgaaatcctgtttctcagggcctgcctcctccgtgaaacttttcctgagccccccagtcatacctggtggttcctctaccttcctctgcacttgtccttctcctataatgtttgccaatggatgcttttgctttagggtaaagtcacttacatactgtgacttacgttcatttttttttctttccctttttttttttttttttttttttttactttcaggtgataagcttatttagttaggagccctcttctatttatctttgtattttcatacttttaactgatttagcatgtttatcataggtactcagtatacattgagttggatgtgttgttaacaggctctaaaattattttaatttaaattagtaccagaggctaaacttgcccctgtcctgtggtcttaaagtgaagggattctgcctaaaggaaaccagacaatcataagagccttactgatgaaatgtgaaaagtgcagaaaacccaaagatgaaaataaaaaacatctcactgtctaggcattgtcagcatcta

SEQ ID NO: 64926 - DNA, 1053 bp, Homo sapiens
tcttatgtaagacctgcccttgaagacataatcccacattctcggggaggaagtcctctaggaaggatgaataaagtaacgtgccatcaccttgtctttcctaggatctctggggaacagcacagtgtagttgaagcattggcttatgactgagataatgaggccactcaggtttggtttcaagctctggctttggccaaatgtgagggttagctaccctattacccatcttttaaagcaaagtatttgctcaaggtcacagggcaaaatagcagagttcacacatagacttatcacttactccaagcccttaagcactctaatgcctctcatgcctctccactgccctccacctgaagtgggcctcacactttcaagttccctactagctctgaaagtctaagtgggtgatcactgagcctttcccctggttccagctctttagctgctctggttaactggctctcatgggattgggggtgtgtgattgcagtcaccggaagaaaagaatgcgacagctgcagaagaaaataaagaatggaacactgaacataaagcaggacgacccctttgaactcttcatagcagccacaaacattcgctactgctactacaacgagacccacaagatcctgggcaataccttcggcatgtgtgtgctgcaggtgggtggcttcctctaacctgtgattgaagtcagagtcttgagggttgcttgggctgcctggctttccactgggaacagatgtacagtaaggagaggagagtcccatgttccctatgcccaagcattattagtggaagtcctggccactttccaaagtacactcggtcacctaccccatataaaaagagaattttaaatcagcacttgtctagagacaccagaactgaagtgatgagttattataacgggttctaactagctaaagctgataaagcaaatgccagagactttgagtgcctctaggaccctaggtccttattggcattcaccaaagactttttttgtccagtgagcaatgggacttgttttccaaccggatatagacc

SEQ ID NO: 64927 - DNA, 3624 bp, Homo sapiens
cctcccttccccattctcccaaaaaagacaagacaaaattaagcacaaatcctcacatttttgtgtgtttatcatatacacttacaactgtgcccattattatgtcaagttacataccttgcaaaatatgggttgtctcctatactgctggcttgcatctcaccttggaggccaagaaagagggcattatgcctcattttcacctttactcagggaaatgccctgggttatcactgattggtagggagtggtcttctacttgctgccatgatcaattgcctgaataatgactcctgtgagcagtagctcccccatgtagtatagttttgtcaaacaggtttgagctataaatgtcagaaaatgtaagatgtttctgaaattcaagtatgaatcagtgaaggttggaaaatttgtttccaaataggattttatcagagacatttttgacatataaaactaacaacgtctctaataagagacccgtttttggcatataaaaccaggtattcgtatattcgagggtttggccctcttctgtggtacccctgtgtgtgtatcctgggaagtcaaggtgggaacaggtatggtcttggctttgtgctctgaagtcttctttttgccttatcacctggcttttggttaagagtcccttgggttgggccaggcgcggtggctcatgcctgtaatcccagcactttgggaggctcaggtgggtggtgagccaagattgcgccactgcactccagcctgggcgacagagcaagactccatctcaaaaaaaaaaaaaaaaaaaaaaaagtcctttgggttgctatttgcatgaccagccctttctaacgcccccttcttccaggattttgaagccttaactccaaacttgctggccaggactgtagaaacagtggaaggtggtgggctagtggtcatcctcctacggaccatgaactcactcaagcaattgtacacagtgactatggtaagcatctgttttttaacttaattgtgagggttcaagtaaatctgtttttgctgtgttctgctttctttaaagaattcctgttgggcagctccagtgagtagtcagcacagcctctgggctaagagctctttgattttaactaatgaaaaagtcactacagttaaatctcagggtccatgagtatgcctaggaatctctgaatttcacctttgttttcaggcacttgcaaattctacaccagtgagattcagatatgatacagcttttatgtagttaaattttctggaatgatattgtacaaggagcaatgccagtgcctaaatttgtgtattgcaaaaaaaggaccatgtgcagactgctcactggcccttatcctaatggatgacgaaggaacatttgccagttgtactccagtttggcaagaatttcaactccagcagagattgtgttctcccaaagcaaaagacactgactgaggacatggtgaggaattagggatatgtctcacctgatgcagagctggtctcctcactttatcagcgttgccaagtcagtgttcagaggcaagttttaagtcatgcccatgtccagcagctcagtaatggtggtcggattggacttagggtttcctgagctgcatttatctgatgaaatggactttcctcaaatcttaggggctgtttcctgtcattacttctcccttcatcacttgcactacagcccttttggcctcctcaaatgtcctcagacatgcccagcacacactcctgcgagggcctcggcacttgctgttcccactggaatgtgcttcctctggacctctgcctggctcgcttcctcattgcattcaagcccctgctcagatatcacctcatccatgtggtctttcctcacaccctgtttacagtaggcagctccgcctgtcactccttaaccggctttatttttcttcaaagcacttgacaatgacctaaagttattattattatttgtctgtcctcctgtactagtctctaaatttcactggagggccgatcacagtggctcacgcctgtaatcctagcactttgggagcctgaggtgggcggatcacctgaggtcaggagtttgagaccagcctggccaacatggtgaaacctcgtctctaccaaaaatacaaaaaaaattaaccaggtgtggtggtgcacacctgtaattccagctactagggaggctgaggcaggagaattgcttgaactcaggaggcggaggttgcggtgagctgaggtcacgccactgcactccagcctgggcaacagagcaagactccgtctcaaaataaataaataagtaaataaatttgatgggaacagagagttagttttctttgctgttgcatttccagatcttagaagagttcctggcatttagtaagcattccttagatagttgagagtgaatgaatgactttgtgctcacatcagtttgttcttcctctccctctgacatagctacctacttacccttcaggcctcagcttatctcagagaggccctccctcactaccctacataagtgacccccacttgctatccgtgcagtctatatttcatatgtagcatttgtcaaaatttgtatttatctactaatttttcttcctccatccattatactccaagtgccatgagaacagaggtcatgctttgttcattagtgtatgcacagcatatctggcacacagcatgccaattttatgaaataaatgaatataacttaggatgctaggaaaaatgtggaaaagtgaaagattttaataagcaacgttgcattcagtgtctgatcccagtttcagcaaataccatttggcacagcagtgtgtgtgggagtgattttgtttccagcaagattgcccatgtctccttggatagagctttgtatttggaccctggtcctcagcactgtttgcatgcctttgttaatggatgttgtctttctttgttaggatgtgcattccaggtacagaactgaggcccatcaggatgtggtgggaagatttaatgaaaggtaattctatagttccccccaattgtggggcagccacattgggagggacatttttatcttggactcaactgaaaactttgcttttatattggggaaagtagtacaatattccaaaaatgatgagattcttgacagcagcagcagttgtgagactaactggaagcagtgaaacgtggtggaaagttggagccaggaaacctcaattttgtcttgctgctggccttgacagctcagttaaaccaggttactctctctggttcttagcttactcatcttttaaatgagtgatttttctggatcactgcttcccagaagatatttcatagagcagtagtctttccaaactttttattatgaatatgacgtactggcatagtaaaaatgattaagagaaatatgggaggtggggtgagatgtaattagaggcagaaaaaggcgacaaagtgtttcttctgagcaaaggaacacccataatttcaaatatggtgtacggtttgttatctgaaattaaatttgtatgtatttatttttattttatttatttatttttttgagatggagtcttgctgtgttgcccaggctggagtgtagtggtgcgattt

SEQ ID NO: 64928 - DNA, 1059 bp, Homo sapiens
gcatgtgcatgggcctgggggaggggtgtccctccggtgtcctaggcctggcagggaggctgaggggctgaagcagggtgagtaggggtggaggaggagatttttggaggatctttcaggccactggcagggctttcacacttactctataacagatgggagcagtggaggcttttatgcccatagtctcctttcagcacagctgccagaggcatccccaggcttctttttaagaggatcgtctggctgctgtgttgaatatagactggtggagtgagggtggcagcaggaagactgatcaggaggctgctgtcatgatggaagaaggatagggtggtggctttgagcagagcagtagaggaggatagtggtgtaagtaagaaatggtaggattttatatatgttttggaggtaacaggattcgctgacgaatcaagttatcagggaagaattgaggaggctttggcccaagcagttgaacagttagatggggaagactaggtggaggaggtttggggcaactttaggcgttcagtttaaagtttgagatctgtagtgtacaaatgggaatgtacaggaagcagttgcatgtgtataaaagtctggtgtgggccagccaggtgtggtggctcacgcctgtaatcccagcactttggaaggctgaggtgagcggatcacgaggtcaagagattgagatcatcctggccaacatggtgaaaccccgtctctactaaaaatacaaaaattagctgggcatggtggtgtgcgcctgtaatcctagctacttgggaggctgaggcaggagaatcacttgaacccaggaggtggaggttgaagtgagctgagatcatgccactgcactccagcctggtgacagagcgagactctgtctcaaaaaaaaaaaaaaaaaaaaaaaaggtctggtgtggaccaggtgccatggctcacccctgtaatcccagcactttgggaggctgaggcaggcggatcgcctgaggttaggagttcgagaccagcctgcccaacatggtgaaaccctgtctctactaaaaatataaa

SEQ ID NO: 64929 - DNA, 2864 bp, Homo sapiens
gggtagtgtgcagggttggggtcagaggactggtatctcacgttcctagttctgagttctgagtgggttcagtgtgtgatttctctaggtcttgatttcctgccaggaaacagcagcactgtttccccaacccaccctaaaggtgcatgtttacttgtgtgtacacacagacacatatataccagggcctttgtaatcactatttacagttgaacaaacatgcagaggcaaagaaatgggagtaagaaactttacaactcagggcatgagaatgtgtatgaccagccttgctgactgagaaaagtacaagtttgacattttaatgattttgattaaaagaagctttctttggcttctgaggagctggttttaggtgtgatgttagtttctgtttttttctactgggtttggaagatacatgcagctgccaatagagtatgttcttccaacttctcggccataataatgaacctagaacttactgtgtttgcctttgtgcattatcttccttggtgctctttagagctctgtgggcattttatagatgaatcaacctaggtttggggagttccagtgatttacccaagatcccccagcaagtcagtgctgatagagctggggcttgagcttagctcctgactccttgtccttcgttcttcctgctgctctagctgtaacagtcagcctcttagccattagcatctgctgttagcatcctttatactcagcaaggcaaagctaacttggaggttagctttggccttggcctgagcaccgattgagctccccagcttcaccatttgaaagcgtcagcacagctagtgatgagcatgaaactacttcttgtagcagtgcactggattgggaagcagtctgtctgttctgcacaccgagggcgttgtctccacagtgcttctaagcagcttgctttcacagatgttggtagctaaatgtctggagttgctttactttccttcccaaaaggtgtcctgactttttcccttgctgttacctctggttatcacctttgggacaggagcaaacaaaaatattttcttttttaaattgtttctttaagatgttcctaatttcttaaaaatccttcttttattttgttctgtaggtactccaatatctttgttacctccccaagccctgataacctccatactctgtttgaatttgtatttaaaggatttgatgctctgcaatatcaggtaggaaatttggattaagaatttttattttggacctggtgtggtggctcacgcctgtaatcccagcactttgggaggccgacgcgggcggatcacctgaggtcgggagttggagaccagcctgaccaacatagagaaaccccgtctctactaaaagtacaaaattagccgggtgtggtggcgcatgcctgtaatcccagctacttgggaggctgaggcaggagaatcgcttgaacccgggaggcggaggttgcagtgagctgagatcacgccactgcactccagcctgggctcgaaactccatctcaaaaaaaaaaaggatttttattttgatacagtgctgggtttaaatccaagtgaagtctttagaatacttgcttactttcataatatttagtttctgaaacttgtttctaaagtttgtcattggtttgactccccaccaggaacatctggattatgagattatccagtctctaaatcctgaatttaacaaagcagtgatcagagtgaatgtatttcgagaacacaggcagactattcaggtgaggcttgttctcagaccctgatgtgcagggccagtgtcttgctgtatttaactggctctaagatgtttcctgttatagacatgtatgtcttgtgtaattgcatgtcttttagacaatggtggtgttgtatgctaaacctgttccagattttcagactcttctaaagaaaaacattcagcaaactaacaaatatatgtagttagattgaaaagttgtgtttttgtcctttgaatatggaataagtggggtggaaagtacgctgattaactaaaagagaatctttcttctgacatcagctctaactttgcttagttattgcagtttttgaaatgttgcatctgtaactagaacaataaccttacagcttaaatgaaaaaaagaactttgcaaaatgtgctctgaatctttgtggtttagccagtggcctattttcttttttaaacagtgttttcccaaaagttctaaaaatctctagcactctgtaagcctgaatggtctgcacttgtccaaaggctgcagttttgctaaatctctaagagaggcatgaggtgatgggcttacagacggactgagactaatgggctcttactggaggaggttcattgattatttttggaattgggttgggaagtgagccaggtgaatttggcagtttataccctagcactttatgcctgtcaaagcatatgtatatgcatgtcaagaagttatacctttttatcagaggccagattataaacaatgttaagtgtttatgcctttcaccttaattttttcttactagcctctttctagaatctcttcattctgtacatttctgctcacttttgctcgattcccccagctgggaggaggaaaggctgctgttggtgagggtcaggctgcaggcaatgagaacacggagacctgttaaaactcaagaaaaatacacaaaccaaagaaggaaaacatttccctgaaataccctgcctcgggccttgctccttcttgaatttgtaatcaaatactctctcatattaccagagttcttttgtctccagtgtgagcacagaggaggtgaccttactttatgagactccatttgtgtacctttcaggcc

SEQ ID NO: 64930 - DNA, 1712 bp, Homo sapiens
gaggtggtggatttgttttattttccaaactggaaatgttctcagttcatttccttatgcaccgtacttctaaaagcagctccgttagttgaccatttaactttgttccagcttcactaaaactgcctaaagcctttatgctaaaggctttacttacatcctttttccagtccttattttttaagttcacatcacagtcctgtgaggtgtatagaataatcccctcttgaagatgaggcgaaaagagattcagctccttgcccaaagatactaagtagatgagccaggacgtgagcccaggcctgggtggccccaagctcagccaccgtgccaccctgcctcctttggacaggtgcctgctatgctggaagttcagagatgagcaaggctgtcctgggggaagcaggggtctggtgtttcagcaggtggaggaaagcagctctctgtcccctcctagacagtggatttgggaccttgtgcctgattccttttgcctttgtttctagctatgagggcactggccggtcactgtccctcaagctaattcagcagctccgtcaacagagcgcccagagccaggtcagcaccactgctgagaataagaccacgacgacagccagattggcatcaggtaccccagaacctgacccgggtcccgcggttcacagcaaggcccttcagtcttactgatcctcgcttcccctgtgacatcatgggaagcaccaaaccttcccaccatcaggctgagaggttgagtccccaagaggagaagtagcttttttcggaggaacagcagtccagtgaccagatgggagccagactagggccttctgatggtggggcccttgtgtgtccttgtctcagggcatggttgcattgagatccctttggggttggtatcgtggcaagttgaatatccaccaaaaacaattttaaaccacccagtttaaattcttaccacacgtctctggccaccatgggacaaatataaagtgaaacatttttccttgcttttttagacaatacatatttaatcattgtttcttcttttgtgtgtgtgattgtggggagcagcgcggacactgtatgaggtttccctccaggagtcaatccgatacgcccctggggatgcagtggagaagtggctgaatgacttgctgtgcctggattgcctcaacatcactcggatagtctcaggctgccccttgcctgaagcttgtgaactgtatcctcctctgggtttcactggccctgtgaaaaggagaggggcggtgaaagaattcaaaggacttgagtcctttgtttcataggatgctgctctagagaaaggggaaagttgaacattttcaatttcctttttctcttccttttttttttttctttcttttttttttttttgagatggagtctcgctctgtcaccaggctagagtgcagtggcacaatctcagctcactgcaacctctgcctcccgggttcaagtgattctcctgcctcagcctcttgagtagctgggattacaggtgccagccaccacgtctggctaatttttgtatttttagtagagacagggtttcaccatgttggtcaggctggtctcaaactcctgaccttgtgatctgcctgcctcagcctcccaaagtgctgggattaccggtgtgagccaacgcgcctggccctcttcttccttcttttatgtgtttctgcttagga

SEQ ID NO: 64931 - DNA, 1711 bp, Homo sapiens
agcagggagcttcagcatttggcagtccccttttacttgatttgcatattttattacccaatggcttaggtgactgttccattgggacattgatgagttccactgatcttgctgtgtgtaggtatagagcatgtagctccatgcagtaacgggacagggtggaaagctgtgtccatttttaaaggagtgctttcatttcttgcctgcctactaaactgataggatgaggtgacattgcagttgtggcccggtggtgcagtttgacctgagaccagctttatagctctgggctacttttatggaacagtgaatttgagggtttagaatatctgagactcttaaaaacaaaagggttggttaaaaaggatactttttgaatgtctagatagtatttttatgaacagcttttaatggaaggcttgaagagttggtgttagaagtggtgacagtttttcctgaaatagcagcctcttatctgtaaaaagttcacttcctagctgtgaaataagtagtgctaaataaattctcttcttctgtccagcctcagtgctcggggtgagaggacagtaggcatttgaggctaagttccacttaacctgttatgaagagtctcaggcttgccaaaatactagaaaggtgctttgctggacttctgctcctcacttggctttggagaaggccatactgcagtcatcctgtggttctgaatcgaaccttttgcgtaaagggcaagaggaagagtgcttctcactgacccgtgtttggcttccacagaactctcccaatgatctccagatgctctccgatgcacctgctcaccatctcttctgccttctgcctcccgtgccccccacccagaatgcccttccagaagtgcttgctgttatccaggtataggagcagaggcgtccttgtggcagtgatttggggaaccactgaggcatcaggaattagtggcttaataactgcattgtgggagttttgaaactgtggagtcctggtctggaaccaaggggctgggtctgctgagacaggtgactagggtgcactggaagaggttagcgccactagacacccaaagctccactgttgacggacggggaaaagccagaaccgaccgctctcttattttgactcacagcttcttccacaaacagacttgtttgttttctccctttattacaaaagcaatacatggtgcattttgaattagaggctacagattggggaacaaatttttaatgcctagcatggatgtatttatgcatttctatatcacttttccttttcatatacatagtaatctgcttttatttttaggcagtgtataaaacactcataatctacataagttttaaagctgtgtagtatttcattatatacatgtaccatgatttgttcaaccattcacctgttagacattttagttattttgaacttgtgctgttctgtacagagcctcatgagcatcctgtgtcttgatggccttcacacacgcacagcatacatagagactctcttctaatgtggcttttactttttgggtcaggaggctgtcagtcttctgccctgtaacatggggcctggtaattaagctcctgttaagaatggatgtgtcaggccaggcgccatggctcacgcctgtaatcccagcactttgggaggccgaggcgggcggatcacaaggtcagaagatcaagaccatcctggc

SEQ ID NO: 64932 - DNA, 1001 bp, Homo sapiens
ctcaaaagagcggggggaatggatgtgtcagtgtcagggttaaacctgaacatgggggtggaaacaactggcctagttcgagaaacaagctatattctgtgagtgggctctgtatcagagttggcctttctgcctgcactgtcctgcttcccccacaggtgtgccttgaaggggagatttctcgccagtccatcttgaacagtctgtctcgaggcaagaaggcttcaggggacctgattccatggacagtgtcagaacaggtgacgggctttccctggtgtgtctgagggaagctggtggtgtccaaagatgtctgtgttgctaagttactggtttgtgtctcccacacagttccaagatccagactttggtggtctgtctggtggaagggtcgttcgcattgctgttcacccagattatcaaggggtaatgtgtcctcaggctcccctgaagccgtgttgctggcggtgctttagggtgggggtacttggtggctggaataagaagctggtcaagcagaagcaagtgaagtgtaggcacttccctgctctggagaattgagccagggttcggggtgggtgggtggacaggatgatggcatatgctcactcttcctttgtgagaacgaggacttgtgaaccagacctgcataacaaaattaccttcttagaacacctcactgagtaattggctgtagaaacttccttttcaggcaatggtacagaaactgcctctcatttgggcttgcccatctggagaccagaaagcacagccatccttaccctcaagtggctgttcttgatgagctagaccagtgttaagaactcgggtcacactactttcagtcttaagtgtctctgctttgacctcactcagggttttcattggttctcttgccccgtgctgtttgacagggagggaaggttctctagaagcaatgcaggggagtcactgtggcttagactgagagcagctctcttccctcggcctcttccccttca

SEQ ID NO: 64933 - DNA, 1069 bp, Homo sapiens
tttgtcacttcctaaggctgtcaggtgatagaacctggacttcatgctggatcacaggagcctgcctgtccctttgtaaatctgttgggcatttttttttttttttgagatggagtcttgctctgtctcccaggctggagtgtaatggcgtgatctcagctcactgcaacctctgcctcccaggttcaagcaattttcctgcctcagccacctgagtagctgggactacaagcacacaccaccgtgcctagctaatttttgtatttccagtagcgatggggttttgccatgttggctaggctggtctcaaactcctgacctcaggtgatccacccgcctcagtctcccaaagtgctgggattacaggcatgagccaccactcccggcctctgtcagtcgtttctaaactctttggctgtcttcctgcattctagaggtctgaagcagtgtgattctatgcatgttgaggtgttttgagaatgattgcttgactccggtgttctcatagtttgaaaaccacagcaataaaccaagaaacctctcccagtttttgttgtgctaagtccagagtgcgctgcggcagggtgcttgacgatgtctctctccctctgctgaatggactgtgttctctccttggcatcttcccaggctgtcagcttgttggaagaggtcatcactccccggaaggacctgcctcctttactcctcaaattgaatgagaggcctgccgaacgcctggattacctgggtgtttcctatggcttgacccccaggctcctcaagtaagtgcctgccctccttccacggcatcactccttggcattgagaaagaagagttctgtgggctgtgtgtctctgttggtagctggtatcggtgctagcctgctatttgtggcgtgctcttcctggctcttgcccttgtgtgtctatcagccactccccagaggccacacacagtgacctactgtctttgtatctttgcaggttctggaaacgagctggatttgttcctgtttatctgagacagaccccggtgagtgaggcatccagcagaggagaagtttaggtt

SEQ ID NO: 64934 - DNA, 2864 bp, Homo sapiens
atagcatgcatatatgtgtatatgtgtgtgtatatacttttttgccaattatattttgatggagaaatccgtatatcttgagctgggcagagcttacacactttctgtgacaccaaatgaagtgacaaagcagggaaagagtgtagttgtgttcccctaaccctgggccacagggagcttttccttggtccatgtgttcagtatgggaactgagcaagggtcctgtggcagccgtcccctccccacacgtggcctggagccgccccttctatggcaggagcaggtttggtgcccctctgggccagggctgtgtggtatggctgccaggccctgttagatgctcctgtgtgttagggtgccgcctgggggctgtgtgctatctcatgagggcgccgggtgacctaacctgtctagctctctatcccatggacagccctgagccgggaggagctggaagcactcttcctcccctatgacctgaagcggctggagatgtattcacggaatatggtggactatcacctcatcatggacatgatcccggccatctctcgcatctatttcctgaaccagctgggggacctggccctgtctgcggctcagtcggtatgctatctgttgcttgcgtggaggagaagcgaggattgtggagctgttcatttgctgggtgttgggttgggcacttggacataattgtgtgcctttaattcctcatacatctgataggtgggtagtggcatcctcattctacaggtcaggaaacctgggctctgaagtcgagtaatgtgtccagccatacaaagtgagagagctgcagcttccaccccactacgttgccttgacacttaactccaccttagcagaggttcaggaacatcccaaacttttaatgtagttgtgaagcaggtatttgtcaggataaaagttactttggggattttaggaagacagcatttcttggtggtctcagtaacaggatgaaagagaagatgccaatatacacagtgctagtctacctttgtaccaatagctttggtcaagagagtactctggttcttggcgccattttaatgggcaagggcgtgtcctagaggcccacccagcagattttccatcctttaggctcttctcttggggattggcctgcagcataagtctgtggaccagctggaaaaggagattgagctgccctcgggccagttgatgggacttttcaaccggatcatccgcaaagttgtgaaggtaacctcagcctgagggcaggggcttgatgtctctcaaatagtgcaacaaacccactccctgctcccgagatgaacacatgttagcatttagctgtgtttgctgcatctcgtcacacacacacacacacacacacacaaatccaggacttcagaacacatgttagcatttagctgtgtttgctgcatctcatcacacatcacacacacacacacacacacacacacacacacacacacacacgtgcgcgcgcaaatacaggacttcagctctaaagaatctgtgaagttctgtgtcctctcccagaggcatccctattaggaatttggtacatatccagtctgtgttcttcagctcttcccgctaatatccacattcctaaactgtagagtgttgctttgtgtcttcaaaatgcacacctttctataagacaccaagtgtctgggtcacgggtgactgggtccctgctgctccttcatcttctgcttctctgttggttgtcttttgtagctatttaatgaagttcaggaaaaggccattgaggagcagatggtggcagcgaaggatgtggtcatggagcccacgatgaagaccctcagtgacgacctagtatgtccctgctcatggcctcgggagtcccagcatttccatcagttgccttaggctgtgaattcagactgtcttccccttcccctttagaaagagtcctctgcactaattgagctaagtgctattctgtaggtttaattggacaaacggacccagcattgtctgagcacacacaggcctagagttgtgcctcccactgattgtgtgtgtgtgttgtgaatgtaggattccagcatctgttggaaatgttttgtcttttttggtgacttcttaaatgcatagtttataacagagctaccttaaaataatcaaagctgcctacaaggtttttgcaggtagatggaagagaaggaaatgttttctcatcattgtgccattccaccccagcttcaccttttcctgtgtttggttcaatccttgactctgacttagtctctttatgggtccttaaccacaggatgaagcagcaaaggaatttcaggagaaacacaagaaggaagtagggaagctgaagagcatggacctctctgagtaaggcttgtgggaagcagagggtttgccttggcttctggggccctaagaatctgcctacacgtttcttctaatcatatcccacgtgccctggaaagtgtctttcatgggatcagttttagggatgctaacagttctatttgaccttctaattgcctgtttgtataattttggaagagttgggttccggagactagtgccgccactttgacttacacattgcactctctgatccccaaggctccaggtcacacctcgggtccttccaggagtgggggtgccgattggatgagcaggccctttaatggttacttactctatttggcttttacgtgtgactttgtttgaagaaaggattctactgctaaaaccaaccaaacaagcaaaacaccccttgctctaaaaccgtctgggaatcctagtcccttttgtgcttcagctgtagtggtgctgcctctccctccactgcctggattgatgtg

SEQ ID NO: 64935 - DNA, 1025 bp, Homo sapiens
tgctgggtatgtgaggtggaggtggccaggagtccttggacagagaatcgagctctagtttttgccctcagctttgcaatatcaaaaccttgatttgccaggactgctaaatctgaaagagaagggagggaggggagaggcacagttcaagggcttgtggacaaatgcttggaggtgggagtgagtgagaagattgtgggggtgacaggaagcttctttggtggatgttaatgagagtcatgtgggaagagccaggcaggctgccttctgtgcaggactgtcctcactgacccctgccagcaggcctggtgaccctcgctcctgtggagcttctatccatagagctaagcaccatgtctcttggccctcctgcatgcttgtcccctctgtcctttctgctgttcaaatgctgacacagctcagcctggctttcatgacaggaagtgtctgataagaatgttgtcactgtcgttattttctcttaagcagtcccctcttctttctagcaggctttgatagttcccttcttttttttagatacataatccgtggggacgatgaagagtggaatgaagttttgaacaaagctgggccgaacgcctcgatcatcagcctgaaaaggtgagggcccagggtctgatgtgcatctggcggaagaggcattctggcctctctgcttctctttaactttgactagaaaataggaggttggagcaaaagctttgacagaaaagtcatggttcttccctttgagagtcccctggccattacccttgcagtgcatgtcccacagaccaggagggccatctcttaggcatggatctcttcactctttgtatttgtcagccatgccagggcactgggcctgtcatggagaagggcttgagggaacagtccagaagctgccactggctgagacttgcttatgggctttcatcattcagccctcaggatgacagcataagggggctgttttattactgtcattgctttaagatgaagtaacaaggctctcaggggttaag

SEQ ID NO: 64936 - DNA, 1047 bp, Homo sapiens
atggcagggttttccttggagtctcatgccttgtattaaggactgtcttcagggtcattgggatgaatatgtctagtttccagagtcactgcagtggtgagagtggtggtggggaatccttgtggtgccttaggtctgtcttgggagaggggagcagagtgtactgcaccctgaggagaacccggatttcaggtgttaagatcgagatttgttcttccacagactaagagctggctcagggcaggagctggtctgtatggtgtgtccccagccccagcacaatgcctgccccctaataggtttgcagagaacattaatgtccaattgggtggcctacatcaagtttcagacggtggaaaccctttttgacaaagcaaagcaagcttaaagcagtctcagatgttcagatctgtacatatttcattctttctatttttgatttttctctagtgacaagaaaaggaagttagaggccaaacaagaacccaaacagagcaagaagttgaagaacagagagacaaagaacaaaaaagatatgaaactgaagcggaagaaatagtgaagagaaactcgggcatctgtgtttgatcatgggaagatactctcactaactgaaccctctctggctggactgttaaaagcaacgagaggccccggcacacctggaagctggccgcgaattcggcctctgggcctgtgtgtctgtgagctcaacctggctaaaggcagagtcactcccaaatgggtctctttagaacttgatggctgggcactgccatctctagaattgccacgagtctctctcttcctgcccagtccagggccctcctttcctataagttcatattttgctttgagccagctttttagtctcattcccacacatgtggaagccacgttgcctctcgaccgcctgaggcccttaagtacatcgctttctggtggtgcccaggaggctgctgctgggccgctgggtctctctttgtggacttgtacctggagcaggaggaactccagtccgtcccggcatccatggcagcccgcggt

SEQ ID NO: 64937 - DNA, 1013 bp, Homo sapiens
tcaggacatgagcctaggggtctttcgtttcttgggactgaagtttcctggccacagacctctgttaggtctgtaggaaattttgctggaggcagggagggggcatgaaaataatttttatttattttctcaggtgggtgcctgaacctgcctttcaaagagggttttcttagaccgtggccagaagcagagtcacatgctcaaatggtcagagctggatgggactgtgcaagttgtccaggcatatcatcctacaggtaaggaagcttttgtttagtgtctctaccctcaaagtctccccggctggctctgctttggggtgcaaggtgagggctctggaggtagactgctctgccctgacgctcaccgtggccttgggcaggttacttcatcctacctgcccttcaggtccatttctgcaaaatttgagtggtaggaatagcacctccgtcacgggactgtggtgagaagtgggtggggtagaatgggaaacgtttagaacagtgcctggcacatagcaagtgcctctgggttctgggcactcatcagatctaactagaggagccgctcaagttcagttacatgccagctctaagaatactcaataaggactagctgtggtgttcttttgaaaacagacagggtcttgctctgttgcccaagctggagtgcggtggctcaatcatagctcattgcagctttgaactcttgggctgaagccattctcccacctcagccttccaagcagctgggaaggtgctcaccaccacacctgcctaattttaaaaattatgtacagatggagtctcaatatgttgcccaggttggtctggaactctggcctcaagtgatccgcctgggcctcccagagtatagggattagaggcatgagccaccacacttggccaggactggccatgttataaaaccacaacctaagctagaaaaggagtctcccttggccagcgaagagcatgcattttgcagtcagacttgtctggctctgtataata

SEQ ID NO: 64938 - DNA, 1043 bp, Homo sapiens
tctttgggatcttgaggatggtgcacacatcagtcattctcagccttgctccttcaggccctctcaccctggagttctcacacagccacgctgttgcagatgggagtttttaaaggggttttccagaatggccagacatgcaggtccagctcatctcagcctgcccagcagactccatggaattatcaggaaggaaacagtagcctggaacccacagcccatggaaggcatgttcctgagaaagtccatgaattacttctctttttaccttcccacagatcccaggctggggaggtgggtggaccaaggagtaaggcctgaagggatcagtttgggggccttgtttgtacatgtgggcaccagcccctccccagaggcagagggctaatctagatttctgtatattgaaagaggcagagggctaatctagatttctgtatattgaaagtattaatcagttttcattcaggaagcagcattctgggtattgtaagcaggagatgatttaatgcagggagttgggggttcacagaatcattggaggagctcgtggagcagggtgtaggctgagcatccaggaatgacgaactcgcccattaggggagctgctccctgagacagcgcctggaactgtgagtttgaacaacacctctggagctgcagttcaggagtaaagctggaatcaagaaggcgttgcagccaggcacggtgcctcatgcctgtaatcccagcattttgggggccgaggttggcagatcgcttgagcttaggagtcgagaccagcctgggcaacatggtgaaaccccatctctgctaaaaatataaaaaattagccaggcatggtggtgcatgtctgtggtgccagcaatttgggaggctgaggtgggaggttaaaaaaaagaaaaaaagactttgctattgcttttatcatttcaccatcactaccactactctgaagcctcagataggtggaaactggactggaatgttctgtaggaaaaaaaaaccctcagttttcatgacctggtttgctagcaaaaaca

SEQ ID NO: 64939 - DNA, 1036 bp, Homo sapiens
tatcttttcatgtctgtcatgaagcctagaaaatacaaagtggcagggagcaaaaatcaccctaggagaaggttccaagcaagccgctttctttgccataagtgggttgccacgcagtgtaagtttttagacgtcacagtcagagttctctgcagccatttgtctttctggtctgagagaaactgaccatagcagggcttggatcgaagaagccggggacctccatctccagctgccttcgtggtttttctgaacttttgggttatctgcttctgtttggatgggagattccatttctttcttgattttcttgtctacatgaagcaggaagtgtgctgccaaagggttctccaccaataacaataaaacaacaataaaaataattaaagataatgacttctaccttgttgagcctttgaaatgttatttcaacaaggtttctctttgatgctatcacagactctttgatttctcctccttgtggtcctgtggttctgccaaaagttatgacatttagacctggagaaacgggagccaggtttcaacttattagcagccaacttagctgtacaactggctgctgtgaggcgggttggctggtggttgtgaggccagtttctaccacccatggagcccaagggcagggttgggatctggcatttcagggtgcagactcctcctgtcctgggaaatgtggggcagagtttgacggcaggcagtagtcctggaaggaagagtccacaggaggcggcccgtaggatagaggaataataataataggacattaattataacagtgctatgttcagccctaccaaatacttactctgtgccaagcaggatgttaagtgctttacatttattgtttctttgagccctcaaaatcagtagggtagatactattgttcccattttacagatgagaaaactgaggctctgataactacgtaagggatttctctttctctgtaaggaatcgccaggggtggggcttaagctgacctccgggggagcctccctgagttctcaggcctaa

SEQ ID NO: 64940 - DNA, 1057 bp, Homo sapiens
gcgacagagcgagactccatctaaaatatatatatatatttgccagaggtcaacaggctagtctctagtccttgtgcagaagcaagatttgaaatgggttgcttgttctcacacgtctctttgctggtcagtgtagagataaagaaccctctccccacctacagtgttcttaagaagccatggttatcttgggtgtgatgatctttggaaggtagaaagttccactggcaggcatttcctcctggagtcctcagcctccttatcaggctcccagattcggactgtcagtgaggtgggcagggctgtggaggggagaggtcctgtcacaagagacacccagcttcctcccagctttggtttacctcaggcccggcctgaggtgaagtcctcattaggttacctcccgcctagctgtgactgggttaagttgttggacttctctaaggttcagctccctgttctggaaaatgaagacaaggactgtgcctgtcctgtagactttgaggattagctgaggcaatgcccgcatgagccacttagcttgatgccacataagtgcccaggagacatcatcctgtggtgattagttagatctgtcatacacccttacaccaggaagaccccacctggtcattcttttccccacaatcctcttctcccctaggataccaatgcctcttcttccctcagagttaatgcagttacaactattctagaactttctgacagcattcctactccttcagccacccccctccatcgccgggcaaaaatgccatggtccagcagccactcagctcagtggggtggtacatacaggggcgcgtgacaaggatgaggtaagtgctggatcaccaacctccctgcccctcctgtggctgcgtgtcagatactgtgtgccaagctcccttcagccactatctcatgtaaagctcagaccccacgatttccggagtcctagagtagtctgggtgtcctcgtggtgggaactggctgtcctcctggccccttgctcccaccctcctgccttcttggttcagtgataaggccttagatc

SEQ ID NO: 64941 - DNA, 1083 bp, Homo sapiens
tgttatttcagtggaggtgcagaaaattatatgacaaaaccgggtttgtttctctgctagaaacccaaggctgaaatactgcagtattccttcaagactgactcagaagacgaaagggagcctttcccagaattagggggcattcaccagggaccagaagggaggggggagaaagacaacattgcactggtcactagtggctgggccagtggtttattttctgtctgtgttttattaagtttatgttttccatctgactgttcctcgtgtgatttatttgtctctaggtgccccccgccccaccccccacaagtagatgataaaaccgacggcagtgtggacaacacagttgctgagactctttggttggattttacgcaggaacagaaataggtgttgggctagtgccagggtgttttgtgaggacttaatctccacctagtgggttctgcaccattttggactgaatgctgatgtcctgaaaactgggctgggtagtgatgcccgaaaggaaatgatcaggagttgggttttacttaagaagacatttggaatgtccttgaggccattgtgggatcacatttctccccctctatttttatggctcctcggataagaccggtagaggaggggaaaaaaaatgtatttaatttctgggcgggcctggtggctcacgcctgtaatcccagcactttgggaggccgaggcgtgcggatcacttgagctcagcagttcaagaccagcctgggcaacatggtgaaaccctgtctctacaaaaatataaaaattagccaagtgtggtggcacgtacctgtagtcccagctacttgggaggctgagacacaagaattgcttgaagttgaagttgaacttgagttgaagttgaaatcgcttgaggttgcagtgaactgagattgtgccactacactccagcctgcgcaacagagcgagactgtgtctcaaaaaaaaaaaaagaagtttttaatttctgactcacttttctaatttttagaaatataacttagaaccatggagcagcttaaaggattttgaatcctgagcaccttgtcctttttgatctga

SEQ ID NO: 64942 - DNA, 1905 bp, Homo sapiens
ctgtgacccctgagttgtcaattcaaagccctcccacactggtaatacccaaatgccatttctattttctgagagctcaatgagtaggtggattaaatgtgaaaaggtttctgttcaggtatttgacagtggccttgattggagcctctctaccgtctagcaatggccctgttgtgtgacttccaggacgacagctgtcttctcgggccatgacctcttccacctgtgggatcacaggactgtgtccagctgacccaatgagaatggtataagtgctttatctcatagggagttctgagtcaaaaattttggtgttcttgacatgaaagattggcagagtgtattattattccttagtgttctgtgcataattaacaaccacccttaactagacctggtagcccagggaaactggtcagaccagctagtgaaagcaggtggaaaatgatctcgagggaagcacggagtcgggatccacattgagtggaggtgacttgtagtggattagggtgctcataaaaaccgtggttgcagttggtaccagtgtcatctgtggatatttctaggcaggatatcaagggtcagcttgctactttagccccctcttaaggcaggatacaaaaaaaaaagagagccctgtattcaggggaggcatgtgacatgccatggtcccccatttcccctgccctaaacatctctggagaaagtcaagtgtgtgtggcttctacagcagggctggatgtttttccctggggtaggaggggcatttacctgcttttcttcagccattattaatagggctcattccaggaggggaggagaatggtgcctgtaactcagactccccagcacagcctcggcctgcaggcttcagccctgttggagtcagggcttgcgtaaggaatgctgtcatggatccaagccagatagattacaaatgatggaatctgatgtttcctgttgggtttggggaagggattcaatgtggtgtgggcttaggtccccacagtttacctcagaaatagtcaagatgcagggagctgaatgaggactctcgaggcagctttgccagcctggagcccaggtgagtcactaccacctcagaaacatccttcagaggccaggattcaggccccaggcgggagtcggagcatccaggctgctggtccggttctctccactgacgtcatcacccccgcttagtctggaatggctggcaacctctgcctgaggatgagagctggctggaagtggaaaagcaggaaatgtttccagattggaaactcaaggcacgtttgcgcaatactgcactcggccaagactgtgtggctgacctgcatgcctaatgggatcccaggtctgaaacagggttctgcagaaccattggtctgacctcatacctcccacctagacacaatgatatcttcttggccaagaaaaaatgacctgtatttttcttttcttttttaatgttatccagctgaggtgtgcctttaaaaaaaagaaaaaaatatatacatacacacacacgcgtgtgtgtgtgtgtgtgtgtatattccaatccactacttaacgcagggatgcaaagatcatattaaaacggctataaccagaaataagacaactgaaagaatcatagtattaataaagggcaaactgagagtccaggtgagaggaactgcagtctctggtgatggagtgcagcctggtggtttagagctccaaaatggaggcccgtcagcctgggtttgaatcctggctctgtggcttactagctgtgaccttggcttctgtcatcttctgttcttttacttattgtaagaaagggtgatagtgccacatcatgaattagtctaagactcgagtgcacttccacgcaaagtaagtccttagtaactggtagct

SEQ ID NO: 64943 - DNA, 1056 bp, Homo sapiens
ttgataagaacattaaatcatccaaatcctttagggttacacgggggtcatttgctcattaatcaccagtggcctgagaagctaaaggtttcccaaagctgagccatctctgccctacaggatgatgtgacgtggcccattgtctcagttcagctgagcatccctgggctgagcccagttcttctatctgagacatggattgggccttacagcccagagtgaggtctctgcaccagcagcatcggcattacctgggggctcgttagaaatgcagactctcaaaagccccaccatagacctcctgtatcagagccctgtttggacaagatcccagggattcatgtgcatggcacagtttgagatgctctgcattatcaatccaggtagggaagccctcctttagatttaccaagaagctggagaactcagcaacttacttccataaaactggctagtgaagcattctctcttccttctggctttagaaaggatcttattaggagataagaaagccagttggaagcctggttgctgagagtaaggaaccaaatgtggcccctgggactaagtttcctggcagctgtgtctccttattcttggggaaatattttgcagttgaaagaccacctacaaaaaatagtatcctcaacggtcaccttgtgatgctaccctctatgctggctggcatttagttataatattctgtcctgacccatgctctaatttgcctttgattaaatttggaactttgaagcttagatttatgagatggtattttttctcaatatatactttgatacttgctaaatggatatatgctacttctttaatcaagacttttttacaggctgggtgtggtggctcacacctataatcccagaattctaggaggccaaggtaggcggatcacttgaggtcaggagttcgagatcagcctggccaacatggtgaaaccccatctctactaaaagtacaaaaattagctgagcatggtggcacgtgcctgtaatcccagctactccagaggctgagacatgagaatcacttgaacccagg

SEQ ID NO: 64944 - DNA, 1366 bp, Homo sapiens
gcctctccaccctggggcctcttcttcatctgctccagttccctaggtgaccccatctggctctgagagtcacttcgcaagtactaccagccaggacgctgccctcagccaggacgctgccctcagccccaactctcctccagcctcctcgtgtcccatcaggtgtcccctgcccagaactgcagtcctagtctcacctcccctgcttctctccctgggccccccctcgacatcagtaaatggcatgatttatagttactctgctgaaaacctagcagctatcctcgattcttctttctcacacaccatacccagtctgtgagccagcctgtcaactctgccctcaaaaaacactgtttccactgctgttgctctagtctgaggcacagccctcactcttccactgcatccatgacctcctaacctgtctccttgaccccactcttgctcctcaaaaccagagccaggttttaaaagttcaactcttaccatgccactggtttgttaaacttagaataaaatccaaggcccttccacagtggaccaagtcatttgtgatttggcccctaccttcctcagtgactcctttattaccaccctctgggggtttgtacctgctgttaccttcacccagtggccccatcacaggctccctgacttagtgcaagtctctgcttcattgccacctcctccaggcagccctccctgacctccctatgagggagctccactcccctgtccctctccgttcgctttcctggcttgacttttcttcctatcaacaactgctatctgccatacctgtattttcttattgtccatcttccacccactagaatataaggtccttaaggcaggactttggtctgtttcatatcaactaagtaccttgccacataagaagtatttcataagtatttgttacatggacaaaccagtaggcaaaggtaagatgactgactggattcggaccacagtagagaccagtggtcctggccagccttcacatggtctgtgaaggctgccatcttcacagaccatgactaaaagaacccgaggaaaactagctgttttcaggccaaggccaacatcttaacactttgcaaagtaggaaagatcatctttgtgccataaggcatgtagcttctgcagctgttttagaagtttccaagtgagtctttgctaaatcactcccagtcctctcagagaacactgcggcttttccttccctcattactggggagggagcagggtataggatgaacagaaggaatttagccttggatccaggggacttaggccagtgtctcaagcagaatgaaatacactatatgcttgacttaaggtctatttagatttgctcctc

SEQ ID NO: 64945 - DNA, 1453 bp, Homo sapiens
cctctggtgttgagcacggtaatgcccgttcatatcttgatataacctctgacctgcacccttgtgtcataacacattttgcaataggagtccttctggaagtcattggcataagggattgttagtgatgtattaactctaagtggatgtgactgctaaccactgaacccagctgactgtatccccaactcaatttccttcaacaaggtccccaaaatgcccacccaatgcatgggaacatgtggtcagttgcagtggaaagagacaatggtatcaactgacagtggctaatcttactttggcaaaaaaacacacgtccatgtgaacacattgccaggccccctccagaagttttggaagcaacctgtataagtagaggctgcctgaagtttacgcttctttggcttcgtagtaaatctgcctctgctgaaatctcagcctatcagaccatagaggcattcaggattgcagcacattcatgccttgtaagtgccaaaacattgtcattgcaataaaattttaattcttcgagaccaaagcatttgaaaagcatttcacacagtttcctgttttctttgcttttctttctttctcttttctttttttttttttttttttgagacagtttcctctcattgcccaagctggagtgcaatggcatgatctcagctcactgcaacttccacctcttgggttcaagcaattctcctgccttaacctcctgagtagctgggaatacaggcgcctgccacccacgcccagctaatttttgtatttttagtgcagacagggtttcaccatgttggccaggctggtcttgaactcctgacctcaggtgatccacccgcctcggcttctcaaagtactgggattacaggtgtgagccattgcacctggccagtttcctgttttcttaaacagtgagtgagctgcatagatgtgactatgttcttgatgactcaagatccatgagtattcttacagtgcttgtgccctcagggagtgaccccaagatgtgatcgaatgttggtcccaatattaaatggccccacactgcagtcttaagtttttatgcctgctttttgtgttgtaaatgtttaagcccttctaatgctgttagctgtcatttcttgctgctttaaacaagctgtggcctgagaaataaaatcagccatcttctttcagtcagtaggctgttttgaggacttgttatgtgtcaggtgatgggctggaaatttacatatagtagcaatgactaataatcacaaacatccattgcatgcttgccctgtatcctgtattccaagctcatcacatgtgtccacacatgtaatcctcacagtaacctaggaggtcggagctactgttgttatccccgttttgcagatgaggaggcccagacacagagaagtgaagtaacttgcccaaagggtcctgattccaaaaaatccac

SEQ ID NO: 64946 - DNA, 1130 bp, Homo sapiens
cctgacaagccagggtgtgcatgaggtctgtcagggtcccctggaacgagatgcagcatcctggagccagtgaaagctagagctctgaggagccgcctcttctcccaaggccaagaaggtcagaaactgaaggcagtggaaggggtcaggctgtgcatacagcccctttgacatggagaaacggcatctctctgtggtttcctcaggaccagcacaagtctgactggtatcctccatcaggaccttggctgaagagagggaccaccggggaaattgcttcccttccaaaaacagcacaaatgcacacatttgctctcacagctgtttttgagtgtgtcgtgtggggagctgtgcaagggactaaggatatgagatgcaggtgaccatcagtggattaatgaaggagacgcacattaaagagcataacctccatgcagtccacccacggaggagagccatgttccttcttaaacaggggtccgtgacccagttgggtaggaggacttgactagcagagggagggtgctggggggtgagggaggtgcaaggaaagggaacagcatgtgtgaggggccctgaggctgaaaagaacaggaacttaaaggctggagggatgcagcggaggttgatgtggtcagaactgtgctctgaaaggagggcttgctctggctggagggataggtgtgtgaggaggaaacccacaagggcaccatggagtacttcaggggagaggcaaggcaagcttggggacgtgagggtggcggtagagagaagcagcagtgacagatttggaagttgattcgaaactcagagggttgcagggaggggtaggtgaatcgggactcacatttctggcactcacagcagggtagatgctggagctttaattgagagagggagagacacaggacaggggccaagtttagggtatctgtggaataataaagtggtaaagtgaaaatgggataatggatctgaagataaggatttgaaagtcatctgcatatggatgagggattacttctcgagcccttcctgggctctcagtgctttcctccctgagctcctgtcattgatgagcaggagacatacatactgtgctcctcccccttttagatgcagggcgattg

SEQ ID NO: 64947 - DNA, 1021 bp, Homo sapiens
cctgggtcatctgttgtagagtctgaggtggtgtctactccagcgctgttcctattactctgtggggctgacaagatgttatcccccagctccaggggccttggccatcatccttgctaagacagtgccagtctctggctccaggatttcagtctggaaagaggtgcctttgacattacagctgactcaggctaataactgggcagttcctttgaaaggcatgcaagcttccttccttagccctgagatgacacttcttggtatttctccatcaaaacatcttgtttctccaaacaggggggtttatagattacttagactagtggttaagctgcccaaggatgacctgagagcaacatgctggatccttatcacattatgggtcacctcccaactcagaacattgagttctgactccccagctggcattaaatggaaaataatcctctggactcttggactctgtacttactggctgattcacagtctagtaaaaccaccttctttcaactgcctagaaatctaagttggaatttttattatgacgtcattgtgtatttagtagctgagactcaggtccatcctggccctgccacgagccaactgagtgtccttagaccagtcccttggtccctcagaccccaagcttcctccttgggaaagtgttgagaatgacttttctagatggtctctgggttgcctttaaaataagtcattccttggaatcatgtcttttgcagtaacatgggtggagctggaggccattatcctaactgaactcagaagcagaaaatcaaatatcacatgttctcataaatgggagctaaacaatgggtatgcatggacataaagatggaaaaaatagacactaggaaccaaaaaacgtggagccaggcacagtgactcatgcctataaatcccagcactttgggagtctgaggcagatggatcacctgaggtcaggagtttgagactggcctggccaatgtggcgaaagcttgtctctactaaaaatgcaaaa

SEQ ID NO: 64948 - DNA, 1370 bp, Homo sapiens
gatctgtaactgaacagggacagccagcggtccccaaaggggagcctctacttgcatgccaagcctcagaaggctttggcagctgggctgtgctatttaataacctcctggaggctgatccagtggtctggcagcattactgaccaatgctgaggtttatttgtaggcttgggttttgcatttcctgaagaggcaggagtggaccctaggaagaagtgttggaggggtagctcagtctaactggcacctgtttttttaacagcatgacttactgtgggaatgacaagtagatatcacctcatggaccaagcctgatcaatcatcactgtctggagcactgtggtgaattcaggctcagaagaaagaattcagaaatccattgatgatgcctatcatgggcccaggaataggggctggaaacttgtctggcagatatttaccactagtgtgagggttaaagtaagcctgggattttaattatagcacaataatatctgtcctcataggactgttgtgaggactaactaagaatttatgtaaagtagctgggcatggtggctcatgcctgtaatcccagcactttgggaggctgaggcaggcagatcacttgaggtcaggagttcaagaccagcctggccaacatggtgaaaccccgtctctactaaaaatacaaaaactaactgggtatggtggcaggcacctgtaatcccagctacttaggaggctgatgcagcattgtttgaaaccaggaggcagagattgcagtgaaccaagatcataccatggcactccagcctgggcaacagagtgacactccatctcaaaaaaaaaaaaaaaaaaaaaaaaagagggaatttacgttgatgtaaagtgctcattagcttagtcatttgttttgctttgtgttggtaagggcttttcaaaagaaagaaagttcagtttattcattcaaatatttgagtgccctccatacacctggtgctaatttggccctggagaaagattgtgcaagctatactaggtcactcttctcatggagattgttctacatggaagaaatagacaataattagtaaataaacaagtaggatgacttcacatagtgataactgtattgaagaacaacaaaaattaggctaatacgagacagaaggactatgaagggggaggaaacccctgtgacagggtgacatttgaacagagaacgagccgatagtgcaaagatcttggagagagaagaaaaaatgtgaaagactcaaggagaaacagccttaaggcatagtgaacttacagaaggcaggccagagacaccatgccctagttgctaaatgctttcattataaaaatttaaaaacattaaaaaagtatac

SEQ ID NO: 64949 - DNA, 1046 bp, Homo sapiens
catctgtctgactttgactgccaatccagcctggacagcaggaccagtccaagcacaaaccaaatctttattctggagttggacagagtcagagttgcttagggctgatgaggccaccttaatctcaatattttcacacactgtgctagatgacacatttcagagtacaggcagaatgagggttggaaatgttaaacagccagcgaggagttgggtctgggagtgagacagcagacaaagtgcattctaaccatgtacacgcagctgccgggggattgtttaaaccagattctgccaaggtcatagcagcagaaaacataatccagaactctttctcccaggcaggatcatttggtttctaaagtttttttctctgtaagtttctcttgggagaaacgtatctgggagagggggaagagtggaaatacgggaattttattttaaatccttaacaacatgcatatagagtcccacttataggatgatgctatagagttgacattttacccccaaggaaggagtatgtaatcctgggctgaggatgactttttccaacaaggtccctgactcctgtcacttttggggttgctttccttcaaaagctaattgagagtggaaaggaactggggtgagtgaagataaccaaatgtgcctgaggcctgagagtgagagccaggccacgtttcccctgctactgggccctcaagtggctaggggggtggattcctagggtgggacacagaggatcttcctgaattgctcccactcctttcccctagaaatatcatcttctttgatgctttatataaaaactaggattgcaatgtccctctttatccttagtaatcttctttgctgtgaagtctactttatctgatattagagccactccagctttcttttgatacgtttgcgtaatgtttttccatacatttaattttaactagcctatatcgtattccaagtgagtttcttgtatacagcaaatagtcatgttttgttgtttatctgttctcataatccattatctcctaactggtatgttt

SEQ ID NO: 64950 - DNA, 1072 bp, Homo sapiens
agccattagagtgggtcagtggtgggtcgcttggggccagctttctgggttttcacaggtctaaaaatttcaaccattccccagcttctcagaagccctctgtttgcagaaacaagaagattcatggaaatggagattaaggccattggttcttgtggctctaacctctggacccttgacacaaggtcgggttttatcatttccaagctgcgtggcctcaggcaagtcacttagcccctctcaagttgtttcctcctcagcaaaatggtgttttaaaaaatacctcccagggatgatgtgactatttaaacaaaataacaaaatgtatataaaacagttagcataaggcttggcacacagtaagaacttagatgtgttacaatgttttacctgcattttcttctttgagccacacagtatcccgcagaggtagatactgttgctgatttcaagatgatggaaggggctttagggagtgctattgctaccatcactgccactgttcctactgttgatattcctaggcttgggttctgctttttcctctaaggctcatctttcctactgagcttgttgactggcttcttgtcataaatcagaggatgtttgtttgtttgaactaggaggtcttctgagctttcattcagggactgtttcttccaccatgggaggtgagctctttcagaggtgtttgcctaaagctggcctattggtatctacctggagagccgccacctggacagctactgccaggatctggggctccttggaacttgaggttaaagtttttagtgcttcacatgacctgtggtcctttggctgagtctaacagaggcttcactgagatcttagctgagggtggctttgggaggagtatctctgagaagagtaggaccaaaagagtcctctcttgagctgtagaaaggatccttctgaaaagatatttggtcacacctgggtcctgggttggttcgcaccttgactcccccagtcacttggctagatcatatagctaattatttaactttgcaatacctcaatcttctcatctgcgaaatggcgattatactaa

SEQ ID NO: 64951 - DNA, 1113 bp, Homo sapiens
catcgcaatgtcccccacctgtccagtgggtgcttgtaaagtattctaagtagtgttttctaccacactggtctttgaggagacaaatgatgatggcgggggtggggagtctgaggactgtgtaggggagaggccaggagttctgtttgggttacatccgtttgttcacccaacaaatatttattgaggactgtgtgctgggcactgttccaggagctggtgatgcaacaaatgaataaaaggggcctgaaggagggcagggtgcaggccctgtggataatgaggcagagtgaggggaatcacctgaggccagcctggctggagaagacagctctaggcagagggaatagcaagcattcctggtgggttcaaggagccaccaaggagaagctccttccgtgcggctggggcgagtgtagcaggagatgtggttggagaggaaatggtggggtggttagtggggtaggccattgggtaataattcattggcttttagttctgagtaagctgaaaagcattggagggactcaagcacagagtgacttgatctgatttgtatttccacaaggtcactctctctattgtgttggaaattgactttagtatcaagtgtggacgcagcgggaccagccactggcacttgccaacagcttggatgtgtgaggtatgagagaggaatcaaggatgacaccaagttgctatggtctgagccctggaaggagggagtggccattgactgaagtggggaaagctgtgtatggaagaagcaggactgcaccaaagatcctagtgcggttttagttgtctgtctcaaatcacatacagatatcaaataggttgggccgggcacagtgactcacacctgtaatcctagcaccttaggaggctgaggcaggtggatggcttgagtccaggagttcgagatcagaccgggcaacacggtgaaaccccgtttctacaaaaaaatacaaaaactagccaggtataatggtgcacatctgtggccccagctacttgggaggctgaggtgagaggattgcttgagcccaggaggcagaggttgcagtaagccggtatcacaccactgcatgcactccagcctgggcaacagag

SEQ ID NO: 64952 - DNA, 1058 bp, Homo sapiens
ttccctggggagcaaattcacccttggctgtgaaacacagctctataagataggactgaaaatagtacccaactcataggatggttgtgagaatttcataagagtccctgtgagggactttgtgttatgcctgacacataagatattctaattgtttttaacaaacttgtgttggatccactgattgtgttcatttttgccaaagtctctggtgcaaggagggtcacgacccaaatctcagggagatgggtattactcgcaaggctttccttggtggctaacagtttgtttgtggaggtaggaggaagttatggaatctggaaaagcacccttgcaccttgctcagttatggctcgattacccccaacaacaagtggtctggcagtgggcagagagattagatctcaccctctgagctcaagcccatctctgccaggatgacagcaagagtgcacattcaaagctccaggcccccagagagcaattctcctgtggatattggaccctgcttgtggcagccgccaaatcctcagccacagatcatagcaggtgttttgtgttttgctggcctgtcatgtaaacacactttgtggtcttcctgcttgttttaaaaaaggcctaagtgcttttgcagctttggttgtgtgcttggagctgcatgcaggattgggaggagatacataaggaacacagcccaagtactcctgaggaatgccatgccggcatcattaatcaactgctcactgagtgccagctacatccaaggcaatggagacagattagcaagggacaagaatcttgactgttttgagtttagaagtgtttagaatctagtagggaaagcaaagcatatatacagatagttacaaagaagtttatagtgaccaccttcaaacaaagaggggagcaatggcgatagactccactgtctagtcttcattgctggttccccattgcgggtgcttttcaggagctgtttcatttaatcctcccagctcctctggaaggtagatataacttccatcccatagttggggaccttaaagcttctggtgatt

SEQ ID NO: 64953 - DNA, 1059 bp, Homo sapiens
gcaggcgaggtgaccattcacttccacttagcaactggatgctcattttttatacatgaaaaccagggggtggccacattaaacaataaccaggctgatttattaagtccctttagacaaagtgaaatgaatgtttagtagaggggcaatgaattacttatgtctgaaagctggcttcagagggaagcatacactgcttaggaacaaaatggagtggtccaaacctttgttatattaaaattaccccaaggccagcaaggtaacggtttacacagctgaagaccaactggggaatgactgcgtatgggaaggagagtgctggttagaattcttgtcctgctggtcttccctttaaattataaatttattgttgatatgcctgctaattatacagcatgggcacatgcatttgactcagctatatagggcttttaaacttaatgtcttccaaccaagaatttaagggccgtaatccatctattcctgtccattactcagaatgcaggacaaatatggttttgctcagcacaagatggataataaaagttctgcagtgtttacaaaacatgatcccagctccgtagagcagcaggagttatatattgttgctcatttggtattgatgtccccaatcccatggcaaggccattaaatgatgatatcttcatgacttccttacgggaggtagagaaaccaatttaatagagcagtatttataaacaggtagtttgcacaaaatagaaacttttcgcatccactcatatccctccctactctcctctctcctctctctccctcctctcccccatcacttcccataggtgagtttgatgctgagcatcactactaggtttcttcttggtcattcttcttactaagcttttgtgagtgtctgtggcattttagaaaatcttcctcaatttctagattcttgattaagtgataggatattggtgagaatattcttgctccaaagaagtatccagggtgtacaaaaggattgctctatcctagtggtaacatgcacaagactttggattcaccatgagagtttgaagc

SEQ ID NO: 64954 - DNA, 1045 bp, Homo sapiens
tattgagtgcatgctagagaaaaatatgtttatggttctctcggccaatattaggaaagatttgagactagcaattcattccttcaatatttaaggatacttttttcttttttttttgagactaagtctggctctgtcgccaaggctagagtgtagtgtctcgatcttgtcttatgcaacctccgcctcccaggctcaagccattctctcacctcagtcttccgagtaggtgggactacaggcatgcaccaccatacctggctgatttttgtattttttgtacagatggggtttcaccatgttggccaggctggttttaaattcatgagctcaaacagtccatctgccttggcttcccaaagtgctgggattatagctatgagccaatgcacctagccatagttaaggatagtctataattacctctgttttacttaagtgaagtgatgggcaactctatactcttaatgataatggttggccaagttatcagtcacatgatgactacttagtctgtgcttgccctacagtagcaattgcagaatactttagctagaacttttttttttaagtttttagcactatagaagtagtgaaaaagcagatgttacattaacaaaacaagagaaattcatgtaaaaaggaaagcttatctgagtttttgcaagaatagacttaattttgccagtgacaattatgtgtttaaatattacattctgatttcatcacatgtatttcctgagaggacagtggaagtaaaagaagttctaatgctacagatttgagaatgttctgaaagcgtcgtacctttaagagttatctccagaacattcttgctgtcctagtgccacaaaccatgcttgtgttttttgatttgcctatctcagatactttgggattctgcagaaatgaaatacagtgattttgtattaattgggaaattcttaatatataattcaatttttaatcttttctatgcttctgattctgaaatatatcatttgccatctccttgtataaatattatgattgtccctgcttcaag

SEQ ID NO: 64955 - DNA, 1046 bp, Homo sapiens
tcttacttattctctaggcctctctctgttaggaggtgttttcattgaggccagtcgagttttaccccacgccatgactcgtggaagacttaaatttgtaaattcctacggcatcacgatagacaaaggtccaggagaatgtttcaagcaaatattcgcttgaaagagcaaacatttaggagataaatcataccaaaaatttattatagaaaattgttgtttagtaatgatattgatgcagttaacacaattcttgcagtatttaacagtatgcaaaatggcaggccgggtattatttttccttattttgggagaaggttggagggaggcggggatggagaataggactgacgttttttagtgtgacgtattacctgccaatcatcgttcctggcactctacagaatgaattttaatttaaataggtctagtagacgttgccttcatattctgagctaccttaggctcagaaaaaaaaaatcacacaaagtcatatggtaagatgagtgtattggggttcctaaaggttccttaatgggaacaatttatttcatttttggtgtaatgtttcataacatattccttggagcagaggtgctttaacagtgtgtgcagaattccttctcttccctcctccaagtttgttgaaattaaacttttttccagctcctagagattcggtctggtctggtgtggggctcaggaatctgcattttacaaatgttggatgagttttgatgttttattttgacatttaatggaatgagctttgagactcactgccttagaaaatcatggaatattaaaagtttagtattggatataatctaggaagagtgctcttaatcttgtttatcaagcagatccttttgagaatctttgaaaatgttacagactctctgtacagaggaagtaccataaatggtcacacacaaaaatgtgcacgtagtggctcacgcctgtaatcccagcactttgggaggcgaagctggaagattgctagagcccaggagttggagaccagcccgggcaacaaagtgagaccc

SEQ ID NO: 64956 - DNA, 1103 bp, Homo sapiens
ctatcccctagacatataccatgaacaacttgtctaccccagtttgaataccatctgtcaggaagaaggcatggcatctcaaggaaagccaaattagttttctagtgctgctgcaacaaattaccagaaattagtggcttaaaacaacacaaattcacatctcatagttctagaggtccgaagtccaaaatggatctaactaggctaaaatcaagctattggtaggagctgcattcttttctggaggctcgagaccccattcccttaagttttccagattctagaggtttctaagattctttgactcatgggcttcaaagtcagcaatggctggttcagtctttatcacattacgtcactcttaatactcccctctgccttctgccacttacaaggacccttgtgattacattgggctcatctggatgatcctgaatattttccccatctcaaggttgagtagaaaccttaattccatctttaaccttaattccctcttgccatgtaacagcatattcataggttctgggtattaggacgtgaaccttttgaggcatggcattctgcatgtgaagctgtggaaagtatttggaaatactaagtatttggaagtgttggacttttttcctaataccgagccaaaatatatccgcttctgactttcacctacatacagatttttgttttgccatgccgaaaacacgtggcaatccttgaactatttgttttacaaactgtgaatttacggtggtgttttttctctgagcttggtagaaactgtagttttataaaactaaacaactatttggattactgtaaactatataaattaagtacatttattgaactgtttcgtctttcacacaaatatctttaaaaatttgtcagtcggaactacctttggagttttaatttccttaagaggtgctggcagcatttttatgagctatgacatatgccattttcttagcactttctagaatttctcattcacttctcacataacctagtaaagttggcatcatctgcatttagttggacaaaaacaccaaggcttagagaaattgagtctcctaaagacatgtaactgtgttgatgaactg

SEQ ID NO: 64957 - DNA, 1105 bp, Homo sapiens
gaaataaaagaaataaaaagcccttatagtaatatcactagctagaatgactactattgtcattttggagtatttcatttcaatctttgtatgtgtacaagctgggcaggtagtaattggatgatgccatatacaggtttgagcatctctaatctgaaaatctgacatccaaagctttttgagcactgacatgatgctcagaggtgatgctcaaaggaatgttcattgtagcatttgggattttggactttgagattagggatgctcaaccagtaagaataatgaatgcaaatattccaaaatctgaaaaaatctgaaattaagaactcttatagtcccaaacatttctgataaggcatactcaacctatatattgcttatgggttatcttttttatgtttgttagcatgccaagacctgtaaatgctgttttcacacaaactgttgtgcattcattttctgttgtggtccattgacattttcagtctatttttactccagtaccacaccaaaataactatttgaacaaagaagacttatatgacaaacgatcctttaaaacaaaaaatactataactgcctttattccaagtgttaatattactctgtgcctagtgctgatttttaaattacttttactttattctgccttatttcatccagcctgcagatggcagaattgtttcatttgaacagcaattttgaaggctccgttttatttagtgtgttctgacattggaatgagaagtgattaaatgaacagtctctctccctattagagaagaagcaaattaatgttagagacagggagccacactaagaaagtactggataatttactttttcatttggtctatcttcatttcatgatttttgcatgcttggattataaatgaactagagcctataaatgaactagagcatgatgtttaagctgtaccatatgtaaactgctgaattcccttaattactttagtcagagtaatggagcttaaatctgcttcatattaaccataaagcagtttgttctgcatttgtattttaagagtttgcttgtattaaattttttttttaatctagagaccttttagcattcatgaatcaa

SEQ ID NO: 64958 - DNA, 1020 bp, Homo sapiens
atatcttaaggccttcttaatttgacaagagaatggtagaatgtacagcttactggaataaggagggagtctgcatataagttcaaatgcaaattaattaatattaggtaaaggataaaattccattccaaggagtctagaaaagtctacactatcttagtagagttgacagcagccataaagggcagatattaattatgtgcaggcctgtcacttcaagtttatcttacgattgtgtaattactttcccatcagaaaaatacgtctggaaaagataccatatagtgttctaatcaaaagagggtatgctagaatgaaatatgtacttttattaacacattaatgcttatgaaatgatttttctagcatgaaagcctgaggatagattagttagaataactacaaaatatattgcacatttaactctccgtaataagcgagtgtaatctatcaagagatagtattgaataatggagatgtccaaaatatctttctttggtttttgtcaccttcatttcagagtaaagataatgatctactacagaatttttgtattatcataattcagataagcaatttcaattcatttcatgaagggtgactaaggaacgattatgttctttttatttttaaaatatgaaaatttttgaggttcttgatgtggtaacttgaaagataataataaatgcagaggtttcataatatagtccttaatgtcaagagtaatggaaatgtgaaggtctcttaggtgagagattatagcaggagatagaatcataaaataaatgtgaattgtgtcgtgacaactggaaccaaagcatacaaatattggagagagactttaagagaattaagttagtatttgtcgtaaattggaatctggctatagaagcattgaggtccatttagttgcttctttgaaatggaactctttgatatataaatgtaatatgtatatatttatgaaatattctgttcataatgcctggcttgaactttttgatagaaagaacacattgg

SEQ ID NO: 64959 - DNA, 1827 bp, Homo sapiens
ttacttgaacttatattgatgcctcatgaggtgcattatttgttgtggctcatctttcctttttttcaatttcaggtgatcccattaagatactaatgccatcactgtctcctacaatggaagaaggaaacattgtgaaatggctgaaaaaggaaggtgaggaggtaccttcctaatgtcctgtgtgctttgttatttggttattttgttttgtttttttttttcctaatctgtcctgttatacagtatgtgatataaattaaataaattgtgttcctttggtagttaatgtaagtttggttgaataaaattttcccatgataaagcagcaaaggttttctgggttcagcatatatccttacacaagcacagaatggtaaaaaatattttaaggctttttccccaacttttagtccttatgcctagcttttagtttcaacatcatagttttgacattctccttaatttataactttatcatgattgtgtgtgtgtgtgtgtgtgtgtgtgtgtgtgtgtgtgttctgggaggtaggcaagttcatcataaattttattgaaaagaacaaataagtagaatataaggaaaaccctcaaaagcagatcagcggaggagggttgtagccctgctaattattgaaatatagtattaagcatttctaattaaaactctgggattggtgcttaaaagacagaccagtgcagctgagtagagaataaagaaatagatgcagttgcacatggaatttaagtatataataaaggaagacaatattagatttattctttatgttatgtgaaggataaattacaaatgaattatacacttaatgtataaaaatgaaactatgcaagtcttgaattcctctgaacccggaagtggaataaacaccctaactataactcaaaatccagattataatatgggaaataaaatttgatggtaaaagtactaacttttatatggctaaaaatacaagttaagtaaaaaaagaagtgacaaattggacaagagtatttgcgatttctatcacaaagggttaatatccctaaaaaatcgataagactgtcaactcaacaagaaagtgggcgatacatgaacagatagtttacagaaaaataattgcaaatgactcttacacgtagaaaaagacgcctaacctttcaactggtaagaaatacgcagacactttactgaaatgtcatttcttactgattatattgacagtacttaaaaagttcgacaagctgttctcttgatgatgctgtggagggaagggaagaagcaggactctcagacattgctggaggaaatgctaaatggtgtaaatactagggaagagaatttggcactatttagaaaaattacatttatgtttaccctttggcccagcagctctacttcgagggatttgtctcagtgttacaccagcaaaaataagaatagacacaaacacacactaggctgtttatcacagcactgtttgaaatagcaaaaggtagaaacaatccaaatgttggttagtacaggatttgttgaataacttttactgtatctacacctgtaaaaaggaatgaggaatatctctttatactgctatggggtgatcttcattgaaaaaaagcaaggtacagacaagtgagtatagtatatatcatttatcaaagaaagaggtggcagtgctaatatttaagaaattagaaaggataaaataaaactttaaaaacaacaatagttggttatctacagagtaatggagggaaccgtgtgggggagaaactggaagctggacttctgaatatatcttgttttgtctctttgacttt

SEQ ID NO: 64960 - DNA, 1093 bp, Homo sapiens
cctaagttcacagtaatactaaagaaaaaaaattaataataattggttagctttagagggtgctaagaaattaactcattttgaaaacgtaataaatggaaagactcaagcatttttctctacctcttctgctatatgaaccgtagctctgagtaaccaagtaattgatgagaagtttctcattattagcatatcacagttgttaaaagatagaagaatcatagaacatcactgtattgccattttgcaatctctggtaaaatagtatagccagtgatcattaatagctgctaacatcacaaaaagagagataaccagatattacatgtttcccactgtgaagtagtcttgccagaaaattgaaccaaatatgttcaagcctgtagctctatcattttccaggaaatacaggggaaaatataacgtgttcaatgacaccatgagaagtatatcagcaaaagctagactgaggaattctgtatgccagtttcttcaaccaataaatttcagggtggtagggaagagcccgggggaggaaggtgggggaacctatagcatacaagagatttgagaccagtgccaatgtatggacctaattttaattatgattcaagcaaacaaaacacatgcggacatttgaaaactggctggatatttaatgatattatggattttttttttttttttttttttttgagacatggtctcactctgttgcccagcctggagtataatggcgcgatctctgctcactacagcctcagcctcctgggctcagggtgattctcccacctaagcctcttgagtagctgggaccacaggcatgcgccaccatgcctggttagttttttgtatttttttagagacagggtctccctgtgttgcccacgctggttttgaactcctgggctcaagtgattctcctgcctcgacctcccaaagtgctaggattacaggcataagccaccgcacccagcataggaattattaattttaaaggtttaataatattttggttatattttgattattaaaaaaaaaaaatctcacctataagagatgtgagatgaaatacttacgaataaaatgacag

SEQ ID NO: 64961 - DNA, 1042 bp, Homo sapiens
ttggaatttgaatactgatgaacacaaatgatgatatagcatcattttgtttttctgtggctagagtctgttttctaggcatctaagaggtatttaattgctgggtttactagttctatagtttttcccgtgattatagcagaaatctttgagggtgtgctttttttcccttttgaagtgcaatctgttttaaccactaaaacatttaaagaagtatgtaagatgatataatctgacactgtagctttctctatgacatacaaaggtcatttttggtctcttcctgcatatcttaccagcctaatctctcgtcacttctctcgcatactatttgccagtttctctgaagtttcctgttctctctgcctccagggctataagtgtattaccttctacctggatcactgcctgtttacagattgtctcctcctcacctcttcaggctcagaataggtggtcattgtattctaggaagccttttctcaccttacaaaaactgaattagatgcccctcctgaacattcccaaagcatcctgacctcaccttatcctgctgtattttccagtttacttgtcaatggatattaagcaagcttcttgaggtcaggaatcttaaatctttgctgttattactgtccactgctgtatcctcagtgcctacatatgtatatatattttatatgtaatatataaatatataatacaaatatgtgtgtgtgtgtgtatatatatataaaatatatttatataattattattattttttagacagagtttttgctcttgttgcccaggctggagtgaaatggcatgatcttgactcactgcaacccccttctcccaggttcaagtgattcttctgcctcaacctcccgagtagctgggaccacaggtgcctgccacctctcctggctaatttttgtatttttagtagggacggggtttcacaatgttggccaggctggtcttgaacccctggcctcaggtgatccacccacctcggcctcccaaagtgatgggattacaggtgtgagcctacacg

SEQ ID NO: 64962 - DNA, 1080 bp, Homo sapiens
ctgtttttctaatgctgtagattatatttctgtttttaaattttaaattaaattttgccaataaagtttagtattattcagtatttttctcctattataagttgatgcaaaagtaattggggtttttgaaagtaaggtggtaaaaataaaattacttttgcaccagctgaatatatcaaagttgttagcatgccttaccatctaaacatttccttacctatcttattattttttagagtttgagttttacactttttaaaccctcaaacattactttaaaaatactagtagttaacattttagtaattttcacaataacttgtttcttatagcccatgggttccatctgcttccacttttcttcttgatgaactgcatcttgtaagagctttttaaagagatctttaataggtggtaaaatttcctagcctttatatatctaaagaatacttctctttcattctcaaatgatggtttggcagcatacaaaattctagacagttatttttcctcagttttttgaagatattacttcattgttttctgacctctgttgcagctgctgagaagtgtactctcagtctttccattgaggtaatctgttttttttcccctttgatagatttttaaaagattatgtttttatcgttgatagaatgcggtttctttacattgtatctaatatggattcatgtttatatagtctaatactcttttttctgtttaagtttttatcaaggtataacttgcataaactttaggctcaattaaattttgtatacatgtatacccatgttaccaccacctagatcaagatttagaacattcttagcaagctacacagatccgtatgccccctgctagtcagtacacctatcctaaattcattcaaaactctttgatgatgagagtatacatctccagttctgggaaattctcagccactaattcttcaggtattgcttctccaccagtgcctccagtgtcttccctcagaactccattagcaaacattgcagcctcagtctttgtcacttaactgctcttttctgttttttcgttttgttttgttttttgttt

SEQ ID NO: 64963 - DNA, 1026 bp, Homo sapiens
tctttttatgctttatatgctttattcatttatactgtgtgctgccaacaggttttttgaacttgccctaagatgtgaacccagaagtactgttaattgtaaaacttttcttcagggaatatagtcaaaatgtttgaaaaagtaagggggatatggagtctggaattgatttgttcagaggtggatacacatttgttgctgatgtctttaaggttgatttcatttttacatgctcagtaatctttgtaatagcttttttattatcacaagtataatttatgtccattatagagcttttggaaattacagcaaagcatacacatacacacacacacacaaacacccacacataatgagaattacttgtatttccacaacccagaaatagctacggaatattttggtatttatttatgttttattcatacgtacatatatacatagtaatatttatattttaaaaaacaaaacaaacccagtcttgttttgtaggtgaagcggtgagtgctggagatgcattatgtgaaattgagactgacaaagctgtggttaccttagatgcaagtgatgatggaatcttggccaaaatcgtggtaagtttttattttaattttcttcaacaggatgaagatttcttgagtggaaagttcattgtagtaaaattaccttttatttttgcctccttatttttaatgtgtattgtctactacataatacatttttagttcaagtgtttaaaatgttttagagttaaggtctaatagcctatttttctgtattttctaaattttctgtaatgtgcgttatttttataatggaatattagagcttatgtgaaaagtaagtgaaataaaatgcgtagagctacatatggtagaaacatgactatttagcattgtgtggtatattccctgattgagccaaccagcgtgtttgtttcttaacttccagaacctttactaggtagtatggtggagcatctaagactgtggactctggaatcaccccgctgactgattcatgtta

SEQ ID NO: 64964 - DNA, 1297 bp, Homo sapiens
ggaaacagatttttaaatatccattaatgattaatatactgcatacttgaataacctgctctttaaggacatgcagttggataagatactatgtatattgagtgtatagtccactctttgactatataatgtatatggactatgaaatatgtataattcaatcatatgtcttttaaaagtaggttattcaaggctgggtgtggtggcttacacctgtaatcctagcactttgggaggctgaggtgggaggattgcctgcacctaggcattcaaagaccagcctgggcaacatagtgagacctcatctctacaaaaaaattttaaaatcagctggatgtggtagtgtgtgcctgtagtccaactactcaggcggtggagattggggaatcacttgagactgggaggttgaggctgtagtgagctatgtgcactccagcctgggtaatagaggaagaccctatctcaaaaaaaaaaaaaaaaagttattcaaattaaggaggtaaaccttactttcaaattcttatggtatgtagagagcatttattctacttgaccaagtactttgctaacataaaatgtttaatttcttaatgatatttgtaaaaatgaaatcagccgcactttcatttgctttgtattatcttgaagtgattgtaatgaaatcccaaaatagagtgaaggacaagaaaggaattagatataatttaaaatctgtcatgcttttttgagagatccaaggaacagaatggaaaaactacagtgaagttataggaatattttattatctcattcatactttctattatgaatctgtaagaaataagatactcatgttatttttaaaaattacaaatccaaatagaaataattgaattgcctgtatagaaggtccctaatcttctaatgtcccttgtgatttctttgatccatgagttgtttataagtgtgaatttaatttcaaaatattggaagacccttcagttacctttcatgatttctagtttaactccactgtgtttagagaatacactttgagacacacttcattttaaaacaatcttctcaaatttattgagatttattttatatttataacatggcctgtcttggtggatgttccatgtgtacttgaaaagatggttcgacttataattttttgacttcacgatggtgtaaaagtgatacacattcagtagaaagcagtgcagtatttccttgcaatgctgggcagtagcggctagccacagctccaagttagccatgtgatcatcagggcaaacaaccactgctctgcagt

SEQ ID NO: 64965 - DNA, 1025 bp, Homo sapiens
aacaaaagctgcttacagatggtgtatgtctatgtctgtcttctctctcctctctctctctgtgtatgtatgtacacacacatatattgctccttgtgtgtgtgtggtatgtgtgtgtgtacgtatatatacacacacaaacacacctgtgaaggaattgttcattatttggtaggtttctttcttatcatcttaaatatagtaacataagatatcccattcacaattgaaacatgaattttattacttttttctgtagttatatgctataaaaccaaagcgtctcagattttttatattcttcccttatactaagaattttaatagtgcttttcttgtgttaatctttaattaataagttaggtcattgagaatgaatttcttttcatttataaagttgcttgttttttgttttatttttctattccacttgtggtttaacggacaggttgctgtctttttgcagggcacattcactgaaatccccgccagcaatattcgaagagttattgccaagagattaactgaatctaaaagtactgtacctcatgcatatgctactgctgactgtgaccttggagctgttttaaaagttaggcaagatctggtcaaaggttagtaaaattgaatttacttaatacaaaacacatgctaacttaactttcatgaaatcctttataaaattataaaattaaaagctacattgtgtagcttttaatttcaatttcataatgtacttgcactctactctgggtatatttgtgctagaggaaaaaaattagcaatggtttccttgaaaaagtgaattggttccacagtattaaataaatcacagatgcctttatgcagaaaaaagcattctgttctaccttgcttttatttcctctttgtcatatttgaataatgtacagttagttaacatttatttagcaggcaattactgagttcaattctctgttacatactgagctttaaaaatacaggttgagcaacccaaaaccaaaacttcaaagtgcttcaagatg

SEQ ID NO: 64966 - DNA, 1017 bp, Homo sapiens
tttggcttttgttatatcctgttttgttaagttaaaaagcagttaaattttttttcacctacaccccattagtaaaaagaaattttcgaacactttcccatatgtgtatatataactgtttatatataaagtacctacatgtatcactgttctagtataatcagtatgttataaagcatacagagaataagggtatttgaaaagaacgaggaagaaaatgaatcatcttgtaaacttcctgactgcacacaccacagagagatcatttgtctttttcgagacataggagttagttctttttttctgattatgcttgtaatgggtccttcaggttcttgtgtatgatatctaagcaatttaaaaaattgataaccaaggcccagaagtaaacttacattcatggttaatattattgatccaggacctcatataatgcaagtttttctaatcatgggaaccttattgactaagcaaacaaaagcttgtaattttttatcattgtttgtcagtacattccataatttacaagtttgaagttgtaatggtcaatgttaaagttatattaggaatactaattttactaaccttatttttctttcagatgacattaaagtatcagtaaatgattttatcatcaaggcagcagctgttacccttaaagtaagtagcagacttcaaatgattttgtcttcttaagtagtttcatgtcgtggaatttttacaatgacaaatagaactcttatttttaaatcacaaaaattttataattgtcttgctaaaaatatcctatcgtttgatctccctcattttacaaatgaagaaactgtaaatcaaaagggctcacaatgaattagagcaggatgaaaaccatttattctaggcattagagatagagcagtaaacaaaagcttacttgatttctgctgtccctggggcttacattctagttggaggagacaaacactattatatgtcagatggtgaaagtgctgaggagaaaaagaaaggataagggga

SEQ ID NO: 64967 - DNA, 1043 bp, Homo sapiens
ctgaggatgaagagggaaatgccaaactgcagcagcgccagctcataacagtcacaatgtcaagtgacagtcgagtggttgatgacgaactggcaaccaggtttcttaaaagttttaaagcaaacctagagaatcctatccgacttgcctagtcctcaaagataagaagttggtgttcagcttagttgattcagtagttgttaccaagaaacatatgttataggaaaacaacttggtatttaagtatgaagtggatgaaatgtttatttatttaaggtgaaagcatttgacccagggtgtcttcatcttcaatttgggtttaatgttatagaaataaatgatgataaactctaactaataaaggaaagagaatatttggttactcagatccatttttaacctctggtgctgtataaagggaatattaaactagatgtaaatcaaagtatatgtttggctcatttgagcattttggaatatttgagaatgtatgatacatgtaaaattaaaaaaactattagaactgtaccataattatgttgaaggtagaagtgatcttcaaagagatggccattaacttagcagtgggacctcacttttacaagcactgctctagatatacttgaagaatttaataggtacagaagtttattctggataataaataaataaggatcacactgtattaggggttatggcaacattattgaattttttatgtacataaagccatatgtttagggtggtttctatctgtcttgtttttcacttatataacactgtgaacttctaaagcaagaggataaaagaagcatgaatgaaaagaatgacatttcaaaaaaatggttcaatgaaaaactatagctaaaatatgtaaacctttctaggtaaaccgcttgccttcatcttgagtcggaatatatttaaataaattgtgttatctcttgccaaacattttgttagtgtttatttaaaaacaaaatgttgtttcttaatgcatttaaatcagttttgtattgtgcagtaaaatgtgagaaaatata

SEQ ID NO: 64968 - DNA, 1064 bp, Homo sapiens
agaagttaggaacatgtcccagtcacacaactgaaactgcaggaagtcagtcctgggattaactgcaggatctgaacactgtactctttatattgtactttaaaaacattgcttcacatggccagaaaagccaacctctgaagaagagaaaaattgttcccttcactctcagagcttcatgagcaccttggacttgccagctttcctcaagcaacccctgtaacttgttggcacaaaattaaccacaatattcagacaaagcagtacttacagggtgagtgctagtatcctatgcaactagggtagcctgagaatctaggggaaaaaaagctagaccaaacaaaagattatatataatctttccccaaatcaaggcactgagcaaggcaggcctgagagatggtgaatttctgcttctactgagagtcctccagacccccagtaaaaatttcttttcatcataaaaccagagaaactcttgctcaggaaaaagaaagaaaaatggaaatcataaagattgcacgacttaggattttgtcaaaatgtgtcagaggctataatataaggctagtttttggcattctgtcagtcactgaatgtccttcgtcagatcacagctccttttggttgtgctgactttatacccatctggaatccactgaccattagctgaaataaaatcccagatgtgctcagatctcacatcctgtgcaatgccctcagttattgctgatacggttcagtcatctgtctctccagctaatcatacagacacagtattctaggagaagtgagaacccactcatagccaggagagcttctccctctcagtcacagggtgactgtgggcaaggtccttcccctgttggttgcctctgtctccccagttataagatggtgacaaactgaccaacttaaaatttccttaaaatgtattggcactgtggacagaaatgaggaaagtggaagacctagtttctgtcctcagggagcttaccatttggtggaaataaagttaaacaggtgaaagaattatgcaagagagcataaccaagtgtcagaag

SEQ ID NO: 64969 - DNA, 1061 bp, Homo sapiens
ctgtgtgacataagtattaaaatgtgtcctgccttataaagaatgtgaattccatattctcacttggtatcagtgagaaatattcccatatttctatttgcaacatagaagataatgcatcatgtccttctggggcatggcaagttctaaatgaattcctggcagagcaatggattctgtgattgtctatgtggtgtagttgttgctaagaggatgctattgtaatcttttctacctatacttcttcattggctcagaatgaagcaaggcatgtgctgctttcttatatgtcatttatgccataaatcccattgttagaaggtaatgcttctaacggattccattcatgcttttgagataaatggcattgactttcatattgatcacatggaaagctgttacctgattcctttcctgagatcacttccagcctaatgtgcatttggctggaatatggttgtctcagaataacatcatgcactcgggcttttatacttctgcctttaggggactgtggcagcatggcatgggtcaagaagtacttctccttcatcttcctttgatgtcggtaactcatcctttctgcactgcgggagttgttaatgcttttgtgtcctccagttcacatgctgattgctaagaagaaaatgagcatgagtgaacccaaagctgctgaaacattctgcgtttatgcaacttccttgccctctatacaaggaagatggtttcattgtcttgtctagagaataaagtcttttttaaaaataaaatcggtgtatccctgaccaagcgtccattaacactttgacaattgctcaaactgcatggtcacagcagcctcagctcataccagccatccaatgcaaggaaggacaacaccaagcccagaggacagttcctggactgatttcttcaacccaatctcacaccccatgggacgaggtcatcaagcaggaagaaggatgggtaatagcctctgagatttttatatattatgttttttgaaatccactgagtgactgctgactatttttctagaaatatgcccttggttttagacc

SEQ ID NO: 64970 - DNA, 1054 bp, Homo sapiens
agatatagtcagtatgtgctttctttcctcttggccagatgtgaatatttaaaaaaatcagctgtagaccataagccaccttcaggtagtggtttgggaaatcaagcaataacactaatattgattccttcagatatggactccagtcatagtataacgcttcagcctactgcaaatccaaacacaggtttggtggaagatttggacaggacaggacctctttcaatgacaacgcgtaagaataacgatgctcagccactttattgacttgtattcctgcttcatctcttactcgctattggccaagatgcagagctttggtggtggaatggtgctatgtggcttacttcagcccagagtgtgaaactgtcttcattgtctgtatttcttgtggaggtctctcaacctgattttcccttcatttctttgtgccttccagatttaatgactttgtgttttaagaaaaagtaggactctattcaactccattttcattctctaagtagttatgtcagtgaaacacatgcccacttccaggatagtgatttctctatgttttaactgaccatttcctttcaatgtccatctttcctccagccagtgcagaagaggggtaggattgcttgcatggttgtaaaaagacatttttggggccagataatcctagagatcacatcagttctcagaggagaggcaaggcatgttattgacaatcaacaaaggtggcgggatccctggaacaacaacaacaacaaaacattgctagtatctctttctatcactaagaaatgttcaaattctagtagccttaatttctactctatgtgcagggatgtcctagagatcagcctaaagtcgttcataatttctttgaggaatacaaaagaaatctagaattaagaaggtcccattttactgcttgccacacataatgggcagagtccttcatatgagccctttaggcaaaggaaaaaaatcagcaagcatgtattgatggtcagcaatgtaaatagcacagcgttaagcatcaaaggagatgcaaataagcctatga

SEQ ID NO: 64971 - DNA, 1055 bp, Homo sapiens
ctgtgaaaggctttgcaaagtcacattaagtttgcatgacctgttatccctggggccctatttcatagaggctggccctattagtgatttccaaaaacaatatggaagtgccttttgatgtcttacaataagagaagaagccaatggaaatgaaagagattggcaaaggggaaggatgatgccatgtagatcctgtttgacatttttatggctgtatttgtaaacttaaacacaccagtgtctgttcttgatgcagttgctatttaggatgagttaagtgcctggggagtccctcaaaaggttaaagggattcccatcattggaatcttatcaccagataggcaagtttatgaccaaacaagagagtactggctttatcctctaacctcatattttctcccacttggcaagtcctttgtggcatttattcatcagtcagggtgtccgattggtcctagaacttccaaaggctgcttgtcatagaagccattgcatctataaagcaacggctcctgttaaatggtatctcctttctgaggctcctactaaaagtcatttgttacctaaacttatgtgcttaacaggcaatgcttctcagaccacaaagcagaaagaagaagaaaagctcctgactaaatcagggctgggcttagacagagttgatctgtagaatatctttaaaggagagatgtcaactttctgcactattcccagcctctgctcctccctgtctaccctctcccctccctctctccctccacttcaccccacaatcttgaaaaacttcctttctcttctgtgaacatcattggccagatccattttcagtggtctggatttctttttattttcttttcaacttgaaagaaactggacattaggccactatgtgttgttactgccactagtgttcaagtgcctcttgttttcccagagatttcctgggtctgccagaggcccagacaggctcactcaagctctttaactgaaaagcaacaagccactccaggacaaggttcaaaatggttacaacagcctctacctgtcgccccagg

SEQ ID NO: 64972 - DNA, 1899 bp, Homo sapiens
gagcaggccgagccggcggaaagggtctttgctgctgcgcccgggcaggggctgccgcggccccaggtcccgcttcgagacgcggcgcggtccaggcgggaggcgactccctaggaagggacccggggcgggaggaggaagtgaggccgcgcggaaggaaggcggcgagccccggggccccgaggccttggccgcgtcacagcacccacatggcctctggagtgggcgcggccttcgaggaactgcctcacgacggcacgtgtgacgagtgcgagcccgacgaggctccgggggccgaggaagtgtgccgagaatgcggcttctgctactgccgccgccatgccgaggcgcacaggcagaagttcctcagtcaccatctggccgaatacgtccacggctcccaggcctggaccccgccagctgacggagagggggcggggaaggaagaagcggaggtcaaggtggagcaggagagggagatagaaagcgaggcaggggaagagagtgagtcggaggaagagagcgagtcagaggaagagagcgagacagaggaagagagtgaggatgagagcgatgaggagagtgaagaagacagcgaggaagaaatggaggatgagcaagaaagcgaggccgaagaagacaaccaagaagaaggggaatccgaggcggagggagaaactgaggcagaaagtgaatttgacccagaaatagaaatggaagcagagagagtggccaagaggaagtgtccggaccatgggcttgatttgagtacctattgccaggaagataggcagctcatctgtgtcctgtgtccagtcattggggctcaccagggccaccaactctccaccctagacgaagcctttgaagaattaagagtaagtattgggccttcagagcataaacctaggggtcaggacacctgggtttcaactcaggtggcctggctgtgaccacattcgctttcactgtgtccctaagaagctagtctttccaactttttgggagcagttcttattcaccgtttttggttgaactcttttgagaatctgatgaaagttctggactctgacctgagaaaatacacacaaaatctagtatacaatttctagaaaattgcaagtttctggtctgtggatcccaggtaaagcatttcttgggagttttgaccccacttaggccaatttccacagcatcactattgttgaaactggtgctttgtgctagggctcttgataaggcaatctttttgcctacttgaaaacatgggaaataggattttgccacatgaatccaagcaagtgatacgtctgcattgaaaagactaacaaaatagttttaatagtaacttcatatgtgccccgagttcattttagattcttcgtgtttgaaacttagtagaaaaggagggtaagaagatggaggccaaattggggtgggagtggaagttcccatgtcctctgtctggatctttgtctgtcgtggaccttactggtcccccagaacagtggacacttcggaaatatttgttgaatgaatgaatttgcagacgatgcaccttttattcatattgtggatgtttactatcattgagagaaactgctggtgttaatcggggagggagggggaaattttgagtggagtgatcagttcattaagtaatctgtattagtgaacattgtcatattatgatgacttttgcttccctgaatagggaatagctggcattgggataacaaataccttgagagtgaagatcctctgtattaggttttcccttttttagtgcctatttataattgtaaaatgcacattcagaaagtgtgtaaaaacttacagtctaacaaataattataaaacaagtactgaggtagtctccatccagattaagaaatagaa

SEQ ID NO: 64973 - DNA, 1052 bp, Homo sapiens
aaaccaaaaccaaccaatcaaacaaaatttcccaaatataccaaaggctcaatccacaatttacggcaaataactctatgggcagtgactttgatgtatactataatgtgctagattatttttgttgaacatttatatattaaacccacttcagatgggtttagttagtttttggtaaggtaataattggtttttaacatcaataagaagattagcaaatacattcattatagtatgtccaaactataacatatagctggctttcattttagagaatgatattttattttcttaaactaattttattcatctgaataattttggagcacttattatggtgaactgtgtggtggatacgaagaagaataagcaaagtttctaacttcaggaagcttacagcctaataggaaagagaatcttttcacatgcttatttgtgtgtattagagaaaaggtacaaacagtatgctatggaagtggagagaaaagagaaattgatatcactggagggcatggagccaggaatagattcttagaggaaggagtctttgaggtaggccttgaaagatgggtagggtgttactaggtagatacaggctttgaggtatccttttgttcccattataacagcctgtgaacatttattgtagcactaaatactgtgtactatgtcatgttatttctttccatgtctttccctggtgggttataaattctttaaggctagaactatatgttattcatctttgtattcccagcacctagcacagtgcctgctggatggtagatgaacatgaagtatgtgataggaagtgtaataatcttgtctagttccagggcattaatgaagaactgagagagtattgcatagttgttgtagatcagtgtttacattgggattaatttgactgcatctaaaataatgaaataatttggaaaaatccaaaataaccactcccacatgatgtttatttctctgtcacataaaataactttgggtgtaggcagtctaaggttggcgtggcagaaccatgaagttaccagaaatctagg

SEQ ID NO: 64974 - DNA, 1039 bp, Homo sapiens
aagtgaaaggtttgagcggttgcatgagaggaatccctggaagtgtcagggttttctcttgatgcatcataaggtaaaggatatttgtaaggacccgacttgatcttgggtgtgtgtgtatacctgcacctcttttttacgttctttttattttgccctggatcatttactaccaacctattttattttcaagcccctttttagtctaccacaaccatatgctgtatatacttggagccagcttgaagaagggtgaacgtaattgcagaatgactgccaggtcaggaatgggggtaaaaaacaggccacttaaatatataatttctgcacaaagaagattttcctagaaataaattggcatcttccaagacaacccttaagtttttgtctgttctgttttcccacagagccccaccatcccctttttgagttggcctatttaagaagggcagaaatctcttaggctttgtgacctgtcatttcctgggcacagaggctttacatagaagcactgattgagtcatggaggactgagcactatctctgcctcacttcctctagaattccctaaagcatcacaaagcttgattagtccagacactgaagcctattggggaatgagttaatttttacctcttgagttttgctagagagcagtagaagatgtctaaattaatcatttttttaaaattataaaataatacatacttatagatttaaaaatacagatattcataaagaaaaagtaaaatctcccctaagttagccactgttaacagtttagtatgtaaccttctagacatttttctatgtagtaccttttcaaaattcttttacaaaattatacccatggttttacaattgctttttcctttatgtggaatatcttagatattcttctgtgtcaaaaatatagacttgattctgtttaatgagatgcctcattttattcaaaacatttgtcagacatcttcttttcttccagacccagaggttcttaaacttcagtgtacatgaaaatcacccagaagacgtatta

SEQ ID NO: 64975 - DNA, 1037 bp, Homo sapiens
atttgaaattcttattattgtgtcctattgtgtcccattattcacaaggatcaagccaggcatcatcttgatccttgccctgtgccaaaaaagaagtattcactggggcactgtttattcaaccagctgaagcagagaattgagatgcctcagctatcaagttgttacatatagaagtgttcctgtggttgatgagttactagaattattgacccatttctggacttttcatttaaaaagttgtaagtagggaattttggagatcatgagttatatttattttatccctgtatcttcagcccttattagcatggaacctggcacatagtaattgatatgtattatctattacagcaacctataaaagtaagtatttgtcttgttttatggatgagcattctgagacttcaaggggttaaatagcttgctagtaagtggtgggaccagggcttaactcgagatttgtctcacttcatgttcttcacccatacactgttattgaattcatgggtaaatagatgtatatatagcctggcatccctagcaatgtgacccttaactgattatttttttaatcacactcttcttctacctccctttactgggatcctgtgccatagcacagtcccccacagctccagagaaccaggactggagaatggccttttccaacagaaaatgtggggagatggcaaaaaagccataaccctcagagcatttagccctcgctaaatgaagaactgaggcaagtgcttccacagtttgacccgattagtgaaggacactaaatgggaaaaatacctgtgctccctcagtcttgctctaggaagaagtaaatgtggcccctttttatcctctctagacacttgggcaggagaaaaaggagaaacaagctctttccctccttcaccattcccctggctttatcaaaacaaaacagcttacccctctcatcctcccctacccaattataaaagaaatacagttgctccttgacttacaatgggattacatcccaataaacccattataagttg

SEQ ID NO: 64976 - DNA, 1072 bp, Homo sapiens
gtggcttctggggaggcctcagaaaacttacagtcattgtggaaggtgaagaggaagcaggcatgtcatacgtggctggagcaggaggaagagagagaggaaggaagtgctacccatttttaaaccagatcttgtgagaactccctcattatacagtaccaagagggatggtggtaaatcactcatgagaactccacccttatgatccagtcatctcccaccaggccccaccttcaacattgtggattacaattgaatgtgagatttgggtggggacacagatccaaaccatatccaaaagcatttgtttctgggagtcaaagctataagccaagaaaaagactatataagagaaagctgtgttccaagcaccaaggcagagggagtgaagagcacatataatcactaagtttgaaggggccagagctgggatttgagaccaagaatagaaagccaaggattcaaggccaagaggaaatgaaaagagacagaaagctgatcaagaacaagttggagttagaagcaagatgctaaccagtgtcctcaaatcactcaagagttctttgtgactttgaattttgttttagcaaattagtggtgcagggggcagtgggactaggttaaaaggtctaaatggggtgagcagggggtgctaaagtggagcctcgaagatgggtctaggtgtttagcagggagtatttggaagggaatacaaataaaagaaggggattttcatgtatatggggcaacatctctgcagccagactggtaaagggacacatgtgggatagcctctgaccttcagtcagaatgtattgcccactgttttttgcagggcccttagttaaagtgtcataatttttccttgaggtagtagtaagtcaagagacctattatctggtggagaaaataaaacttgactccagagtttggagcctgataactgcctaaatcatggcgtcattaaggggaatagaggaaacaagttgacatttgaaggggatctgtaggagaataatgttgggtcagaaggcagattgtataatcaaactatttgggtttaaaatctgct

SEQ ID NO: 64977 - DNA, 1229 bp, Homo sapiens
caattatttaggcctcctaggtctgtgcattcacttctctgctctgcttgtcagggcaaattatcaggtcatctccactgggcagtttgaacataggattatattagctcttgtcttagcctttagatgtctgttggtttgtctctgttacaataaatgtatagtccatgcattcaggttgggagaggggagggaaaagaaagaaatctgactctgtctgtaccaacagtgatttctaatactgtttctttctgtttgtctttcagggcgatgaggaaggacccaggtaagatcacattgttgcttgtcttttctcataattgaagtagagtgacatttgtggccttttagtgctccatgaaatatagacagccaaggaacagcacagaaaagggatctctatcttaagcctgggatttgaagatcttattttgtaagactcccgtctccctctcatctatgtcatttcctgcctgtaaccttcagataagtaactttgttgtattcttttgtacattcagaataccttgttaagaagaataggcactacatttaaatggtaatgtagtatcattatggtaatggtaatggtatcaggtggactgactagataaatttttgtagtctttcttgattggaattagattgatttttttaatgggctctagatctagtattctttatttttgacctataatatctttgtgtcagacacaagacacctatatgatgaatcctagggtacaggtatacaaaactttgtttaggaaaaaaaaaatgttctttgtgcttctgtattgccacagttgaatgcagtttagaagtgcattttattattgtctgagccttgcagtgaacctggactgtggtttacttacccttcctgtcattcttctcaagcagtgaaaacagactctgggaaaagctacagctgtgtcatcaacacaattgaggaatatttgtacaaagtaaaaggcaatgtccagatgggtcccatctgtcacatagaatcaagggttgttaaggctgggaagtatcagaatggtcatccaggccactgctattcaaactttatttttagcagaagcacccttttttgaaatggactttaagcagaacctcaatgtgtaaaaaacaatttttctctggtcaaagttggggcagcattcattgaactttctctattcttcaaaataaaccctgaggagcttctgcagtgacctagggtt

SEQ ID NO: 64978 - DNA, 1022 bp, Homo sapiens
tcgaggaagtgatgaacttgtttaggtacttaatcatcatagctattagtccatcaacccttcagagactgtgttaatgaaagtagccagcactcacatggatgattatctatctcatttaatcctcaaaacaatttaggaaaaacatgctattaatattctcataacagactcagagatgttcagtaccttgaccaaggtcatagagctagtaagttaatgtactgaatcttatcctattgggttgtatttttaaaatagaacctatactattctatagagaaatcgtggtcccaatctacaacaaaatcagacttaagcagatataaacaatttataataaaaaggaaaatattttttctagtaaaacaaggttagctgcaaaataaaatatcccgaatgaacaatgttggagaatatccttttcttttgagatctatcaggctcatagctcaagattagccctatgtcccaagccctgatcaggtgaataatgtgagtcatgattctttcctaacttggttctatggctcaggtggggtaaagctcagaagaagaggaggtttgttgacattaagcaatgcagaggctgtccaaaactcatctaaatgatctgttagaaccaaacttccatgatgtatgtatttttcatgggaaaaaatgccataatatacagcaagacttccctgtattccttggtgtgtgtatgtgtatgttagagagagagagagagacagaaacagatattttactttgaaacagtgagtctcagttggaggagaaacatggcattcattcagcagagtttttagagcacctgcttcattctagcattgtctttggtgctagggatataactgtagagaaaacattcaaagtcccagccttcaaagaacttatgctatagaatcttaagaaaaggtaaaggaaggtaagtgatgtgtaatttaaaagcacattttaaggagactcattaatccttctttcaaaatctgttatagaaaataaaacttacccagtcc

SEQ ID NO: 64979 - DNA, 1036 bp, Homo sapiens
atgtgctgttcatcaacaaataggagtgtaacctttcttttattagattaatacagggtcgtgatgcaaaaggctgttggaataattcttactcctttgttctaagaaaataaattaagtaccgtcttaaagtctagatatggaaattaaaatcattaaagacagaaaaacagtgtggccactcattccaaaatctccatgagccttctgtcatttctataaaattcattcctttgtacatttatgaaacaaatttgatcaagtgtctactatgtgctaggtagtgctagatgttggagctatagtagaaaccagaaccaaatgcagtccttgttttcatggcgcttaccacattgtgaatggtctctcctccacatttgaggggcatatatttattctgtgtctgctcaactcacattaaaggatcggcagcctactaaaacattcatgtcacttgtagctgtaaatggaaatctcccaatgcagagctttctagatatattagactaaacactattttagctctcagtttgctcttctaaactagggttccatggtccagtaagtttccaaaggccaccttcttggagctccacaagtttcatgatgcaataaagactttgagcagccttgtgataatgaaatatgtttagtttgtttaacctgacattcccacacttattgaccgtaagactcttaaccccatcacataaatgtaagtctttagaagtggtgttcctcaagatatactatgatgcatgctgctttttctccactagatgttgggacttgttgctaatgactgacatgcagaaagagggtataaagaaaatgtagagtcattatcttagttgaaatcatctcttcaccatactttgggacttctaggacatttctctgctattattcatgtaatttatttgtaccgcaattaaaagtgtagctatcaggggtatagaaaatgaaggtaatacatattcctgggaaaaggaggcccagagagggctgctcagatatttttaaaaattgccattaa

SEQ ID NO: 64980 - DNA, 1015 bp, Homo sapiens
cagagtgctcctacatgcccacattcagtgtccattccaaaacaaattctacttcttccatgtgtagcattttgcagataaactgagtagtgattattcatccagcacatagttcttacccctgtttctcacttgctttggcctcggcaggccgggatatatgagaaaaaccaagaatttggagtcactggatttattagttccatctcttactaattcagtgaccatgaataagctccaacatcttagaacctctcttccctgattcaaaaaatgaggttgacttgtgcctcaccagcctccctggatacttacaaggggcacatgataaatgtgtgtggaatgactttgtgaatagtaaagcactgtgcaaatgagttcaattattaacaaattatgttagagatggaaacaaaggttgatttttggcttgtctgacatttagcatgaagtactaaggaatagattctctgatatctgctcatccaagtcaagtcatggttttaggcaagattcgtaaacaacacgtttctggtgctctggctctcagactgtcatcaagcatgtgaagttccttgaatgaaagacgtaatggaaacaaatgggtgcatgctcctacatcaatgtgtgtgtgtcagtatggcctccaggcatgatagaggacctttcattttttagctgaaattattttaatcattatagtggtattaaatgggctgttatcggggtgcttcttttagttagatggtgatggtgaaagaaaaacatggaccacaaatgtgatttaactgaggatcatctttacttggtgtggataagaacaaagaaaagaccaaacttgtgaacatacaagatcaccttacctggccctcctctgtcagtcacaggttaggtatgcaatagataatcctcagtactactactctgttccaggatggagaattaaggagaggggaggttggaggtgctgccagctctttttctttgtcttttctgtggttgtattatgtctctg

SEQ ID NO: 64981 - DNA, 1051 bp, Homo sapiens
gtaatagcaccaaccataatgaatacattttgtatccatgcagatgtcactggtattttcagtgcttcattctaatttatgctggaaaatgaatacttaaagtattgcccaggctcccattactccagaggaaattagggacgccttgtgtgtgtgcatatgtttttgtgttcatgtagcagatagaatgttttggtcagaatgaattgtgtgcgtgaaatgagagcctagccccttcctggaagggcactttggaggtaattcactatgcctatcagtgaacctgtgcaagcaggtttctttgtgagtgggtgtttggggcacaaattatagtcagattttgttagaagtgaaagagggaaagccctactgattgagggatacacgttttggggtgccccaaggtcttctggccatcttatatacagccagcaaaggttgcagatgtacttggtggcagcagtcaccccatctatcagcctcacactgacgtggccttcaatgttgagggtgaacagtgagacagaggcctactggggagcagaatgtgctaggcttgtggttaattatgtgaactcacctttatggcaagtgttggttcatgacgtagaagataatagtcaaagactctgaaactatggataagggcaggagtactcagctatccaagaaatgacctctcttatgtttgaaacaatatgtaggccagaatgctccagacattcagcctgtctgtaggggattctcgaagtgatatactttcagatacatctgtgccaaaaatactatttctgaggcttgagatctgagcagctaaagggtaagataacttgtaagatccattattacgaatttttattcaagggttctgtgtattaaaagaaggagaagtggtggttttacagaatataagagtattctaagtttctttaaaatactacatttttataccatacctatttaaatcttttaaatattcagaagttgcctcttaataaaaattgtctacttcttttaggattactgactccataatttcaaggcaaatcaa

SEQ ID NO: 64982 - DNA, 1046 bp, Homo sapiens
acgtgtgtgtatctgcctcgctcgctcgctgtcacacacacacttgtgcatgcacacatacagcgtgaatctctattcagacagagattagagataagtgtcaagtatatttatttattgatcctttctctttttctctttggtaacttgtgagatacagcagctgaggcaacaggaaatttgaagtccagcattttattaaatcttatgtttaagatttctatggaaggaaactgcttgagagagatttggtttccattatacacatgccaaaagaagatgaggaaactgggtcaggtggatttcctgaaggtacaggaagcagggaaggcaagtccttgggctaatttctgcttctaactctccaccccctgaaattgcctgggccctagtagagggtataggaaaggttcctttcagacctcatcacaggagatcgccagtgatagaaaatccagcagcactggggggaggaaagggaagctggggaaggccaatgtaaaggcaaagaaaaggaaaaacttaactggccccagggcatttttctcttgaagttcaacaggaaactgagtaatgtagaagttattttaaagagatggaacagatagacccatacatgcatatatatgcacacactgtatcccatgccaggtcatctccctgcagacactttgaaattgccccgttattggcaagggtgtggggaaaatgggcattcctgtgccgatgtgagtaatgattgtaaatcaatataagatttctggagggtagtatcaaatgcctctaaaaccatatctcttgtgttctttgcagaatatctgattttaggtctggggaggaaatagctaagcctgaaggctgtgtagtgctagaaagtagggaagtgctcaaaaacaaaaacaaaacaaaaaaccagaaaaccgttattgatggggatatgtcaatggaacataggacccaactaacagagcactcaaaggccaaagctgagcagtttgagcaacaaaatagtaatattggattataacccaaagaataaaataaac

SEQ ID NO: 64983 - DNA, 1585 bp, Homo sapiens
ctattaaacttgcaaagtcagaatgcctgctacctgatttattaacttcccctttatgcccctaaagctctggggacagaagccaaaaagctaagctgcctatatatgcagcctaactaaaaaatggtcacagtgaaacactgtaaaatgattatgataaaatataatcattttatcagcaggtgtttagggtctgaatgtggagcttatggcatgcctctgacatttcagtttcacaggcaccacatcagacagtaagcccaactcagagaagggatacagcattctgcttactggaatgccttagtctcattctgtcaccccatcccctacccacaaccaagaaagtgttaaatttcacaccatcctcctggtcagaatttaggagctcccagttcctttagctaaacttttttgttttacatcccctaaaagaaattttaaaagtatgtgcctttttgcccgtttttaaattaattcctgaaatcatagtatcaagtgtaaatcgttgctaagggtgtgctcactgacatattgtgtagtttatatgagtttttatatatatttttgtcaaaactttggcactgtgaatttagcttattaaatttacaagcaaaggtgcactatataatctaattggcaaagccaattttggtggtcaaaccatccagccaaatcagacttgctttctgtcagattaagtctgatttcatttttttcaatacaaataaacattagcacacacctcatgataaccacctcacttttgaatttgaagtgttagatcgatggatagatagataaaacacacagccttgccaagagtttcctgcctgaatgaaaaaagagattgtctcctttactattgcttgcggttctctcataggactcctctaagggagacattctaaaattgttacatgctaagattcagaagggtgagtgagagtagcatttctgcggaagtgtgggagtatggtgatctgtaaagtgggagtggctgaaacaagaaccttacagagcacaggcatgtttctgagaaggtaagttttaggaagcagtatatatggaagttaaggatttggacattaattttcttaaaactacccaggcccaaatacttcctggaaagtaattacataccacaagggtatccataccccagttttaaggccaccacttttagatacagcagtaccctcaaactagatcagtgaccgagctaaggccggttaactaaacttcactccgtatttgttctccccagtgtttggcaggcatgacttttcttgagacctgccacctagaagggtcagagtgatactcagcctttctagttagtacctgtatttcattaggtctgggttgtcatttaaaaaactctccaagtgagcaaagcaggatactgttgctctccagatatttgaagggtatttggggataggaacacacttgttctggaatgtaatgtttcagctgccagagctaggaacatttgagggaaaggcaggaggaggcaggtttttattcaggataagaaggaaggtgggttgaggaagaagggtaacattttttatcatttgta

SEQ ID NO: 64984 - DNA, 3062 bp, Homo sapiens
ttcttatatgctgtagtcatgggtagagagaagagtaaatcgtaaacaaataaattatgtaatgtgataaggcctatgacagacataagatagagaatcaccagggagtcctacttagtagagtaccttctctgacgaggtggcatatgtccctatggcatgagttgaaatcttggattttttttccaagtgcagagtgccattgagagtgcagatggtagtagcttctccttgttttttctctcctaacagtagatggcttaaggcttagaggaaatcatacacctgatttttaccagcaatttattttgtcagttaagtttaaaagaattatgactctcacctgctcctttaaatagctgctcacgtactgtataccaggtactgtgcattttatatgtattctcttatttaatcctctagtaactcaagaaagtaagttttatcatcattccccctatggccagataaagaaatcagaatttagagaaacgaagtaacttgcctttggccatattgctcaatcatggtagttaagacttaattccaggtatgtctgacataaagtctgtgctatcaaccagtagactaggctgcctcccttcttgtgatatcttaactcacctggttctccttttcctttgtagtggtgccagtgaagaagaggacacatgaaggcttgctacccccagtggaaaatcatcccctccccttgtgtgtatgtgacagcgtgtatgtaacggcttctgatttctgtgaaagctgctcagcaacaaacgtacttccaccagatgtgtccccagatccacagcaggcacatatctctccaagggatgaccagttttatgcttactgtgtgcttctcatcccctggttgtggtaggtcaaggaaaagagcccctttgatccaccaggagcaattaagaaaggtccttcaggtaatccctcaatggctgctttgaacttactcaggaaagccagcccccataatattgtattaccaaacagtatcgctttgttaggaaggatctggaataatcttgaagggaagtcagagttttctccctgcctattaacaaaaacccaattttgttcatattgaagcatgaaataaatgagagcaaggtagggccaaattaactcttgtggacagtccctaaaagtccagttctacatttgtgaaaattgtggtgccatgaattaagatggatgactggaaaaaggtgttggagaaagagttaaagatgaggaagagatatttttagtatatgaagttatccaggacttgatattcataattcagtgctgtggaaatgaaaaaaatgattgaagaggtggaacggaaatgaccttagggggaaaaaaaaggaccaaagaagtctgattaaaagttgaaatcagtatttctgaattcaaattgcttgaatttccaaaatagtcagtaaaggatctaatagaaccagaattatttgggtgaattctgcaggttttatgggcttgtcacaacgtgaagggctggaatgtatattaccaaatgggaatttccattgtaggtttttgctagtcccacccccattttagcctaatttggcttaaacgcagtatggggagaattgttcccattccatgtgttctgaattcagctcatctcccagcatatagatatatcctcctttaactccgaccagaacccttcttcctgtggcactccccacccatagaccttcagatcatctcccacaccctggatctcactctcctcttagtaacagagacactcctgaggttggacttccttgcttttctctacttccaaatcacaatttcttacaaccaagctttgtgctcccgagtaagcagggatgtactaggggaatgtaaaactgcaaacttaaaaacctgcatcttcttgaagcatcagttttacttaccaaatggtttagagtcataagatgacctatttttatataaaagttatattatagaataaaatgttcatacgcatagactgttaagataaaaaaataggaatcttgcaaggtaattcttatttgcaagtgggttatgtgttcactctcctctacctttatggtattttggtgttcacttacgaagcatacaactagaaccatatccaagcagactctgggttgctgttaacccagggcctagacttctagtgcctctgaggcagaaccaaaggagcctgcactgggggaaatcccttttcctgcctgcctgtctgcctgtgacctgtgtacgtattacaggctttaggaccagctgattgttatgcttgcaggatggttttgaaacagaaacaatacttgtttactgtaggaatcctatttatattatttttcagtcctgtgaatgctgtgaaaagatttattcctttgaggccaggaagctcccaggcatatatgcttctaggttaggattgtcctgactcactaaagatgccaggatattggggctgaggggagtttgaggtgttaaaaaaaaaaaaaaaaaagcatttttctctcaaactgatggccaagaaatggctaggacaattttggtgctttacctatctctgcaaagactggagaatttggcataccattaattacaaccaccaatcatatccaacaaaagtaccctaaaagaaggaccagtggccactctcgaaaaaatttaagtatcagaagattaaaaagattttaggatttggaagcttgtattgtctttccccaataatcattgtttgatctccaaatagtagccttatattagcaatagacagatcattggttctccatatctgatcatatgttactactttgaatcagtatttgggaaattcaagcatttatgcagtggatataaatggaaatataaaaatatttgccaacctgtctcagtaacttatcatatctctgtgatcctcaaggaaagcacttttgcttttacttagaaagcgtttcagatttgctttatagactcctgctgtcttcagtacctgataaaactttaaccagggaagcattaaacacagtgcagcagcttttgcccaggct

SEQ ID NO: 64985 - DNA, 1079 bp, Homo sapiens
agctcagaattgggtcttgcctgggtgcaggtggcagggtttgctgaaacccctaaagagaagtcaccaagggaggcaggtaatgaatgtttccagaatcagtcggatactcatagcaatttctggctatctttcaaatgttgaatttctggatgctgagagggactttgatttgatatcattaaatccaggacagtcccaagaagtgcttggagtctcggctctgacagcccaagaagggaaataacttgtattaaggaacaactatgagccaggccctgagctgtctcttagataataaaacagatggggagtggaagagtcatttgcttcaagttatacagctaggaaatactcaagccaaatcttgaacgcagctccccctaattctgtggacaggcactttgtaccacacaccatggtccacctaaaaacagaaggataaaaagacttcaggttttcccactgtgtgctgaccatcccaatttatgaatcttcttcaaaatgacatttcacagttatagttagggctcagaaatggcattgaggtagccttatttctcccctttagcagatgctttaagtacacattgctgacttgagcccacccccaggagttaggagaacatttcctttttcatgccatcttccataaataaggtgtttcttggccttcaaagatatagaactttgcagcagtagtaaaagtgaagggtgttctgctctctactcaactttatttgaaaatgtctgcagcttcactcctgtagaaaaggaaatcttcatattttagtaaacttagccgccagtgtactctgtgaggatgtggcaattcaaagtccagtgaatctggactctcttactgattcctggttttagtgtgtgtgtcgggggagtgtgtacctatatataaaggacaagtgtgatatgtgtgtatatgtatatacatacatacatgtccgcacacacacacacaatatttgagagctaaggaaaactcaaagcagccccttcattatcttgcgtactacttcaaagatttctgtcagccctaattacaagtgtcaccatatagttgg

SEQ ID NO: 64986 - DNA, 1080 bp, Homo sapiens
taaacgttatgtagatataataccagcgtgacagcttgtggttggtggtttctagaagaaataattcagaagcaaaagacacatgaagttatgtggcagttcctcactagggaatttggtctccagggccacttttgaccttaatccatgttggagccatcaatcaaagaattgcttgcatctaataatggtgtaatgccaatactaagccctggaacgaagataggattcatttctcatggattattgagcactctggggtaacctggccctgatctgatgacgctaagatttaaaaacccagatgcatgtgactagaactatcttttctcccatgatgcactgctttcaacactgcatgactgtaaaaacatgtgccacgctgattatatatagagatggtctaaatcagctgcatcccatttggtacccaggcaaggatttttccatacctatctttttgctggtggtaatgatgagttttgtcacttgctataacattctctgtccgtcttttttcttttatgtaaatacttttgtgacttcattgtaaccagcattttgtaatactcttaacagcagaggggattaaatcatgattcacttctgaacagtacaatcagcagtaggaaaacgaggagggagggagagggaaattgtccaccacttcccaatgataatgcctggctcggaccccagattcacatcatacttgaagttcataaattctgggcactgctcagcttgaggaggcaggcattgctccttcatatttcagggtgagacaaatgctctgttgaagccatgccactacaggatacattcacctctgcttgctttcctccctaagccagagtgtagttaaacatttatatgtcccaggccaggagatcaaattaagaggaggttagctactttccctggctcttaaaaacatttgagtccaagtatggttctctggcttgagggtggccatttgttgcctcactgtttttattaggacatctggagattagaggtgttaattggaagtaacttttctatatttggtttctctccacacattatgagaccttttag

SEQ ID NO: 64987 - DNA, 1053 bp, Homo sapiens
ggtgagtcggggggcggccggcgaacttcccgcggggcgcggggcgcggggcgcggggcgcagcggccgggtgcgatcgcgtcctctcccgggcgcgggccgctctccgggcgtgggtgagcgcggagggcggaccccggcgccgggctggcccggaccctgccgaggggccgccgcggggtgcgagccgtcctattgtgtgggcgtgcgcgccgggtcgtgttgtgctgtgtgcgcgggcggggctctgtgtgcagtccgggtctggggagcccggcggctgccccgattgggcgtagctcgagtgtggctgtgtgtgtgttgtgtgtgttgaggaacggaggcggggaaaggaaaggagaggagaggagagaactcttccctggtctcatcttcccagacgcctggtcgcgcgcggctgcgttagcctcctctgggcctcttcccgagtctctggcgtgcactccgtgcctcagtttccccacctgcaccgcggagggagtagcaaagctgcttcctttcattcctctctgggactgtttggtttgggtaaagtgagttgaagcaaggccggatctgggaattcatttttccccactgatcctgggaaccgaagctttatttaagacgtctgaccaccctacttgccccgcgatgggcgccctgaccggcgaggggccctgggagaggacacggggcttcatccggcggccctttgaacctggcatcaccaccgcgtgtgcatcccggggcctggaccgcagcaagcctctttcccttccagacagcgtgctgttcccaggaacttttctgctgatgtgggcatgatccgaattccagcctgggagcccttcctcctctgcccctgcccgccgcccacagctgtcagctgtccctcctggactgggcccgcccttggccccttgacgtttatttctgggcatctgatgcctagaatgtgggtgacagggcccagtgaactttcttcagcagaatcttgcctgcctggtgtttgtgccatccacatgtccaatagctgccctattttgccaa

SEQ ID NO: 64988 - DNA, 1020 bp, Homo sapiens
agggtaccacagtaaaggctgaagcctagattctaacttaagcttctctttgccccctacctgggcttttcccactctgtttccaggcttcctgcaccatgcttccatgcctttcctccacagtgctcttgcgaattgacacagtgagattgtttacatgaatgctccccctccccaaatctgttcactttgtggtcactgcccaggatctattcagcagagacatcagctttctttgcaggatactttggtgttcatggtaaatacataaaatacatctcaatccttatgtgaagatgaaactttttcagactaactctggtccttttgctgtgtgtgtgggtgagtgacaaacactaggcggggagatgataccagccagggttcgatttcttgacccgaattgtagttacatgggggttcgttttcattctttgagctctaaattcgtattcccctcttaaaatgtgtttattgtattttagaattaaaaaaataaggtactttccaccatggagatgccttggagtgatggaactgtttttagctatgggattgccccagggatggatctatttttggttgttgggttttcttgtttgttcttttcccctctttctgtcttcaaaatatttaggaaatgcttggaccattctaaccatgcagttttgttgttgttttgccagtgcctctacctgacaaccagggagatttttaagttggctgatcgtgtgtgtgtgtgtgtgtgtgtgtgtgtgtgtgcacatgcacacatgtgcatatgtatgtaactgccttcttctattgttgtgaaaaaatctactcacttggatgctaaggagtaccttgaagatgtttgctgggagagcagccaggtacttttgatatgccgtatttgctcgtcacatcattggcttgatgtttaatacatcttaatatagtacgtggacttttatgacagagtaactgcttggtcgggggagagcaaaagtttacttgagataggattcttagggcttt

SEQ ID NO: 64989 - DNA, 1837 bp, Homo sapiens
tggaaaagccttctgtagtgaggagctttagcttcctgagtgtgcaaatgtcattttctttgtctttggatagttagcaatttcttaatattttatttggttgttcgtcattgtgccatcatctctgccacacccaggcactgtgtctatttccaggggtaggcgaagccatgtaaaacttgttctttgcccttgaagacccaaatgacccactgatggaaatgggattgttgaccttcttcgttatctgggaagggtagaggctctctgccagtgtaatctcggaggcatttctagacaggagttgtactgatggatcttggaccttgatgggaacacagagccgtgaagatgtcacagtgcccaggcaaacatgggtactgcgtcttcagggatatttaatcaatgtgtcattcttgaacaggtttcagaggtgatgacacatgtcctagtttgcttctttagctttcaagataaaatactggtatacgtgtattggtgctctgtgacttttctagctctaggcttctgaggtttgagctagaaatgtcttctgtggcttttggacaatagccttctttaccttatggtcatacacagtatatatgtgtatgtgtgtatgtgtatgtgtatgtctgtgtataccctggttatatatatatactgtatatgtaaaacctttcttaccttctaaatcctgctagattgaaagctccttgagggactgggatcatatattaagtgtctgtgatactttttcttttgtggtgtctagaagagtgagagtggctcccattcattgaaggtttactctgtctggcagggtggcaagcactgtacgtgtcttattttgttataaacttcttgaattacaaacactgcaaaaataatacacgggggccaggagcagtgactcatgcctgtaatcccagcactttggggggccgaggtgggcggatcacgaagtcagaagatcgagaccatcctggctaacatggtgaaaccccgtctcttctaaaaatgcaaaacgttagccgggagtggtggcacgcacctgtaatcccagctacttgggaggctgaggcaggagaatcacttgaacctgggaagtggaggttgcagtgagccgagatcgtgccactgactccagcctgggtgacatagtgagactctgtctcaaaaaataaaaaattaaaaaaaaatacacagactgagtacgtgcttatgatacaaaattcatacaaattagaagtaatggcaataataaaacattaaaatcctccttcatcttcctttcccatttctctcccctcccttaagtaactactgtgaattgtctggtatatatcaatttagctttaacatggatttataattatatacaggtacacacacacagagacataatttaatgagctcctgcttgtctctatttgtagttttttggctggctttttaactcaagtactatatttcatcaattttattttgagccatgtgaatgcgtcacatctgtctcctgttgtttagacatttcagttagtcccaagcaatttggcagtttccctcaccttcccttgctttgctcggctcttgaacagacaccccttttgttgctatctcagaagcacagctgatacaccttcagttatttgtgttttcctcttttaattctcttaaagggctggctcttgctttgcaagaaaatatggaattatggtaatttcttgcagtgagagatatttgcttcactattatcaaattcatgctgtttccctgcctctttgtgtatacacaaatgtgtttaatttttcatttcaatgccacattttaacat

SEQ ID NO: 64990 - DNA, 1930 bp, Homo sapiens
tgcacataactggagggaagtgacgaaataggaacagctgtgaccaagtttacccaggcactgccagtgaccaataaatcacagcttccgcccaccctgtgcttttagaagatgcagttggccattaggtacatcctgatgtcagagatgttacaacatcaaataaaagtgtcttcttggccatctttctttcggctcttatatacctacccatgcttttaaaaacagctttctggtgtgtgtacatactataatttatttaatgctttccctgctggtggatcttatttcattttcagagtagtttattcaggtgggtagtatgctttaccgttttatagatgaggaaactaaaaggttcagtaactttcctaaaccttcgaccagtaagagatagtttcagaattggcacgtgggtctgcgtgacttagacttggtctcctaaccactggccctgctgctttggtatagaatagaaatccaagtctgtatgtgttgggagaagaattgcaccgtctaccttgtgctggagaattccagcattgcatagggatgtcaatattgacttcatgcttatcgtgttggatagaatgatttgttagagagccattggagtggggggcatctcaagttgattctactcaaatggcctgtctttggcagatagaaactgctgttctcctatgtggagaacgtatcagtataggtgttgaaattggcttttgcaaagactgaatttattaaacaaaaataagaataaacaagttatttcagcaccatgacacttgcctttgaatatattaatgatagagataattcttcccccctttatgggaatattttgttggaataccaaccaaaagcaatttcttttcagcacttccctcaaatagtgctgggtgccaaatagaagggcccactgttcaaaaagtctggaaatatattttctagacaaagatacagtactgatgataatgcctcgtatcaaaagagaaattaaagtatttttagaattactttctgaccctgagcttaagcttatatggtccatgtatgagagaacatttcctgaactagagattgatgttctttattgtggaagctgaaattttaatatgttgctccagaaagaaactagaaataattggccccatcttgttgcttcaaactaaggggctcttgtgcgaaagtaggcagtgatgtcttgtgagaaagtaatgccacaggcctgtaaagtgttagctacaggcagagcagagtgaaccccaggattttaaacttactcccaaggcctttccagagacctgagaaccggactctccttttgttgagtcattgtgatatcaagagacaggtgataaattgggtgaattcgctgttgcccaaatccaactgtgatttttgacagacaaatagcgcagtgtgcagacgatgttgtctctgtcctggcgagcggccacggggagggagggcaggccctttagcttactctggaacaggccttgggcatccgggtgctgcaaggatgtggaatttatgaataacttgatttagaagacttgcatacccaaggtgccagtgttccaggtggcagtgggacacttatgtgtttgttggcataaagaaatgaaagcataaagggtgtttaattttattgcattaaaaatcccttctcattattataagaccgagtgagtttggcttagcgaatgtcagaagtgtgtcctctttgatggcattactggaacattttccttcagctttagccttgaatcagagcagtgttctccaggcgtcgttaaactaattggacatggctgaaaaatgagccctagtcacacttgtagttccacagtccgttgaaaaaagcctcttgattgatttggaaagttctaaatttaacttgtttttttattataaaaataaaatt

SEQ ID NO: 64991 - DNA, 1113 bp, Homo sapiens
taaatagagtgaaaagttaaggaaataaaatccattatgtaaggactacttttatggtatcatataagtaatttcatagcattaagcattaaaatagataaacagggttactgcaaatgacaaaagattcattaaaaaacaaatatctgatcatcccacataaaaagacatgaagaattaggaacataatgaaaggatgttgaaggttcttcaagtataaaattagctggtgcttgccaaattttggaaggttaaaatatttagagaatacatagttctaatgttttaagtaaagtctgtgggaatggggaagtgctcatcaggtgctgaggactgggtggtgtgtgcagtgggaatggtgggtgggactgaccagttccttggggagcccccaggggcctttcctacacacctgctccctggatctacagaagtgctcactcatggaagctatggggataaaatccttcctgctaatgagatgagaaggttgattaactttgagttgggcttagtgagtctgacaccagtggctgcccaaggggagtctgctggtgggaatttacaagagcagcttcgggcctctcatatggatggaaagaggatgtaaaggttactgaggagaaggtgtatttttgttatatattattaagctttcatgttatttaaattattcgataacagagctgggtatggtggctcatgcctgtaattccagctactccggaggctgagacaggaggatcgcttgaggccaggagtggagaccagcctgtgcaacatagcaagacccccatctctaaaaataaaattcaaaataattattagaaaacattttcctggttgaatatagtgtattttctcttttaagattttacaatatggattgtgtagagctttgctactcttagtgtggttgacagaccaacagcatcagcatcacctgaatcagaatctgcattttaacaagatccccaagtgatacatgtgcatattaaagtttgagaggcattgatgtggtgattaagaatacaggctttagagtgagtcagtctgggttcagattccagttccttgccttgaccttggctaggtttcttaaactttttaaat

SEQ ID NO: 64992 - DNA, 1057 bp, Homo sapiens
tagccacacactggaagaggaaaactgttctgtgtggagtgcttactgtgtgctccgggtactgtccttagtgcttttaggtcattatttaatcctctcacaatcattcaagtaggtgtcacaggttaaattgtgtcccctgaaaaggtacactgaagccctaaaacctggtacttgtgaatgcaaaccaatttgcaaatggggtcttgacatatgtaattcgttaagacacagttctgttggactggagtgggccctaattcccatgactggtgtctttgtaataagagggggtacacagacactcacagagggaagatggccttgtgaagacagaggcagacactggagcatgtaggtgcagggcaaggaatgccaaggattgccagcaacctccagaagccaggcaaggaaggattctgccctggagttttcagaggaagcatggccctgccgacaccttgaacttctagcctctagaattgtgaaagaacatatttttgttgttttaagccactcagttcgtggcaattaattacagcagcccttggaattagtatagttagaactacttagaagaatattaaccccattttatagatgagtacatcaaggctgagaggtgttaagcatcttgccccaggtcactcagttcataagtggagacagacaaatcaggtcttgcataatgccgctgccaagtccatgcattcattttcatgatggagccagcaaggtggtaactttctaatgctgggtatctaggacatcttaatgagcagtttagtctcaaagggagattgcccagttgcagtttagatctgcttctaatcctggatttggccagaagattccttgattgactctgggggaacctttacctttatagagaggatacaggcctggtattttctgtccaggggatctaagcatggggtggagtatgccatctctccctggtgctcagccaggcctgtgggtcatcaaggacccagcccattctgcagagagtttagacagcttgcccaaagtctatctgtagttggaagaagcatga

SEQ ID NO: 64993 - DNA, 1920 bp, Homo sapiens
agctgtggagtgtttgagttgctgatggattagtgccaatctctctccctgaagaacaagagcatgcagaacaggcatctggaagaaggatggaaattctggcagctgtgttctctgcattttcgttttccccacatttccttaagtcaattttgttacctacagttcctggccaaaataatgcttccatttcctttcccaaaagtcattatagattgattgacctgtagggggtagagaactcagactctaattaaaagatgatgggttaaaggaagttaaaaaccaaaacgaaataacaaacagtataggcactggagtgcaactggtgtaatctttggtactgagctttgtaggacagagaggtataggatgatgccgtgattcatgagagaaggttggagaatggaaccttcaaatgggctgagccagagagctgcccaggaacaggagggagcactggggattttttttttttttttttagaagaagggtgtgaagccaaaaagagttgtcagttgtgtttggatgtgctgatggtggtagagacttctgagaacaggtgagtagagcattgtgtgcccaggctcaggagaatgttcatatagaagataccctgggcaggttggggaatcagttgaagagagggaccctttttgatatcaggtaagaggagttgggctggtgaggggtggaggggtctcattttcctaggagtgtagggtgctgaaaggaaggatagggcctagttcctgaagcagaaatgtgatgatctcagagttggggaccacatggatggggtggggtgatgttggcaggaaacctgcctggtaattctttaaacttgttgtgaatgaatggcgtcatggtagaatttgaacttggaagtgtacacagttagatccttatgtcccttcataattaagacaggcatagttgtagggattagttctgtgagtccagctcttcctgagatgcagaggggtcatatcttggtgggaaaggagggtaggaggcaatatgggactttatggatgttggagctggaaagtttctccccaaaacaggtgatgagagttggctaggtggcctccgaaggagatcgtgtacaggagaggtatggaggcccaggggcaatggatgagggatgctttctggaaacacagacatagacacagtcaggaaggggatgctagtatttcctgtgtaccctcatttcctcccctcctgtgacagtgcatgaatttgacttcattcatcatgaaacttactatgttccaggcatcgtgttagtcacttgggggtactgagttgaataacacaaagtctcttctctaggagcttagtctggtgggggtggggaaggacactatgaggtgtctgagacgatgttggaatgaataagtcttccattttcaaaagagtctattttagttgaattttattatatcgcaaggtggacggtgatttaaggtgtgtgtttgtgtgtgtgtgcgtgtgtgtacacacatgtccatgcatgcatgtgtctgtgtttagctgtgttgctttggctttttatttatcttggagttctagaaatatgcatgcttacaacatatttacaaatgtggttttttgggtgttactgatttattgaaattcaagctcgaattcaataactcaccttattagaatgaaaactgcattgctcaggcatgtgttatgcctattgagtggctttcagagcctgctggaggtaggtaattcagggtggcatggtgctagctccatgctatcagggacccagctccccctcttacttggtattcctgtgctaagtacctcatggcccaagatgactgcttgaataccagccatgtcatctgaattccagttggaggaaggcagaaggcaccaagaaggatgggctccgtcttc

SEQ ID NO: 64994 - DNA, 1013 bp, Homo sapiens
gggaaaaaggccctttcaggcctctttcataaaggtgctaatcccattcatgacctaaccacctcctgaaggccccatctcttaacactattacattgggaattagatttaaacataagaattttggaggtacacagacgctcagaccatagcagtgccttcagatggtgggcttagggaaaacagatggtggtttcaaacctgagcccctacatcagtggtcaccgtggcagactccaggatgtggatatggatttataatagggctgcagcttcctgtgtgggttccatgggatatgctccagagtgaggcacagtggggatcttcttactgattgacaatggcttgtgattctcccaagtgatgcaaggtaagccagcttatttaaaataaccaggatgtctaattcacatttttaggaggaagggaagtaacactgaaggctgtttcccattgcatcaaaggcaaaatccaaactgtagtcgtttgtgaatggaatccctgcctgtctccagcctcacactcactcgaggtgtgcctgcctgcagtgctgcactgctcccttcagccttcgtgcagggtcatccagggcagggcagcttcatccattctgtttgtgacattgtgtaacacgacccagtacggccatcagttaaatgtgtttgctgtcgtggtagctcttcttgatgtactaaactccttgattcaagatgggctgttcctcacacatctttgggaccccagctttgctttgcttgggacatgtgattctgacccagtaccccagacctgaaggcccctctatgtgtcagtcctgaaaggattcgctgttttcttagcctcatggtctctcctaagcaggaggcattgctttacctagagcagattattgagctggaaaagacagttaataggtaaattgatcaccagctgagtccaggatagtcagctcaatgaaacattaaaattttaaacacctgcattcagagttgtttctctaacattccaagtg

SEQ ID NO: 64995 - DNA, 1008 bp, Homo sapiens
tgcgaacaggtgctgataaatccttttctactcactccctgcccaacccagctgaagacttcttttataatattctccccgctagccagatgttttgaaatagcaaaattattaaataataatttgtattgttaaaacatgaatgaaatacagatatagctatgagagtttctacttagaggtcgttcttgttgccttgcagatgtgttttgatttcagccaagaacaaagatatttgatatgtcaattgcccagtgtttaggaaaaaggataattttggttactgcttttgaactagtggtgggaaccttggaaatcccccacagtctggggaccccagtttagaagctattattggggaccctcgggccactgctgaccccaggggaggcaagacttcctcgtttggattttggttttcagattggttgggggaaatctcacatacgggaagaagaagaaaaacaaatataagtaagtttccctttggggccatggtccacttacagctgtgacttggacctttcacttctatttcctaaatgctcacgtcattaggccatacttttgggaaacgtgagggcagtgggcagcgggcgggggttgggggtgggggggctgagtcagagggagggagggttttgtggtgacaaccagaactctgcaggcagagtaacttgggactataactttgctgtctgtttctcagctatgtgaccttggccatgtcacttaaccttcctggtctcagtgtcttcatttgcaaaatggaggcaataacgacctcagtgggtggctgtggggattaagtgggttaaggtttgtgaaaaacaaacaagaacaatgggggtgtccttggctgttagtattaagaacagaaaaataactcatgaatatctcagattctgatagctggtgcacacgctgatgaaaagatttgttttcagatcctcagatttttttaggagtacacttctttaatgttcatttagatggtcctgatgctgt

SEQ ID NO: 64996 - DNA, 1014 bp, Homo sapiens
aaatgactggtttttcaagatagtaggaaagcagtattggccacagagatccaggtggctgcatgaacaagaatgcaaccttgattttatggtctttatttcgttttccaaagtcaaggtccatgagttgattaaaaatatcacaaagtgatttaactattcctcagtaatcttgtagcctattgccatcaaactttgttgacagtgacttatggaaacacattggtatgtccacacacaaatttgtgtgctggtggttcatagcagcattcataatagcctgaaagtggcaacaacccacatgttccccagtggatgaatggataaataaaatgtagtgtatctatacaatgggatattattcagccatacaaaggaacaaagttctgatacatgctacagtatgattgaaccttggaaatattatgctaaatgaaaagaagccagttacaaaagaccacatattgtatcattcaatttataggaaatgtccagaataggcaaatacatggagatagaaagtagataggtggttgcctagggctgagtgggggtttgggaggaaatagggcatggctgctaatgggcatggggtttccttttggggtgatgaaatgttctaaaattgattgtggtgatggttgcacaactctgcatataccaaaagccatagcattgtatactttcaatgggtaaattgtatagtgtgtgagttttatctcttagtcatgctgttaaagatcacatttacattgcaaacaagaacatttatataaaggtgaatcaaaacatacccttcatatctgatatattctaatttattccagtcttttccatttttttctttaaaagtgtctggacatgagccatgatactgaatccataatccacacttttatggattcctttccattttacagatttaaaaaatggcgtcccagtgcttaagaagtgagtacagggttacacaatttataaatgactgagttgagacttcagactgggtctttcttc

SEQ ID NO: 64997 - DNA, 1050 bp, Homo sapiens
cctctggattcggagtagtaatagtaatagcactttaaagtaggctcattactagagcggttattgcttttgttcgaaatggcccatctaagtcaggccctattaaatagagcaatttaactgacacttagcgtctttagggagataaattatcctttggcctggtcacctccactttgaaatttgatcattggtatgagtcctgggagagtcgttcaggcagatgcatttgttcatgtaagcccacatttcagtcattcgttcaggacacatttaatgagggccaactctatacctgacactgtgtaaagccctggatgtgtgataacaatgaagaggacatgggctctgcttttaaggagctcacagcttttattcagtcacgaaacatcgattgggcacctactgtgtgcaaaaagccctgtgcttggtattgcacgggagacaggttagtggcagaatgtgtgtgttcatggggcctttatgatctgtgtagagaacagacttacaatcagttaactgggtgcagcctagaaccgaatgtatgttataaaagaggtgcaggaaagtgctgcgaccctgaggatgcagaggttccttcagttggttggactggagtagcctcatggtagtggtggcattactgatccttgaagaatgtcctctctgttgagagtcagccagattacccggagaaacggcgtttaaagcaggactgctccaggggcctggctgcagccacaagcctctccagaaccgagcctgcccctcctcatctctcctgctgcctgcagattcactccttcttggtgttcttggcttctcattggaggcggctgcgttctcatcctacccactactttctccaggcttcatgtccacgacctgcccaatcccaagtctccctcacgctcttccattcagctcctttggctaacccaaagtgcactaattctgaagacccaaagggaggggtgtatcacctctttgtcttttctggagctccacgtgtgtcactggcctcctggaaatctcctgttggatcaaagg

SEQ ID NO: 64998 - DNA, 1023 bp, Homo sapiens
atcattagggccatttttatgtgaggagggcatattatttgtcatttgtaaagaacacttggggacgcaaaccaggcagaatgggtaaacaaattgggtaaaatcctatattttttcaaaaagccatttgaatgtgcacctgaggcctgaaaatgtggattagatacagattgtgctttgatgagagtgcagttgtacctcaaggaaagcctcctccatcccaactccagggttcatggaagacggtagcattcctatttggtgttgggacctcttcaaggcttgagaaaatataaggaggaatttagaatctggggagagggatcctttctcccaggagtttgttggggtcaagaaatgtaactttaaatgctcctattgcaagattgggtttgtcgatacacaggcaattctttgggtgttccagtcctatggggtgagaaagaatgaatatatatattttttatctgtctctgtatgtgcctgtgtcaattcctagtaaatatttatgggctggcaagttgcaactgggaaaggcccatgtttaactggctaaatattaataagcatattcaagagaactgaggtctttgttttgtcttcttaagaaatgaatccgctcttattcactgtgtattcacaggaaactgtgctgttcagggaagaagtactgccttgttttccttgtaggctttccagcttggatttcgatttccactgaggccttatttttaaaaacatgtttttacagcagcattacaactgtggagattatagcagtctcctacagctttggttatgaaaataatatatatcgtctttttattccctttaattgaccattctcttaccttcctttgtctccacatggagacacggctagatatctccctcctttgtatttttttctctcttctccaacactctgagatcaaggcccaagtaagtacacaccttcacttttatcctggtttcctggtatccagtgaaatggatttcatactgctgaaatgtccatccttt

SEQ ID NO: 64999 - DNA, 1031 bp, Homo sapiens
ggatacagaaagaaacaaaggccaaagttagggtgctaatggtttgggattcaccatggggagaaggtgaatcaacctctctgtggatggaggactggaggcgtgactgagaggcggtctgccacccagtgcagagcagaaacagagggctgactcagagaggcgttgtcacctgctggatgcacttgggcctggctctcttcccctttaacatgtgtctgaccttgattccctgtgagctggctctgtgggcatgggtcatcacagaatgctgggtttgtctatgggcagctgtgtcagatgatgctgacagcacatgttatcacatgcaaagtccttgtgccccggagttctggaggcaagcttttacctgccaaagttgcagtatgaaggactggactacatttgaatttttactttgagccatgaagaattactggtttacactcaagctaatctggaggtaaaggttgcctcacagaaaatcctagggtccatagccttctcaggaaagaaaataataatatgaataaaaaataatatgaataaaaacatgaatttttggttcctatgcccgctcctaccttttaaaataagcaagttattatctgagcgtgaagagacatgttttagttctgtaatcttaaaatgcatgcaaatagggactgtccacaagatggaggaataatcctaatttgaaggaataatccacaaaatgtttatagtattttagcacagggaagcaactgtccatttttccctccttctttttctctctccatttcgatagacactctgttgtgggctctgggctacattagaacacattccctcctgtagtttaaaagttgttcatgagttgtcgggggaagaaaggcacccaacagaaatttgtggagcattatggtaaatgaagagatagaggtttgcataagttatgttgagaggtctgagtgggggcttgtacattgtcttgggggactagggagaaaacccctggagaggtgggctggccaggatacccagggcac

SEQ ID NO: 65000 - DNA, 1038 bp, Homo sapiens
tcataaatgtccagtaaatgcttatggaatgactcaggagggagctctggagttgtggtgtgctgaaggactggtctttttttttttttttcctgcttttccccaaaactcttttactcacatggctccttatctctcagccattgatcacaatggatcagactggtcagatcgatcagatcctggctcccttgaaaatctccccccagggtctactggtagatgaactcagcaccctgcccacctccaccgccacagcactggtgttctctctttgctttctagcctgagggttggctgttcgggttgggggctttggcactttatgaccatgttcagtggagttgaatctgaacttgcagcttggttctcagcttccagtaactcttgaaaggcaattccatgaccttgggaccctgctggaggttacaaatcccaagttcaagattcaatgtggccttttctacctgtgccacctcaggcaggttggttttataggtctgggctcctgtttcctagagtgaaatgatctcccggtattccttccaacttggcccaacttcaaggattctgtgattgtaagggctacagagtgtgaggcctggaaagatcttgcagttcctaatgttggagacattgggagtccagtgctcactcctgtctagaattttaatttttaaccactgctgatggccagaaaagaacatttggattttacaaccagtctttgatggagaaagaaaaaaagtcagtgaacacccattttgtgcctgacattcaagtatgtttgttccctgtatttctccatttagtcctctcagaatctctggaggtggactggggcagattattagtccatttcacagatgaggaaactgaaggtcagagaggttgagtcatctaccagaagtctcacctataccaaaccacacacctttcagttgaggggcgctgaggtccctgctgttgctgtgccgtctgacctgtcccctctctctgacagagagccagctgctccccgggaacaacttcaccaat

SEQ ID NO: 65001 - DNA, 1025 bp, Homo sapiens
aggagtgccaaggattggctttctcgtatgagtgagatgtccggttttttttctgcatcttggttcttggcaagccactgctagccaagggctgaattccaagggccttctgaaggagttgagcctcagaaaacataactggcactctgaagggtctagagaatatcgtggtttaaagctctgtccattaaacacttcagaatgaaaagacatgctctttcacagcgcttacggtgtgcgggaaatccaagacctatgtatattagcgttgcttcttttctcattgagtcattctgtttgtatttggtttttaaatgtctcacctaattcctggcatgatcctcacttcactaaatttctttagtcttaaatgcaaaaccattaatgctatggttaagaacaggggctttgggcccagacagtactgagttcttcccccagcttccatttatgacctgtgcagcccccgggcttaccatgcacctattttctcatctgtaaaatggagataatagcagtgcctatcccagagatgtgatatttcaggggtgatgttttaaacatctagtaagtgctgtgtgcaggccgtaagccagttagaaaggactggatttaaacaataggtactgtttcctggtgcagagaaggtgaagatcagctctgagtctgacatgagctaatatgaggcttgtagctggtgcctggtgtgagttaagcattcagtgaatgctagctgaccctattccctcaaacacatgtatactggtgacatttcctggccagagcaatgctgggagttattactcccctgttcccaacacctccatcctccgcttccccttcccacgcccggtcttttcttgctcttagtttgagagcctgtgccacagaaacaccttcatctgctaggccagtatctgcttttcactgtccagtcttggacacacattcatgagctcacatggaatagcttttagcttagagctccagggagccagccagatgcccaaactggtgcaaaaggg

SEQ ID NO: 65002 - DNA, 1060 bp, Homo sapiens
ggacctatgtcttaatggacctgcagtgggcgcccacccccagagtggctgccatccgctgttctcagctctgctggagccctgcacaattaaacacctaagtggattttaatgacgatattttgcttcagcgctcaggcttctcagcctccatgagtatgtagtcttttccaccttcaccacactggcctgaagtcagcaccactccctatggccttcagcactgtaggcctagaacttgcaaaaattactgtcttcctgaccccctcttgccactccagatgtgctctttgtgccttgtggcctatcatgaggacagactttcagttcagatgttggaatcacagcatgaagtttgaggtgggcatctgataagcacccacctacatacagacgtttccaggttgtcaggctacacttaacatgcgtttgactgtattcaaacttttcttaaaggcccctggtagatttttgaagatgttggtaattttacactaaggggaggaagtacaaagtgctccaaatctttctggttttattagtttcctagggctgctgtaacaacataccacaaactgggtggcttagaacaacagatatttattctttcacagttctggaggctagatgtctaaggcaaggtgtcggcccggccgtggtttctctgaaggttctaggggaggatccttccttgccttgtcctcacttctactgatttgctgtctgatatactttggccactgattagctgtctgatatggtttggctctgtgtccccacccaaatctcaccttgaattgtaataaccctcatgtggtcatgggtgggacctggtgggaggtaattgaatcatgggggtgggtttttcctgtgctgttctcatgatagtgaataagtctcacgagatctgatgggtttttttttttttttcatttcaaaaaatttatttcagtagtttttgagaaacaggtggtttttggttacatggtaagttctttttaaattttattttaagttctgggatacatgtgcagaaagtgcaggtgtgttacataggtat

SEQ ID NO: 65003 - DNA, 1040 bp, Homo sapiens
aatcaatgtcagctgtactcttcctggcagtgtggagatcccagctctgcccctagctagtcacttctcttcttggaatctcagttccttcatctgggaaatgggagcagatgtgaaaaggggcagggtgagaatacatatgaaagtgctggctcctggtgcatagcaggcacttaatacgatacacttttccatcttctgccttccccagggatgcattgtgccatgtaagagagagagcctccagggttggcgagagtttttgatccaggctttttcaggtgtcaaagatgagctgggtgattctccatagattctcctttctaacaggtgacagttctgtttcagaaatactgtggatgttcaggtttacagcacattagtcaaaattagcacctcctcttccctgaaccattttcaggagatggaatccagggatctcttgatagtctggttctgaggagtgggctgggggacagcctaggatggggagccccactccaactacaatgctgtcgagttcccattgacacccccaccccctgcccaggaggtgagaagaatcagactatctacctggggtcccggtgctccctcccttgaagctgggacagaagacccaagactctggttgggaagaagttgagtcaggtctattgagataaggcttcctggagcctagagaaaatctgagaagaacttatccaattaagtatctcccaggagaagagtgactgtttcattttctgaagtgactaaatcccccagttcttagaacgtttgtttcattatttagttaagtctcctgtcacatatctctgctggtgccattctaatcctattctggtggtgatagggggacttggacggcatctgcaagaatcccaccaggcctcttccatctcccttggtccctcctaggtgatagcagctgttgtttgggacctgccactgctttcttggaaactaccaatttaaatgccaatattgtcaccagctgagaagtgagtggtatggagtcgtcttaaagttgtctttta

SEQ ID NO: 65004 - DNA, 1054 bp, Homo sapiens
tctgccacttgtcagccaagaaatcttgtgcaagtcactgagttctttaggttgcagttttctcatctggaggagggatgaagtacctcatctcagtggagcgcccagcactggggttgatgccctctgagcactcaggagatgtctctttgattttcctttaatcattagtaataagtagtaggaataataacaacaaccctccagtggctcccagattgcacatgaaatcaagtgtgtcttagagagccctcctggctggtccctcctgtctcttcagcagcagctccttccctcctgctctccgcccgccagctctgtctcacaccctggtgctgtggcacatgccatttccctctgtgcctctgtcttccaggcacaacactggaatctcactggagcactcacaccacttcccccagaagcaaagagccacgtcttccttcacgcttctggtcagtcttgggggtttttctgaagcatatgacctactttatcaactccatttgcttataggtctgcgtctctgtcagattgcgagctctttaagttatgcttgcatccctggcatcgggtttggctgacactcattgtggactgtttgaatgaatgaatgatttagtggcactgcaaatcaaaacccagtccactggtatagagggagagccctctgaatgtctgagatgatcttaccttgttacatacaaaaacttagaaatccttcttgagtcctctgttttagtaattgcccactctccctattctaatccattagcaagcccagtcaactctacttctaaagcagtgggtctcagtcagaggtgattttaaccctcatagtcatttggcaatgtatagagacatttttgatggtcacaattggggttgcagctggtgtatatggatagaggctaggaaagatgtgaaacaccttacaatgtataggacagtcacctcaacaaagaattatccagctttagtgtgaagagtgctgaggttgaggaaccctgatttagaggatactgagttcattcacagctctctgtcttcccca

SEQ ID NO: 65005 - DNA, 1110 bp, Homo sapiens
tcttgtgtccaggtttggctggccagccttacagcatgggctttgagtctgccagcttagaagataagcttactgcttcctgagcgggacacacgccaggctggaagaagttccagggtccccaagggaacttgctggcctccctggtaatgtgctgtgttttccctctgcagcagcaaaccctctgctttgctccaccgcccgctaccactgcaagaacggcctctgtattgacaagagcttcatctgcgatggacagaataactgtcaagacaacagtgatgaggaaagctgtgaaagttctcaaggtaggaacctctcaagctctaaaaagataattgcaacacaacactgcagtaatggaacaccctgaaaggcagaaagcaacacccattcccattccaaacacaatagctctgttagtttttgcactcagccttgcagcccttgtacaggtaggtacccgtgtttacgtggctttaactacaacacacctaccattttgaattttgtattgttcctgaattaaatatcatctatacatttctcttcaaaactgtaatatgccccaactgtgttacatactgtcatgttactctcctgtggttttctgagacaacgctttattggggcaatccaggttgtttctttcccttgaattacttctttgggataaagtctgcagagtgggatgtctgcacaggtgtctgttacacctcagcatgcagctgtgtttttttttcttttttaagtttacattgctgacatcattgtctgtgcctgtcagttttactgtgctatcacagacattcacaggcatcacaactgctgccctattttttttttcccatttttgctaatttggtagtcatagaataacaacctccccaaatgctttcatttgcatttctctgattatgagcagagttcacattttttcccgtcatgtttgtttactgctttgtttccttttctgtgaattgcctccttgtgtctgggctattgattttggggctgtctcatggaagctgagggatgcagctggaggatgggaagatgagctttgttagggagtctgaggaggacacaatgggataaggtcatgtcctc

SEQ ID NO: 65006 - DNA, 1014 bp, Homo sapiens
ggaggcgagtcttggatagaattagcttctgattgtctttgcctggaaaatgcctttcttgggtcgactcttcacagtggttctcaaagtataatcctcagtccgggagcatcagcatcacatgagaactccgaaaatgcagttgttcaggcgccattctagaccagctaaatcaactggtgtcggtgggcccagccagaaatgcagttgttcaggccccgttctagatcagctaaatcaactggcgggagtgggcccagccatcggcgttttacttaagaagccctcaaggtgattctaatgcacactgaaggctgagctccaccattctacagtcacctgagagaggtttataatcctgccatttgcctagaaatttccaaacttctgactgaacgcaacgtattgctggcctttacacaagatcaaatttttataaaaccaaacatgccaatgtcttgccagtgatggacaccaaatagggaacaagaatgcaaaatcaagtaagtattagcatagataggaaggattgaggaacattttctatggcgattgtttctttttttggggggatggcatggacggagtcttgctctgtcacccaggctgaagtgcagtggcgtgatcttggctcagtgcaacctctgcctcccgggttcaagcgattctcctgcctcagcctcccaagtagctgggactacaggcgtgtgccaccacgcccagctaatttttgtatttttagtagagatgggtttcaccatgttggccaggatggtcttgatctcttgaccttgtgatctgcctgcctcagcctccccaagtgccgggatttacaggcgtgagccactgcgcccggcctatacagtttcttaagtgtgtatgtatcctggactcacttactcatggtgccctaagacgttcagtgaaaagactcccacgtctaagatgtggaggttaggcctgtcaatagtttgggcaacaccctcttctgtgcccatcccagtattttactga

SEQ ID NO: 65007 - DNA, 1654 bp, Homo sapiens
ttagccgggatggtctccatctcctgacctcatgatccgcccgcctcggcctcccaaagtgctgggattacaggcgtgagccaccgtgcctggcccagtatttaatcattcttaagtgtgtatgtgtcctggactcacttactcagggtgccctaagacgttcagtgaaaagactcccaagtctaagacgtggaggttaggcgtgccgaaggtttgggcaacacccttttccacgcccatcccagtgttttactgaagcagatttttgtttgcccttaagaagaatgacaagtccctctgtaggccgtttgaagtttgcatttttaaatcctgcttttctctcttcatgttccatgtttgtgactggcttatttcacttagcataatgtcctcacggtccatccatgttgtagcctatctcagaatttccttcctttttaaagctgagtggtattcaggtgtatatatgtcacatttggtttatccattcatccattgatggacacttaggttgcttccaccttttgactattgtgaatcattatggtaagacatgagtgtatggattgtgactcgcttttaacaaagaaaatgcagcaaaagtggcggctgtcagtcccgaggttagatgatggagccactctagcattgtcttgcctgccctcgctggctagctctctcccactcttgaggcaagccagctgccatattgtgagccgccctactcagaggcccatatggcaagggacggaaggagggctccaacctaagctagcggggaaccgaggcctgccaatagccacatgagtgaggttggaagtgggtcctcccctagtcaaacagagacatctgcagccccggctgacacgccgactgtagccttgtaagactccctgagccagggtgtggccactcctgggtttctgacccatagaaactgtgagatcataaatgtttgtttgtttaaacctctaagttttgggggtcattttttctgccacattagataactgacatactgaatacttctcaggtgggctccaattctcactgctctaaccacagagagcttgtggtgactcaggtcacagtgatcggtgaaacctttggaagatcatgcaggggtttataagaatagcaaacatttggagtactaactgcatgtcaggcaccattctgagcattattgtattttcctgtacagttctcacagattccctctgagagtgggtgctcttatcacaccccttttctagatgaagaaactgaggaacacatagtttgttcctggtctagtccgcacagggagcaggtggtggagccaggatggggactcggctcatcacactgacggacagactcatgtttttcatcaccccataagactcctgtctggtaacactgagctgggcccaggactttcaggcggtcagtcctactcttggcctgtgagtttatgggggagattagtatgaagactggcatgttttccctctctttgtactccaaaagttttcctttccatgaaaaagaataatgtgcctgtccaccttccctcctcctgaggaatgtctggcagttaagctcttctcaagcagccaccaatgccgggagagttaattaagtgttttggcagtttctttatcttgcttgc

SEQ ID NO: 65008 - DNA, 1017 bp, Homo sapiens
ccaatttgcatctggaggagacctccaaggacagatgccttgtcctcattagctaatttgtcaggcagtctttcctgtgtggcacagaaccttttatagatttttcctcaaactcgttttggttggccagtgcctgcctgcctttctttctggaaatgtgctgtgtatttgtggggacgtgactccatggtgcgtctctcttcccaatacattccctttcccctatccacagccctgttacttctgtctttcttccactctcagtgcagcaattttaaagtacatccacagattctttggcactcctacctttgagaggtacagactgtgtccctacttctggaaactgggccagctattgtgactattttgatcagtagagtatggcagaaatgatgctatgtgatttctacgaataggatataaaaggcgacatggcctcttccgtgtccagaatacccctcttgagagcttcagccaccatgtgaatgtggtgccctgagactgccatattgtgaggaagcccgaactatctacacaaagagaccctggagaggccaatgagaggagagagatgcttgggccacccctggctgcttcagccactgctgtcccagctgcagatactgtctgactgcaatgacttgtgagacctggaaccaaaaccaccgcttccttctcaaattcctaaaccatagaaactgtgagagatgataaagatggtgttaaatttggggatgatttgttatgtagtagttgctgattggaacctcagtcaataaaaaggcatctccttgctgcatcgtcagtgtgctcgtcttgatagagaagctaatagtaggtacccattttcagagtcttacttttcctaggggcagctcgaacctttcactggacccccgcttcccaagagagcattcatgtggcccttgtgttcctgaactctgtcaaagatgaccactccctgaggttgcacacgaaggccagaaaggctactgacctcaagctctgctgtgt

SEQ ID NO: 65009 - DNA, 1026 bp, Homo sapiens
gctgtaccacttagtagctctgtgattttgagcaagttacttaaccactctgagcttcacaaaggcaaccaggcctgcctctaggattgctgggaggaaatgtgagaaaggctgtccagcacttagcaggtacttctaagtgtgagttccattccccatggaccaccattcccctatataaccagcaaccatcagagctaccagcccaagccattccatctttcgaaaaacaccaaattgaagaaccagatgggttccccagtgtactctgtctctgacagctgacaagggttttctttttcctgcctaccagcaagaagccagcgtcccagcttggttccatctggtatcttgcttcctggcctaacaaaaaaaggaaataccagtggaatgttcacatatagctgggggtgaaaccgaccctcttccaggaaggcggggatggggggatgctcataaggcgcttctattgtctaaagtgcccactataataactcccccaattgtgttcagagaaactgtattacaaataacagagctgaatctcgtattagcctttgttaattcagtgttaggcacctgggatgcatccttggacaagagagactccctgcattatgtggttctcttcatttctagtgattggcacctcagatatcaagggaggagactaaaaaaataaaaaataaaaaaataaaaaaataacaactggcactagtttaaaagccacgtgtaattcttgattagttttcttgattagtttggggaaattaaccatattttgattatttatcaggacaaagacttgccttgtcattgcctgagtaacctttctttttctttttttctttttttttttttttgagatagagtctcactctgtcacccaggctggacttcagtagcgcaatcttgggtcactgcaacctctgcctcccgggttcaaccaattctcgtgcctcagcctcctgagtagctgggactacaggcgcgagctgccatgcccggctaatttttgtattttta

SEQ ID NO: 65010 - DNA, 1134 bp, Homo sapiens
cacgtacacccagggcattctaccctgtcctgtaaaacagcaagggcccactttgtccaccaccacaatggcgatggctcctgggaagggtgcgccatgagtatcaaattattatggttcgggaaaataattgctggttgtggaattctggagaagtagtatcgcaaaagagagacatgcacagaagtgttcaggcagggagagctggtttgtataaataagagcttgatgagctatctgttatgatttatgctaggaatccatagcctctgtgcttctcacacagtacataaacccaaaaggtcgcctctagtttggagtggtgatgctgtgccagtgtgggagcaggcaaggccgtgaggccttcttcctcacaaatccagcacctcccacctgccatcgggtaaagagagggagggcactgcaatggctggtgttactgagccctcgcggcatgccaggcactgctcattcgtgttttacaccatttcggaatcctttgaggaagttatttctattatcacaatccccattttacaggaggggaaagtgaggttaagggagacaatgggataggcatgaggtcatccagtaaatggcagagccaggattcgaacccacactcttgtgacctcagagcccaagctcttaactatgccttccacagacacaatccatgcaccttaggatttttacctgaggttcttagtttggtttgggggaccaaaggaacaagtaaacaagcagaaaatgatgaggaagggctgtgctgtgtgcccaagcgaggaagcaaaaggatgggcatgaacaatttgtagatgccatccagaacagagtggtcaaggatttggaggctcagtgcagggggagaagtgggaagggcttgtgctgtacacatgagggttaggaactgatgaagccacctccccaagcctcagattttccatctgaaaaatggaaacaggattcatctccttaattgtgactatcaagtgtaataacgttggtaaagagcttagcacaggcttggcacatggtaggactccataaatagacactgcaattattcgttctgtggttactgcatgacgatgatgataacaataataattactattattattaagcaggaac

SEQ ID NO: 65011 - DNA, 1004 bp, Homo sapiens
gaccagtgggtgtcctgaatggctaagtaattagaacatgcataatcacccagagttaaacccactgccgagcaagtgcatcctgtgaactcgactgtgtaaacaaaattgtgcagaatcagcccaaaaggaaaattcaacaaatgtgagcagtggtcatccctggtggtggattgtagagaatttaatgtctggttttgcccatttttcagttttttacactgagcacattactgttgtgttttgaaagaaagacacgcattaaaaaataaccaacacctgtattcttgtcaacacttgatcttgcaatcttaatatagaagactgcaaaaaaatgactgttagaagctaaagatacaggtttaaggaatgtctttactttattgtttatataatgaaatattaatataataaaactacagatttgcatatggaattggggttaaacagaggtttgaaggattatcaattatgaatagtttatggtgaaagttacacaataaaacagtactgagaggaaggtgtttttcacttatatatttgaatttatatagtacatgctgtttaatcctggctggttccttaaatctcactttgtctcagtttcaccatctgtaaaattggggtactagcctgttaggttatttttaggaagatgtgattaatatttgtgaaattcttagaacaggattggaacatagtaggtactcaagaaatgcttgatgctgctgggttagtcttattgttgtgatacagaggctttgacaacagtttttgctcctacatcagaagtaacagtaggtaaagctataatgttagttaacctgagtagacttcttaccatgtctgagccaccatgctaagttttttatttaggttatgtcatttgctcctcaaatctgcttcatatcagtttaggatgtaagggctcagagaggttaagtgacctgcccaagatcacacagcttgtaagaatttgattccaaagctcatgctctgaatca

SEQ ID NO: 65012 - DNA, 1068 bp, Homo sapiens
gaagagaagagtcttcccggtggagggagcagcatttgtgagggcataaggtaaagagaatggggctgacgggatagaactcacaaatgaagtgtgcagaggcttgtctggatgtgtccacgggggctggaaggggctggattttagaaaaagtattaagatcccagccttgatcctcaggacagcgtgaggccatcaaaaggttcggaaggaagtttggagggcagaaggctggagggaatgcttccttgcccagatgaagcctgaatgactcgcagggctggggcaagctgccgccagttttatccacaaagcagcaaccacttctgctaagatagtgatgactccgagcccctccagctcccctgttctcctcaaccctggtctgagcgcctgctttgtgcgagtcattcaggcttcatcaaggcactatgttaatgttaggtccttcttacagatcagcccacgtagtcctcacagcagctggttgaggagctattatcatcatccccacttggcagtggtaggtagaggctgaggctgagagagttgcccaggttcactctactggaaggagccagctctggaatctggaattcagccccaggcctctctcagtccaagtccagtgcgcactatctctttcatggactgcctcccattctcaggatcctaatgtctttatctaaccctgctggtggccagaagcctctacctggtacccgtcacaacccaggtgagaccaggcatctcaggatgcctcacctgacttccagctggaatccaacctgagctgtgcagttggctcaaagggtggccaaccagaggagcagatttatccacattggcatcagaaaaaccactctaggccgggcacagtggctcatgcctgtaaggctcatgccttgagaggctttccctgttctcccagctctcaccccaccaccagtaatctgtgcttaaacgagctgtcttgcctttccacgcaaatgaattggagatggtgaggctccaggcagcagcagacgcatctcaaagctggtttggggcataagagctttctctcta

SEQ ID NO: 65013 - DNA, 1889 bp, Homo sapiens
tcttccagctcccctgcctctaggtttctctcctggttactcttatgtccccagttctccactctcagcacccttcttttctccattttccctgtttcccctctctctttccctcctcttcctcactgttgtaggtgcagcaaaagaagagtgatgtttggtggatacttgggataactgagcttccaccttcttttgactcagcctggagatgcagcctctcaacttttctgtataaatcatttaaacacacggtttaataagcacagagttttgctgtggcttgtctctggtctttcagatcaaagccagaagtccagggaaatgtctgggaaaagtcgtgcctctgcattccagttctgtgcattttgattcttgaaagattgattgctggctttttgccctttccccatggctggggtttgggaagattctggagagttgttatttctggcccctaagccttgaggggtggcaacaattctgaccttgctttccttcttcctgccttctgttcccattctgagtcttctcattatcctgagtgtttaaaatgataaactccttcatggcatcacctacccatctcccaaaacagtgatttaaaaagcatgaaaaaccccaggtaaaatgaagtcaaacagatttctttgttttggaactactacaagtcttggatgctttagaaatccgtaagtggggttgggcacggtggctcacgctgtaaccccagcactttgggaagccgaggcgggcggatcacttgaggccaggagttcaacaccagcctggccaacatggtgaaacaccgtctctactaaaaatccaaaaattagttgggtgtggtggtgcacacctgtaatcccagctactcaggaggctgaggcaggagaatcgtttgaacccgggaggcagaggttgcagtgagccgagatagcaccactgcactccagcccaggcaacagagtgagactccatctcaaaaaaagaagaagaaaaaataaatccctaagtgggagatacagtatttggcattttccaaaagtacccaaccaaggaattatttcttggagttacatctcgtggatcaacactaccaacactctagctctgaaggacctgctagcattattccttcaggataagatattccttctatataacccagttcatctgtgcacatgaatctgtgtacactgagtcctgtgctctatgccgattggccttcatgaatgtgtgctgcagggggcatgctggcctatctcagaaggattaagttgaggcataaaagcctgagtgcccactgtgcaccagatgtttcatatacactgtcttaggtagacttcacaacaaccccacaaggtagatcctgtttttcctatttcacaattgaggccagtgtacagagaagtaaagtaagttactgatacagtttggttatttgtccctgcccaaatctcacgttgaattgtaatccccagtgctggaggtggggcctggtgggaggtgtttggatcatgggggcggatccttcatggcttggtgctgtctctatgatagtgagttctcttgagatatggttgtttaaaagtgtgtggcacctcccgccagactctgtcttacttgcttctgctttcaccatgtgacatgcctgctcctccttcaccttctgccatgatggaaagtttcccgaggcccacccagaagctgagtagatgcctgcaccatgcctcttgtaaagcctgcagaactgtgagccaactaatcctcttttttttttttttgagacagagtcttagtcacccaggctggagtacagtggcgcgatcttagctcacggttacccctgtctcctgagttcaagcaattcttgtgcctcagcctcctga

SEQ ID NO: 65014 - DNA, 1066 bp, Homo sapiens
gaaagtgttcagtttttttaaaagtcaaaccacatcttaagggtggaatttactgggccatacgtaactcaggggccctttaatctgttgcatttgaggtgcatcaccctgagtgcttgaagatcagggagttgggtccaaggctggcagtgacaccagcaggctgtcctctgcaagggaaccatctattgccttgtgggcaagaacatgggctctggattcagagagatctgggttcaaatcctgactctcacctttcttaactttgtgaccataacatttctgaaaggcaagtaaatgggattgctaatagtacctacttccttgggtggttgggaggattaaatgagataatgtgtgtcgtgcctagcacagtgcctggcacatgatgcgggaatagatcagttagtttttattgatagtctcttttatcttttgtgcagtaaagtagtttgaccaaatcaaagagtcccaaagtaaggtcttgacaaacatattggtggaggtggctctcagactattttcagtattaattagaagtgcctgatgtctttgcctttgactggactcactccaacttcatagcaacacccattatctcatggaggtcagaggcttggtttggcagtgacatttgtttatgattagttaaaaatgggaatcatattaattagtatttaatagctgcattttggtgacagattttgctaccaagctgcccttacacatcttacttggaaaatgcctctggtttagaagatggcagttgtcagaacatgtgatgcttggggggtttgaggggtaggtggacattgaagatttgtggtggtagaaagtttaagacccttggtctggatggtgttttctagttaaccttctctgattctgtgagtcctgcctgtgcagagagcacagtaatagggtaacatgtaatccctatgtaatagggaacctgactgtttacctatacacaccttgcctaccctttcttctcccacccattatgccctagctggtggccttggcttaagccagataaatgtccttataatctcaggaaaatgca

SEQ ID NO: 65015 - DNA, 1395 bp, Homo sapiens
gcatatgccctgtggtattacaagggtgagccaccagcttgagtctttattgcctgggcctttatttcttttccttttttccattagttgttttttatttttatttttatttcttttgagacagagtttcactgtgttgcccaggctggagtgcagtggtgcaatcctggctcactgcaacctccacctcccaggtttaagcgattctcctgcctcagccttgcgagtagctgagattataggcacccaccaccagcctcggctaatggttgtattgttagtagagacggggtttcaccatgttggccaggctggtcttgaactcctgacctcagtgatctgcccacctcggcctcccaaaatgctgggattacaggcgtgagccaccacacctggccagattgttttcattgtttctgtttttcttattaaataaatgttatatatctagcatagggattttagaaaaggagcccagtgatggtcctctccttggttctcaaccctgtgatctttgtgttttaacccctgccctgtcactttagggatctggaagcgggaaggagacatctgcgagtgctcagatgactatctcgatacactcagggtgtattttctggggtgactgtaggggcatctcggttcatttggtggcaaatccaacttttctattccctaacgaggactttgctgcctttatgatttttctctcactgcctgcttttggaaaaatcttctgacagttatatttaccagtagaactagaagggaatgcttcagtctatcctgtgtttagagtcatggagttggaggaggtttgggtgggaatctgagtgacagccaaggagaaggagatagggccgtcttggggttttctgcagtctcagactctgggtctttgtatgacccttgggaacatgaagcagccagggaatggagccaggaccactttaccccagcaagactcccaagctatatcttcaaaggtctgagggacatggtgcattcacttgtcttctgctacccacagatgaccagctctgtgaaggaggcatcccctggcttgggtaggcagaaagtgttggaaaggaattgaagtaacatttcagtttgaaggttttgtaacagatggtggtggcagctgctctaggagagacaaatgaagttagtgaaatggtccttcattcagtctaccttgtgcatccatccatttagccaactgtgttgatacgtatgatgaaccaggccccatgtcgcacactgggatgataaagagagaacacctggccacagcgtctggaaactccttatctaagaagagggacagactcatgcccacatgatgagttctgttgagtaccaaggtagcagaaaaggggagctttgaactccatt

SEQ ID NO: 65016 - DNA, 1043 bp, Homo sapiens
gaggcactgctggccactgtgccaagaccttcatatagataatctcagccctaacagttggactctgttaccgccattttacgaagaaggaaactaaggctacaaatgttaagtttcttgcccagggccacatagctagtaaacaattgggctgggctgtagtcaactcaggtctctttccaaagcccatggtctttccatggcactccgctccctccttaatagatgctaagttccgtgagggcgggatcccactttgaattgtttttagtcttccacctcctccattgagcttgataaatgtatattggtcaaaatccccagtcctgtctagtgccagttacacatcagtgtctgtagtagagaccctggcgctagcatgaattctaccaagcaggctagactttacaatcaatcaatagaataaaaggaaggaaaataaacagttcctcccagcccactgagtactattgtcttgtctcttagtaccactacaaggaaatgctagatcatgagctggggctaccagagagcttcatagacttgaccccaacactttagctggatgacttggagaaaattaccccaaagtgtctgcagtgacttctgtgaccaccaccagcttcccaaaccagcccatccaactcccttttcctgagtgaggtaaaaactggtagaaccaaggaatgctgaatttccaaacgcctcctaagggaactgaaaccgcaaattggccacttggctgagaaatgctctctttccctccaacacacactttccttttcctttagctaaagaatccatagatgagtctcactttgtgatacacgtgctcctgaaagctgtgtggaattgagtcattttctaaattcaccagggaatctttccattttaaagaaaatctctagtcagttataaaaccagatgctatcagagacagaaagaccattagaggtttatctaattcagctttcgtctcattttacagatgagaaaaccagagaggttaagtgacttggccacagtcacacagctcgttagcg

SEQ ID NO: 65017 - DNA, 1034 bp, Homo sapiens
aattagccaggatcctgagcttggctaatggtgggcccagtgaatgcttgatttgcaatggaaatgcccaatttggtatggagtctccatttttaaaatgcattggctaactttgcagcttcccccatccccttctcatgacagtctccctttctggaatatttcaaatgcaaagggggaaacagggttgtcgttatatctggatcctatccacaagggctcagcagctgtgatgttcagcaggccaaatacagacccaagagaccaaacagcttcttccttccccaagcagttaaaacaaagatctgctcactgccttgcctgtgtgtcttcatgggtgtttgatatcagggtaaactctaggggctaaaagtgggagcagaaaaagcaatgcaaacgcattaggcgagaagccagggcggatcagcaaaaggtctggaattatggaaggctgaagataagcagttttggttgatttccaacacaggcagttgcctgctttaatgtctggataagaacttgcctgtaattggtagatggattgcttggctataaatggagcctgaaaagagtctattcccttccagcaattaaacatccccctgactgctgccactttctccactctgattattcagcagacccattcttcttaatacacagcaccgaggtgtggcttagcccagcctggtttgaattagcttatgggatccacattaatgaagcctagccttacttccctgcatatgatgtgtgactgggtatagtcaagtgcccagtgtaggtaaatagatttcggagaatggtgatgtaagatacctaccaaccatatgtggaaatccttttcaggatggtttccctctgcaagactgtaaaggtaggaaatgcactgcctttcccaccccttcactcctgcacccatttgataacccacttgagtgtttagaacagtcttccaaagagggatgtgtgcaaggtgattgtttagggaaggaagggagggagggagggagggaaaagggagagagaaaggg

SEQ ID NO: 65018 - DNA, 1148 bp, Homo sapiens
acagaagcagggaattaatgatccaaagattctagttaacaagatgatcacccaggtttcaaaaaataagtgatctcatttttatggcttaaatattttagtaaccgttgagtgcctactgtttatatttcttttctaggctgactggcttgcttcctccctccctccctccctccctccctccctcccttccttccttccttccttccttcctctattccatcctctcctctcctccctcctctcccatcctagacagcttaggtgaagggctgacagagggaaattgactggctaatctatgtgcagtagcccctggttcctgctctttccgctgaacatgatttatagttgtttggcagaaggtcaaaatctgattccatagagtgggaatgcagggggaaatatttgatttctttgacacagttcattaaaaattcatacatatggatctggaaatgaaacattgctccatgtcaacatgagttacagtgggagcctagagcaagacatgagtattcaagtgagacactgtcaccaggtaatcacatcggcatggcagtgcctctcagtgagacatggaagggggaaaggtgacctggactctggagggtggaaatgaaatttttctcttttgcctaaaggctttccttgtaaatagaagccagtttgttagaaaacctctgttacaaagagcccatttcattcatgtattcttttgtccatttgtttgacaaatatttatttattttccactattggtaaggtgtatattgattaataagagagatgacttatttcaaatttccctgttatttctactttgtttcttaattcttcctctttgaccctttactttagagctatctgacttttacaatgtctagacttcaagccttttattataaatactgtaaatggttggaaacatgatcttctagcccagtacttctcaaattgtaatgtacacacaaatcatctggggatctgttaaaatgaagattctgattcagtaggtccaggatggggccagagagaatgcatgtctgtcaaattcccaggagatgccgctgctgctgatccaagcaccatttgaatagcgaggctctagtctaccatatctgtactgggttgaataatgttctcca

SEQ ID NO: 65019 - DNA, 1086 bp, Homo sapiens
tagattgaatttcaagagatgaaagtgaggtttttaagtaatagcaaagccttgtgtttctgtagtactttgtgctttttgaagtgctttcacagtcattatcctgtttgatcctactaagaaccctgaaagtacataggttggtggtttttatcctgagactacaaatgataccaaggataacgatgagtaggaatcagagctagaattaacccctattttcttactattgacccagcatgctttctatgttgaaaagtgcaccacatcgagaagagattggtcaccgcagcacagggcacgcagaattccattagtatcacttacctgggaagtccaggtgccttcaatagttgaggggagtaaatgatatgactacctaccttcaaaacttgtagtttaaagtggtaacttgaatactcacatttacctctgtttccttcctctaaaagaatggttttttaaagggtaaatccacagggacaaagaaaaggagaggaaaaccagcaaaaaaaaaaaaaaaaaaaaaaaaaaaattgtggaagctggagaacaaatgggtgagctatgactggattagtgaactcagaaaatggaattctaagctggcactcaggagaaccaagaggcaaccagatatacttccagaaggcctgggaattggcaacttgagataactctggaaacagaagagatgggctaaaaatgggaagattagttgaaatttcgttaggaagctatgacactttcatattccttccctatgctacacagcctagcgactgcccctctcacacccaggcagaagactggagcttactctctgctgagggtagaacaggtctctggaataccagatatgaagcacagctgagaatgggggtccgtttctgaaaacagggatttagcataagtcaacataatgaacattgaaactactagcccttttcctcaagtcaggtcccagaacacagccagccaggctcatattccttctaagcaggagtttataaaagtcttctttgggaaaactcaccagtttaagagattggatgtcaatgaagtggcgcaactgaatcatctaat

SEQ ID NO: 65020 - DNA, 1043 bp, Homo sapiens
ctcccaatcttggatccaccttaatgatggaagcacagatgctgtgggaacatttcagaagcctgtgacctgacttttttctctgcaggtaactgcaggatgagtggttttttgaaaaacccaattctgagcattttggtctaccacaaactagaggagaaggcagaagtgccatctaaatgggtttgggtcacacacaaagcatcacaaggccgctttgtggggtaagttataatgctgccctgctcttcaaagcaaagccacatgcatatatctggcatatgtgcaggataagaattcattctctttttctctcacactcctaggcaacctggattaggtccagggcatgaattgtgacaccttccattacaaactccaaatgcagaatgtgttaccggagttgtctccctggaaccttttagggtgaatgatggagactcctttcctgagatgagatcttgccacttgctccccggccaaaccagccaaagcctcaggggccaaatgcacatgctcgtgagtatagcaattcagagcatggactttggagccaaactcaacggagttcaaatctggaccttgctacttactagctgggtgcaactcagaggaagttacttcacttccctgatcctccattttctcttctgtaaaatgggaataatagtagtgtctatgttgtaacattaaagaagacctaggatatgcttttagcacctatcatacattagctattaactcagtattatatttgctgtatcattgtgggaaaatcacggaatctctccgagccccagtttcctcatctgtaaaatgggggtaatgctgcatcctcgagagtgttgggaacattctgtgagccaatgtatacaaattgcttagcccaaaatatggcaactagtgagagctcaattcatgaaggtgattattactttcctgccttttcctttccacagcttctctcctaattcaggcctactttccttttgtctggccaccaaaatagcttatctggccaccctgagtctctctccctcttt

SEQ ID NO: 65021 - DNA, 1013 bp, Homo sapiens
atttttaaattttttatagagacagtgtctcactgtgttgcccaggctggagtacggtagtgcaatcatagttcaccgtgaccttgaactcttggcctcaagcgatcctcccatctcagcctccaaaagtgctgagattacaggtgtgagcccccgcgtccagccctgtgctacatactttataacgaccatgtctgatcttcacaaacacctcatgagatgcatgctcttatccttcattttacagatgaggaaaacaggctcaggagtttaagtaacttgccacagttgcaaagccaataaatcgtagagccaggattcagacatgggtctgtcagcctccagagtctgtggtctgtgttggatgtcagtgcatcatcgtctcaactcctttttaatgtccatgggcacccatccaacaggtaggaaaacctggcccaacaaaggcagtctttaattttgctcactggtggtaagagccggagtgcgagtgttggacatcttggaaaatttccccaggcggcacatgagatgatatttggatacttgcaaagaactttctagaatctccacagcaaagagttaaagaagtgtagattgtccctcactgtaatgattacggggtcttgtttttatttaacatggagcactttgtctgagcttctcatttccaaatgcataaccccagaaggcttctccacccttgccccttcactgttaggtcacaacatctcagctagtgactttctttggtttgggaagcacactttttgaggtcagctgttactttctggaatagtgtgtgatttctgaaggcagttacagctcaccagaggggccaggatgggccccagtgaatgctggttccacggcacttttccaattctcattaagcacaatggcttttagtttaaaaaaaaaaaaatccatcacagacgtacataccagactgccattagctgacccggggagaaccttttgccaagtgaagcaatttccttcttctgtagtta

SEQ ID NO: 65022 - DNA, 1022 bp, Homo sapiens
ctaaaccattgctaggagtttgtatttccagtacagtgagcaatgcttggtgggaatataaagcaggaaacataccatggtcttatttatttcctaaaacgagctttgtaggtgctgtgtggaaaatggattggagaggggcaagatcagaaattgggagaccaagtagaggttcacatggtaatccatgcaacagatgatggtaacttgtcccatattatggaagcagaatcagcaggacctgcccctgagttggacatgaatggaaaaggaaaggaaggaaccaggtttaacactgaggcctgcagctccagtgactgcctggggtccctggcccaggattgtaattgctatttaatgatgatacttgctttcccaactcccacaagtgaggttttatttgcaacaatggcctgcctgaagtagatttttctctctccagtttttagggtttgcttttccctgcaatgctatttgtgtgtgattacaccacactcacaaactgatcaaagcatctccgctccctgcatcctgcttgagttagcagtattcgctctggctgctgactcggcaggctcaataaactattgtattgtaattggccaagccttattactggaccagaaaccaactgaccattgagttcaaagaatgtctgctaagcatttaattttgcggcttccaccaaacactacaggtaaatagctacagtaagcaatagaaatagtagttctttagagccttccttattcagcaaattccagaggcatggatagtcatttccagatgtggcctgcaggagcagcccaggatatcatatataggaatctggatctggcgaagccactcgatgcagaggaggcagatgcctcagaggtttccctttggatgggtagaatgattagattgatcccggtgcaggtgcatgagctcattaccaagtcccacccccttcccgtgctgtctctcattggcttctgctgcttttgtggcctgcagtaggagaggtagcaaagaactcc

SEQ ID NO: 65023 - DNA, 1129 bp, Homo sapiens
ctctgccgtgtatggcattagacattttgctggccgtgttctgatggtgactgggctcttccttggaccctcttccatggcagctcttacattattgaatcttcgttttccttcctcatagaaggtgaataaagtttcagaggtcaggggagaggatggcgcttaaggatctctttgcaaataagtgtaagaattcaggaccttcctcacctaataaagttcccactcataacctcttcatttggaccacccagcatagggtaaggttaaaattgctgaatctggaaacagaatgcgtgggttcaaatcccagcattgctgtttaccagttatttctgatgctgggccagacattgaatgtccctgtgcctcagtttcctcaccagagcaacaggcatgaaagtaatgcccacctcccagcattcttgtgagcattaaataaggtaaggaatgtaaggggcatggcaaagtgcctggctcatgagaagccttcagtaaatgagagctagaaaataaaatgtcttttctgttaaattcattccttttaagccccttctgccgatacagaccgaggtgttgagaggatgtcctctcaccccagttcatagccaggaagagttggctttcaatagaaatgccaattccatgttcccatcagaggcccagtcaagataccagcccagcctcttggccacagggcttttggctgatggagcagagtggcaatgccaaaccacccaggttgagccgagggacttggtgggcgacctcattctggttctacccagaggatgtggttttggcaccgtccggtcaacaccaaccagccagaacacactggccttttctgttccgatgtggttcctggtccttgaattaattgtctttgtacttggagggaaaaatctcatttcgcactggaaacactgtctcagaaatgggctgaagttggcttatcttggccctaatgtgttctcttctcttcctgtctccattgcccctgcccccctgctgtccccatcacaggcctgcgtggtatgaccttcctccaccgccctactcttctgacacggaatctctgaaccaagccgacctgcccccctaccgctcccggtccgggagtgccaac

SEQ ID NO: 65024 - DNA, 1008 bp, Homo sapiens
ctctatgtttgtgctagtttttcttttttttctctgtgtccagtcagccacagggcccgcctccctgcaggaataaggggtaaaacgttaggtgttgtttggcaagaaaccacactgactgatgaggggtaaaatggaaccaggtagagccactccgggcagctgtcacccattcagaacttctttccgcagctgaagaaatgttcagtaacctgtttgacgctaattaaaacagagcctgcaggaagtggggctaaagtggcattcagtgatcctgttctgtagacttttctttctttttttaaccaaatccaaaggatgttacagaaaagctagccactggtattttgttttgtttaaaaaaaaaaagaaagaaagaaagaaagaaaaacggaaaggaacctagctgcctgtatctttcatttttaaaatagcacttgagttattttctgagtaatccaataaagaacttttgatgacagccagaatgtgttagaactctggctgaacatttcatctcctgtgagtcagaagggctttatttctccctttgatggggccccttcttctttctggtgctctggaagttgtttagaggaaagaattctaattttaattaattgcgcagtgagttaatctcactcgcttttctgcttccaggcatcttaggaaaaacaaatggttttagtagataagggatgcctactaatgcttttttaaaacaaacagggacatttttattatagatttgatttttttaatgaatgtttttaaaaatatataaataggacaccaaagcggcagggtttttttgggggggagggggtttgttttccaactcaagatggcacattagtggccagcaatattttttaactcattccaaccaggaagcttttttatacattgcctaaatctacgccaaccagaaaatagtctcatctctttttttctcaaatgagatccgtgttttattttagcattaaattagttacactgtgatgactg

SEQ ID NO: 65025 - DNA, 1080 bp, Homo sapiens
ccctcctcacccctctgtcccacagaaggtccccttctcctcagctcacctgatctcagcaggtagccaagagggagattaaggtaacttgtggtaagttattatgtagcagtgacagccttatctttccaaggcaaatatgtttttaaaacagcactttcttcatctaaatgggcctatgtttttggattttttttatttttgagacagggtctcattttgttacccaggctggagggcagtggcatggacatggctcactgcagcctcgatgccccaggctcaggcagtcctcccacctcagctccacgagtagctgggactgcaagcatatgccacgatgcctggctaatttttgtattttttgtagagacagggttttgccatgttgcccaggctggtcttgaactcctgagctcaagcaatccacccacctcagcctcccaaagtgctgggattacaggcatgagccactgcacctggcctatgttttttgttttaattctggaccttgtttattgaagtgagctgtagaaaaggaaaaggaaaaagcaagattttggaagtgatttggagacttattttgggttcccccccaaagtagattatttgggagatgattctagaaaacacaaagcagtggggaaaatcaaacagggaaggcaagtcaatgaaagaggatgttaagagcaattactgctatggaaaacttgggatcctgtaagaaaccaagtagaacacctctcagaattgttccccgggagaacagagaggcttggccatttatccatgaacacccactctcactggtggaaggttaacttcccttcacttccgggttgtgtcaggtaatctgcagtgatatcagagaaagccctaaagcagagaaacagttacctccagagagcttttttaggttagctaagtattactctattcacaagaccaccataaacccctcttacacttcaaagttacagattcacttagaaggacctaggatgggaacacagcattttagcaggacgggcagacatgcctcttcccaggaggaacccgcacagccggccaggagctgtt

SEQ ID NO: 65026 - DNA, 1030 bp, Homo sapiens
aggataataatagcactaacctcatggtcattgggaggattgagataatgctaaaagcatccttagcacagggtctggtaatttaataaaggtttaataaatattagccatatgattcttattactgtgaacagttaagaaatagtaaagtgatacataatgggtgagtacgaggcatgagaacacaggccaacgtgatgaattgccccatgaatagtgctgtgtataaccctctccaggccaggtgtcatgctcccacctgtaatcccagctctttgggaggctgaggcaggaggatcgcttgagtccaagtgtttgagaccagctttaatgaaaccccagtttctacaaaaaatacaaataaaatgaaaagctgggcgtgatgatgcatactgcactccagcctgggcaacagagcaagatcctgtctcagaaaaaacttctccagcagtttggatgaggtgagctcactttgaactagagagtctgggacagaatcctcaaagagtggtgcctggagttgaagtttgggtgaggctaagttcttacaaggagagccagctgtttctcctttccacagagaaaagaacaagaggaaatgactttttcagttctccattctactgaacccaaatggtaataaactttttgatggagtatccaagtctggagtcaaagcctaaatcagattctttgggtcactcatcccagccaccctggccactttctatctgtagggttagtatgtacctgggaaatacaaatttatttaaatagtagccaatgcaaaggatgactaggaaggtagatgttttatgtaactgagtcttgtaatgcagtcattattataagtggcctttccatttaagacatgtctttgaaaatagactctagtttaaatgttagcagatagactttgaagtaattatgaggaagaacttgggactgaggatggtcaaattctaaaacacagtattggatccaaagacaggtttctccaccctttaagaataaatctgtcaggccaggt

SEQ ID NO: 65027 - DNA, 1041 bp, Homo sapiens
ttaatttttagattactcactttaaccagatgatgtatgcatttaaagaataaacaggaacattgaaagtgttttcacatgattttgccacatttggtttttgaaattttgctttatcaacttgaatatatttttcactggagtagaccattgtatctcttccatagtttcaatatgactgtattagtcacaccttggtttttaaaaagagtttttaaatgattatactatatctaaaataacctactgaagtcttttccttttaataggctacataaaaacaggcagatttaaaagaataagatcctgttcttcagctgagggaggcttcaaggtcaacacattaaagattctttgtaaaggacagaaatataggaccaataaatatatacaattttcccaaccccatgctaacattcttcagcagggagattttcatttattctctctgatgctagggcatagttgagtataatgaaaggactcatagtatgaggtctgggtttatagttcctaatatctgaactgactttttcttttccaaagaaagatactgtactgtgaaacattaaatcttgctgatccgtgctggccatgttttcttgattgctccagagtagcaagtaacctcatgtaagtaacttcaggcatttaatgtgtgaataacagtatcttgcactgttaatcaggtttgaggcatatattattttatttctgctggcagtaaaaccaggattaggtcttccttcctgtcttaggccagagaacgatttatgtacgaagattaataatagtgctctaaaggcctaataattaaatccctgaagcagccagagaacagaaagccccacattttccaaattctactcatcccttccctatctagacaccaaatccacttgtgactaacacactgccaaaatgtggcatcttcattcccttaaagtttactaacataggctcccattttttagctttggtagaaatgaaggtatcagacctacctgaaggccagaggggctgctcacgcctctctgaatc

SEQ ID NO: 65028 - DNA, 1048 bp, Homo sapiens
agtatttctgatgaaaatttactatctgaattgagacatgccataagcataaaacatacactggattttggagacttgtataaaaatagaatgtaaaatatctcaatatttttatattgactatatttgaaatgataatattttagaaaattgatttaaataaaatatatcattaaaaatgatattactttttatttgtatatttatttgtatatatatttatttatttgtatatttatttttttgtatatttatttatttgtatatttatttttaacatgtctacttgaaaacttaaaaccacatatgtaagcagctctactattgacaagtagttctcaaacttggctgaatatcaggagacttttgtgatggcagacttttatgaaagtatagatttccaggcttttggcttattaaatgaaactataaacttttatataaactttatatataaacttttggcttattaaatgaaactatagcaaggggtctaaaatttttatattctcaaggctctgtaggtgattctgatgtaccactagttttgagaaccactgatttaggctacagattctcataaggcagtctgttaaaaagcaggactgtctgtactgctttaaaataccagataattgcttaaagtgtgtttctgtttcaattgtagagttggcagagactgtctagtgctctttattttagattcatttatggatatattgctaagtatttgtctcgagtaacttatttaattgccaccatgatgcaaagaattagctattattcttcctttttatagctcagggaactgaaagtcattgtagattaaataatttgcctgaggtcagataggattcaaactccagacatctgaccctcctctgtacaattatacctctctcagagaaacatctgggagtgagagattattaaaaaacaagtctaatattactactgatagcagctaacatttattaagttctagggattaatgcttagctcttcacatgtatcatctcgtttaatcattataatgacctagtgagtt

SEQ ID NO: 65029 - DNA, 1121 bp, Homo sapiens
aatttttgttagacctgagatcccaacagtagttcaacatcaggatcagaagctgagacttcattatattttgctctttatttcaaaggagtttcatctggttacctgtcacataacctgggtgttttattggaaatagtagagagtacactgagtgatcatgagaacaaatagaactcgtccttgtagaacatctttgattttcagacattgctgtgcttttcaagtatttaagtcaatagattattacaatagtgttgtgctgggtacatagtattttcttagtaattactagatttaggttatacttgatttaaaggatgagcagggaaaactgaaaccgtttcaccttttattagaatagagcactgaggcatggcagtagccacaggaagtctgctttcctttgaacattgatgaagtttgaggaaccctttcatccttcagttaactcctatttccaagtgtctccatgcctatcttgctctactctgctaccaatgctgtttgccctaggactgatacaggacatctctgtggccgtaaaagtggaagaagtcagggagactaagtcctaagaccatttcttcctcatttatctcatcttgtatagggctggttactccaacatattcttagcaaccctcctcacactttgctcagcaacccccagccctccacccacagaagccaaggttgggtgcttcgcaccagaatttccaaggatttattgaggcaaaaggcaagggctacctctcccactagtagctagttagaagtcactggtgctggtgcagtaggcagtagtagagagctggcctgagctggtgttatttatggatgtgaactttttaaagagaacgtgatgcatttcatatttgtgttttccctctctggcttattaatgacgtattatagattaggtcaccttatctctgtttcccatcagtatatctgtgttatgtcctaaagataccctcacaagtcttaattctaccagtgatagggtattcagaagcaaacaaatgatgttaactggatttgtaccaggctgtgatcattacaacaacatgaatctcactgattttgatgccatgcactgacaggtcaagagaaacaaa

SEQ ID NO: 65030 - DNA, 1033 bp, Homo sapiens
ttttacttttttccctcataagttttctaaagtcatccatacattgctttcatataaagaaaaaaatccctcaaatttagaaaaagatgtgataggtcatgtctaagagtctcacaaatactgtattttattaactttttaacagcgaccaagaacagtgctggatatgtaataggcactcaataaatatatgttgagtgacataatgttatctttctatccagttttagaaatcacttttaacagttcagagtgcttaatgcctcaagggttcggtttgtagagttctttgaaaagtattctttttcattggaagaaactttctcaatatacacaaaataaaccagacttggtattgtggatgttttctaatagtgcataacttcttatttcagaggatcatgtgtccaaaaggggagtgtttggaactgattcttcagaaaacatttttacctcagcaaaagttactcataaaaatgaagcagatgactaccatcttagaaataaaaccatctttcttcgtacttcatcacaatgtttggaagaacaggtaataccaacatagtacatgtatagaaacaatctcagaagaaaagaattcttcatgaatcaaaaaaaagagaccctactaaacactagacagttattagatctgtaattcctaattctagaaggagtgccattggggcactttattgaaagtcatcattacatatatttcataatgttgacagctattgtttatgatgataactggttatccccaatttttgttcaaaagttcttaaggatctgccatctataaattattgaaattatttcttttagcttgtcttctatttgggacaaaagagctcctttctctaattctctgtgtaaaatgggactttctttcacctgtcctagattcatctctttcaaactcaagatggaatcgattatcttgtttttctctaatatctggtcaataaatgttagatacgctttttctaatcttgaagactttatagactcttcacattctcctcagcta

SEQ ID NO: 65031 - DNA, 1061 bp, Homo sapiens
tttgttttgaatgaacttttctctcctgctttctttagtttcttctctctggctcctcagagtgctatcagaaagcacggtgttatgacagtagccagagccaccgccaccatttgcttgacaggcaaaagcaataaaaggaaaacaaaacccagaaacactgttttcaactgtcatggtggtggtatatattctgggatagaatctggaacaaagtcccttttaaaaaactctcagactgcttttttccctttcagtgcagaggcctgactatggtgcctacaaaatccaggccagctttcaaatttactgcttctttcagatgtctcttgggaaagcacagtgaacacaaaagccttgagctgggactcaagagttaatgagaaaagtggattcagctgctcagttaggtgttgtggaagtggattcgttgacttttcactgcagtttttctttaggtctattctgcttaaaaattatgttaattcttttttctaggtagataatttcctagatttagaagatttggacatggatgaagagattaaaccccaaatgagtgagggtatgctttctatttcctttctatactacctgacctctttctagaaactacaaataaggctttagacagctttcctgtttttggcaattcttacctccacctctcctaagacaggaagaactaaagttgtgagctatttttttcagtaacaaaaatttcacctgaaaggtcaaagctttttgaagattgtgaaacctttggtcttaaatgaaataaagatgtgctctcccccttaacaattcatcacaggattgattcttaggtaattgtctcaagtggagccattgtaagtcaactctgtttcctagaggtacagtcttgtaaactgaaattatttttgagggacacataaaatacctattaatcataaaaatcataaaaatatcagaattgatcacaaaaataaggctgtcttgcctggtattaaaggttactgaggctgaaccaagtttcagtggatttgagtgaactaatgtcaaggccttcccacatgtag

SEQ ID NO: 65032 - DNA, 1026 bp, Homo sapiens
tggcaacctccatcctactttctgcttctatgagtttgactttatagatagctcatataagtggacatggggtatttgtccttctgtgattgacttatttcacttagcataatgcccttcaggtttgcccatgttgtcgcatatagcaggatttccttctttttttaaggctgagtagtattccattttatgtatacactacattttctttatccatccatcaatgaacatttaggttgtttccatatcttggctattgtgaataatgctgcaggcctgtgcttgtatgcacgtacttgtgcttgtgtgtatgaggaattgtgtgtgtgtgtgttttgagtgtgtatatgtattcataaaaacaccgtttatattttttacaaaagaatgctcttgatttcatgttgccctagagtcaagtgtctgccacatttatttttacttattcaacaaactttcataaagctccatttgtgtgttcaagctttatgctaggcagtggggaggatacaggcaagttagacatggtccaattaagtacggaagagagatgtatacacaaataattacaagctatattgtccaatataatagccactagctgcattctagtacactagagtacttgaaatatagtgactgagaaagtttcagctgttatttaatttttatttcaatttaaaatagaaaactgatatttgattcagttattagaaaactttcaagtacatttagaacaatttgggtatgtgaatctactttttcaattatacattttatgaaatgtaaatgcagatcagttattttggaaaacagcttagtgtattagagttctctagagggacagaactaataagatacatacatatatatatatatatgaagggaagcttattaggagaattgactcttacaatcacaaggtgaagtctcacaatagaccgtctgcaagctgaggagcaaggaagccagtcagagtcccagtacctcaaaagtagggaagccggcagtacagccttcagtctg

SEQ ID NO: 65033 - DNA, 1042 bp, Homo sapiens
ctccaaatataatcacattctgatctactggagcttagggctacaacatatgaattttttttgaggagttgaggagcacaattcatcccataagagatctgaatttcttgtactgaggcaattctcatgatgggcttacatggtaagcactacataagtaatgagttattcaattgtagcattattatttctgttctctcatatagctataaaactaccacatttgtgtatatataatgtatcatttataaatgtatacatatatacacatttctatggcacctctcttagtaactcattttagtgatttaatttaggtaatatatctgggtgacttgtttccgtttcccagaagccttgggggtttataaaatataaggcaaaccttcttaattttcattcatttacccattgaataaatactcatcaatcatgctgtgctggctctggaggtcacaatattgactaagactgcgcagtttacaattcagtttaaatgtcacgaggaggcaagtacagtgtgccagtggaggcttttggaagggccccgtgatggaataagcttgtccacaatttctttgacattcctctccagtgagaggaggtatatgtattccctttctttgaaactgggctgatcgtgaccgtgttgaccagtagaatatggcagaattggtgcttttctgaggctttaaagaagcagcagcatcctcacgtagaatgcttgttttaggggaagccagtgccgtgtcacacgtctgactatcctgagagccatctctaagcattcaagccatctcataaccatctcagctctggtgtgatgtcctaacgtgccaaattatgagctccataaaatggtagtttttttaatactactaagttttggagttatttgttacttagcaataggtaaatgaagcaagaccctaatgcagacatggaagataattaagaaatcctatatatcacgtatccaacattaaagcactgagtgcatgtagacacagaattcttggacgatgcctgtctgcaaaatcca

SEQ ID NO: 65034 - DNA, 1107 bp, Homo sapiens
cagctttggaggtttttcacaaagcccttattgatttgtaacaacatttaggcacttggcaataatcacttaactgtggagtggatgttacaggatctctttagtacttccaaagaggagaagttttacctttgggctataagaacctaataaaccactcaacttcagctaacaaaagcaagcaagtgtcattaagaaaaagatagctactggcttttagaagagttggcctaataatacagtacaattataggataatgtgtcacttggcaattcccttacaggtagcttaaagatgccaagaaaatggcttaagtcatgactaaaacaaatcattccttgttaaaccccaaatcagccagatttcctgcacacttagaacacagaatatgtagaaggtggatttcaaaacagattccctagatttgaaacccaactctgcaacttactatttctttgggcaaataccttaacatctatgtatgtaccttcatttacttaactgtaaagtgagtggtataataataaccatctcataggattgttgagagggtaaactttcatatacatgaagcatttagaacaatgcctgacatggagcaactgcccaataactaactttcttttctttctttctataatttttttcttctctttctccttctttctttctttctcctccccacctcctgcctctcctccttctccacctcctccgcctcctcctcctctgcctcctcctccttttccttcttcatttctgtgcatttttccatgtaaagaatttccttggagatagataagccacatcaacatgcaatatgtttatgtttctcacatatttcaaatgtgtgtttcagaatctacaaatcaactttgactcatgaagtgaatatttgtacttcttggctccccagcatcctactcaactccacttctttggcaataaacccagttcttttgtggagattggctcacttaggtggtgtacaattgttatggaactatatataatggtgtcctgctctcttacaatctcagggtggggggatgttggatccaagtttaatgcatggacttttcttccagggactctgaatcttgaaa

SEQ ID NO: 65035 - DNA, 1035 bp, Homo sapiens
agcctctagtgccaccgattaatattaccttccttgaatcaggaggaaaccatttgtgacttctcatatgtaagatcttctaagggcagaaacgcaattgtctttgtattcacttccccgcccacccacaccccttccatggagagcctgcagccaagctcaagctttcaaaaaggcgtgagctaattcaatcatccttgccgcttttttgctcctccaggctgtagagggcgacaaaaaccgcggaggcgcattggggtggggggtgtctactgaaggccgctcccgacgtgcgcgtctttacgtagacgtcgggggcgcagccgcgctgtgcgcggtgactggcggctgcactggcggcagctggaggtgtaatagtgcgggtagtgggtttggagaagttccgaggcggcggtggcgccggtcaggacaaggatagcggaaccgggccctgggcttgtcgctcaccatgccgacagtagaggagctttaccgcaattatggcatcctggccgatgccacggagcaagtgggccaggtgagttgagtccccgggcggcctgcagggcctggcgctccgcggcctttcgaaagcgcttcccgccgcactccccgggccgagcgggggctgcggcttcatcctcccggggcctcctagcctcctcaggccgtctcgtcggggtgggcctctctgggagtgtagactctggtttcaccagggagaccgcggtccccagggttccaggcttccttgcctcccttgcccagccttttctcaccgtggcgtaacctaactcagcccgttcaggctcacgttaattcttctcacggagcttttctctacaggattctcttaagcctttctccttttcggtggagctcagtgcttccaagattagatcgggagttttcttcatgaggtcaagatgtgttttttttgggggggaggcaaaattctgctactaattgaagaagagtgtttaggagacagaagtttgtgagaaacagaagagggactctttggtccagactttg

SEQ ID NO: 65036 - DNA, 1178 bp, Homo sapiens
actccagcctgggagacaaagcaagaccccgtctcaaaaaaaaaaaaaaaggttttttttaaaaatttattctttttaatgaaacatgtttgaagaaaataaaacagggctgggcgaaggagagtgtgagtgcgcagctctgaatggagttgtctggaagagctctcttaacgatgcttgcccccgatacacagtttctcagcagtgttgaattatccatacaagtcatttgttccctgtatgagttttcaagtactggagtacattgaacttgataagtggttgggtatgtgtgttcttgggaaaagaaccaggctctcctggaggtaaccttgatcattgttttagaaatcccacaccatagcttttcagcgcttagaactttgtgatttttctgcttacgcatcccttcttggagaaagtggaagattctagtctattaacagtcgtgggagtacctttcccgtccccttttcttaacataattcaaataggacttttctgagctgaacgaaaaaaaaaaaatttcatgttggagatttattgtagcttaatctagaattaagaatataccagtttgaaatagcaaatgattttttttccttcattccctgtcagtagggaatttcacttttatcagtaagaaatgtatacggatgttctgctgtacatgtggatagagtgtgtaggtcggttgtgaaggaggaatattctgttcattaagaaggtaaaaactgccaggcacggtggctcacgcctgtaatcccaattctttaaggggcgtggatgggcagatcagttgagatcaggagttcgagaccagcctggccaacatggtgaacccccatctctactaaaaatacaaaaattagccaggcgtggtggcatgcgcctgaagtcccagctatttgggaggctgaggcaggacaattgcttgaacccggagggtggaggttcctgtgagctgatatcgggccactgcactccagcctgggcaacagagcaagactccatctcaaacaaaaaattaaaaaaaaaaaaagatacaaactatgtgtggtcaatcagtttgaatttgttgttcctaaaaagaactagtagtgaagatattctcaatcgtataatttatctgtgacttagttgggtaactttgtagcaaattgttctacctacgttag

SEQ ID NO: 65037 - DNA, 1093 bp, Homo sapiens
gattgctgccactacagactattccctccccattattgtcaatactcctttcagagtagtgccttctaaatatataagggtaaacttacaagccgtctgaggttttatcggctaatttccccaaagcagatcaaatcctctttttgaaccccttggtacgatgtacttactaataatgcttcagacttgtattttattttatttatttctgtacttaaattataacgtctcaagggttaaatccttttatgtatttatttatttatttatttattgcttctcttcttgcactgtaccttgcccttcagtaagcatttctttttcatagttgaagaaatgtattggaagaaggaacagagaaaccatttacaaaagaaaagaaaaaccatttacacagattatctctaatggataaagggaactttatcatacacacacacatacatacatatatgagcatgtatattctaataagcaaactgcagatgacaaattctaagtgcagaattatttaatacctcaaatcttccagtcctatcatcttctcatgtaactgccatgttctgcctatgcgttcatcctgcctttcccccactctgcctctgctactccttcaggtctcactcttctcttgtgtgctcctttacctttctgatctccttttccactgtactctgcccagggctcctgactagccataatagagcaagctgtggcccaccattatttaaaattctgtttcaaattattatgaatttacttactttaaatatagatacttaattttatattatgtagtcaaaatcttaaaagttaaaaaatgtatccgacacctgttaaaggaccatggcagtggggctgattagatctgtataatgctgaaaccctgattcctcctgttctctcaatcattgagtatactagctttgcagggttggcgtgtaggcttcttggacttttatttcatgaaataaccactcttgtagtagggttttttgtatgattaagctaaaaccactgaccaaccaagttcgtaatccctcaaaaatatgtggaaatatttatttcacttctctgagccctagtttcctca

SEQ ID NO: 65038 - DNA, 1072 bp, Homo sapiens
gctgctgacacaggttcctaagaatattcagccgttagctcttgtcttttcagatgaaacagcgaattgccaacatttcatgcagaatttgctggatataaaccctatactttttttgcttttttaatagaaacagggtttcactctgttgcctagaccagagtgcagttgcacatccatagctcactgcagccttgaactcctgggttcatgcatttttttccactttagcctcccaagcagcacagaccaccgttcccagctgatttttaatttttttgtagggtcttgccatgttgtccaggctggtctcaaactcctggcctcaagctatcctcccaccttggccttctgaagcattgggattacaggcgtgagccacctcatctggcccgctgtacatattttatgtaaaaatcgaataagccaagatcagtatttggaattaaacatgcagaatatagccacaaatgttgtatttagtagtcaatactgaaaattctaaagtaaacagttactaggtataacattgccacagtagccattttttaggaatactatattataagcccataggtagtaaaaacctaacagttgcatataattagcatgtaaatagttgtttataatctcaaatctgtctccttcagcgagacattgttaacatccctttttatattttattctgtgtaacttgaagattaaattggagcaaattctctctttttttttttttttttttttgagaaggagccttactctattggccaggctggagtgcggtggtgcaatcttggctcactgcaacctccgcctccctggttcaagcgattcttctgtcttagcctcccaagtagctgggactataggcgtgtgccaccacgcctggctaatttttgtatttttagtacggacagggtttcaccatattggcaaggctggtctcaaactcctgacctcgtgatccacctgcttcagcctcccaaagtgctgggattacaggtgtgagccaccacgcccggccaattggagcaaattctttttaaaactgctagaaatctgctgtttcata

SEQ ID NO: 65039 - DNA, 1027 bp, Homo sapiens
tgttattttaaaggtgatagtatttggttaatttttgtttgaaatcatgcccagattcgacgtcaagcaattaaagaactgcctcaatttgccactggagaaaatcttcctcgagtggcagatatactaacgcaacttttgcagacaggtaagggattttattattacctttttctctaaatatatatcttctttctgaaatgttgactctgtttttaggttttaaatggggtgcaggagagctggaggtcctacctctgatagagattaaatttcctactttcattcagtagttaaagtgtaatgatttctggttatctaattcctggtgttgttttgtttttaattccgttatgaaggtgtaatgactagattcttttgggcattttgatatatcataatttttcccccaatttcctgtagtttcataattgtagcatcttaataaaagtttttcaggcatgccagatcgggttctcaacttacaaggaacacgtatctttttggtacttgagggaatggcttaagttataagtttcctgtcaatgtaaccttgagaaactaagttgaatcaagtttgaaactgaagcagatgatattttaaatttgttttatattcattatgccactttttctttatccagatgactctgcagaatttaacctagtgaacaatgccctattaagtatatttaaaatggatgcaaaaggtaaggccagttcttattctgaattgtgtttgatgtcttacagaatcacaaagttaggtgttactcattaagaataaactctagggtttacccagagttctatttcataaaaattctaagtattgtgaaaaaagtctccttaggtcaagatgtttatgactagaaaaacgagcagaaataactgcaaaaacagatcacgtttttccattagaaatctgttggaagaactccttttgacactttcaagaaattcttccaaaatacctgggttttattattagtaatgataaaaaaggaaagtcatgcttaagctgact

SEQ ID NO: 65040 - DNA, 1100 bp, Homo sapiens
tataaaatgatatatcatatatcccattggaaccaccatagaacttctaagtttttcttagattgaatttagcacttttgtcggtggtaatgatgaatcaatttggtaatttaaaggaatctgattacatttaaacttttcgtggtagtgtccttaaaatttgtgcaacctctgcaaatcacctccttcaggaaactttccctaagtcctacccctcccttccattttaggatactctctcatagtattctaaattatttcaaaatgaaacatcacatcaaaatgacctgttgtcaccttagcccttgacactatctgctcttcaagggtgagaccatgcttgtctttgctcccagcatctagcatagttgtagacgctaagattggcaaggtgcgtcacaattaacttttcactcatcttaatgtgccaaagtttgggaatagtttacttttttaatatgttacagaagattcagcattttatctaaagcatgtgatcactgttatggttcaggctttagaaatttcagactactactacccacttccttattgataagattatttttcagtgagaaaaaagtagatctttagctgggagtatcagactattttacctatgccccagcttgtaatctggtagagtatgtcgtgattgtgagcttttttggtccatgaatagaaagatttagacccactgatatggaagatttaacatgagacttgcaaggtgacctattttgtatacaacaattaccatattaatatgaattaggctgcttttaaatataggatacaatctgattcaacagtttgctacagaatttttccaaccattttttaaagtcactcccctaaatagccaatttttttaattttttttttttcttaactgctctcccatgaaattttaatgccacatatacactgtatatctgtttatggtactacatgtatatctgtgctttgtacgtaaaaaagtaacattttctaagaaccaatttttgcccccttggagaatgcgtggtttacactgaagctcaattgactgaagctagaagttgccttttcgtcagtattttggaagcattaataacaaa

SEQ ID NO: 65041 - DNA, 1030 bp, Homo sapiens
attaggcatccaccttaaagtccttatttgggcccttctgatttctttttgttgcctaatcttaaaaaacatctttaaagggcacccacatttctttggttaatagtataaaaaagactgcattgacatggttaagttcccaggaccctcagttgttcagagatgactggtatcattacctgcaaaagtgtcttgaccttgatggagcttatgttgataaataaagtttatattttttattctttatctttttattccatttttccatgaacttattgaagccccttcgtagatcacctattgaggttatatctggggcatgctggggtgtgcactatatcgtatttgtagtcagaatacttgatgctgtagcgctcagcatttattgaatgaaattctgctataatatttgagcgaatatttgtttttcgacaatgcattttctttggatttcttacagaaaaatgtccattccacaaggtttgtgacatatttctgtgagcaggttctccctaacctcggtaccttgactaccccagtggaaggtcttgatatacagttggaggtaagcaaaaatttcagctttagcactgataaggcattcttatattttaacaaaaatgtaaaccactaacttagatccgatttctaagggagcagtttaaatgtctggtaatggccagccagtaatctccctagaccagaattaattgcattaggactgcttcatggattcaattaaagtttgctgcaatgggaaagccttacctgtagttttattatagtcagtctctacttttgtagccttaatatttttaaataaggtgtttaattcattcatttctatccataactgacagagccaattttaaactggattaacacaaaatatcctttattccttcttcaatagaattcactacccctcccaactttgtatctcaactgtaatgtatgtaaacattttttcacagcatctgtaatactttacatttgtttataatctctccctacatttaatctgattcac

SEQ ID NO: 65042 - DNA, 1027 bp, Homo sapiens
taaaatctgattcttcttattagaaagaagagtgaatttctgcaattattttacatttgagaatttaatgtgatcaggtcataggtattctcacaacaaaatttgaagcatttgcttgactttatttcacctgttgaaacaaaagcagttctcagtatccaagtttattgctttactaaccaatgtctctgttttttgctttacaaacatggtattggttctcacaaattagttcaacttcccggtgcattcataaacatatacccacgtttagttttccttccagtgcacaaagtttccccagtaacctaaaagtactaaatgttctacattttgtgacttgtgttctttactttttggaatataaaaataatccttaaagtttaatttaaactgggagcagtgaattaaaaaaaaaatgtaagcttgaaactattgaaaagatcatgaaaatgcagagtattttttaggatgaagctcttcaaaaagaagaaaatttggtgaatctctgtactatagaaatggctgtatcaattggaggtaaaaaaaaaaaaaaaaaaaaagcatttgccaatatagaaaagataactacgtcaaatagtaccttcatacagtgtatttaatttcctcattaggtacagctgaatagagtgtaacctgaattcatattaaaattgaaagagtggattgtaatagtcttttagcttaaagctaataatagtatctatgacagtgttaagtgtgttggtgtgaataatgagtatgatagggtgaaatgtgcaggcatctgcatagatggctctaagtctaaacagtcaaaaatgcagaagtcatggcccacaaaaggctactgcactaccttaatgctcccatagttactgcatctgtctctgggagcatcttgccctcagagaaaccacctctgattttctgaatgtgttcactaggataataaacacaatgatttcattttcaaatggtttgcatactaatcagcttgtaaaaaaatgtgtcatggcataagaag

SEQ ID NO: 65043 - DNA, 1068 bp, Homo sapiens
ctacctgctctggctatgactttcatgacaacttcttagttctttatttattgtctatcattactaaaggtaactcatataactatgaaaaatatcttaaattatcaataatcaatttcgaaaatcaggttagactacaaaatgtccctttgaatgcaataaatatgcaatttttgttttgatcacagtatttcacgcaactggactcacacaaatgtagatctaaaggctgagtttttttcactgctttatcagctacataagcttctcagaatactgccaaataggtgctatgtgtgtatgtgcgtctgagtgtgtttcagctactgatataaactaagcatatcttttgctgaaaaatcaagtcacttgtgatgtacagaacaagagtctctcatccattggtcagtcacttttatagccacagagaaatggtcctcaaaggtgtcgtcccatgaagaaaactgatcgaagttatcacaaggctggacttttaatcatatgtaaatgagatcaaatctcttcattaacttctaaacttcctcattatagcaatcttgttagcaacaatagagagagcttggttttgctgtttttgatccacaatcttggaggcttgaaaaataccttttcagtcaattttgcaatcaatttttttgccattatgtcttactagggtgatgtcttgatgtcttttttgacccccctttctgcagaaagaaaagtaattcaattctgagacaggaaactcactggacctttccccagtttggctaatatttatctgtataatagaatgggtctgattcaaagtcaccttcttatgccatgacacatttttttacaagctgattagtatgcaaaccatttgaaaatgaaatcattgtgtttattatcctagtgaacacattcagaaaatcagaggtggtttctctgagggcaagatgctcccagagacagatgcagtaactatgggagcattaaggtagtgcagtagccttttgtgggccatgacttctgcatttttgactgtttagacttagagccatctatgcagatgcctgcaca

SEQ ID NO: 65044 - DNA, 1661 bp, Homo sapiens
cagctaaaaacttaatgttctttatacctttgtatgtatgacctacttttgtaacagaccatggttgtgtccaaggtaaaaccacagtgatatttttggatgctttgtctgcaatcttgacttgtttttgcagtatcattattcagacttcaaattgtgaatcttttaaacatcttgataatttgttgttgagagctgttcattctaaaatgtaatgaaattcagtctagttctgctgataaagatcatcagttttgaaaggttactgattttcctcttccctcttagttttttacccaatatatggagaagagtaatggtcaatcttaacattttgttttaattgtttaataaagctgctgggcagtggtgcagcattcctacctagtgtcataaaagcaaaatacttacatagctttcttaaaatataggaatgacattacatttttaggagaaagtaagttgctttgcaccgcctacttaattcttttccatatattgtgatacaaacttttgaatatggaatcttactatttgaatagaaatgtgtatgtataatatacatacatacataagcatatatgtgtgtgtgtgtgtgtatatatatatatatgcatgctgtgaaacttgactacacaacataaatcactttttaaattccaggaacgggtagtctgacacggtgattatccttttgaggctgaatccgttattaacttgttatttaggtttttactcccagtagcaagggattctaagttagttgcacttacatgattattgttatttaaaactaagaataaaggctgcattttcaaagataaattggaattgctgttggtgaaataacaaccaaaatactgaatctgatgtacatacaggtttctacaggaagagatggtataatttacaatttggagatttaataaccagggctacccagaaaaagtgacttgataacatggtaccaataagtaagggatgctctctcggtttgcttttgccactttcaagattttaacttctcaggttattaatcaaaattattgtataagttagccaatagaatttttaggttaaaacaacagatggggggtttgtggagtgtttaatgtcatgggcatttttagtaggatagaccctttgttctgcatttgaatgtttcgtatatttttgtttcacagttaatcttccctccccaagtttgctattcaaatcaactgcctgaatgacatttctagtagtctgatgtatttttctgaggaatagtttgtgattccaatgcaggtgtcttcattaccattacctctacactgcagaagaagcaaaactcctttattagaattactgcacatgtgtatggggaaaatagttctgaaaggctagaatgatacaagtgagcaaaagttggtcagcttggctatggagtggtggcaataatctctaaacattccaaaagaccatgagctgaacctaaactcccttggaatctgaacaaaggaatataaaattgccatttgaaaactgaccagctaatctggacctcagagatagatcagccagtggcccaaagccatttcaagtacagaaattatagagactacagctaaataaatttgaacattaaatataattttaccactttttgtctttataagcat

SEQ ID NO: 65045 - DNA, 1050 bp, Homo sapiens
gttcctattgggtaacgttttctatatgacatacataaagaacagtttccttttcattgccatactatctgagactttaaatatatgtgtatgtgtttcagaaacccaagaaaacactgtaagaccatatgtgagtgctggttgcttccacccttcttttgtttcttgatagtggttttccctgaggtctctatgaagacgtggaattaagtcactcctgctgcattttggggagcctttctcctgttggctcttctgcaatattgtttttggccacagctatttatactctatgacattgacttctccttcccattttggtgtcctaccactcagctgaaaaagtagcccatctaaaaagtgaaagctggtagaaatgttttatgtatatacttaacattgcaatgggaaagtagagtctgattttttttttttttttaacaaattccttctttttgcactttggatacatatgtattaatgggggaaggcaggggttactggaaacttgcctcagagaagcagggaagagctgaagaatcttttggatctctgccaagtcactgctgagctaagtaattaggcttaaagtttaaaaagcaagatttctctattacatgactttttaagtgatccttttcattgaattttccaatactttgctatacataacatttacaatgttatgttcaggcagccacaagattttatgccagaagaaataaggttggtgtctgcagtgtaacaataagaggccaggggaggaaagttggatttaatctgaagaaaaggcaccacatataaataaagtaaaagaattgggtgctgtggtgagctgccgagttccactctgatagctgattgtgcatgacccatgcttcccttcctggccataatttgtatgcaggtagaatccaaactatcaatttagatcgtgattaattataatatttgtatatactgtacttaaggacttgaaagatcacattagtgtatgaaatccatatatattgcagatttgtacattcagaaacataattaaaagcttag

SEQ ID NO: 65046 - DNA, 1026 bp, Homo sapiens
gaagaaaataatcagaaaaaacagaggcgtggtagatgagaaatggcagctgcactgttgaggagggattagaaccagctgtggggttcagcagttgttgcagtttagaagtcactctggtgaaagtaaacagaaggcgctctgatagtgaagaataaataagagggctcacgagctgctcacgtcaaaaattagaacaactttgcattccaaaatgttaaggagcagggtgtaagctaaaacctgcgtctcagctgtactccttgatagcagaagtgaaaacaaggggaatgtctgtgtgtgtgtgtgtgtgtgtgtgtgtgtgtgtctcttttacagacagacaccctaaaagagttatctgtgctcgtggagtctcctctctcttccttttttaagccccctccaattcatccttcatccctataactcttgtcaagatacccagagcctatgctcagttctcactaatcttaagttcttagcagcccagcatttgtcttcatatcttactcagctattttcttacatgcttacctaaaagagtggctgacacatagtatacactgaggaaacactgagtaagggagagagaatgtgtgcaactaagcaactttttacacctgtaatagctcttacatgcattagcatacagaagagccaacacgtattcctggtttttcttctcagtccctggccctgacttctcattttcttctgctgaattcaccttttcttgatgagtcttaggtgttggtgtgccccttttcttccctctgtacatatgttcaccagatgatcttttgcagtctcggggcataaagtaccatttatattctaaagactctcaaatcttacgtgcagtttcaacttcttcctgaacttcagactcatatatccaactgcctactgaacatcaccatttagttgtcatcacaaatacatcatgtcctaaactaaactcttgattttctaccccaccacacctgatcttcccccattcacaaaattgcccaggtccaaaat

SEQ ID NO: 65047 - DNA, 1027 bp, Homo sapiens
ttttgttttgttttttgtttttttgagacagagtctcgctctgttgtccaggctgaagtgcgttggcgcaatctcaggtcactgtagcctctacctcccgggttcaagcaattctcctacctcagcctcccgagtagctgggactacagtcctgcgccaccatgccagctaatttttatatttttaatagagatgaggtttcaccatgttgggcaggctggtctcaaactttcaacctcaggtgatccacctgcctcggcctcccaaagtgctgggcttacaggcataagccaccgcgcccagccttggttaggcattttggaatgggactgtcacacttccacagtttcttccctcccccaattttattttttctaaaaatctcatttaaaaatacctgtagagtcatgtactaaatagctatctcttgatgtctggacggagttgtaaattaagcactttctcctgcttccttatgtaaagctcttatactctggtcactggcagtagctttaacattttttcctgtatcccattccattggacagtgggtctctctgtcactttattgatttacttaggttgtttctgattgtccttttgcagctacaaatgttgtaatgagcatccttatgtatatccttgcctacttattgaacaatgtctgtaggatagtttcctagactttcttttgctcaaaggttatgcaattgtaacattttgatatatgttgtcaaatgacactccaaacaatgagaacacatttataagccagctaccagtatatgagtgttcattttttctacagcttcaacataattgtttgatttgttgatccagagaacatgagcaataagtaataaatctcaaggttattttatattatctttgatttatgacttctacaaatagctttcaaaaagaggtacatttaatattttccttttatcacttccaagcctattcagatatgaaatgtgctatcaaaacaagacaattcattttttattattacaggcatgaaaca

SEQ ID NO: 65048 - DNA, 1030 bp, Homo sapiens
caattcagtggttgtgtagaggaatatctttaattgtatggattcctgcaactagagaatatttgtagtaaaagctgtcacttaaatgtttacaattttgaccattgattacttttatgaagtcagttggggtggggagactgggatacttagttgactacttactttgttgactgcatttttatttgcatagaatatactaagtttcagtaaaatcacttacatgtgcaatagttgatatttctcctcttggagagaggtggtggctcctagggttgagttattgttaaggtagttaaatggcattgagagacattatttggcccacgttttaatcatgattgtgtgttaggttgtacagtaatggaattctattgtatttgatccttgaggtataataagttaaaaaacatttccttcaatcagtagggctagttaagaaacttcatgttaactcagaagtgaatttttcatatctcagaattagctgtaatatttgagtttactttggttagtagagaattaaacagagatttagaactcattaaacttttgtatttgcttcttttccaatctttttaaggcataatgtggtaggaagtaaaaaggatgccagcttgcttattcataactggtttctgttatacctggctgagctttttccagtatcatgctcttaataattgagctggctctatctttacacaatctgtatagttcctaaaatctctgtatgttacagtgtgtaataggcagtatgggttttctgattaaatgtaatcaggcagctgatttactgaaatcaggtggtgaagcatattcctttcgaagcatagtttctgtagtttttcctggcctgtaaccaataagctagagtatgaaagcaaagtactgtggcccctaactcttaactttgtctttaagcagaatctagggaaaaagtgaaaaggaggaaaggattctagaaagactttgaatgttgatggaactaatgcaaattttgtagagagaaatagagttgttaaataca

SEQ ID NO: 65049 - DNA, 1109 bp, Homo sapiens
tacaatcctaatctatctagttgggaagaactaacacatgtaatgataccagatagtatataatagatgttgaataagtggtacagacagcaagtacagccagaattctgagtataaaaaaaaaagattcaaactctgaaactttttgagcactgacatgatgctcaaaagaaatgatcattggagcattttggatttcacattttttgattgggatgcttaacaggtaagtgtaataaaatattgcaaaatccaaaaaaatctcaaatctgaaatactcctgattaagcatttcagaaaactgatactcaacctgtattagaaataaaacatttattctatcttagagaaaactcatcatgtctaatcgtagatacagaaatttccagcaataactacttaagataactaagagattaggagagcatctataggaggacaaaccacaaaaacttagaactctttaatctggaaaaatccagactgcattgggaaaaaataagagacaaaaattaagaagccattttaaaggggaaatagtgatagggaccaaaagcttcctatgagtattgtaaaccagctcccagcaatatctcatgtttggtttccaagggaaaaaataaagaagaccagattcacaccctctgggattatagctctttatcttaaaaccaagcattttaaagggaagaagggggatgtttagaaatgaaatagattgaaacccaatacaccttttggactttttgatggtctcaagaccgatcatttgaaggagtgtagcttccaatagtctatattcataaaattgtatcaccactatatagtgaaagaatccattcctgttcacaaagacctagagctacaaattcgtcatattcattccttttccttttgtctttcctaccccatcccatccccagtcccattctcattatctagcaaggtttcagaaatacacaagcatctttgtaagtatatccaacattgttccaccttgctttgaaggaaggctgtatatgtttgtgttctctcatctaggttaccctttcaccctcaaaacttttctttgtaattgattgcacaacagtctgtaatccttaagtgat

SEQ ID NO: 65050 - DNA, 1030 bp, Homo sapiens
tcttttgctgaccccttttctaccctttaagtgttggagttccccaggatttaccactaagccttcttattttgtaatcacttctagtcagactgatctactcccaaaattccaatcaacacaaagatgtactaacagctcccaaacttgaatctccagaccagatctttttacaatgcgttcaactcatttgtctgtctccctgacctgtctgtctagattgcactcaggcaacccatgctcgggaaaactaaagtcataattttcttgcccactctccatattaaaaaattattgtttttttttgttttgttttttcttttcctatttttagtaaatagctccagtaatgcttaggccaaaaacctgggagttatccttaatgattttcctcccttgctcttcaaattcagcctgttaccaattcttagcacttttactccctgagtatttttcaaaaccacctacttttctccatccccattgctgcctcctcaaaccagagcataaccatccctacgtcggttcatccagtacttcctagctggtcctcttgctctgttcactcttgcctctgttcaatctattctctccacagtactcagaattcttcaaatataagtcaaatcattcttaaagcactctaggaaattcttaatgctatttaaagtggaccataaagcctttcttgatctgctccctgcctgttttttcatcctctcttttgccctctctcctgccagggctgtcacacgtggtgtctcctttgtctgtggcattgttctcactgtgggttctcagctggttaattcatactaaaccttctggcctcaacttaatcttacctccacagaatccttcactagctaccctcctccaccagtgcagaggcaacatatatcctcctggagtgtattatcattgcaccatattttatcttttataacttaccacatgtaataaatgaatcactcacaagagaatgaacatggtaacagcagggactaactatgttgttttactcattatt

SEQ ID NO: 65051 - DNA, 1028 bp, Homo sapiens
aaagttttggaaaaggtaagtcaccccacagaaaagctggaaacaattgccctccttctaacttcttttctaagttatttgctcctaagtgtctgtaacctcttctgttagttacttagcacttggtggctaaaaggataatgtgaaataactcccctcagaatgtttcagtcgctttttctatcacttgggtaatattcttttctgtctctttgcctgctttctgtggtgaaacttacctagtcagttttctcttctttaccccagtatgtgtgtatagaggtggtagtattggaaaccatggaatctaggtatatgaaataagtcagatattcttctgatggtgaagaatatttggtattttggatgatggatgggaaacacactttgaaatgtcttttctcttgaaatcatgaaacaaaatatttaccaaattgcattttcgtagagcctacagaaaatatcattgagaggttctaagactccttttcttcctctgtgtgatatttgtgtaaagaggaggggttttttaatttaattttattactttatggctaagaatctctctactttattactgtataatattaaagagctaatttaacatagtcatttaaacaatcaacccaacttcaagtatgaatgcgacactgtgagatagcaacttccttcatcttccgagtatcgcacatggaaaaatcatcagcagactccagttataatgaaactagggcaaacacatgatccccagacttcaaaaaaagtaaggattgccaaaagtggttatgatccacacaaaaaacatacaggatgaattgtagcagaattcaggcagggttagcaatttcagaaaacgtcagcaaaattctactacctgaaggaactttctacaggtagcccaaccaggaaaatcctgagtaataaaaacagagcagacacagcactgatacaaaaataaaagaaaaccggtcgggcccggtggctcacacctgtaatcccagcactttggaaggccaaggcaggtggat

SEQ ID NO: 65052 - DNA, 1051 bp, Homo sapiens
ggaggctgaggcaggagaatggcgtgaacccgggaagcggagcttgcagtgagccgagattgcgccactgcagtccgcagtccggcctgggcgacagagcgaaactccgtctcaaaaaaaaaaaaaaaaaaaaaaaaaactagaagccattgtaacaacatgtttaaagtgctagaataagaaaactgcaggcttagaattctaaaccagccaaaatgttcttaaaagattaaggcaaaacaaatatgtgttcaaacaaacaaaaacagagacaatttggcaccagtaggcctgcactgaaaaagtaaaggaagtttatcaggaaaataatccaagatagaaatatggacttggaagaaagaatgaagaacactgggaaacatatgtaaatgaatagtaactgtacaaaataataatggtacaccctgaggagtttcaattttatgtactgtatatctaaaattcatggtagcaataacttaaatgatgagagggaagcaaatagagtttaaaagtcctaaggcttaattggtatcagccaagtagtaaaagtaataatttgcattggccttaataagtaaaaaagcatgttttaaactctaggctaacaactaaaaattatttttaaatgtaacttaatagaaggaaaatggaatcatgtagaacatttgattaatccaaaggaagtcaagggaagataaaggtacataaaagtagagcacaaatagtacaatggcgaatatagacccaagcacatcagtagttacatggaggaagactgtgtaacttaagaattaaatgtaggctagattaaaaaaaaaaaaaaaacggctatataactatacccttgtcagaaaaagtaaactttataataagaagcattactggagttaaagtggaatattttataacactaaagggatctgtggcaggctgaatagtgcccccctacaaagatatccacgttctaatccctggaacctgtgaaaactatatacatacacagtatggaaagaagaggactttgcagataaaattgaggatctggaga

SEQ ID NO: 65053 - DNA, 1023 bp, Homo sapiens
ggggtgtgaaaagttgtttaatggatattgagtttgttttcccagacgaagaagttctgaaggttggttacatgatgtgaatatactaaacactactgaactgtgtacttagaatggttaagataaattttatgcgttttcactacaataacaagtagaacagtagaacagatgattagtcacagcagaaaagatgaaagataggtcaaaacaggttattagaaaatatccaaactgaagatgaagaagaaaatcatttttagtagaaaatatccaaactgatatataaagacataaaggaatttgtggaggcagaggggagataaggcaataaaggacatgtgggacacatccaaaaaaaaaaaaaatccaacatacagaatcccaggagaagaggagagagaacaaggcaggagcaaggtttgaagaggtaatggctcagaatttatttcctaagaattatgaaagacattatttcacagactcaaagtgtgtgatccacagatttaaatacaaagaagccttactagaatatcatagcaaattgccaaaaacaaaagacagagaatagaatcttaaaagatagagaaaagaactcactttcaaatgtccaagactgacagctgacttctcagcaggagcaatggaaccagaagacaacaaagtgacatttcaattgctggaagaaaacagcaccaacctagacctctgtaccctgcaaatatcctttaaaaatgaagcaaataaagtaatcattatgtatgttattggcaaaatgatagaccaatagaacagtggaacaaaagagagaggccaagaataaacctttacatagatggtcaaatgattttctcaaagggcacgacagcatttgaatgaagtaaaatctctgtaataagtatgtctggaatgcatggatatgcatatagaagaaaaaacccatacctcacatcatccagaaaaatcaacttgagataaattatagacataaaagtaaagctaaagcaataaagctaccagagc

SEQ ID NO: 65054 - DNA, 1047 bp, Homo sapiens
ttctcagaaattactttagcaattaattcaattgatgttgctgtggaagaagcagggcttgatgtttaaagggtctagaggaagacgggcctacattcctgatggacccaataaaaagagtatttttcctgccttcatcaactgccttttgctcctcacctactagggagcaaagctagagggcatcttagagatgtgaggtggactagtttgtaaataaaatagcattaaaaatatatccaacctagagaatgaagactatggaccctccatcgttggttgagggactttgagagtttttgagagttgtgtttttcaagcttaatatagctttcctttctagcctgttccttcaagtgacacaaacaccctttttttttgagaaatatttagcttggtctaggctactgacagtacctagaaagaaaaagaaaaagaattattcttgcttattattttataaaacctttactagacttggagactgctgcagcgacagtccagttagtggactggaagaccaatcaatgaataatgattgactgtttacaaatgagcctagcacggtgcttgacccatggtgggtgtttaataaatgttagctgactcagagtatgtctcattattgtggcactatgttatagtgaaagagctatgaatttggcatcaaaccacataggttcaagcaaccatgtggatgtatgctcttgggcaaattatttcgcttcttcgtaaactgcttatcatacctaaacaatgggagtattcacattataatagctaccccacacagttattttgagaatgaaatcagaagtgagttggctcattttaaagcactctagataagtaagtgatacatgtgtttctgtaatatgtgtgtgcacaaaggcagatattaaaaatttttttaaatcctgcctttttctctttcccatctcactcagcaataggagtaggcataggtctctgataggctggatggcatcctgagtacagtgtaactgtggatagtttaggctttgcagccaagaaggcgtgcattca

SEQ ID NO: 65055 - DNA, 1055 bp, Homo sapiens
actacgcccggctaatttttgtatttttagtagagccggagtttcaccatgttggtcaggctggcctcaaactcctaacctcaggtgatctgcccacctcggcctcccaaagttctgggattacaggcatcagccaccatgtccagctgccttcaatgaatttatgtgattccatttaccttaattgtaagaatttgacaatgtgatttttctatatattttacttctgcatatattatgagccacacttttacacaattacttttaaggagatccacatatttctatgatgctcttcactcctttgtttatgcagtttttattcagctccaaagggcttccttgagcatttcttataatagagggctgctggtgatgaattatctcatcttgtggctatctttaaaagtctttattttgccttcattttttgaagtagattttcattggatatagaattttcaatgacaagtttttctcttttcgtttcagcactttaaaaatgtcattccattgtcttctggctttcattgtttcagataaaaagtcatcaataattacatttttgttcctctgtatatgtgtgcctggttattttcaagatttttcttttcttccccccatagcacttctgtccgtttctcagatttttctatgtatatttggatttcagcaatgtgactacaatgtgccttggtgtcatgtttgtgtttttgtttcttaaggtttgtaagtttcttagatctgtgggttgatctttttcataaaatgtagggggaaatggtcatttggtcttcatatacttttctgacacaatttctctttctctcctgagaccattttttattatcctacagttccctaggacttttaactttctgtgctttattttctttggtcttttctacagtgtccaagctgctgttaaatccattcaatagattttttttattttagatatcataatttttacttttaaaatttttatttcatcctgtttataatttcttcttctgtgctcatatttctcatttcttcacctattatgtctagtt

SEQ ID NO: 65056 - DNA, 2037 bp, Homo sapiens
tgagctcaaaccagcctgggtctgaccggccaatccgagcgcagtcttccgcagtcgcgagtacggctgcagccaatgagagaccggggcgcctcggtggggtgagacagggcgctcactggcggaaccccgggggacgcggtgatgggaggagtgtgggaggggcagtggaactggagtcagctaatggctgacgcactacgcgcagagggaaagacgggtcaccaatagcgacacggatatggccccgcgggcggggtttaggcccaaagtggtgtcggagcagcgcctattagtgtcatcctcaccgtcacggccggcgcctcctcctggattcattcactcgctcttttcattcacgaaggtagtgaggcctagtggaaagccatggagagcgctctccccgccgccggcttcctgtactgggtcggcgcgggcaccgtggcctacctagccctgcgtatttcgtactcgctcttcacggccctccgggtctggggagtggggaatgaggcgggggtcggcccggggctcggagaatgggcaggtgagtcggatgcagcgccgcgtcctcgctcccgcggcggcccggaccaggcctgggccgtgatgactagttctggggtctgctcctggccttcccctccccagctctcctctttctcaggctcctgtgccccgcgggcccctcctggctcccttggctgtcttctgcttgcttagactacttgcagagttttaaggtacgaaatacactgctcgctcaatcctgggaatctaagctcagcttagggtgtaggagaaaactgccttaagtctctggggcttgtgccctttaagccattccgtgttcatggagccagtcagtcgccctgctgcctcctcagtcacacgctgtcctccttggttcgccccttgtaagtgtttttaaaataaagtttttcgctcggtttgaatattggccctgtgctaaggatgcagagcattctgttaacatgtttgggcagaggatggaaaggggtgtagggacacaatttcagaaggctttttgcactgcggaatcgtacctccccagttacgattaagatagtaatcgtatctggatttggcctatttcatacaattacaaagcccctttaaaaggaattctcgctaaactgttctggagtcctaacgagtagcaagaactattgcttctgtaaaatgataactcatcatgttaaaatcagatttttttttttttttcacaaggacgtttgtaggaaaaagtatacccgtaaagagtgaaccaaacacatggaacttgtagtcggaggatttttaaaatggaggacgaaggtcaggttgaggaaatagggaaaattatctgcagggaagttttgctccccccccccttttttttttctttttcaacctattttgtttccttctttgctttatttttcgtctcttggccttttttccctttaaaccgagtgattacttatgatatgcttgtggtcctaccctgagatgattatttattttgatgttttataatcgaatgtgcacttcctaagcattttattgaattttggggtggttaggcattgcctgcagactgggctcaggtaagatacactaataatgttactccatgttctttgtttatttagaaacatttaaacaacctagtaggaaagacatatgttaaccttttgggtttatgttaacattaagagaaaacatcttagcagtggatatgtatgtgaaatctttggacgatgtggagcaacattataattctgtttcacagtcacctgtttctctgaaaaaggaagtgaaatgttcagctgggtgtgatggctcacgcctgtaatcccagcattttgggaggccgaggcgagtggatcacaaggtcaggagtttgagaccagcctgaccaacacggtgaaaccccgtctgtactaaaaatacaaaaattagctgggcgtggtggcgcgcccctgtagtcccagaggctgaggcaagagaatcgcttgaacccaggaggcggag

SEQ ID NO: 65057 - DNA, 1757 bp, Homo sapiens
ttgccggccctctttgggaaaacattgttacacagagatagatcagtctaggtattcagataaactcagttaaaattgccttttttaaaatgtcaattggctgggcgcagtggctcatgcctgtaattccaacactttgggaggctgaagtgggcggatcacttgaggccaggagtttcagaccagcctggccaacatggcaaaaccacatctctactaaaaatacaaaaattagccaagtgtggtggtatgcacctgtagtccccgctactcgggaggctgaggcaccagaatagcttgaacccaggaggcggaggttgcagtgagccgagattgcaccactgcgctccagagtgggcaactgagcaacactctgtctcaaaaaaaaaaaaaatttaatgaatacaataaaatgggaatttatgctttttgtaagggatgctacttttgtgcacttcttagttatcatctctcagagaccatttctgtctgggggaaaagtctgatcactgtggtatgggaagttcttctcttacagggactgagtgatggggttattgaaacactgaaactaggttattgcgttgtcatggtaactccataataccatggtgtggtagttgagaagcttgccacaaatctgtatcagaaagaacgctttgttttatttgtcgatttttgtctacaaaacaatgcgtttgccctatctctaactggcaattccaggaaaactatccagtttctggaaagttatctttgccaccatttagtgaagttatttccatttaaataacctagtcattgtggaagagaggaagggctagacagtttaagaacttgaacaattggtgcctctcaagagtattacattgggaaacagtatagctaacaaacagattggctttggagtcagtgggcaagctgtgctgttactaagctggttgaccttaggcaaaaatagttaacctctgagcataacttctttcattttttagggggatgatacttttcgggattattatgacaattaaatgagatgtaaatgaggttctagtatagtccttactgtatttttatgaatattaagtaacatatatttaagagcatcatttgtttgtatagattactcttattggatgaaaagggattgttgaaactaagaaataattgtagttcactcagcaggtatacacttgaaaatctaaaattatgaacagaccaattaggagatgactagtgctactgcagaagaattccttgcttgggtaaaagatttactaagcagttcctttatatatagatccccttagtgagtaaatctaagataggaaggacttcaaaaaatttggttatttataatttttcaattacatttgtaaaaaccttagagttatctttaagtcttcaccacatgcagccttttaggaaatcccgttgactctgaacttcaaaatatccagaatctagtgagttctaagccaccacagactcttgtctctctaataacaagtttcttatctctctgcttccaccttggctctcctgcagttgattctcacacagcagccacagtgatccttgacaagctttggtcagattatgtgatgctctgcctagatctctctagtggtttctcacccactcagattaaaactcagtatttgtctcgtggctttgaataaggctttattttattttattctattttatatttatgtttatttttattttttgaagctgggtcctgctctgtcacc

SEQ ID NO: 65058 - DNA, 1052 bp, Homo sapiens
tttgggctgctgtgacagaatactatagactagatggctgaaacaaaacaaatttattgctaaaaattctggaggctgggaagtccaagatcaaagcttctgatgtcaggtgagggatttttcctggtttgcagatggctgtctttcattgtatcttcacatgcttgtgtctttttttgtaagggcattaatcccattaataattacctcccaaaggccccacccgcagataccatcacattggagatttaagcttcaacgtatgaatttggggggatgcaaacattcagtcccagagcataagttataatattttgtcagttgacctaataaaacatgatatcctgggtaacagcatagaggtaatcacattacttttaacacaaataaaagcttggaaagctttttggtaagctgaagaggaataacagttttattctaatgcaatttttaaaacaacaataggctattgttttacacatctctctgaaaactatacatttattgactttatctagaagggcagtaactatgtatctctttattaatctttctcctaaacatactgaaaatattttgcagtacacccttaggacttattaggtttataaagaaaaggcagctgtgaatgaaatgctgaattgcatcccccattggatcaactctaaaataattatgcaaaaaataagaataaccccatttttgctgaacatataaattttatcattgcaaaagaactgaatagttcaacaccacattctcatggagatgtcttactgggaccgcagtagttgggtgtactattgttgaaaaagataatttctatttgtatgtaggttactctgtgcctaaaatggatcatttctaccatcgtattttatcttccttgttttccacctcatcttttatttatacttcatagatcatgatatttggagcatatttggctattagccaattagtgcttatcttttataatggttttcaaggataacagagataaattaaattccaaaatattactgaaacatcattcccaatagcaactataa

SEQ ID NO: 65059 - DNA, 1045 bp, Homo sapiens
gtggaaattgggagatacgtttccctaaaagaatatagtgggtgatagttgagaaacagtaaacagaggctttctttttcttaactcttataaaaccctgagccaactatccttacaatgagttgtcatttgaagttttctacatactcaagaaatatgtttccttatcttattttaatggagcgtatcttctgcaaacctttttacagttagagtgattcttaaaatttaggcacatacaggacaattagacataaaaagacttgacttacagattttaaagcagggatccttgcatggtagactttcaaaatgatagtatcttttacttgaaccatcttttgcaaagtaacataaatatctcagagacactgccagagcgaactcacttttagaaaaagcaggatatgtaaacttttagtgataaattttgaaattcttgaggggaaatgatatgtgatttaagttccttcaaaataatttatctttattttatttttattttaaataatgaattatgttttaagatctgattcattctgaactataactgactctagagggtgcttaatgagcactgaagacttcctaaagatttatattgaagatgatttttattaaaatgaagtttatttggggttttaatccagtatttgaaaataaaccatattttgccctcccaagagagcctagagcaaaaatacttagttgtcagtattttttcgtttttttgagatggagtcttgctctgttgcccagactggagtacagtggcacgatctcagctcactgcaacctccacctcctgggttcaagtgattctcctgcctcagccttccgaacaggtgggacaacaggtgcatgcgccaccacgcctggctaatttttgtatttttagtagagatagggtttcactatgttggccaggctggtctcgaactcctgacctcaagtgatccacccaccttagcttcccaaagtgctgggattacaggcatgagccaccgtacctggcctagctgtcattctttttaaagtaggtaaa

SEQ ID NO: 65060 - DNA, 1046 bp, Homo sapiens
agcccctcccctgcactgagttttcctgcccttccagatctaaccaatgtaaatcttacgtgtattgattggtgtatatatcttccctaagatgtataaaagcaagctgtaccccaactatcttggggtacagcttctgaggctgtgtcatgggtgcgtccttaacgttggcaaaattaactttctaaactgactgagacctctctcagattttgagttcacaacgtttacaaaaggtctgtgttatagtgagaaaactttgctaaacaaaatgagttatccttcattggagtattagtcattgcagagaatgaatgttaatgtaaacttttacatgatgtcagcctatgaaaaagtgatgtgtttccatactacccgtttgtttaacatttcttcagaaatatcacactgttttcattactgcaggcagagaatcatattagaaaaattcagtaatttgatgtgaaacctatgttttactcattgaaggcactgttatccaacagaactttttatgataatggaaatattctgtatctacactgtacaatttggtagtcaccagcttttttaaatttttttgttatactttaagttctagggtacatgtgcacaacgtgcaggtttgttgcatatgtatacatgtgccacgttggtgtgctacacccatgaactcgttatttacattaggtatatctcctaatgctatccctccccctccccccaccctacaacaggccccagtgtgtgatgttccccttcctgtgtccaagtgttctcattgttcaattcccacctatgagtgagaacatgtggtgtttggttttttgtctttgcgatagtttgctgagaatgatggtttccagcttcatccatgtccctacaaaggacatgaactcatccttttttatggctgcatagtattccatggtgtatatgtgccacattttcttaatccagtctatcattgttggacatttggcttggttccaagtctttgctattgtgaatagtgctgcagtaaacatacgtgtgcatgtgtcttt

SEQ ID NO: 65061 - DNA, 1069 bp, Homo sapiens
aaggtatatatatatatatatttttttttttttgaagtccttgtcctttattgcacaaggagtgagggaaacagacagaccagttggaccatagtagatgggtgtatgaggacaaaatgctacctgaaagccagccaacccatactcgcctgaaatggatgctaatacccttcaaactctgggcattggtttcacacacagcctcttccagggataaaaggggttcttctaaagcttcttgttaccctcaaccatggaggcaagttctgagttctggttttcctatgatgctaactctagtcacatagatctctggagtgatcaaacatggtggagtggcagggtgagtattccaaaagcataagtaaaacaagagtcttgaccaagccctgttacaatgtcaatgcctgtatatggcctcccagcccaaccagaaattgacagaggcatgtatatggtgaaaagatatacatatatttagaattagccatctggactaagtttagatgatcccaattttgttggcaacatccaaagcattgtaatcaggagccagttgaacatatgctttcttctctccatcaggctgaatcagggtgttgaccttggccacatcaatgtcatagagcttcttcacagcctttttgatctggtgcttgttggctttaacatccacaatgaacacaagtgtgttgttgtcttctatcttcttcatggcagactcagtggtcaatggaaacttgatgacagcatagtggtcaagcttgtttctcctgagggtgcttttccgaggatatttgggctgcttccggagtcgtggtgtcttgggccaccagaaggcgggtgacgtgcgggtcttcttttttttgtggctgtgaacacctttcaacactgccttcttggcctttaaagcctttgctttggcttcagctttaggaggggcaggagcttccttctttgctttcagcgccatcttgtgaaaaggctattcaaggtatatttttgatacatggggtaagagacttagtaacatgtgcccagatgaatttcaaaattgctatggaacagt

SEQ ID NO: 65062 - DNA, 1047 bp, Homo sapiens
tacaaaaaatttaagaattggccaggtgtggtggctcacacctgtaatcccagcactttgggaggccgagatgggtggatcacttgaggccaggagttagagaccagcctggccaacatggtgaaaccccatctctactaaaaatacaaaagtactagctgggaatggtgtcaggtgcctgtaatcccagctacttgggaggctgaggcaggagaattgcttgaacccgggaggcagaggttgcagtgagccgagaccacaccattgcactccagcctgggcaacaagaaaaaaaaaattaagaattcgcctgccatggtggtgtgctattttgagtaatgggaagtcactgaaggaattgaacaggggtagtgatgtgatgtcatttactttttgcaaagatgcccctggttgctgtgccgtgaatagactagtggccacaggtggaagcagaatggtcatttaaaattttctatttattccaattcagtgtggtcataaaggatcaagtgtaatttattattcacattttattggtatggagaattaattcatttttactattaaaaaaaggtggcatgttagtaatcagaatgttctaggagaaccttccagaggtttgcaactcttagaattgaaatcactatttagctaagaccagaatcgtaacataaggcaagattgaataaggtgaatggatttgatgaattaaagtgctacttgtaaaggatagtaaattcacttttgcattttagatagtagcttttattgtaaatttggatgcaaaatgagataatagcgttttcaccccttttcaagagccatttggagatagcattttgactagatctgtcattcaattcagcttagaaataatttataattttatttttaaattcctattttaggatattatcatattatcatgagataatgataataccactctaattttattataattgggttgggaggaaatagtcttttgtaaaaggttagttagtggcatattgccattagcatttattttaccttttttagaaaatg

SEQ ID NO: 65063 - DNA, 1583 bp, Homo sapiens
ttctggacctatagatgctttgaatttttgttattgttgttgtttgggtttgccagttttttaagtgacaagtagaacagtctgcagtgtctggttgggtcaaaagaaggggagtaaagagtcgaagagagggctgctcagtggggaacctgaaaggactgagtgggaaaaaggggactctgtattgggacaggacatttgtaaactgggcattttctttctataataatctactgttcttgaagaaagatgtgtgcttcctcataccatgggattgtggaaaatgcccacaatatctgggtgtatgcataaactaatatttttctgtaaaattatttttataatatgattaggagaacaagttagagtggtcttatattgcatcactttcactgtttgtctttaataaaaatggaggaagttgctgctgttttattaacttgcaccctgcatgcttctcttctttgttctttgttaaatatgagctggcgtgtgttaagactacgttagcatttgctctcagggacttctgtggtttctaaattcagcactgctaagcccctacactgtttgcctgaatcagttgagactgctatttttagcaacaaaagggaattgaaatagcaattttctttccatgtaatagattcccaagaggaatactgatgcaagctctctatcattttctattcctaccaccctcctcccaaagccctcagaggaaaggcagctgtcatggtttgcggcagtattaatctttaatcaatcgagtgttttctgcattcaggtgttcggggggaaaaaagagtcacaagaaggaacctgtttggaataactaagctcttaggcatggactttacagtcagaattttgtgggtagtggcagggaatagacagaagagctaaaaatagtgagtttgcttccagtgttgctctagtctatttttgatgtttgattttgataaggttgattgggttcttactaaaaatatctgttcctagcaagttgaggacaaaaagagtagaatatttttaacctacacaaactaaagtatttttgttgactgtataaaatctggaagtggagccctggtcagttgccagtattttatataatctgtagcaagctagacacttctggatgccaagttgggctattctttatagttgtcagtttccatcttctcaaaggcttgtaaatttgggttctagtgttatatttgtgtatgaagacataagcctttttaaaaaatcttcctttttccactttccttcttttcttcctctaccttatagtgccacccatgaccatcatctgtactgtcccaacccacagggttctgggtgataccatatagcttttttctgtgtattgttaaaagctaccctaacttatccacgtatttcatagcaaagtggaatctgaggacaccagtgttaaatgaagaagcaaatcttagagacaagaatagtgaactgtccggccaggcgcagtggctcacgcctgtaatcccagcactttgggaggccgaggcaggtggatcacgaggtcaggagatcgagaccatcctggctaacacggt

SEQ ID NO: 65064 - DNA, 1006 bp, Homo sapiens
aggtcaaggaaggcttaatgggagatgagacggtttaactgaaaaacctcaaggatgggagggaaacacagctagaagtgtgtcttagttcatttgtgctgctataataaaatacataaagaacagaaatgtattttctcacagttttgcatgccaggaagtccaagatcaaggtgctggtaagttcagttgtctggaaagggatactgtgtgtttccaggatggcaccctgttgctgcatccttcgaatgctgtgtcctcacagagcagaaggcagaaagttggctgaaggaacacttcatgaagattcttttataagggccttaattccactcatgagggaggagacttcatggcctaatcacctcttaatgtctccacttcttactactgtcacattggccattaagtttaacacctgactcttggaagggacacattaaaaccatagcagagtgtacgttggaggtgtagagaacattttcgaagagaaagcatgttaccttggaggaactgtaaaaatttcagcacaactggggcatgcttgagtggaaggaggaaagtggtaggagtaaggtcagctcatggaagaccttgtaaagaatgaggggagtgagaagccagtgacaggttttaggcagggaagtgaagttcagatttgcactttggagtgattgttttggctacaatgtagagattgaattggagaggagtaagaacgggaccaggcgaatgcgttagaaggctgttaacagtagttcttgtgggagatgaatgatggtagctctaggtggtagcaatgggaagaagtgaatgaatttgtgtttcagtttttatatagttggcaaaagggaaatgtaacttcttggcagagaaaaaatggtgtttgagaaagataatttttaactgtgtatagcatgaattgagtgaggagggatgaaagattcctcgtacaagtccttgtgtttgggatgatagcgtagattggggtagtagttgtgagaat

SEQ ID NO: 65065 - DNA, 1325 bp, Homo sapiens
cagctcagtgaatctacacacacacagtagtaactgccaccctgaaaagatacagaatatttcctgtatcctggaagattcccgtattgcccttccctgttatctactccactatccagagataaccagtattctgacttctgtcaccatagattagttttaccttttcttaaacttacatttttatgtcagactttttgtaatgtcttagagattcattcatgttttgcatatatcagtagttctttttttattttcttttttattgctgtttagttttgcttcttttgttttctcttttattgctgtttagtattccattgtttgtctatatctcaatttacttattcttctgtcgattaatatttagttgtatttacctactatgcatcaactaagctactgtgaacattctttggggtagacattaatgcatttctgtctcttgagaattggtgggttaaggtaggcatatttttagttctgaacatattggcaaatagtattttccaaaataattgtaccaatttacagtgccaccagcaatgtgtgagagtctagttgctccacattctttttaacacttggttttgaagtctttttaaaattttagctattgcggtgtgtattcaaccttagatttgaaccgctggtattgttctgtcttttacatcaaagtgtcacactggtccttttgtatgtaattggtgggtcctaactatgaccaattcctcaatgtaattcttagactaaactattgcttttttccctttcccagttgtcacaggtagtactgatggaattggaaaatcatatgcagaagaggtaggtgattttcaagatctttccttttaatataaaaaataagaataaatatgggatgatttcttatagtagttttgatttttgaagtaaaaaacacaaatataatgttgcatggtacaatagatgctttttgtttctaccttgttggaaataccatatttgcctaaacagacacaattttttgaaacaaatttcatgtaaaataagtataaaactttctggttgtactgggtagttggaactgggaacaatttagtgtaattttattttatgtcatgtaagtgtgtacagtcttcagatttgaaagtcaattattttgaactattttccaaaaaatgaaaatattataggtggttacatttctaggctagtccatgacatcattttcacaagaaggactgtgattaacagaaaggtattgatagacacaggcaaagggttcagattctctgcaatgaaattaaagaacaggagagcatcatagtttgaagaccactgga

SEQ ID NO: 65066 - DNA, 1028 bp, Homo sapiens
acccagataattaaaaaaaaaaaaaaaatttttttttttttaattttttgtagagatgggattttactatgttgcccaggatggttttggactcctgggcttaagcaattctcccacttcggcctcctgaattgctgggattacaggcgtgaaccactgtgcttggcataaaacttttttaaagctaatttttaaattatagaagtggtagacacttaaaggtttaaaaaacccaaatagtatagatgatataaaatgaaaaagtaaaagtctccctccttctaaaaccctttcacatttaaatactagcttggcttagaaagataactttttggggcatttttttggtaaaatctctattttggattatgtcttcattacacttgggtttatattttgaactatcatctggacaggttttcttaaaatgggggttatagctcattaatgtttttcagtgacatgcacaggtgtgattcaaatctcctttactgtttcagttagcaaagcatggaatgaaggttgtccttatcagcagatcaaaggataaacttgaccaggtttccagtgaaataagtaagttctcacatcaaacaaaaggaatacatagctaattaatgttttcaagcagttatccgatactgacatagttatttctagttcaggaaacttctttttcaaggagagatatcattaaagagcatgaaaaagcacaggatgctttaaaaatggatcatcaattttaggctgggtgcggtggctcacgcctgtaatcccagcactttgggaggctgaggcgggtggattacctgagatcaggagtttgagactggcctgaccaacatggtgaaaccccgtctctactaaaaattaaaaaaaaattagccgggtatggtggcgggcacctgtaatcccagctactcaggaggctgaggcaggagaatctcttgaacctgggtggtggaagttgcagtgagccaagatagtcccactgcactccagcctgggtgacagagtgagactccatc

SEQ ID NO: 65067 - DNA, 1071 bp, Homo sapiens
tctcatgagacttattcactaccatgagaacagtatggggggaaccgcccccatggttcaattgtctcttaccagatccctctcataacacatgggaattatgggagatgcaattaaagatgagatttggatggggacacagccaaaccattcacagcgccttattggagattcccaatattaaatatgttatatctttttttttttttaattattttaaccttgctgagagtacagatctttacaaagctgagcatgtggtatatagatatacaatatatctttggcatttgaagcttttaacattcaagatttcagctatgtaaatgcaaccccaaagggccaagatatacagtattttacagttttgctgaggtctgaatctgaattaagccatgacactaatgagcctgaggtagttactgagatagtaggtgaatttaacatactgcctggatcttagcactgtttcattcttagcttcttgtagtcttgtatataataactcttaaagtgatttaaaaaatgttgtgtttgtgggtgtgtctagaaattgcctctcaatgaatgcatctactagttgctagaaataaaggtacataggcagaaagtagatgcttttgactaaatggaatgttgcattttgaaatgctatgatatgaatgaatctaccgtctactcgatacagaaacaagaaaagctacctcatgacactttcagcaagtactgcagcctgtacaaagattgctcagtgactcagaagatatgctttaatgatatttgagaatttggttaactcatgatatgaggtggcacgtgactgttggcagaaatgtgattctggagaaagagaggattctgttcaaacattttcatgaaggaacagatggtaaagacactgaattgacctttattaaaaggcatgggtttttatccttgttaaaatttttgaaaaatgtttttctgggcataatatgaatttaataggagaggtgatatcagcagactatgtcttctgttctaagctgaaaaaatacatagaggagatttataagttaagacagattttta

SEQ ID NO: 65068 - DNA, 1026 bp, Homo sapiens
catatagccccatgagtcatatttttaaaactgcttctttaatgctagaaatatctttgttgctcgtagagtttatatgttacagggccaggaataaaacccatccattttgcctctactggttttgcccatagtacctgtaactgtagagatattctacaattttgtcaatgttcctggccttccagaaagtgacgttctgtactgcctgtaagacagactccacaaggcagtgagctagtcccaggatagtttcctgaaaggtctttgaagcattgtttccacataagagaatccttgttccttactagtgggcttgtcatgcttaattaaatgaaatttaccattaaatgaaacatttctgttatggtcatggttacaaaattgttttatctaattatatcctgatagggagaaggatagattcttactgagacaatgcaaataattacattgtcatgtaaaataaaagaactcaataaaggcatgttgtagaatatttggccattgctttgattagttttacagacaaggccaatcaatatgtgttgtattttctatataattaacatctttaaatttatctaatgatttaccagtttatatttcagctactgttgcagcgtaacaaaccaccccaaacttattgtggtaaaggaacaaccattttagatgctcacaagtttttctggtcaggaattttgtcaggacttagacaatccttttgctcctcatggcattactgaggtcactcagtgatattttgctgacggatggtctggtctggaagatctaagatggcttctcttaacaggtctagtgacttggcaggagatggccagaggctggacttagctgggactgttgactagaacacctacatgtagcctctctagcatagccatatcagggtaactggacttctcacatggtaactatattcccccagagtgaacattccaagagaaccaggcagaggcttatgtctttgttgcctggtctcagaattcacgtagcattattact

SEQ ID NO: 65069 - DNA, 1079 bp, Homo sapiens
aatgacctagcgttatgtctaatactagaatcaaagagaaaaggaattcattaacaccaataggaattttcacatatttgaattatttcatttctttgctattaaaagccaatagaattaatatttaacaacaccaggccactaagaatagaaaaaatgatatggaatcaacttttaatgtgctttcattctgtttaatgctgtagagatgtacaaaatctaagacgcaatcattctgcaatacctgatgaaagtattaagtcacagatgtaaatacatttaacttttatggaacacttaatcatattcaggcatgtttggaaaacatactcctcacatgatttaaaaggcatctctgtttaggaactgctgatggatcaatactctcattttataaatatgaaaacgaagtctggggagagaccaactcacatccagtgaatggcacaactaactgagttctaatctttgacttcttgtgctgtgttctccgtgactccatgcttttaagtgtactttaagtattgtaggtgggtaactgaataacttttggaaggtgcatccccaaaacgtaatgtcagaattacatcacatcaacagataaaacacaaactaaattaaatttgcagcatgactatgtttgaatgcaattgcctgttggagttattatattatttaattgatatatacaataatttttcctttttaagacatagccatgcccttgtattcatttatttagagacagagtctcactctgtaccccaggctagagcacagtagcacaatcttggttcactgcagcctctgcctcctggtgtgtccagagttggttccttctggtgggttcttggtctcactgacttcaagaatgaagaagccaaagaggttccccttgagtgttatatagcgcttaaagatggtgtgtccagagtttgttcctccagatgggtccagaatttattccttctggtgggttcatggtcttgctgacttcaagattgaagccacagacctcactgcgagtgttacagctcttaaaggtggtgtggacccaaagagtgagcagcagcaagatt

SEQ ID NO: 65070 - DNA, 2821 bp, Homo sapiens
tggtgggttacaagaatatctctttttgctttctaacttgatttgtaggtcacggttatcctgcatggaaaattggtcagctctggcccaaatcttcttggtagtcatttcatttttcaagctaacaaagagagagaagtaacttacctcaagaaaagattcgttttactaaaaaataacagagagacacatttcatatgattaaaaaaaatgctgagacataatcacaggaacattgcctcatatgcagaactagaaagactgttttagctataaaatgtgatgtttcattaaccagatttctaaagcaaatgtttatacattttataacccttgtgttctgtctcttcatagagctgtttgtctgctcagttgtacagtcctgtgggctctcactcagaagtccctcccagcctagcctgccttcctcttcccactgctgtctctctctccatgggaccctcctctctcacgggactaatgaagcagctgctttgttctctgcctgccacctgtcgctttttataacaagctgtgtatcttctactctgccaccgtcatttccttcctcaaaaaaaaaaaaaaaaaaaaaaaagaagtgtgatcttgtaacttcccagtttaataacctctcctaagtaattgtaacacacaggaggaaatataaacttgttataggaccaattccataggcctgtgacctgagcatttgcatggagccccacacttagaagggtccatacttggtttaatgctctgctattgccatcttgaaattcttaataacttttgaatgagggggccccacatttttattttacactgggtcccacaaattaagtagctagtcctatttgttatcttggaccatacaacctccaccagctgtcttctacgaattttctttccgcttctctgtgccatccacagggattcttaaaacatgctgttcgttttctgcactttctggttttgccaacatctgccctttcttgatagggtcaattcctactcttcaccaaaaactccacacaaatgttacctagtaggtaaaatagcactctgcaagaatgagttgctttctctttgatgctttgtttatatttattagagcagcaattgggtttacacatatctccttcatcaaaatataacctatttgagggtatttgttattgtcctcagggtgaagcctgacacatgggcactacttagtatgtatttcttgaatttattcaatcaaaacatttattgagctcctataaagtaccaagtactgttgggctttgagtaaacagtagtaaagagcaaaaaacagacacagatcctgccctcatagagcttacagtttagggagtgagatgctttgccagattgcaacttgccatgctcctgaataaatgaatgagcacctgggccttggtttagaatgggaaatctttttgtctctttgactagcagtggtggtggaatattatgatccctagagtactgggaattttgtatttggaagctgacccaggtcatttggtgacattaaagagaagggtaggctagccattgtggtttcatgcctgtaatcccagcactttgggagctcatagcaggtagatcacttgagcccaggagtttgagaccagcctgggcagcatgacaaaacccccaaaattagatgggcatggtggcatgcacctgtggtcccagctacttgggaggctgagatgggaggatctcttgaacccagaaggtccaagctgcaatgagccatgaccgcgccactgcactctagcctgggtgccagagtgagaccctgtcccactgcccactgcctcccccccgcaaaaaagagagagaagcgtgactgtcagcagggttcccaggcttctttcatcaaatctgagataccattgatcatgaagcaacaatgcagcttataaccactaagaaagaaaattcaccaattaaactgacttgccatcaattataaaacaccttgatttcagagatgaaaagtgaactaaaatgtacaccttggaatagataacatacaataatttaaaggttaattacaagcaaattgagtcaaggaaatacttggacgctaaaagcaaggctaaaaatagtacatcatgaccattgattccatggatgatatggtaatgaatcactttttgaagcagagtcagatgttcatgccagcttgaaaaaatatgcagctgatgcaaggaggtaagagttaagaatacagattatacctacagcagcctatgctattaaggaaaaaacaactatttgccaagcagccatctttgtagatattggcagatagaggagtcccccccgtgtctgcaggggatatgccacaagatccccagtgaatacttgaaactgtggatagtgctgaaccctatatacctatatgtgctctttttctgatctgataaccaagagagatactaagtgactaaagagtgggtggtgtgtacagcatggatatgctggacaaaggtatgattcacactgagagcaggacagtgcaagatttcatcatgctaattagaatggcgtgcaatttaaaacttatgaattattatgggccaggcacagtggcttacgcctgtaatcccagcactttgggaggctgaggcaggcggatcacctgaggtcaggagtttgagaccagcctggccaacatggtgaaaccccatctctaataaaaaaatacaaaaattaacagggcatggtagtgggtgcctgtaatcccagctactcggaaggctgaggcaggagaatcgcttgaacccaggaggtggaggttgca

SEQ ID NO: 65071 - DNA, 1761 bp, Homo sapiens
ttctaactgcatcccaggctcttccagtgaaccctgctttcatactgctagcagtagcatcttggaatcttaagtgtagtaatcttaagaatgatgttttgggccgggagcagtggctcatgcctgtaatcctagcactttgggaggtcaaggcaggcggatcacctgaggtcaggagttcgagaccagcctggccaacgtggcaaaaccctgtctctactaaaaatacaaaacttagctgggtgtggtggtgggtgcctgtaatcccagctacttgggaggctgaggcaagagaatctcttgaacctggcaggcagaggttgcagtgagctgagatcacactactgcactccagtctgggtgacagagtgagactctgtctcaaaaaaaaaaaagaagaagaagaagaagaggaatattttgcctttttctcccctcaaaaaacaaaattcaggtacttctgttgaccttttgtttaccaagtgcagaaaaatcaacgttgttatatgaaaatttcttcaagagtggtttgtacaagagtctacaattcctggaccaactgtagaacccagagctttcaaaaggatggagcctattcacgtcctatcaatagaacagattcacgcagcataaggtttttatttattgcaagtggttgttctagttaaagaggctataatgaaaaaaatataataaccttggcttaaaataaagaaatgcttggtttgagatagaatcctgatgagctatgattaattttttggaaaatgggtctcttcatatgagattaaaattgtcatgaatatttttccaagggcaacataaaaaaggaaatagaccattatttgtgtggcatctctgctcattgtaattaaatgggcctttataaatggagtcagatcaattattcccttctggtacacaatcaccttttccaaagtcatgtaaggcaggctttctttgttgggggatgtctcaccccaagggatagtagggatgtaaggatacggtaaggcctaggagttgtgggggaaagaagacaggaaaagaagggaagtggagagaaattggttagggtactttgtttttcttttccccttaaaattagagaaagtacaaaagacttgtcttgcatcttttaaatctctaaatactgtaaaacataattttagtgaaaatggagaggttttttaaaaaacgtgcgagacatttttatggttacaaactgaattttatgaatttatttttaagatgctaaaattggtacgcattgaatatagtgctgtttctctaagagtctcctctccccaactcattatcttttccaagactggaataagggagattggtacatgactaaaatatcctcaaccttcatatatgtgcccctgagccaagcttagagtactttattcatgagatgggatggtttctaaggtttcttataactctaaaatgtttgaatttatatgagaatgatagtccagacccgtgtatgacagatggaggaactgaattgtctctcaatgtaaccttttttttttttttttttttttgagagctggagtcttgctatgttgtcctggctggtctcaaactgcagggctcaagtgatcctcttgcttcagcctccagagtaggtggtactacaggcgtgcaccaccacaccccactctagcttatattttaatatgcctaatgttctgtcttatacatacatttcttaccagcatgtaagaaatgtaatttctatagggagga

SEQ ID NO: 65072 - DNA, 1106 bp, Homo sapiens
gggataaaataaagcagggaagggcatgaggagtgctgggggggatggttgcatttattaaagggtgggcaaggcaggcttctctgagaaggtaacatttgctcaaggacccaccagagacaagggatgtggaagagcattccaaacatagggaatggtaagtttaagtcccgagtgtacgtggacaacattctgtatctaaacaactgctaggatcccctatggctagaactgaggagcaacggggagagtagttggaggtgagttcagccaataaactcacaccgtttattaggctgttgccacagccttttggctcttactctgagtgagagggaaatctctggaggtttgtgaagaggtgggtatcatggtctgacctacgttaaataggaaaagccgggaacgatggtgtgtgcctatagtcccagctactaaggaggcttaagcccaggcttgagaccccatctcttaaaagaaaaaaaaaaatggaaaggctcacaatagaggcagtgaagaaaagttgttttttaaaaaaggcagtggtcactgtattagtacatgattctgggaaatctaggtatgagttcagaaattttaattaacctgaaaaacttgtaccagaagccatttgcttatgctaatgtgaatacaaagagcttgctttggttcattactaaataacattcttcgtgaaagtgtcattgaatctttttagcaacatatctatacaaaactctacaatgtaagtatgtacattcagcaaatcctgtgagatgcagaagagtgaatttggttcaggagttgtgagttggcttttattggtagaaaatttcctgaatgtcaatacctaatactagtatggaaaaataatttgcttttcaaaataaatagataaatttaccttatgttattcttgaatgaagtttttcatttaatcaaaggtatttttaagcttttgttttggggctttttttttcccttgtggatctgtggctataataaagtcagcattctttatttactggtgataaattctgtgaaatgttaaagtagacatgttggaccagctattgtgaaattacagctctgtctctaacttccca

SEQ ID NO: 65073 - DNA, 1082 bp, Homo sapiens
ttttatttccattgtgataagatagactttttgttttaatgtgtcacactttaaaatattttacaacatgaagacttcttcctgaagttacaaagcaccaatttacaattaaaatcacaaagccagtgatatttaaagagtatataactttatgatatgaatcatgttttattatttgtacctaagggtctaaaagtagttttcattattgatttacaaaagaagaactgattaaggaacattcagccagctctctgtgacgacattagaatttttattgcagaactaatgtgttgactctatatcatctcttagatggtctcatgattgcttaaaattatcctggtgtaaattttgtatcaaattgggtggggagaaacgtctgaaaggataatgctatcaaatgccttaatcttcactgccatgtactaattttccctgtctctccccgtttgtgttttctttttccctagaagaaaaattcaaagtggagacaagaaccattgctgttgactttgcatcagaagatatttatgataaaattaaaacaggcttggctggtcttgaaatcggcatcttaggtttgtatttttgccacatttataggttcttcttgtatttattatttgactttatgactttggatgttaagtggtaaaatgactagtgagaaaattgtcttatgattacgtaagacattatcagtgaataatatcactaggtgacattaatatatacatttgaatctgtgtttttagttctatattaacaacatacaattttggttattttccttgttatttctcttattctctgtgtatatttagatatacagttgtccctgggtatctatgggtataggttccaggacctcttcatatgctcaagttcctgatataaaatgccttagtatttgcgtatagcttatgcgcatccttctgtatactttaaatcatctctagattacttatagtacctaaaacaatgcctacacatcacttcatttgtgcagatttaatgtgtagacacactggtaaactcaagttttggtttttggaactttgtgtaatttatccccctga

SEQ ID NO: 65074 - DNA, 3135 bp, Homo sapiens
ttaatagcatatctcaattcagactagccacactttcagtgcttagtagctacatgtggccagtggttactgtatttgacatctcaactctagttcaccttggccatctctcaacctcagtttgtatgagggaattatgagtataatttattgatttgtcttagcttttaagcagtggttctcaaccaaggacaattttgcagtgtatggcaatgttctgaaacatttctgattgtccttcttggctaggggagggtagttctactgtcccctagtgggtaaagctcaaggatgctactaaacattctataatgtgtataggacagccttccacagcaaagaatgatccatccaaaatgtcagtagtgctgaggttgataaaccctgctttaaaattatgctgtccttaaacagttcagatactcacacaactttgattttgatttctagttggttgcaaatcaataataaaaatcattatagctaatgtttacataatcctttaaagtgtatagctgaacttttgcatacattatctcattagctgagctgtaagtttagttttcttcctactctaccacaaatgtctccttaatcataagatttatgtaattattattgacatttattagcacatattttacacatggattgtaattttaatttctcaagattttcgatggaactattaaaatacttctgtgagttaaattttattactaggtcatatttcaactccattcttatggttccttcactagtatgggtataaccctctagaacttgttgtggggaggtctgatgtgtatatgttttctttctcttatgattacctgaatttatagccccatcaactttcttctctcccgcatccccatccagatcccacatactctcacctctgtctagtaagggcaaaataatttagtctctttcctctgcttatgcaattctcacttttataacattctctaaaatattctatgtatagactgatttctagtaagacctaggaatccatattaagtcataggaaggaatttttttctaccaagttttaatgaaactagtaaggataataagaaaaataaatcaccagggtacaccccatttgtttgaagtgttaagcaccaaacagtcagtgcttaataaagaaaattaatattttcagaattacaaaggaaaatgctaaagcccttagtcatgaaagaaacattaagttttcagtaagataagtggaaaggaaacagccatgaattgtgagaatttatcctgaaaggtcaccataacttgatgagactataaatgcttaaggttgagaagttggattcttaactccgttacttaaaaaaaaactaagcatctactgtcttctttcaggcaaatgccaagaaatacagatttcagaaagcttataaaactttggctatttagagaaaatgacatccttactgctttgagtaagcaaacaattggttaacaaagtgtgattaccgtaatgcttacttgattccttaggagagactctcatgtgtgctccagattggtttggaggactttgcacaatacaactcagggaggcgtaatttaccaaggccaaaagagtaggcttggcttttaagtatgccacagacaatacttttttcaaattctactactatgacttttttaactttgtgagattctgtattatagaaggagaaagaaaggtcctcttggaaaaatatacttagtttgtgattcatttaaaaaatcaaccatagctttatttaagcttttattgcattctagacaagaatttccccatgccagatgctctcaaggccttctctgtccatagtgttgatggcgtatacaagttgtagcatcctcagctggtacaaggtgacctgtgttgccctactggcttagtgcattcaggactttagtcatccatcgactttcttgattctttccatacgcattgctaataattttaagaagcctcattttaacaacaacaaaatgtgtagataatagaggtcagttgattgcaaagaatcactgattgccaaagctggaatagaacttattattctcttttcttcctgtgccctttataagtgaacacttgctccactaatgttcttggtgaattattttttaattggtgtccttcctttttcagctgaatgcaaactctttgttatccttgcctgtgccaccactttcctcattaaaccttatggatttggggaagcaattgtgttgcatttttctcccgaaaacctagtgtttcccagaaggttctaggatagagaatagttgaatataaatattttatttactaaactaaaagatagtttgagcaaagatacccatcagagttaagatcagagtaactctgtctctgtgtatacttacattttcaaagtttcttaacaaaagacccaagagtattattagctacttggggaaaggactagttagcttccaaatggcaaactcctagttaattggtttgggatccagagatggcttccttataattcagtccccagagaagcaaaggaagagcaatagatgtaggcctaggagagagaaccaaggcactacaggaacagtgctgaggaaaacttttctaggattgcttggaaggaaggaaaatggagcatactaggagtttatgcagcttcctggtccctgttgattaaggaagtcacaaataaaagagtcttatttcttcagaggctttagaaatacataatgctacagattctcttcttgctgttctcaatgttataaatagttttaagttgctctcatttgaagtgtaaatacctctaaagggctaatggcacctgttatttaattcttattggaactagtatattcagtttattccttgtctacttcttgctgggtcagttggctattttagttagtgaaagacatggaaaagtcattttaaaatggagaacaatagtcttaaaaaaggaaactatgtggtaggttgataatcagtggggtgcagagatggagacacgcagaaggacaaaataaaattatgttgagagagcaccaaaggtaaacttaatgtagttagaattattatcccctactcccgctttttctctgtagcccagtatatgagga

SEQ ID NO: 65075 - DNA, 1064 bp, Homo sapiens
aaatagaactgtaagtcatgaaattggtgaatgttcttcccaccagctaacatttaactaccaacctcatgtcatctttcttcattccctcttccaattttatgtatagcaaatcttacctagttttgtaatgaagatcacatagcaatttataattaaacagtggaagtgaaatgttctgttgtgttgcttctgattcagtcttaatttttcaatttctgattaaagcactgcaaatttaaagtcttgtaaactctcttttatttggaaattgctactcacaaatgtatgaaaactgtaaagtttgcaaaatgttttacatggtgttccaaatatcatctgtcagagtatgaacatgtgctagctaaagcaatatgttaaataaggcaaagatggaatttactttgcatcactttccaaactctctctataggctgtaagagtggatctaattgaatgaaataaagagggtagaggagcaattaggagaaatttaatcagtataaatagcagcagctctggttaatggatgtccagagtccactctctcagaaggatctctccactttgattctggtcatacgtaataaaagtagggtactttgggcttgggcacaaaacaggagtttgataaatttttgttgaataaatgaccatacaacaataacaactcttcctcttccatttattaacatattactacgtcccaggcattgggttaaagattttatgtatatgatctcatttaattcttaaattactatccccattttatgtcaaaggacaatgaggcaatcactagtttcttgttaggagctggtagtagtggagctgggactgaaacctggttctgttaggactctggggtctgtattcttttagctcaaaaatttaagacaggaagtttcccccacttttggtatatacactgttactaaagtatacattttaaaaattcagtttattttgaaatatagtgaggtagcagcattttttaaaatctccttttattggccaggcgtgatggctcacacctgtaatcccagcactttgggaggccaagg

SEQ ID NO: 65076 - DNA, 1018 bp, Homo sapiens
tagtagtgggattgttggatcatgtgatagttctatttttaatattttgagaaacctccatactgttttccacagtggctatactaatttacattcccaccaacagtggataagaattctgctttctctgcgtccttgccagcatctgttattttttggctttttaataacagctactctaactggggtaagatgatatctcattgtcattttgattcagatttctgtgatgattggtgatgagcattttttcatttatctgctggccatttgtatgtcttcttttgagaaatatctatccatatcctcagcccactttttaataagttttcttgttttttaaactattcagttgtttgagttctttgtatattctagatattagtctcttgtcagatggatagtttgcaaatatattcttccattcaacaggtagtctcttcactctgttgattatttcctttgctgtgcagatgctttttggttgaatatgttttcttatagagctatgttaaatagatgttcacattttcattgtgtgaataaatagctttgatagctttcctttgctcaattatcagagacacagctgaagactctctattgtttgtttttgtttttgtttgagacagagtctccctctgtcacccatgctggagtgcagtggcgtgatctcggctcactgcaaccttcgcctcctgggttcaagcaattctcctacctcagcctcccgagtagctgggactacaggcacgtgccatcgtgcctggctaattttttgtatttttagtagagatggggtttcaccgtgttagccaggatgatctagatctcctgacctcgtgatccgcctgcctcagtctcccaaagtgctgggattacaggcgtgagccaccacgcctggcaactctctattgttaatacagtcataaccagaataacacttctctgcttgcttagttattcagggacttcctttgcttaactttgtacttatagtacatgtaaagattacaaa

SEQ ID NO: 65077 - DNA, 2039 bp, Homo sapiens
tattaaatgagctctcattctggagcggaacaaaatgcgatgcatattgtacatgacttatcccaaatcacatgttttctgaaaactgttataactagaactcaagttttcagtatcctggaccacggtactctccactctttctactgcactatgaaaatttaaggtctggagaagagttaagtaatatctccaaataacagtatgatagaggcagaatatacatatcccaaagggctatggaaagtgagaggcaagtataagttctgtcagttgctggatggtaggtacaggaaggtttaatgaaggaagagacatttaagttggacttttaaggatagattttggacagaaaggtgtggaaaaggttatgctagccataaacagcattttatataattatatatatcatattagtcttgatatctttaatgtcattattttaacaaatctttaaaatatgcatatgttactcagctaatcatcttgttctatttcagtgaacaacgtgggaatgtcgtatgagtatcctgaatactttttggatgttcctgacttggacaatgtaagtctttctttgtgtattatggtaacaaaaataatgcatgcaggtattggtataatgattcacactatgacactggagtccagctgcctgtggttcacacgctggctcttctgtttactacctgagttccctgggtatgggcctagccatacttagtctcagtttccttgctcataaaatgggcagcttcataggggtattagaaagatagaatgagaaaatatttataacctcacttatacagtgccagattcaataatagctctagttttgttattactcttatttttgtttgtgttatatcaaaatagctctgttgtaagttttatgattctaaacatcaacttaaaaattgtaagtatgttaatatacagcaacgtggttgattcaggtaaaccagctctaccaaaatgaaagtgacatccttgatgcatgcataatcctttactgaaaacgagaaaagcatatcattgaaggactatgtaaaattttaaaaattattgaaaatcctaggttcagtaatttctatgctccatactagcagaaaggaaattgcaaagtgttctatttattttagatttaatgtgtctttttacttccagattttacttgcacatacactttggattctgcatgttagcatcaattatcaccttagttaggaaaatataacacggagagtaaaatgaaatctgcctctctaccccaactcttgtcatttttccaaaatctctgcaatatctggggaaatgttcaatgcttctctagattacctaagtagatatctaatagggtcactttcatgatcaagtgtatataaaattctcaatatttttttgcaggtgatcaagaaaatgataaatattaatattctttctgtttgtaaggtaagcatccttgttataaagatgtcatccttttttggttccttctattcaaaaacactgacataatcagcttgttcacctgagtctactcttgtttagatgcagatacatgtattccagatacaagtggtctattaacttatttcttcagaaaacataaagaactgaagaccaagcaggtgcctgtattatttgacttttcatttatttttattttatttaattatttaattttttatttccataggttattggggaacaggtggtgtttggttacatgagtaagttctttagttgtgatttgtgagattttggtgcacccatcactcaagcagtatactctgcacacaatttgtagtcttttatcccttaccctcttccacccttttcctgagtccccgaagtccattgtatcattcttatgcctttgcatcctcgtagcttagttcccacttataagtgagaacacaggatgttggttttccattcctgagttacgtcacttagaataatagtctccagtctcatccaggttgctacaaatgccattaattaattcctttttatgactgagtagtattcca

SEQ ID NO: 65078 - DNA, 1220 bp, Homo sapiens
tagttctgtgaagaatggcggtggtattttgatgggaattgcattgaatttgtagattgcttttggcagtatggtcattttcacaatattgattctacccatccatgatcatgggatgtatttccatttgtttatgtcatctatgattcctttcagcagtgttttttagtttattaaatgctttttgtttattaagtgccttctatatgcaagcactgtggtagctactgggactacaaaaacttaggctggagacttatttttacaaagatttcatccacacgctatttgtcactgataaattgtttccattttgtcttccccatgattcttttcagttgaggaacttaaatgttgtgataagcattgtacggggaatatggaagtataaagcaatgggtgtgatttttaatagttactcataataactagtctggttgctagttgctaagcatgtgttatagtcatgtcacatgtatgtgccaacaaaagacaacaagccaatacctgccaaaaggaggaatacttagcaagtatgagcatctcaacaccattttttcttatattgtattagtaactacaaaaatatactgtactttgattatacataccagagcagtgaaaaataattgcctgaggcagaattctcatgggcagtgtcagatacttgaaatttgaacatactcatagaaagccaaatccattttcagtaactcatatatactagtttaaggaaattcaaagcatgtttaactcaatgtttaactttgttgttattagccaagtttttttctcatataagattcagtttaagtgaggtaaactaattataagtggacctgtgagtgagtctggagcaagactctcatgcacaaaattgatgcatttaaaacatggctaataggaatatatctaatagtcccaagatcattataagggctctcaaaatgttattgttgttcttaaactcagagctgatacagattttaataatatgtggaactatgactttattttttagcaagcaaaggtttttgatcaaaaatatcacttttagtctacaacgtatatattttataatttttgccttttgaaatgaccaacgtgtactattattttgatatatcttttctggtacatttggccaagtgcttgaaaataataagtgttaaaaacaatgtacatgtgtttcataatatcttgtgctgagttaatgataa

SEQ ID NO: 65079 - DNA, 1024 bp, Homo sapiens
ggcagaactggatatctacttacaatttttatacataagctttcttttgcaaacctaatcccatttaaaaagcactaagggagtttgctatttaaagcacttcttcatggagccaaataagcatcccttcatttatctttaatatgaatctgaattttcctgtacctttgtgatgtgtacttctaatagaaaaacaaatcaaaactctcaacatgtggaatcaatggatcatggaattaataccatctggaggcttagccaattagtttttgttgtactacatgcagaagcaatgtagttaacattgcttctgatcacagttgactagtgaccattcagatagaaaatggcttgacgggagcagtgggaggtgagtgatgtgcagtggctaaccagcaggtaagaagaggaagttagggcatgactgggcaagaccttgagtgctgtgctcaacaggctagagagctacagaaagccttcaagtagatgtaaggtgtgatctgacctatgttttagaaaggcagttctattggcagagtgacacggtaataggtattttatgatgcatgtgtttttcttacttatactgagagaaaggcattcaccttgacgaaatttgtgtgacgctcccaggtttaggactctttggtgctgctgtgatttgccctataatatatttggatgaattgcacctattgttctttagttgactgtgttacgttgccagggccagggccacattttcagtagcaatggctgtttggagccctggggtaacttaaaagaagatgaaaattggtgcagctacagaatctccaaaggttttattgtggctggacatcaggggaactggggcatggatgtctgcagcctaatgccacaatgaatttctcagaaaaggcctgtataaggaagagagcaacctcttctcaccatcaatgttgggccaagttttatctcctcactaaactacatgacagggaataactggctgagaagtgttccaggagagattggtgaaatc

SEQ ID NO: 65080 - DNA, 1986 bp, Homo sapiens
cgtgatctccgctcactgcaagctccgcctcccgggttcacgccattctcctgcctcagcctcccgagtagctggaactacaggcgcccaccaccacgcccggctaatttttttgtatttttagtagagacggagtttcaccgtgttagccaggatggtctcgatctcctgacctcgtgatctgcccgcctcgacctcccaaagagctgggattacaggcatgagccactgtgcccggctggtatatgcattcttttttaaaattttgtttagagtttatgaattatggctttggaatcattattaattggcatggagctctttgttctgaaaagttctttttcttttgataaattaatgtagatcaaaccaaatttattacaaaaggaaaaattttattttgaatgatataggattgaatttaaggttaagtaatatggagctgggaaaatggcaaggcagggctcttaactttcacaaaaacttaacattaataaaaagggaaatcaaataatacttggagatctcaaagcactcttagaaactttgtctaattaagctttccacccactgtgcaataaatattctattagctatacaggtgagattctaagaatttctaattaagttgtgttcttttttaccgcggtgctcaaattacacagtttgccaaaggaaatgtgtgctgtgtcattgtagcatgattttcaatggagttaccatctaatttctccaaaccaggcattgtgtaacactgttgtcactttctgtaattattttcactgttacactgtgattttgaaaaattattgttaatgattacagttgaaaacttgtttaaggtatttgcatctaagaaattgtttacttccaaattgtgtgggtacgtttttagttacttggattcagatcctatttatggtaagcaggtttctttggggtagagggagggcagatgtggacaaagtggctatttgtggtatcctaattctgggtatgaatatcctggattccaggggctttgcctggattctagggtgagttgttatactttattctctccatgtgtattatgataatacaggtgattaaagcatcttgaattttaatgtaatcttttaatttgagcttttgattgtctttttgaacattatgcaatcatgttttctttgtactgttctctctaaaaaatgaccaaatgccaaagattacatgatatgagaataatttgcttatattgtatcatttttcatactaaattaatgagtgggaaaatctacattggctcctgggtataaaataaagttccttctacaaactgttgattactgacgctacaggagtaaaacagaaaaagttttattcatattaggtttcttttagaaataagattgtggaggcttttctaattgtaaaaacaatgcaagattgttgccaaaagtatgagaaatatatacaaacactaagaagaaattaagtcacttttagtcgtaactgcagatggttacattttaatataacattttcaaggattttctaggccagccaatgcatttttgctgaataatctaatcatctaaataatcttaatctaatagtactgattttgattttgtataagcgaaataagcctcttatttatttcccagccagaatatacattgctataccagtaaatactagtaaatattttactcttgacattgaatcaaattctaaatttagctgtcatcaagacattcatttttcctcatatatttgtatactttttggctagcttgcatataaagtgataacaataccttaagtgtgatataacatatatattaaactatcccctttagattctaggcatctaggattttcttgtggtgaggattaatgatactgtcactgaaaatatatatgtatataaagaggaaacactttccctgcaaggacaaggatttcacactctcactgttgtagaagcacaattgtagaaac

SEQ ID NO: 65081 - DNA, 1869 bp, Homo sapiens
cgtgagccaccgcgcccggccacttttgtctacttcttaggaaagaattaaaattgttcgctatacacttttggaaacagtcccaatggggaagaaaatgggtctggaaatcatgtttactactacttgtctaatattcttaaccactgaacttgcaagttatggtaacctttttttagaagtgtgttaagaggaacaaaaatttttctggtgcagcaattatcacctgcagatggcctaatattagcattgagttaactccagaaacagcctgtgagctgtgaaatggagttcagatagatagtgacaattcacagaaatgcctggtatattcatataaataaccaaatatcaagataccagctgatgcttacagataactctactaataacttagctaaaaatcctataaaaatttggtgttaaagaaaatttaatttgatctgaatataacgaagcctcttaactaatgcgtagaatattaacgatttgtatatacatactcatataaagaaggcttgaaattcaatttattgtgacttataatctgattagaaggaaagataatttcattatagatgaaggcattaatcaatttgataaaagcatgcagatttcaggttaagttttctcaggcttttcattgttattatttgacagattaaaaaaagatgttacattttatgacaaggacagagaatttagagtcagaatgtaaaaggaggagctcatgagctatgagaaagaaattaacttttgcaggggagaacttgtgtctttgctgatgaatcctctagtcgttgagcattcagcaaatatttctggcctttaatagccaggcattgaaatcagtgtttatgtcaagttattaaaacttcttgagttttaattcatatatataaagaatatattttgaacatgtccctacataaaaggcctcttgatgaaggaaacatttaatgtttagcatgccatgatataattttgtaagtatggttttatgttatggggttttgttttgtctcatgattttctagataatttttgccattcagaaagcagacatttaatatatacatgacatgcatatggtataagggaaaaaatagctcctgatattcccccatctccctgcccccaatattccaactggaaatagaagagggactgtttaagagagccaaacaggcagtggctaccccttctggactccacttagctgctttatagttaacagatctcatttccttaatacaaatgcgcacgcacacacacagacacacatacacctgggtaaagacatttttattaccagtctccttccttattctgtttctggtgatctcagaactttggagaactgaattatagcttcccttcacaaaatgctgggggaactctttataatactttagctaagcattatggtccctgatgaaatgtgctaaataaaaaaaaaaaagttttcaaatactgttagggttttgtataatctatcctttacaataaaatacccaccactgttaatatgcctgatgtacatctgtactaccatacaaagctgttcataatacatctggattggatgttcacatagcagaatttaccttgttaaatctggctggcattttatttcttcagaatatttctaggaaaacaaaattcccttctcatcagaatgctgtctactttaattaatatgaagtattattcaagatagaaacaacaaaatttctatgcttagcatgcattgaaaccttattattacaaaacagcatctgtttcttagagaattgatgatatccaggagtcagaaattcacgttacagcctcggtatttaactgtgaggtgattttgactaaaccatt

SEQ ID NO: 65082 - DNA, 3368 bp, Homo sapiens
aatctcagtggcttaacacataaaggtttacttttccctcccctctctacccgtcattcaggatctgaggctccttccatctaggggcgtcatcattttctagggtcttggagttctctgcatccagctgacagatgaaagacaagagagtaaagatggttttaagggaagtttcacttctgcccacatttcattgtgcagaactcagtcacaggctacaactactgcacagaaggccagaaatattagctgtatgcccaaagaggagagaaaaattccaagttagcagatcatattgaaagcattcttaccttacatattataagtggtttcattatagcctgctctttacaccatccccaaatggcttatttcctatggctggtttccatagcattagtatctccattgagtaacagcagagtcctttatcatgatcctttgttgttgttttccttccactgcttccacctctgatgtgggagattttccaaaccctctagaactatagcctagggccaactgactatcgctaaacaaatacctataatcaaactaaggtattgttaccatagatgtagaaagtacataattacattatagaggaaagttgctcttttcacttccctggaattataaacattgtgtacagctggagccaggaggtggttgccataacaaccatgggaaagctaaaaatagcccctttcataactgtattgcttaaggtggaattatgacatgttatggtgttttagggcaagtaattctctttcatgtgctgaatgtttgcaaactttcttccacaaagcaatatttgtacaatgtaagtatttggattgctggttctaattatacacctgacccctatgttctaagattctttttgacatagatctctatttttataggtttctcagtcttcgtgagcatctgttacagaactgtctgtgccaatttcagtattatatttaagctttaatatatatatataatgacaaccctccccctcaagagcctgcttttgtactccttgatatgaagtggaaatgtgaagaattgggatggaatttttttttttttgtacattcttccttggctacaatcaaattctgtatgcagttagcagtccccactaggattaaccctgcagttccggttcctcatagcagcaggtctctcttcccacctgcactgtgggacagtgatgaggtttctaaggaaggtagaaaacagtgacttacttcaaaggagacctattacgtcctctatgacagtagaatttttatagaggtgtggacaaggataccacaacagtctgatagaatattaaagcacttataaaataaaggcttggcaatttttttttaatccaggtgacaattaagggagtcttattgggaatttcacaggtctgagggaattccatgagagagcatatctataggaagctgtaagtgtgagggactgagttttatagagttgggcgaatttaatgtctggcttgtgggaggactagtaattaaagagaatatgtttatatgaaaaggtactttcctgtcagcaattggtgttttctgctttgggttttttcgcaacattttagttctagtagatcctcagtaatttgtaccactgagacagcattgtgtggctgttagcaagtaagcagtataatgaattaagaatgttgcattacagaaaacattgcttgacttgtttatttggatatttgtcataacaaactagaaaatgcgctgaagtatgagcaacatgagtcttcattatagaacttcagcaaaaattcttaatgtaccttccaatcttagaattgttcccgagtccccagaaaatgagagattaaccagggtttagtttcatgtttgtttctgtgtgcaattaagcgcagcccattttgtccttctgcttgatataacagagttgtcatgagtctggctgtgccatggaaactggtttgacgtcactaattctgcttagatggaggattagagctagacaacacggttgatttaaagggcgagtcttttgtgccttgcagtcccaaatgctcagccccgtttctacatagagaacagatactgtatacagtacaaagattgaggcaggctacaccagtatattagctgtgattcagacagaactaagttgaatattattgcctttggaaagaaagagcgagagagttttacactgttgtgtgtgtgggtgtgggaggaaggtttttgttagacaaatatgtgagcttaatggtaggacagagatttgtagaagggctattttctctactgtcactttggtacaattttaaatgctactcttttatttacttaggtcgagtgcattcttgctttatcatttattagtcttagatttgttttcatgtgttttagcatgcaaatactgtattttgtatgaagtaccctcaaactctgacttttcactaattcaaagcaactccacctcctagaagttttcaataggattagaatacttgagaaacaaaatcttagttgccttaaggagcaaacaagtaagggaggatgactgcatgaatgtgacattggataattgatctgtattgtattttaatatgggaaaggaacttttattatctttaaatgacttttcctgtacttagatcattgctttggtgagtgaagttttaagggtctgttttgatcaggtcaagatttaatttttaaagtgcacttgataatgttaaattttaccttttacagatttttaaattgcattttgttagcgagaaatgaaatttaaaatgtaaggtttctgttcaagggcacatataacaaccccagctaacttgagtataatggagcatttaatccagctgttaggccaagcagtgataggctgcagcttcagtggaaagcctcatttttctgcatctacttcaaactagttgtgtcttcacttgctgtgaatgagtttggacatagctgttcccagttatgtgagaaaaggttaaaataaaacactacccatacctacaaggatgcttaggatgcaggagaagggttgacttgtcaagattgagggttacttcttagaaagcatattgtgttgcatacgatacaatagctctcttagttttcacttgattgggatctgctcccagtttaaaggtgatacattccaatatgtcataaatatttttctctctcttttcatagatttgttgagataaatttcacatactgaacaatctacccattaaagtatacactttaatggtttttagggtattcacagagctgtgcaactatcaccacagtctaatttttgaacattatcaataccccaaaaaagataaagatattttaaat

SEQ ID NO: 65083 - DNA, 1107 bp, Homo sapiens
tgggagataggaggtgggtgggatcaggttgcagtggctgaaaaaggggaatcctctgagaagaatggatttgaggggaagatatggtagctgtgacactcctaaaccataattctacactttacctaacctatacatactttttaacaactggtatctttatagcattgcttttctcaagctaattttcacttttttgtagaattagaaattcctggtaactttgattttaaactttcagtagtctctaaaagttacagtaacagttgagctttgccttttggcaaaagacacagtttgatgaactagagtcacataattttagagtcaactctttgttggtgcccaagtatctacaacccagggaaagtagaagtagacagtagaagtagaatctacaacccaaggaaaggacatagccattcactcattgccagaaagttttattaagtacctgttggttatgtgctcagtaccgtgtggaatattttgagggaaagtgggctattatatccagaagcttatggttttgttggggggaggagagaatgtttatatacatagaatgattaaatcctacagtaaagtagtatgtgacgatatgttaaaataaaggtgtatgcagggaatataaaagatctgtaagtaaaaattctcagcactgtggctagagaagacctcagagggtagagatcaactcgaggagactggagatctgatctggttatgccctgggttactaagactgggaaatgagctaatcgtgaagaagagctatttttagttgattgaattatgtctcatttactgaccaagcatagcacatactgatgaaaggcagggagagatatgtggtagaaaaacagctacattattctgtttcgaataattatatatctcaatctgtaattcacaaacaactgcatactgtggcttcactccttttacacggtacattttcctttttagatccaaaggggctattctgaacatttcatctggcagtggcatgctccctgtcccactcttgaccatctattctgcaaccaaggtaaaaaatattttcttaaatcatgtcaatatagtaataaggggtaatttttagtc

SEQ ID NO: 65084 - DNA, 2270 bp, Homo sapiens
acctaggcagatagcttagttaattagaacatgatgttaatgagtctaagattggagatttgatacatgaatgagtccacttcacacagcatagaagaaatgcatctagtcaatgtgtaaatgtacatagcaggcacaagatagactgggcgagagtgtattttgccatgttgtccaggattcatagatattctttgtcacttttggggtgagacaagaattttccagaactctctggacaatgtcataatttcatacaatatcaccattaacctcttcacattactgataggaaagtaatttagaatgagtctcctactgcctgcaggtcaatggcgtcatcttcagatacattgttgaggcattgaatacatctctgaagggaaaatgatcacttagatgttgaaattaagcaggcttttagggaaaaataaacaaaaatatgtacagtaagaacttgaaacatttcagggaaggaaaagagcaaaactccgacttctttttcatgtgaaaaaacagtcaccactgtcttttgaaaagcttggtaccacctcccagcccctacaatctactttctgtatctgggaacatactgtaggcaaatttaaaatgaatgccatgtttcttgaagggattcgtgaacttcaacttatctgttctactccatggctacaaaactatgactaattaggacccttgaaaagtcacttgattctttgcatttctagtctgaggttgcgtccacatttgaaaaatggcacattgtattttacaaatagatttaaggttgtattatcagaagaagatgggctgtcacattcacctctatacttcttggatcttgtcatcccaaagcaccaagaggatgcttgttctgttctttttagcaacaacaaaatccccatagaacagagttgaatggacttcatcttgtgtttctatttgagtggcaagtggagagatgaaatgagtcttttgttatataagagaaaaatattttttcttggaaagtaattttctgaggggagaaaaagataagaaaagccttttccagttaaatcaaaatttgatctggatattatatttggtaatataatacttcatttagtggcagataaaaacagcttgaggttttcaggtgtttttctaagttctcttctgcgtttgaaatgaaaaaaatgatgagaaattatagcattaaatgattagtttattattttgtttccatggctacaaatcaggcagattgatgtaatgtgtgtgttttcttctcactcccactcccctcccagacttttgtagatttcttctctcagtgcctccatgaggagtataggagcaagggcgtctttgtgcaggtgagtggagtttgtttcacttaagtatccctgtttttgtgtggtttccagagcaactgttgctgtcttggcaataacaaaaaaaatcatattcctaagtaagtgaatgtgacattagcacaccattaaaaacgtggtttctttttccttaatgcacttgtctagatttttaaaaaattatcccctagaattttcaagtagggatacctaaagtggaactaaatgcagtataaatagctgaagcatactttttaagttcttagggttttattttgagagaccgagactatcggcatctctctcttttttaattgtggtaaaataaacataaaatttaccattttcatcatttttaatatgcagttcaatggcattaagtacattcacatatcgtgcaaccattgtcaccgtccatctccagaacttttttcatcttccaaaactgaaactctgtacccatcaaacatgaactccccatttccccttccctccagcccctggcaacctatctatctctatgaatttgactactcttagtacctcatatgggtggaatcatacagtatttgatcttttgtgactggattatttcacttagcatgtcttcagagttcatccatgttgaagtatgtgtcggaattttcttccttttcaaggctgaataaaatgccattgtatatagaccacattttgcttatccatttacatgttagtgggcatctgggttgtttctacctgttgggtattgtaaataatgctaatatgagcatgagtgtacaaatatctcttgcaaactctgttttcaattcttttgtatatgtatacagaagtggaattgctgggtcatatggtaattctgttttaaattttttgaagaacttagctattttccatgtcagctacaccagttta

SEQ ID NO: 65085 - DNA, 1053 bp, Homo sapiens
gaaggtagcattaggccttgtgaacagacaatcaatttctaaaattccgttaataagcaagactgtctcctctctcattctcacaacttgtttccctcaaagatcttttctccagattttccacctagtaatctggtgtgactagaagctactgtaaaaacacattagcatttgtcttctgaaatattttattttgataaacttttgtttttccctaataatgaagtataaactgtcatttcatctgtcattgtgttttgtcatatgaattcattcaaggtttaaactttgaatgaatttgatgaaaaaataaagactcaaatgtttgtgagggaaagcacagtcgtcattctgtgtgaatacatcagaatgttgaagtagaatagaaagagaacctcttattaattctgatcaaaggggcaaaaaaaatgtagtctaaatgaagctcagagttaaaaatgattggtttttctttggcggtgtttatgcccacaaattttttggactaggagtatttatcagctgattctgcctcgtactccagcccacacatgtttcctgggtgatcttattaaaatacaaatcagataatgttgctttccttcctagtcctccagtggctgcccataaggtttaggattaaattcgaactccacaaggccatctcctttcttgccactccattgtcctccccgacgttcaggccagagtggacatcccagtgtctagtacatgctctgccctctgaagtgcccatgactggctcctctgttggcatcctttccccaactcctctccagttcttctcactgtatctcctcccagccctatttgcacctgaaccctatggctgctgtccctctctcaaggcttgggccacagttcccctgccctggaaagccttctctcagctccttggcacatttggttaggcctttctttgggctctcgttggagctccttgtatacctctgcctgctactgtctggcccttccctgtctccccacttccatgtattctcgagaacagggctttttatcttatttgtctct

SEQ ID NO: 65086 - DNA, 1015 bp, Homo sapiens
cctttgttttaattattatttgtttgtggtctatatcctcctactgaaatgtaagctctgtaagattagggactctgtttttattcacaatgaattttattcattaagttcccatgcctaaaacattgttctagtaggtgctcaggaaatagtttagtgttaagtgaatgccttttgtgagattacactgtttttctttttgttccttgaatgttaacatacaaattccacatctttggaggtaggttatttacaagattatcagccaacatttatcaaggatctttgtgtagagcacaatactttgaactccttcattttggatttagatgctaagatttatatgtattgttattgcagggccttttttcattgctatataaccagggatctctgcaccagcagaacaactcctttttcctaaaatttctagaaagtctaagggtttctgccaagtagataatcaagggcctttatatggaaaagctaatttcgtggtctgcaagtaaagtaatacgcactccaaaactataatataggtgtataattatttaagtttttgtataccagatcctgaaatcgtagatgaatacacagatttcaggaaatggagttttcctaatattcttcataggagccccagcttctgccttaagagtgtgtgctggctacacggttgaatttaatgctcggtaaaggcagatgtgacaccatgtatgaaatctcatactgtgcaaatacactagaccctagtgtattctgggtcttcattttcccaggtcattgtcatctgatgttctggtcatttttcagttgaaaagcatgtttagtacacagatgatgacacctgaaagatgccctaccatgttaagttccaaggttcaatccctgattcttgaatatctgccatgcagtttcaggcatctttctttccactactccatggccataagccttcctcttctgaatcaagccccctgaattgtactgtgcagtccagttatctaagcaagct

SEQ ID NO: 65087 - DNA, 1433 bp, Homo sapiens
atttccaacatttgaaccatcctgagctatgcagttccctgaaaaacatcatgctcttctgtggctccttttcttggctcctgctgttcccttatttgtttacaattagggaaattcttgcacttcatttaagacttagctcaaacgctgtttcgtctttgaaccctccactaggccatgttaactgccttgattttaaaccatcgtggaaataaatatactttctagaaaagaatttacatttcttagctggaaaaacataacccaacttggaattcctgagtatgcatctcttgtccccaccccttgatctgggggttctctagactagctctatggtttagctgcatgaagagttaacttgtggcaccaccaagtggttcagtcaggcagtgcaacttaattctcctacaagatcaaagtagtccaatttataccatgttacatacgaagggagggaagaagatggcaaaaaggatggacgaaaggaacaaaaaattataacgcagttgagaggtataatgattagaccatctctacctctagaagctcaaaatcttacaatacctttaccaggcttgtgatctatatttgggtttttttttttaatcttcactattttgtgacctttaaacctaatgcatagaaatgagaaatggtttgcttatgttccttcattatgtgagatcagagtatttacatatactctttctttccttactgctcaactttactctgggaaataaccttttctttactgacccattgtgagagcctcactgaactctgcatttcctactcagtctgagtcggagatctcaccctagtgtgtgctctcatagactatatccttgtggcaaaatggtccttaaaagatgtgacaaaaaatttttttttctaagtgagggataaatatatagtgataatcccaataaacaaattctcagaaatcaaaagttacctaatcaaagttggctcaaatattgaagtacttcatacttagtatgagtctgtggctgcagcaacaaggaaagaggaagatagagagtgacagcactccatctggggttcttggttctaatgaagaggctgaggtttcatctaacctgtcaaggagagtgggttgcattccttgacttagacttcggagtgggaaaaatgcaaagcacacacgtacataaaaacccagagacggccgggcgcggtggctcacgcctgtaatcccagcactttggaggccgaggtgggtgcatcacaaggtcaggagatcgagaccatcctggctaacatggtgaaaccctgtctctactaaaaatacaaaaaattagccaggcgtggtggcgggcgcctgtagtcccagctactggggaggctgaggcaggagaatggtgtgaacccaggaggcggaacttgtggtgagcagagatcgcgcc

SEQ ID NO: 65088 - DNA, 2622 bp, Homo sapiens
cccatccagtcaggtgtcttttagttacccaaacagtttccatattgttagactgtgtttcttctaaaaaagaaaaaaagggaggtggttctatcttatcaataaaattgtttataaaactcagaagtagaatggtgagaaactagggaagaaaagtagtaacgcaagtctgagaaataagatgtctattttagaaggatcaaagctgatagaacaagcttaattagccataaattatggagaaagttggcattatcccattagaagaataaagtatcaaagatctcctacttggtggttctgtctcaatgttgagtttactaagtgtgaaaagtatcctatcctgaatctgtgctctctggattatttaatgctttcctttttaaaggttcaaaaaggtagatttctgcttatttttaatactttctctggtctcaaactctgttttattgagagattgatttgttacaatttgttttatggtatcatgtgttctatcaagttggctttagatagccacttctcttttcttctctctctgtaaagatacagatgtttctaccactaagagcagtcaagcaccactgtacattctgagtttgtggccttactaatcaatggcatgttttctggggtgggtgttccctttctagagtgtcctgccatacttcgtagctacaaaactggctaaaatccggaagccaactttggataagccctctccggagacgtttgtgaagtctgcaattaaaacagtcggcctgcaatcccgaaccaatggatacctgatccatgctcttatggtaggtagattttttgaatcacaaatcaatactttctggcttggggtttctttcccattgagttacaggatagtatgtaatagattagcacatatacattgtccagccatagtaacaagatatctatatcttgttataattataatggtcgtatacccaagaactttaaaatctacctataaataaaaacaacactataataaaacattaaatcatatgcttcaatttagcccaaattgtaggctataattacatatctctctcattctgtttccctagggctcgataatctcaaacctgccttcttggatttatttgaaaatagtcatgaatatgaacaagtctacacgggctcactatctgaagaaaaccaagaagaactaagcattgataactgcattgtaacttggccagatgctccagcatatgcacgttcactgcaaagcaccctactggttttgaaaatctgaccttgtcatttcaatagttattaacatgactaaatattatcttaattaagaggaaaatagaagttgcttttaggggtttctgacatatattctggatactatccgaggtaattttgaagtttaatataaatgctcatatcaaatgaatatagaactaatattgtcgggaacacctaatagaaaggaatactattatagcaaatcacagaatgatagactcaagcataaaacttggcagttttatctgcttcaaaatgccattgatcattattcctgtattttctctgaaactgattataaaaaccaatgtccagctactcttttgtttttgacacttgaagaaatggagatcgatttgatttgtttataagcagacacactgcaatttacaaagatctctttacggttttataaaattatcttccagtttgtacatttatatggaattgttctttatcaagggtagctaatgacatgaaaataattgtgaaatatggaattatttctgacacatgaagcccactaaactatgctttcttataatgcatatttcttctcagtttaaatgtatgtaaatatcgaagctatatggtatgatttataaagataaatgggccaaagtgtacattgagactggcagccatctatggtaccactgaaaccctgacccagaaaagtggcttgcttggacacccagctgcctttgtttctgcattaaaccaatattgatcacacatatgacacaggctagtcctataaaagtaatgacttcatagaaatggcattataatttttaagttgatactctacaggtagctattgatataattagttttaataaaacatgctgcaaccatggtatacaacaaaaatacatttctttggtgattgaaattaaggccgtatttacaatgacttaatataagactgacttttatcctgcttcataacttgtatggagaactcaccaagaaagaattcaatactgtgaaatatgcagcaagaagattggtctttacctaggctgtgtttcctaagctctgagttttcagcaccagtagatttgtattaaaagaaaaaaaaatggggccttagcttctggcttttaattttgccagctaaggacataaaacaaaaataaacaaacaaaaacaaatagccatctgctatcagcatcattatgtaaaagaaaatatattttagcccctaaaattaggaagaatgtaatctcagaataaaggttgtcatttaagttgaataaatatatagctttatgaaaaacacattgtttgcccttttttcctctcatttcattgtagaaatggtgacaccacaatgacctggacagt

SEQ ID NO: 65089 - DNA, 1018 bp, Homo sapiens
cacaaaaggtttaggaaaaattatagagagagaaaatggtagagtaaatggggtcagatgttaacctttggaaaatctatgtggaggtatatggatactttgtactgttttgcagatttactgtaaatctggaatcatttcagaatagaaagtttaaaaatagcttttgttctaactaattgcatgtggtcaaagaacatgcgagtatgataaagcctgggcaaatttttatagcctttctctgcctcagctttaccatctgaaaaatggaaataatagcacctatgtcatatattgtttgagaggaagttaagacacttaaagtactgagaactcatccaggcacaagtatataaatatatgttgtagtaggctgaataatggcccccaagacatcaggtcctaatccatgaaccctatgttaccttacgtggaaatgaggtgtttgcagatgtgattaaattggagatcttgagatggggagattttcttggattatctaggtaggtcctaaatgcaatcacaagtgtctttaatcagaggcagggagattgcagacagaagaggagaaggcagtgtgatcatgaaggtgaggactggagtgatgcagccacaaaccaaggaatatcagtagccacaaaaaaaaaaaaaaaaaaaaaaaaaaaaaaaggaagggtcaaggaacagattctctcctagaaattctggaggatgaagcatcccaccaacaatttgattttggtgtagtaacactcattttggacttctggtctccagggaactgtgagaataaatttctgttgttttaaaccactgagtttgtgataaatttgttccagcagccccaggaaacacaaatgtaaattgtattacctattagaggttttgtttgtttgtttagtgtcagggtctctctctgttgcccagactggagtgcagtggcgtgaccatggctcactgcagcctcaaactcctgggctcttacaagtgatcctccctcttcagcctcctgaatagc

SEQ ID NO: 65090 - DNA, 1001 bp, Homo sapiens
ataaaacgagcttttacctttgagaacttgaggtgtgaagctttcttaggtagaagcataaagaaatagattacagatgtggaacatgtggcttgaatttccttgttgttttggtagctgtacgtgcttctgcatttgctgtaggctaagcttttactggtacaactgtcaaattagtattattagccattatgaggtggatttatccgttagctggagacaggagtttaatataagttgaatgttaatctgtctgttgttgatttcctgagtggctttgggtgcatcattgaactttaccgtccacatacatacctgcattgtgtcaaatcttacactgcttgttataaagacaaatacctgtatccatcctaaatcagattttctgaaggtgggccataggtattttgaacaaacttccagggaagtttgatgcagccagtgataatggaatatatgcttggaaacagtcttagccgatttctcaatgtccatgtaggtgaaaatgggaatagtacagtttccttatattctactcttggggactattaagaggaatgtggtttataataggtcctaattttagaatttcttaaaatgcactttcttgtgaaagaaacaaaagtactatggtaagattacaaaaggtgaatgctaaagccagcagccccaaatgactaggcttcttgaatgaaatgttgtgatgacataaactgattttacatggaagctctattgccattgagagtcttctgcctgaaattaattatgccttaggagtaattgttcacaatcctaactaaaagcactgttttgttttgttttaataaacagataccatggagtagtttgaaacaggaacaaaatcttctgaaagctcggagcagaagcctttttggtcaacatggaggaaaaaagacggcgagcccgagttcagggagcctgggctgcccctgttaaaagccaggccattgctcagccaggcaagaatctgtagggat

SEQ ID NO: 65091 - DNA, 1030 bp, Homo sapiens
cgagtgattgagtaagtaatttgctgtcttcctgtaattgttgcccacagtgaaatgaagagcctggaatctttcctcactgttttttctatctggaagagaatggcccaataagtgtcttaactgtagtctgggatattcccatctcaaatgtctttaaacttgatcttttgagaagactttctgaatttgctgatagtattgaaaatgcaacaagatatccatatgttaaactttgacttgtgtagatttcctggccctatttcaccgatatctgtagacagtaagctaaacctctcaggcaaagacagagagggatttttcctgagtcattgaagcatggttctttgagaagccattaattgcctcttttttttttttttttttttactagcaatgctatgaaagctgctagtgctgtagatgagcttacagtccatttattaaaaccatgtaattattccagaacaatttaaatgatagtaaacattcttcttatattgatctgtgtctaaaatgttcttgtccaaagttggtgagagatgctttgactcctctttttatgcttgtcagttttcatctgatgtagataaattgtcagtagaaactattcttttatcttagcaaattagcatcagatatatgttcttgcccatgatcaatctgtttgttatgctgtttgactgcttgcagattggcttgtatatcttagaaaaagtcgcaggctaatagtctttggttgtttattattttttatttttttggaacaggctgtcactctgtcactcaggctggagtgcagtggcataatcaaaactcactgtagcctccatcttctgggctcaagtgatcctcccacctcagcctcccgagtagctgggaccacaggcacacaccaccatgccttgctccttttttaaaaaattttttgtagagatgggatctccctatgttgcctgggctggtttcgaattcctgggctgaaatgatcctcccacctcagcctcccaaagtgctgatattacaggga

SEQ ID NO: 65092 - DNA, 1007 bp, Homo sapiens
attgcttgaggccaggagttcataaccagcctggacaacataatgtggtcaaattagaattctttaattcagatttggctggctcataactttgcctttattggtgatatatttagttcatttatatactgtcttgaacaaaaaagagctaccctttctcagatttttatttatgttcattttaaatttagatatagggtcttgttatgttgcccaggctggtgttgaacacctgggctcaagtgctcctcctgcctcagcttcctttaatagttgtgattatcggccacaccccgacctctcagaattttttaaaggtggattcactaatgtatgtatatatatgttgggagtacttgtttagtttaaaaattgtcattacctgaagcttaatatcccgtacaaaataagcaatttcagtcatgggtttttaaacttgttttagtttttgttcaaactaaatctcacatgagcccagtgtataaaacagatcagagccttgactggctgggagtcccaccaacttgacctctcctttcttctcctgtagacccagaggtacctctgaggtacctagaactctatacaacactgtttgaaatccactgaataggtcctttcacttctgtgattcatattttttgtattcttttcctaaaatgtcttttaaggataaaatgtcttcactgaacagtgagataatgctgaattttaatttagacattcagttctgaggcatctgaatatagagtattggttggagagtctaaattaatcctctagttcattatccccttttttcttccttttctcactgtttcagtaccaaaaataacccagaaaaaaaatacctacttagaaacataacacaaactttatgctatctcagtattcagtccctgagcaagtcagggaagtgctaattagattcccagtaacattggagaaaaaagcccatcttcctcctttacattcttgtttttcttgttaagcgtgtaattctagca

SEQ ID NO: 65093 - DNA, 1008 bp, Homo sapiens
tgtcattttgtgtgtaatgcgactgtcttgcccttttcttggtctgtggattgcagtggcaccctgtgctgcgcacactaaagaaccgcattgaagagaacactggccacaccttcaactccttactctgcaatctttatcgcaatgagaaggacagcgtggactggcacagtgatgatgaaccctcactagggaggtgccccattattgcttcactaagttttggtgccacacgcacatttgagatgagaaagaagccaccaccagtgagtattctctttttcttatgctcttcctgcctcttattagtctgtggaaaaagtagaactcctaaaagcttctactttcagatttcgagcatgggaatacacattttgttgatgaaacattttcaagtgactacttccccatggttaacttttgacttccaaagtgctccttcattcatttacaagtccaacaagaattggctgccttatgctaggtgctggcggctcatttcattgatgataaactccctgtcctcctggagatacagtctagttggggtagataaatattgcctattactcaaataattgcaattgtgatcaatgctgtgaaggaaagccttagaagaatgactcaagctagtgggaggctaaggaagaggaaggaggctaaggaggacgtccctgaagaaacctttattttaagtgttcttcatggtaatatggccacttttctgaaagggagcattcacatatgtttgttccttcttagccttctcctgaaatacaggtgaatctaactctttcagagagaggaaactcaagccagattatcagagatggtgatctgtccacattcaggtagaaaaacagtgaccaaaaaattaataacgatataataacttcagtttccaccccagcgcttacctcaattatgtgacatttgaggaatactagggttattaattttttaaaaaatcaaaactgtagtcccttacgactaagaaagatagtaatg

SEQ ID NO: 65094 - DNA, 1050 bp, Homo sapiens
ttcaagcgattcacttgcgttagcctcccgagtagctgggattacaggcgtgtgccaggacccctggctaatttttgtatttttaggagagatggggttttgccatgttggccaggctgttctcaaactcctgacctcaggtgattcgcccacctcggcctcccaaagtgctgggattacaggcatgagccactgcacctggcccaggctgatttttgaatagacctaagccagaccacatcattattagttcttgtgtcagttcttcgtcagatatacttccataagaatacagttaacagactgagtgttttcctggtgtgtattgggtttccatgcatggtatttttaaagcatattgtgtgattttgcatatatgccattaagtaccttttgttggtataatttccattgattaggctttctttggttatgtttacataaaaagtttgatcattgttaggggattggtagttgccggtgtttttttaagtgaacttgctctctaagccttcagttacattggcaagcagccttctcatataccaaggagtaccacttgagaatcagacaaaccagcttttgctatatttgttttagatatgattatacttctgtacacagctttcactcagttaaataccaagttcacatgtgtgaaaaattcatcctgcccttagtaagactcctgttgcataaatagtagagagacactgtatcagtctcattatttaagttcagaccctcttctcaagccggatgtatggaacctcagcttgttgccaggagtggtcctgagaccgggggccgtagcagtgaatgagtaagatgaaattgtctttctcctcctggagctcatctagcatatgctagcactgcgccttcctcctagagttatccttctggcctcctgattggcaaataagctatagtatatatagcctttggtataataatggtttttagttcttcacacttactttctttgttgctcagtatttaagtattcagttactgtttctttacacacatatattcaccaccaccatg

SEQ ID NO: 65095 - DNA, 1049 bp, Homo sapiens
ctctgtgctgagacggtaaggagatctttgtttcgtaagcaccagtgccctctgattcatgcatcagctcagtcagcttcatgtagacatcatctctcggattaaacatttcactcctccaaggtgccggttttttgttttttgtttttttttttcactgtcctgtggtccaagtctgccaagtgctgctcattcattttgattttagagtaaattaccctttcctttaatgatattactgtcattcctcaggggcatagtagacttgtttaagcttgcttttacattcattccgattccttttttgtttagttcaaatcaaagactaagtgaagggcaccttatctatattctggctgttgtcaggctatattgtcttaagactgtcataaagcttatcaaatatacttcagtagaccttttttattctatcaggctggcattattaaaggttttctatacttcttgtcccaaacccagttgtacttttcaaactacattgtgttcctgtttgcaaagattagtctggttcttttcccagctagttttaattctatactgaaaaaaacaagctggaaaaggaactacaaaagccatttggcaggctgctatttctctgtcggttaccatggaaacagtgatggctggggggtgttattagataatagcaggaagtttgtgatgcactggaggtttagatgccaaaagccttgtttttctagcaaattacctctggataaactgtatccttcatcagctgaattctgcaaatgttaggggctcctattcacctcagggtgattgagctacagcaagttgagccctctaaccactcctctttttagcccttgtgaagaatgtgaatcctgtttgtattgccaggagagatgattgtaaaaccaagtctagcggtagagactatgagagcacccaatgaattggaggtcctagtgtttcctttgctaattggttgtgggttttttgtacactgctgggaagagtggagtataaaaaggtcagtcaagtcataaatactgatattttttgta

SEQ ID NO: 65096 - DNA, 1057 bp, Homo sapiens
actcatgagcctcaggaaggagcagattttgttttatgtccatcagggagccagtgaggtgtataaagcagaagagtgacacggtctgattggcaattttaaaaggtcactattgctactgcatggagcctggactagaaagaaacaaggaggccaattaggacattgttagattttgtatataccttgggaccaaggtagagaaggagaaaaagggatgattcaatggcatgagctcagaggaacagggatttttattctctgcttcagaataatgatttgaaagtgttattgaggagtaaggagaatactctatcacctggctctgtgagccactggatggagagccatgatcaccttccacctgagagggtttcagggaatttgcagtcttccagagatagccagatttcaattaggatgaggaagcagagagaaccttcagagctcattgagactgaagatataggtgagtttgctcatctttgaatgggaaatccagaggacacagtggaagggtgcaggagggaaagagttccgggggattgtgtctgatcagattatgtccaggaacagtttgggaatgagtgttctggtattaacagatggctggagaggcttgcacttctgctagtgactgggctcagctggaggtgaggtatggcggaatgtgttctcatatgctttcagaggatgaagggcatttgtttctggtgctagcacctgagatagaagctctttcaagatagcagttcttttaagttgcattttttggaaatattatattgccaagaatggaatgttcatcacatgatctcttctgatttcacatgcacattcagtgtagctggaacagctacaactgtgagtgtaaaaccaggtttgtttttgctcaaattcggtaacttcttacccccaccctatccctagtattattgcagcaataagtctgaacagtaaacgctgtcagcaggtatttcattcaatttcattgacatttcaatgtgtgcagtccagaaggaaaggcagtagtccgcctggtagtttgtgctgtcga

SEQ ID NO: 65097 - DNA, 1026 bp, Homo sapiens
tcttctctcattctcccctctccaaatattaattaaacccctactatgtgtcaggtattatactatgctcagctctggggatatagcagtgaacatgacaaacatagtccctgcccttatgggggttacaggagctagactataatcaaataaacagagagaaatagttacaactcatggttagagctctgaatttttattttagaagatcactgtggctgctgtgtgaagaataatttgggaagaggcaagagtaggagactaaaagagtaggtggttgtagtcatcgcagtgggagactgctagcttggactaaggtggcattggggatgaagagaagttaatgggtttgaggtatatttctgaggatgaatcaacagaacttgccagtaatatgttagatgtgggggtaaggatccagactcccaggtgtctgacttgagcagtggtgagtggagttgctgtttactcaggtggaagagaagctgggatttctgcatttgattttgtccctgctggaggagttccttcttctacgtgcaaaatctgaggtgcctgaggcttccaaatgttaagtaggcagtcgactgtgtaagtctggagttcagacaacaggcctggctggagatgtcatttgggaattttggaataaccgcaatagtaaaacgctaataataaataacaagtgtatagtgctgactgtgcctggctctgctctaacttctttattgaattctctgataattttatatagttgatgccattattatttccattgtacagatgagatgactgagactcagtgttaaattacttgcccaagatggcttagacaactatttgttgaatgtggaatcgaattaaaactaataatatagaccatatgtaaaactgtggaattgtacattatcattcagagaaagagaataaaaaagggagcggccaggcgccgtggctcatgcctgtaatcccagcactttgggaggctgaggtgggcggatcacaaggtcgggagttcgagaccag

SEQ ID NO: 65098 - DNA, 2296 bp, Homo sapiens
gctttcatcactttgttttccacctgaaaaatcttaatttgcttctgttggaacaaaggataaaatagaaactccttacccagattgccaaatccatacatgatcttagcccagggagatccatggactctcactgttcccgtatggttgctccattctactaagttatctctttgctttccccgaggcttgctctccaacttcttaacttaaaagggccccctatagcgtgaaggctttcctgatgcctccagtgcagaaattaataatagttactgtgtgccaggtgcttcctgtgaacctgtaaaacaagaaacaggtagcaggcttctaccttgtcctttctgctcatttgtgttttgtttttataagtgtcttcttagtacagagatggaggtttttctattttgctcatctaaggaatcagagatgatgtggaaaaccaactgcctcactgttatctgagatcagtaatttggaagcatattttgctttgaatgactttttctgattgagttaggggtgagatgaagaatgtgataattttttaaaatcatggcatttattttttaaaatcttaatatattaaacaatacagtttcagatacaaaaaaaattactgcaataaaacagttgaggtgtatttccattgtgcttcccttccttatcaggaaagtacattgtccactgagagacaggatggatggcctctcccagctctacacaaagcacaagcctactggctctcctgggccttggttaatacatggaacaggctatgttttctaaaatgttgtagcaacactcataagtcaaccatggttcaaaaagtcaaccatggttcaaatcacatatttacatattgatcaattctttatgatagacagacataaatgagatacagtaaataatttccagttgttaaaaaaaaaaaaaaaacaagtacaggcgacaaacttggtcatggtacacaaatatacttcatgtgtacagacagcttcattcaggtctaatttttttttaatttttgttttaggttaggtatatttgcaggtttgttatataggtaacttgtctgtcacgggggtttggtatacagattatttcatcacccggctaataagcatagtacccgataggtagtttttccgtcctcacccccgtcccgtcctccaccctccattattcaggtataattttaatttgaaagacctagatatactattatttaagtgataatggcctctaagatttattcagattactatcaaataataaattaaacaaatccactataatttaaaactctgtccattgcttgaaaccttggaggagcctatgctacaatcagttgctaactaaaagcaattgtacgtgtatttgatatttccccacagtttctacctctagatttaattcagtaaaggaagatgatatttgaagatgaagtagcacttgtgtcctgagcatctctcaggcactactgcatggaatggcaaaggggatgcaagaagcacatcagatgacaacggtcttagacgcttacaagtctgctaaggtgactgacaagggaatcaaagaaggcagtcatgtcatggacctatcagcagcatagctgggcaaccctggagctgaatctggccctcagacttgtttaaattgcccagtgtttttaaagacactgaattaattgcgaaaatttataactcaggaaatttcacataaaaatcccacttgtcagcttccctggaaaacccagaagagggggcagcactgggggaacagtgatctgaaatggctcattggcagagcagccaccacctttctgcaggcccctggttctgcatgggtccctctcctccctgtgctgcacccagcccacacctctcacttatgctacttgctggtgtttgtgacccctacagtatagtcagggtgccatataatcaggacaggaaatattaggatttcagaaggaatagagcttaccttggagagcagagtatagtggaaagaatagggctttagagccgggccaatctacattcaaatgctagcctgccctcctgctagcttttgccttagagaaatattttccctccagctccctttgcttatgataaaatggataatatcaccttccttgcctcccttacaaggttgtagtgaggattagcaataacggatatagagtgcctgatgtgcctggcacctgagcacatgccatcgtagatcttgtggaagaagtctggcaggatgctttggtttaagtacctggaaactgttataaaaagaa

SEQ ID NO: 65099 - DNA, 1065 bp, Homo sapiens
gtggaggttgcagtgagccgagatcacaccactgcactccagcctgggtgacagagtgagactctgtctcaaaaaaagaaaaaaaaaaaaaaaagaacttggcttgtaatccaagatctctaagtttgaatgagttgtcatttctcccctaattgtttttcgttactgtcagttgataatgttcagccagaagataggtactgtcatgttttcctggtgagattatagattgctgcagccttctcaagaaagcagtttggtaatataaatcaagtgccttaaagttcatacacttggctccagtaattccattttttaagaatatatcctagaaatatatgcagaaatgttttgcccaaaaatctgcttgcagcagctttttatttattttccctctttttaaaaaaaaatactggtgtatgaaaatcaatctccaaccatgtgctccttactgctccatccttagtactagcataatgcctgatatatacaggtggtcaaaaggtatttgtgagtttaaaggaaggatatgttcatacaaaggaatattctataaccatatttttgaaatgtatatttaaagatatagaaaaatgctcaataaaatattaaaaatggagtacacacgattgtatatctggaagactctgtgtgtatgttgtataaactctggatgataggattacaggcgattttctacattttctgtgtactcttcctcagtcattcagtacatatttattcatatgtgtgataggcactgagaatgtttcttaacaggaagaccacataaactttccctcatggagtttataagagcagaggttgaataaataattacaagtgcatcatttactttagtaaacttatgttactttttatattctagaaggaaaacctgtatgatgattttaaagcattgatgattgtttgtaatttctaagacattcttttaggacaagaaagggatgattttaagaaaactccaaatctcatacagtatgaattacctttccaatggaaagaaaaatgtttaggtttcccatctgttggatggttaataat

SEQ ID NO: 65100 - DNA, 1043 bp, Homo sapiens
ctctggaagttctttaggccaaactgaagagagctcccagatgccaaagtggccttgcgttgatgctctgctcactctcggcggccccaccacatgctccccaggtaattggtttcctaatgcactatccctggacagattccaggattccagtgccttgtccccttggggtcagttcttgacgtttcctagcctggcaagggtcgccgaccaggctcagatgcacccccacaggactgtattgttttctcgttcttgcaggccactttcaaactctgtacagaacgccttggcctgcaagagtaaacaagattaccaggctggaattctgttcaagaccagggcttttatatccagagattgtgggtcagatgcggtgagggatacgtgaaaggaagacacagtgccttccattacagatagaagtaaacccatgtggcttctattttccttggcaaaattagttttttctccttactacaaaagaggtttgtgttctttgcaagaaattaaaaagaaagataaaaagagaaagcgtttgtaacttcacaagctagacatggcaactctttacattggtgtgtgtgtgtttgtgtaagacagggtctcactcttttgcccaggttggagggcagtggtgcaatcatggctcactgcagccttgacctccccgggctcaggtgatcctccaacctcagcctcctgagtagctgggactacaggtgcaccccaccacacctggctaatttcagaatttgttgtagacggtcttgccatgtagcccagcctggtctggaactcctgggctcaagcgatccgccccccatcggcctcccagagtgctgggactacaggcgtgagccactgagcccggccagcttttcacaatttgcagtatatatattttttctacacatttatgtgctttttaaaagaaaaaattaccatcttactgaactaatagttttggggcctttttctacttaggtacattggtgcctgccattaattcttgttctatgacatcatcttgagtggctgca

SEQ ID NO: 65101 - DNA, 1051 bp, Homo sapiens
tcgggcgccctctggtggtggggctggtgcgtgggggtcaggaatctctaggagatacccagtctctcagctgcagcgcagagctctggagaagacagcagaggaaacgaaacaaagaaacaaaaatggaactacagggccggagagggtgttcttccctcggctcagagagagcacaggctatggccttggtggctgtagtatttggcccgtgtcccagtccctgagaacacgctggcccaacaacgggttccactgtggtggggtatcatggcaggagactcttaacctgcaaaggcctcagagatgtgaggccactgtgggtcgatgctttattccagccagggcagctgccaccactggactagtttgagctccacggagtgggaggaacttcctctgagcccagcctcattctcttctctctccaaagaaactccctgaggacagaggggcggactccacatcctgtgcccctctctctgtcttacctcttcggcagcagctcctctttctactcttcaggagctagatgtcccaagtgtctggaagaccttccagtgggcttctagacccttcaggcctgagatcctcccctctgcatagccttctctcgcggaagaacctccttctcagccgggcagtggttcacgcctgtaatcccagtactttgggaggcctaggtgggcagatcgcttgagcccaggagttcgagaccagcctgggcaacatggtgaaatcctatctctacaaaaaaaaaaaaaaaaaattagccggacgtggtggtgcacacctgtgttcccagctattcaggaggctgaggggagaggatcacctgagcccagggaggtggaggctgcagtgagcagtaattgcggcactgcactccagtgtgggtgacagagtgagaccctgtctgaaaaaacagaaacaacaaacaaacaaaaagaacctcctgctgccttcagcccctacctgaagggtctccttgggttaccccagccaacaacagaggttattgaggggaccatattccctgctcagctgtggg

SEQ ID NO: 65102 - DNA, 1062 bp, Homo sapiens
gccaggagtttgagaccagcctgggcagcatagcaagaccccatcactacaaaaaggtaaaaataaaaaaattaacagggtgtggtggcgtgcacttgtggtcccagctactggggaggctgaggtggaaggattgcttgaacctggaaggttgagactatagtgagccaagatcatgccactgcattctagcctgggcaacggtgtgagaccctatctcaaaataacaacaaacaaacaaaaataaaataaaatgggataataatacctgttgtgtagaagagtcaagattaaatgagagcaagtatatgaagtttttagcacagtgctactcaataaatgatagctgctattattattttctgtcccaaatataagctattctcataatgccttcagaagtcagaaagctgttacaaataaccctttaataatctttatttgttgagcatctaccatgtagatgtgaacagaaacaaagttcttatcctcatagagctcatattctagttagggagacaaacagtgaatgaacagagaaaatatatgtatactatatggtggtgagtactatagagaaaaataaaccaggttaaagaagacagagaaagatgggtgggctggggatgttgctatttagtagaaggaggtcacagaaggctattttaataagatgaacatttgagcagaaacctggaaaaagtgagggattgtgttagttatctattgttgcataacaaatgacctcaaatctagcaagttaaaacaacaattcacaatttttggagttcaggaatcctggtggatgcctcaggctcaagatcttttttttcctttttctttttcttttttttttgtgacggagtctcgctgtgacacccatggagtgcagtggcatgatctcggatcactgcaacctctgcctcccgggttcaagggattctgcctcagcttcctgagtagctgggattacaggtgtgtgccactatgcccagctaatttttgtatttttagtagagacagggttttgccatgttggcctggctggtctcaaactcctga

SEQ ID NO: 65103 - DNA, 1021 bp, Homo sapiens
gcttgagcctggggaggtgaaggttgcagtgagctgagattgcaccactgcactccagcctgagtgacagagtgaaaccctgtctcaaaacaaaacaaaacaaaaaaaaaggttgaatagtcttttcaagtgtcatttgccatcctaaatacttggtttttcttatttctctccctggtgaccaggagtgtgaggaagaggctgtctgtgtcattatgtgtgcgtcggtcaagtataatatccggggtcctgccctcatcccaagaatgaagaccaagcaccgaatctactatatcaccctcttctccattgtcctcctgggcctcattgccactggcatgtttcagttttggccccattctatcgagtcctcaaatgactggaatgtagagaagcgcagcatccgtgatgtgccggttgttaggctgccagccgacagtcccatcccagagcggggggatctcagttgcagaatgcacacgtgttttgatgtctatcgctgtggcttcaacccaaagaacaaaatcaaggtgtatatctatgctctgaaaaagtacgtggatgactttggcgtctctgtcagcaacaccatctcccgggagtataatgaactgctcatggccatctcagacagtgactactacactgatgacatcaaccgggcctgtctgtttgttccctccatcgatgtgcttaaccagaacacactgcgcatcaaggagacagcacaagcgatggcccagctctctaggtatctcacactcatacagcccagcccccaggagatacttgagtggccctcagggaactaaagggaagggaaggatgggaatgcttctgctcttgagttggtttcccgatgctgtcttcttgcaggacggggtgtgttggagggactgacttgcagcatgaggcctgtgtggcagcatctgcctgtgtgcccgtgaagagtagtctgccatctccggcactactgctgtgggttcccagcctcttagagtttccaaactaagcgtggctc

SEQ ID NO: 65104 - DNA, 1036 bp, Homo sapiens
tgtaccctctctgtcttgtttgagtcttgtcttccaggagggaattacttcccatctggtctctccaaaatcttccccttgacttcagacttactaactttgtgtttccatatctgtctcttgtggagatctgcatggcactagacccttggagatctttcttccctctgtcttgtttgagtcttgtcttccaggagggaattacttcccatctggtctctccaaaatcttccccttgacttcagacttactaactttgtgtttccatatctgtctcttgtggagatctgcatggcactagacccttggagatctttcttccctctgttttcttttacacatccttgccatccagatgttaagactggagattctatgctttgatgaagatcgttttttctacttcttgttttcaactaccaattcggtctccctcccatttatgtggccttgatgatggggactttccctatagcctctccattgcacagggatgctgttagacagccaggagcagccctttccagagcccttcagttgcctgccagtgcttcccatcaagcttccctctttccccatttgaagaatgcagccagcttccagtcgctttcagatcagggactcagatgtaactaagacaacacttcgatgttccttccaaattatcagtttctctcctacacacacacacacacacacacacacacacacacacacaatttatagcatgcgctctcagcttagcatattataagcatttcctcacgatatcaagaactgttcccaaataagatgtgttatgattgcataatatttcagtgtgtgaatgaatcatatcttactttctcacaatatataatattttaaatatttactaatactacagaagataattttaaaaatcagtggaggtgaagactggtaaggaaacacttactgtcataagtttaatatcaaagtttgtcttaccttgactaacataccagctgcaattttccaatcacctgtttttttcccttgtagtccacggcaatac

SEQ ID NO: 65105 - DNA, 1050 bp, Homo sapiens
aaacatgaaaagagatttgataccttccctttagggggtcttgtagaaagcctgaaattcccagacaaaataattccattacaaggtaggctgaggtaagtactgtaagagatgtcagacagtgtgccgtggtgtgtttacatagtacactagggcctaaagagacccatttgcaggaagtcacgttgttagctgtctaagggaagactttgacattgaccttgaacattttcagaaggccaacagtggtggcattgaagcaatactgaagagtagaaatattaatacaaaacattgcagccatttaaacttttcaagttttacaggtgtgagctgttgtcttttggcatttttgtgtcaagatgcctcagtattgcttggcgtcaacccttgtagaaactttgtggtctgtagggatcaaagttagtggatcagcaaaactagtttgtaatctcttgcctctttgtgttcctgcaggaggctactttctgtgtggttcttcgtggagctcggctgggccaggcagtattgagcgatgtgttacaagctggctgtgtcccggttgtcattgcagactcctatattttgcctttctctgaagttcttgactggaagaggtgggtagtacctcctagtaaactctacattagtggttctgcgtatattacaaataaaatctcctcaggtcattgtaatgtataccctggttcaagaactactacagatagtttttctctattttccattaggagagttagtacactggtctagagcagttcacaaaccaaggccagtttgcaggctggctgtttttgtaagtcaagttttattgaaacacagccgtgtcccttcctttacgtatagtctggctgttattgtgtcacattggtagagttaagtaattgcaacagaaattggatgacatacagggcttaaaatatcactatctggcctttcatcacaggggtccccaactcccgggctgtggcctgtttggagccgggctgcacagcaggaggtgaccagcgggccagtgaacattaccatctg

SEQ ID NO: 65106 - DNA, 1073 bp, Homo sapiens
tgtgagctaatgattaactagttaatttattgaatccctaatgttttttggtggggggagagattataggagataataaaaaaaatctttgatccccattcacaaagggcttgtgttggggatatatgggtataagcataaagaaagttgagaagatgatgccgatatttctaggtacattatgggtcattaagggtctgaaatggaagggagaaagttggggctaaagctgtcaggatgaatttcttggagatgtagaatctgaggtaggccttgagatgggagttccatcagccatctttcttatgttggaaggcaggcagaagtatgcagctaaatatttttctgtagtcaaatggaacattcatattcccagtctcccctgaatcacaaagaaaaagtacacaatctgggatctcagaaggctggatagacactagactgtatcgttagaaatgtttgtatggatagggaggaaggtgtaaatggatccccagtttatctgttgagtagaatttccaaacattcttttattggtcagtggctccaccagcagtgacctctaacctcagccacactaggaggtggaagtcaggagcctgacttgcctttgaactcttctttgtactcaattgactagaagcctttgaggtggcagaaacattcagcatcttcttttctctctagcctttaacacttggggtacattaaaataccagtttcttttcagtctattacactgatccatctcaatgtgccttcatatttttctattaagcaaaccaaatattggtgctgcagagaagtacttgaagatgtagtgggctgattaggaaaaagacaaaacaattttatttaagaaaataaaacctctagactatagttgggcctagtagtgatcaagaagagagtagaagaggctacagaacagtaaatgtgtgcatacaccgaagttcctgtactttataggagagcccctatcaggggcctcttattttatcctacttgcatacaatttcaacacatttgaattatttggtttccatagccgtagtagtttggaagagacacat

SEQ ID NO: 65107 - DNA, 1025 bp, Homo sapiens
gtaggtgtggatcttggtcagtaaatcaaggggtggtctggggttttcagagatacactcttagggtctccagccatgcacagagcttgctcagactggagaaggagaggtgagagttcagagtcatattttggctagatgcagctgccttagtttaatgtaaaaaaaaaaaaaaaaaggcctacgtgtgtcgatgattatgacagtgagaggtggccttgcagagtattcatgtcactagatgctttgtcactcttatctgtaaaactagggtgatgacattatccacgttgcaccacaccctcagaacctgaaaaagtttgacacagtaaaacttggaaataatgttaaagtaatacacctgtctaaactggagagattgaccttttgttttgaaaggaattctttttgaaaggaatttatcaccaagttaaggttctttattaggggaagtgtgcatgtttttatattaattttcttagctgttcatgttaaggctgcctatatttttatgccttttcagtctcttcatgcttttatttttctctcctttttgcaaatatcagcaaagctttgtcatctccctaaatatcctatattacttctaacttttatgtcatttctggtcttgcctcttggcagaccttcatccgcacatctggggctagcctctatagctagggttctccttggacaccctcctcattttacttctgtttctctgccagatgtgaacatatgtaggaggacagagacagagacaagtgagcttcaaacagtgaattcatgtgtcaccaaagctatgtcctctcagtgacagctttttaaaaactaaatgtaatatagtctgaaaattatgtagagtggagtgttttcccatgttatttttctatgatgtgatttaaaagattatactgcatcttatcaatgttataattttatttacatttttgatagatggttttttttccaagtttgctatcataggtaacactaataaagataccccagatttttttcctttc

SEQ ID NO: 65108 - DNA, 1060 bp, Homo sapiens
atatggcagtggtttttgtttttttatttttgtctttttaaaaaattcactgtgctgcttctgttaatcctttgcaatctgaaaattcatgcctcttatatcttaacgtactgagaacttctttaatttctttgatagatttacttctcccatagtctgtgttttcttttctggaatctcctattaaatagatgttggaccttctagattttctcattttctctgtccttatttttcatctctgcctttttgttcaccagtctggaatattttgtcatctttatcttgcaatcctgaccttttttcccccgactgacaggaccaaccaggtagcaatcctgccctcaaaaaataatttaaactattatatttttaatgttgaagagttgtttctgttctttggtagagcttttaaaataaaaatagcaatttattcttgtttcatggatgaagaatcttatctgccagtggctacaatttgttgttgatgctgtttgaatttccttctgctgcttctgttgtttctgttacttctaagttcctttttttctttattcatttggtttctgacattcatgctgaagatgctcttgaaatgcctgtgattctagaatctgctcatgattgagagggaagcgctgaaaagctgatcggaagttctttgtgtgaaggccagcttgttgcctggaggacttcactgtaagatgttggggtgccgagctaaccacatggctaccaatgctttgggaactaaaggggaaagaaggctgtagggcccaccattcagaatgtagatttttagcctgtattttcctctcctctgtgcctgtatttccctgtctagagcttcagtttccttggagaggaaacctcccttctctagctggggtgagggaagagtcgtttttctggctgagtaggatcaagggagggtttgtgaatctgggcctctaactgctccttaaacagatttttaacagtcttcctgttttcaaccttaccgcttctcttacctcacaaggtatctgtgagtttcattcctgaaccctgtgaattccca

SEQ ID NO: 65109 - DNA, 1050 bp, Homo sapiens
tcgtaataggcccatcagctgttgtctcttctcccatctctttgtccttgtagatttatattcttttatattcatcaactgcctttttattgggtttggggagagaatggagataaacgcatgctttaatctgtcatgtttaactagaattcttttctcagctgcaaaagttctcagctccttttccagtgatatcagaaccaaacttaattagtccatgcaaattttgaggaggggaagactttgagcagttgcttagctctgggatctgtcctggtaaaagccaccaagcctgccatgtttgggtttgctgacgatattgggtcagccatattgttacagctgcttttctgacccgtgttaatctgtcctcttgtagaagtggggcagcgtgagcaatccactcttcctcccgctgatcccaccacagtctcaagggttcaccgccatagtcctcacctacgaccgagtagagagcctcttccgggtcatcactgaagtgtccaaggtgcccagtctatccaaactacttgtcgtctggaataatcagaataaaaaccctccagaaggtaagaagccttagtgcctctctcagctggatcaattttggatggccaaattattcacatcctttgttttaaataaattttcctgctttgtcaatagcaataccatttctgagacagcatgcctccatttttctcagtcatctcattcttgttctagggtggcccatttaactccaagccctggcatactctgtagccacaagtgtttgagggcttaggaatcaacaggatcaaaggctatcagccttaggaaaacagatctcagcttccctcagccatctcagctgatttgtttacatgaaaactcagtttaaaaggcattagttttctcctttcttatctctgctctgatgctgtactttctcaaaaaaaaaaaagggatggcctcacttctgattggaaaagtcagcagcaaagcataccctgtccagacttcaagtcaggtccttaaagagagcaatcactagaagttcccattggt

SEQ ID NO: 65110 - DNA, 1023 bp, Homo sapiens
tttattgcctgacagtagtatctgcactttttatggctagtctcttttaattggatatactgaagtcgggaaagtcaaccttgaaaattgccagtagtagatctatagtctaggctggaagaagtccatatttctggctctgttaggcaaatcagaatttgccttgagaaaattctttagtttctcctttacttcatgggatgtttgttctctgagagaatcatatgctttctttttagatttagggagccacagtttgagtaaataaaacagctattttaaatgaaggtcctgtattattccctgatttttaaaaattaactttctatgccaagatttgttttctctttctcaacactataacatggccagttttctggatttttgttttgtttgatacttaataagggagaaggaaagggaggggtaaaagaaaaaggaagatgtgggcatcatttaagaagggaggatgagaatacagaaaggaaggaaaagagagacaattataaggaactatgtaaagaaggaaattgttgacttggatttcttcataccaattgcctttctccagagtgaagtgaattggatggtattgcattgctaattagtcccttcgtttataaaggatgggctatgtttgcagaaggaaggctgggcctctcattgggtctggagtggcctgttgtgtcttgcagtagtcacaggcctgtatttgctcctgcatggaaaggccaccagctttcagagagactctcagcctgctcctgcaatcctgcctgaaaggcagagttgcaaattctagtgctaaatgcaaaagaggcttctccttattactcctggttagccactttaggcataaggtgagttatttattgtgaatttgtgtcacttctttggggaaggtatcattgcaaactgtgagaaaggatacatttttttttccttcttgatctaagcctctacactggcacaactaaaggcagtagcaggagcccagattttggagttgggtgttcagtttta

SEQ ID NO: 65111 - DNA, 1076 bp, Homo sapiens
ccatttagttgtaggaaaatcatcatgtgttgtcagttctttgatttgggatcatatagaagaactagatctttgtcagggactcagagagacagaaaagtaaatctatttttttgaaaaaactaatgggaaagaaaaatcctcttttctttttcacatatgtttttctttcctacctcattctcccttctccttctactgctccagtcctaatttttttaaaggttacctttccagaatcaaaattccatatcaggattatctaaaggcaggatataattttaatgcttattctttgattgctaccctctcatttctggcctccacgaaagggatactgtcagaagcctgagagaatggtacttctctttcatggaggccatttaatttgacaaagggaaaacatgaaactgagaattctatttagagttctgcctggtggtagctgatcactgaaatggagatgccttttgccaaagccgacttttggctactcagacctaacttgcaacagggaaaagtaaccatgtatcttaaaaagccatgattcattctatatttctacctgcaccccatatcatcctcctgggtcttcattgttctctaaaacttccccttcaaagactttacagaggcaagttagttctttgtggacatggtctcaagtaattctttggacatatatagatgaacagtgcggaaagctgtctatgggttgaatatgctatacacattcgccaattgtaagtccagattccatccagtatagaggtacgttcatacttaatcaaagtagctagcctagtttctctacatagtggaaagaggagctgcttgttgccttgtggaattaacatgaccaaagttccatgttcttttgttttattagtgtgtgagagtttagaggattcatggcagggatcttgcttctctcaaagtggatatggaaggcctgggccaggggtataccactgggttgtcagggtgatgtaccagatctcaactgtaccactttgacactgctacctagggttcaaaaaatgctctggttctgtaggtagacacagactttccag

SEQ ID NO: 65112 - DNA, 2571 bp, Homo sapiens
catctttactgggtcttagggagcacagaattagaaaacccacgacctgatcctgacccatctcttcctcctcctcccatcccctcaaactctcatctctccttcccttcttattatctcccaagagattcattgcctcatgaaaaatagtatttggggttaatctttcatttagctgctttttgcttgtgtttccttctctgcctcagagcctcacagattacgaggttccagtaggccctcagatgtcagatgtggagtctcactagtttgctgcacagctgactggagttctttcttttaatggtgtgagcatatggctttctttgctagatggaaaccacattcacaaagagcctgtagcttttagaaatgaagactgatgggagcaaagggttttttcgtgttccctgcctcctctccctacctggttctattctgaatctggtcattcagcaggcacctgtgaccctcttcatatctgccactggcaccacagagctgaagaacattgaccctgaatgtcgtttttgacatcataatctgacttctttgttttcaggtgaggggctgagcttggggacaataaggtgctttttagaattagcatagtaggaagtcagatgacttcatgaatagaagattggactgggagttcgggccaatttagacttgacccagcactgtaaccttgggagaaccatgtctctccaggtctcagttttctcatctgtgcaatgagggaactggaccaagtcacctctgccttctacatgatctctgaggttgcagatctctgagatagcttggacagtggtcatcagctccaactgccaaagtgtgagtcttcttattatccacagaaggctcatggttatgctgtccagtgagctggtacagatacaaggatgaggcacatgtttaaagacactttctttggcagtatcttcctagtagtggtaattattgaaagatttaatggcacagatttttttatcaactatggccaaccccagtctgtctctttgccatcttcatggcacctggccttaaaaaataacttgcaaagaatggagatcaggtgccccagtaccaaggtaccaacctctagccagactggagcaaatgggaatgctgcccaaaccccagaagcctgcccatgtaattggttttcctgcgtggcttattttaagcaagctcctgcctggggttgggaaggtctctcggacagactaaagtgatctcacaggtaaatcttaatccataatgcagtttgtccatgtgtttgtcaaaactagtcagcattagggaactctacatgacaacttctgggctccttggctgtagatggctagtatcagcattgaattgtgtcccaggagtgaatgaaggctccttggcttttctcaaagcacatccttgacaaaaactgccaactaccactgtagttaaaagcataagctgaaaatgaaggcagtcagtccctccattccacttcatttcaggaaattccaaaaataaaaggtgagctttgttcccagagggctgagagtgaatcctataactggctcctctgtggaaaccagctcggaattggaagccagccagctgcccctttcccatctgggcagcatgcaagacgaagcctgaagggaagaagggccactaattcaaagatgcttttgcatattggattccttgtgctctgtcttggctgacccagccatgtgacagcaaggtttgagctggttcatagagctctgttgcactttaatggttaaggattgaccaaactcaggcagtgtgtgcaaggaaggaaatgaagccattgccaaatttgatgtgccttggatctatagactgcacccccaattccatttctctcactacttcttagtctgtctcttggttcatgagtcctgatacattgctcacccagtagcaatatccctgtggaactgtgcctttgacagtgtgatgactgtagaagccacttcagagtggcttttctcctagtgctggcccgtgatttcataactgaacgtcccagatgggcaccacctgttgttacaccttcccccttctccccctagtctgtttccggaatctgactgcggttagcacacaccctgagtttaaaatgcactctctaagctggcttagaaggtagtgcattaacttctttttaggaccatttattgggtacttctatgtgtatggcattttaaacaaagttagataatgcagcccatgctgtttagaaacttacaacttgaaacagatcacaattggtgggttagttccctgggaacaggtcagtgaggaggaagataaaaaatctcagctgttaaaggacatcagaattcacttaatccaatcccttattttatagatggcaaaatggaagcaagacaccttgaataggtcagttgcacaatgcactagtggcagagcttcctggacctactttaaccatgtgcctctggtccactttctataggatgtgagactcaatctaggctgccccctgtgggcttttacacaaaggtagaagatatttgtttgatccta

SEQ ID NO: 65113 - DNA, 1084 bp, Homo sapiens
aattattatggctgcaaaagtggggcttgtaaagaagaatccctagggaaagcgatttgaacttttcttagcatggaggagagagctgtgttgactcaaagtaaacagggggagaaaagcaacttccatcttcagcagaagtgccaactgaattggatgccccctccccatgccctactccttttctttcactttggcatccctggtgtttagttatgtgtgcttggggcccttcggaaatctctttaaccccatgaatcagtgatcatggcattggtgtgacttgaacaggcaggtgcttggtgctgagaaaaggaagctggcagcacatttcatggcatctgcccaggcccacaaaacaaacagaagttatggctcacatactgtgttgctgctctgggctctataaaactgtaatagtatcatattattttaatctgctgaaatacaaatcccagagtagagagaacacagcagcagcattacacgtctgagaaaatgtttgacatggattcatttgtctgcagctattatgacgatgcctgcggtcgattagctctgttggttacaacacagtgttaatgaagccaaggttgtgggtttgagagccctgttaggtgagctggtttcacacaaatgaaagctcttttcatgatcccagaccacgcccaagacctaggtcagacattccataaaaacacggagatggtcacagtgaggactgggcaagacagtgcagtgtctcaccaaaaatgcccctttacctgcttctggaaaaacaagtcacaacatgtgctttagtggggaattaggactgtggtcttcacacagaatggatatcacgttattattcatggtaactgctggtcagtactgctgcaggcttccttcctgaattaaggaatatactggctctggtaaatattttctctgaagaaaagagaaggatttttggtccccttcattcttggctttttactcactgagattctgcccattcgtgtgttagacaactgtgtgtggaatgttgttgcataccaggcactgttctttgtgcgtggaataccacagtgtataaaacagt

SEQ ID NO: 65114 - DNA, 1034 bp, Homo sapiens
agtagctgggactacaggtgcacgccgccatgtccggctaattttttttttgtattttagtagagacggcatttcaccatgttgcccaggctggtcttgaactcctgagctcaggcagtccacccgcttcggcctcccaaagtgctaagattacaggtgtgagccactgtgcctggccccaaatttgctttttaacatgcttcaacatgtttttagctgtggctgcttactctggacagtaatgcccagtgtctctatgcttcttagcctagacttagttatctagctttctttcccttccatctcttcactgtttatttatcttcactaggttgggatagcagcttcccctgagtttgctagggagatcgctagttaaggtttgagagtgtagtggggagtcagggaaaaagattcagagtatgagggacgattcaatttttttcttgactcaagggaattgcaaaatagcttggcatcctcaagagcatggtgctgctcatagcatttgccattagctggaaagaggagaaagagcgcctgttggaactaaggttacggtgaaagttatgggaagctgtatttcatcgcccttatggctacaagaacaaatggtgtttatacaaggaccttggcagtgagaaaacagtcattaaacaggaattaaggagcttgtcatcaccacttctttccagttacagaaggcaaaagccctccaagccttttttattgggcccttgtgagttctgccgttggctgagccagacagagttgaatggaggaatggcgaggtgtgtgtgtgtgtgtgtgcacgcgcatgcaacatctcagcttacaacacaaaagaatgcagtgtggtgtcacaagcatgattttattgtccttgacactgacagccaggtatgtttttgtcctcctctggcaggtaaccccacgaaagaaattcaagtgtcctgagtgcacagccatagatgggctttcactagaccaaacacacatggtggagaggtaagtgagcctccaaccaaaagtgc

SEQ ID NO: 65115 - DNA, 2611 bp, Homo sapiens
ataagtacatttgtatcatctaattaagacttttgcctcagaagccagaatgcctgctttggctctagctttttctagttatttgacctttgaacatgttatttatcctctctgtatctcagtcttcccattataaaatgggaatgatagtcctaccccatagggttgttgtgaggattaaatgcattattaatgcatagaaagcaattttaacacagcttggaacatacagtaaatggtagttgttgctttgtggtgttggtggacatgatgatgttatgagttaaaagctcaaaatgaaataataacaaatttttttagaaacataatgaccaagagagaagtttgttctttttgtagtgctctcagatgtcctgggcccgactgaggcaagagtgttgacctttctgaaatccatccttgaggtccccttgacttcaaaagcagcttttccaggcgttttccctctggcctaatgctgaagcgtcctcattacccagctgtcacactcagttggcctgattgaccagagccattcccgaacacatgcctgacctgctcacctctgagaaggctgactttgggggtgaggtggagatagggagacagcctctcccctcctctggcggtgctgtgctgcactggcactgaagtagttgttgctaaaagttctgacatgggagtgacaaaaatgatgaaaattatgaaggctgtcctatgtgaacttcagctttcacagaagattgtgcagattgacataattcccagaaattgccacttacaggccctctgtcaatgttggttgaatgaatgaagtgtttattgtttgaaatttggccctgtcacctttttttttttttttttttttttttgcctttcatcattttgtgagcaagatctctcctctgccttttaaacttcagtaaactgaagctcagatccaagtagttttttttctttccatcctttgccttctcttagctggcagagatggggttaagaattgttggcagctaatccaccttggtttgaggccctctcacactgagctggaggaatgactggaatttgagggggaggggaaaagatactctgacctttgcaggcccgtggcctccaagcagcatctcctgttcacgttctcccactgaactaatagtccaagtacccccagttcaccgcttttttccacacctgtcaacctttttaagaacctgggagcagactgtggctacttgagctttttttgttgatgttgaacattatgtattttgctgttatctctcaacctcttgaacatactatcttttctccctgcccccatccttctcattctgctcaaacccctcctccccacctcctctccaaatcccacaggtcagagtgcatcaacaagtttgcttcagtcttcgggaccatgcctctcaaggtggtggaacaccgagctgaccctgtcctgtacaaagatgactttcctgagaagctgaagagcttccccaacattggcagcttatgaaacgtgtcattggtggaggtctgaatgtgaggctgggacagagggagagaacaaggcctcccagcactctgatgtcagagtagtaggttaagggtggaaggttgacctacttggatcttggcatgcacccacctaacccactttctcaagaacaagaacctagaatgaatatccaagcacctcgagctatgcaacctctgttcttgtatttcttatgatctctgatgggttcttctcgaaaatgccaagtggaagactttgtggcatgctccagatttaaatccagctgaggctccctttgttttcagttccatgtaacaatctggaaggaaacttcacggacaggaagactgctggagaagagaagcgtgttagcccatttgaggtctggggaatcatgtaaagggtacccagacctcacttttagttatttacatcaatgagttctttcagggaaccaaacccagaattcggtgcaaaagccaaacatcttggtgggatttgataaatgccttgggacctggagtgctgggcttgtgcacaggaagagcaccagccgctgagtcaggatcctgtcagttccatgagctattcctctttggtttggctttttgatatgattaaaattattttttattcctttttctactgtgtcttaaacaccaattcctgatagtccaaggaaccacctttctcccttgatatatttaactccgtctttggcctgacaacagtcttctgcccatgtctgggaacacacgccaggaggaatgtctgataccctctgcatcaagcgtaagaaggtcccaaatcataaccattttaagaacagatgactcagaaacctccagaggaatctgtttgcttcctgattagatccagtcaatgttttaaaggtattgtcagagaaaaacagagggtctgtactagccatgcaaggagtcgctctagctggtacccgtaaaagttgtgggaattgtgacccccatcccaaggggatgccaaaatttctctcattcttttggtataaacttaacattagccagggaggttctggctaacgttaaatgctgctatacaactgctttgcaacag

SEQ ID NO: 65116 - DNA, 1007 bp, Homo sapiens
ccctccgcccaacccaggaggcctttctgtgtccacgaccctgagcatagtgggcctggccctactccatgacaggaatcaagggagaaggtagaaaaggcgagcgcttcaatgcggggcgctgcctgctggagggaccccccacctggggtctgacaggcctgcctctggacggttactgtgtactcccagctgaggtgagggctggggctcagggccagacccaagctacaggggtcgggcaggcaggcacagagccccgcttcctggaggcaggaagcctggtttcaggagggcatcctgacagccccatttgcaatagcaaagccacaccgaggagcccaggccaggagcccttccgcaggctggagagagggcagagagtcctggtccctgtggaagaagtgtaaggacggagtgtggaaagctgtgtggagaagagcaacacctcctagtgcctggagggacacagagcccccatctgccgtggaaggctctgggcagcgatgacactgacagatatggcagggaggacagtcagtttgaggccatagcagggcctggaggccgagcatggccacacgtcctctagcaaagcctgcacgcagcttttgaccctctgccacccggcccccaagctctagcttatgtgttccgaagttgtgagtccttccatgccgggacactgctgagcagccccagggaggggccagggtagggcagggaagagacgagcccctccgcatcctcctggagggaacctgactgggctctggatggagaacaaagctgcccagacctccccgctgtaccagatgccaggcaggccggagagcgggaggactgcccgggcccacgccccacccggatgcctccccctctcccaggacctttccttcttctagcaccatgggagcccttgtggcatctgtgttctcagcctccctcaggtctggctcctcccctatagtgtccagtgaggggctggcccgtgtctcccctgggga

SEQ ID NO: 65117 - DNA, 1110 bp, Homo sapiens
cctagacaatcacacacagttttgccacagttttccaaaaggttcatggctctctaaggcttattggtccagattcacaatgccttcctccctgcatcctgtctgcagccttcttgttggagacagtctcccagctcagaactcccctgtgttaaagggagaacaggggctctgctgggcaacagaggcagtcagggaagacttcctggaggagggacaggagctgggccttgaatggttggctgaaaggaggaaagccaaggcctaggtttagaaacagcaaggcatactccaaaaacctaaagaggtcaatttgaaggaagcggtgggagagaaagaaacagagtcagatcgcagggggccttgactgccaagtgaagggtttttcccttggtgctgtctgtagaggcagttgctataaaatcttgtgtagaagcgtggcctgatggtgagaggaagtggaggccaacccgtcactgagcacaagtggatgggatgttggcctgattgggagcccaacgggggaggggaggtctctgagtcagctgtgagcactggggtttttggtgacggggagtattgggtccttttcctttgcacgagcatttctggaaggctgagaactttcccaaggctcaagagcaagagctgccctacccctggcccatgacttaggatctggagaaggggtgatggggacggggtgggtgagagagggagagtgaggagggatcagcttccaggccaggaatggctttaggctgattcagagatggaccgtggtgctcctcagagggaggcctctgccagcttgatgtgcacttgtctgctggctttgcagactcagatgcaagtgggcacacctcagacagcacgctgcagaccgggagaacagagccatgacaatagcctcagctgcagagccataaggagccttgccaggcccttccaggcccaggcatcaagaaagccaactttcctgaggtccagtccctgctctccaggtggaaacatttctccatccatcacgaccaatgcagctgctgagctaaatataggagtcagctctcaaaattcctctgcctcagagcctttgagcttcctaggaac

SEQ ID NO: 65118 - DNA, 1091 bp, Homo sapiens
tctcccggtctgaatgtcatacctcaggaccaccccagcctgggcccactcagcacaggcctctcccgaggaccgggctgtgcaaggaaccaactgtcttggcggaggcctcgctaaccgcagcccatctggggccagggcggggtggcccagggcggggaggcctctgtcttattgtcttcagacaccagctgcagagattggaatcccagacagcagagagaggcccctgcagccccctggagcagggccaaaccctaggcttcttcccaggaaaagtccatcttggggcccccattgccccgtccctgtccccaccaccactctacgccaggcacctggcttgccaccagctgagtatgggccctgaacaaacacagcagaggcaggcagggggttccatcaccacccccttacccccccagggcactgccaggcttagggctcaacccagaggtctgacgcacatgaagatcccacccaccctgctgcctttatacaaagaaaagcctctgaacaatctggcatgtgtccttgtacagcaaactaaagtcaaagaagcactaggctgcgactcaggagtcccggattccagtcgcagtgctgctactgagtggctgctgttaacttcaggttatgacttcccacctatgggcctcttcttcctcgtctatcaaatgggaagatggggtgatcatttccagcactaccgttctatagttctgtggtcctcccactaggtgataagatatgcagcacgtcagagtttccctttctgccttggctgccaggaagctccaagttgaagtttgtgctcaatggcaaccatgaaccttagcctaaatttttttttaccacattacctctgcatttcatgccattgttcttgtttttagattgaacaaataaatctttaattgtaagctacctcaactccattttggaagtaggtataagtgtgtgtgtgtgcgcgcgcatgtgtgtgtgcagagaacactctgttttagttgtatggtggcaactgaaaaatgctctgtgcgcctttgttttcatgttttgtactcaaggcgtcattcttctttcagtactta

SEQ ID NO: 65119 - DNA, 1035 bp, Homo sapiens
ccacacctatgcttggtactttgcctgcctcatcccatttagtccttgtgatagccctgtgagttggggattttaattatccccatttacagatgaggaaactgaggctagttccttgatggaggttgctcagctggtaggcggcagggctgggattgtaacccagtagcctgactttaaaccctgcactgtgaactgtctgccgtccattctccttgtgccctgcacacctgcgctccttcaacttgaacttccttcctactctgctttgtatttttgctggtcctggttttgatttttctgctgtacttgtagtttatgatggttcggctgggaccaggggcctggaagtggcatatctcagtctctgtcctggggaggtcctccctctgccaggagggcagcctgcctagggtgagccgtgagcacaagcagtctgtcccctgccttgcccaggtgaagtgctgcggctgggtcagcttctacaactggacagacaacgctgagctcatgaatcgccctgaggtcacctacccctgttcctgcgaagtcaagggggaagaggacaacagcctttctgtgaggaagggcttctgcgaggcccccggcaacaggacccagagtggcaaccaccctgaggactggcctgtgtaccaggaggtgtgcggggggctgcggatcgggggcggggctccgagggcgttgggggccatctgggctactgctcagcaattccttcctgcatttagttccttcccttaattcatctgtcatttgtaccttcatctacttctttgttaatgtatttattcaaggaacaggcagagccctctgtaggggcttccgggctgggactggggggctctcggtggttctgcatggcggggtgggatggtgcagagcggggtgatgtgaccgcattctgcccttgcagggctgcatggagaaggtgcaggcgtggctgcaggagaacctgggcatcatcctcggcgtgggcgtgggtgtggccatcatcgaggtctgagccccctcccc

SEQ ID NO: 65120 - DNA, 1028 bp, Homo sapiens
cagctccaagatggtggggacagtggagggacccatgtttggggagagtcatggcggaggcatggggcacaagtgagtctttcactcactacccattgattgagggcctgacacattccagtccctactaggtgttaaaagttattcactggtctatgaaaccaagtttctgtcctctaggaattcagcctagtaagaaaagggagtgtatgcagaccacaacacaagtgagtgttcgtggatgtaaacagggcaggagcaaaattcacacaggcagataaggcttttcagaagacaagtcgacagagaagccaagaaaggatttactgaggtggccttgaaggactggggctgggaagatgacattttgggtggagggacagcatttgccagtgcttagatgtgggaaagcatgggttgggggggcattttttcagcaaagaaggtatcctcccttcgggtggggattctgggaacatgtacaggagtagggaaacattaaatcagagagggaggttgaggccagagtacagaagttcttgaatgctgaatttggatttaattgttctgtcattaggagtctgaaggttttggaccaggccagtggtctggagatatggctctgagagagggtagaggagggattgaagaagtgagagactggaacaagttgtctactgcaaggatccaaggagtagaagctgccgccctggagtggagcaggggacactggggtggagacgaggggctgatgcaggaggtagcaggacaactctataggactttggaatgaattggatggggcaagaacagaaatgctctgagtctctgtgtatttgagctgagatgcttagattattgaggctactaagaaaaatggtgggaactcaaaggatagaggaaaagctagtgagaggggccagagagatgataaactcagcttagggcaaaaatgttatgattcttactccgtcagccttccaacatgaaaaccccattccagcagtattctctcagcacttggatgg

SEQ ID NO: 65121 - DNA, 1049 bp, Homo sapiens
caacacttcattgagcacttactgtgtgcctgggcctctgagaggcacgtggggtcctattggataggatgctcagggtccctgctctcggcagctcaggtcttcaggctgaggccttggggaaaatcccaccccagcttcccatggcacccgaagctttgttcaaccctcccttgccatcttgggcctaaggcctgggtgaaatgccagagcatccactaaaatggactggtccagtgttgcacatggaccttatggggtggattgccaagtcccagttcagcatcaggaaaactaagtgtttcacggggaagatgggcttgccctgggtgccaatggcaaggtcctgtttcatttttcacccccctttgatgcttctttggatcctgaactgcaaagggttttgattatttctggaggacgccaagcctgtacatggaaggtgctgggggtccagtctgcccctgtgtttgcctggcggtctccttgtgggtatctcaccctctctggtctctggcagccagcagagcctgccatgtggggcatcagccagaggttggtgaatggatggatgggtggaaggatcacagtggatttactggaatcggtgttgtcccagcctcagccggggtggttggacataccaatctcttggcttgtttttctgtgacaatttgattttggctcccgtggaatataaggaattttcaagtagtggaatggactcaaaacaaatggcttttgagctgattaagtttctcagtttgatttcagggaggcagcctggtgtgtaccctgatttaaggacagagcttgcaaacgccagctctgaggctgggtgaccttgggcgtgttattgagtctctctcaaattctcaactctcatctagaaaatggtagcactaatggcatcatagggctgcgatgagctttaaattaaataatgagtgttaaaacagttgcagagctctgggcacgtggtaaatgctcaagaaaggatgatgatggtgtatttaatgaacacccttaagctatttgttgcatcttct

SEQ ID NO: 65122 - DNA, 2334 bp, Homo sapiens
gagcaaagtcagggagacggccacaccagcgctccgggctaggggggcagcgctgggacacatcccctcctctgaccctgtggccttgctggactctctcccacagtggtcactgccacgctagctgagacgggcctcatgtccctggggatcctgctgctcctggtcagccgcctcctttttgtcgtcatcagcatttactactattaccaagtcggccgaagacccaagaaggcctagttgcccgctgggcctggggccctgcccatgcctgggccagagtggcgctggggcctcggcttccctttggctcctggaaggcaggagggtcccctgccctgccccagtcctgccccagggaggcagggggtggggggccttcctttcctcctgggcaccccgtgtgctgtgatctcctgggctttcaggcttgacatgctggtctggggagagacagggcctctgctgccctgttcttcaccctcacagtgatacctcctttccttgggtctcttggcctccagaccccctcaatagacactgactaaagtcaggctggagtcatgagggtagtgggctaagtcgagggtccagcctcttctgccaggaagcccttcttgcttttgagagaggctgtgaccaccccccatccttctccctacactcccagccaacctagtgcccaagcagctaaacttggcttccttctaatcctggaaaaccctgtacccctcctcctcaatctggccctctccacatgcacaccctgaaaacacacacagacacacaacacacacacatacacacccctgaacacacacacagacacacatacacccatgatgtgagcaaacacacacacgtgcgccttcatagcccagccaagggcatgcaggcagggtgtgctgcctgagatggcacctccctttcagccattcttcaagaatgggccacacacagctagaagtcctctcccagctagaagtcctgtccccactctcctggcctgacaagatgagctctcctgggaccttgctctagggcactctgcctctaccctaggacactggaatgccctgggagccccctccctgcaaccagcctgagttcagccccacggacaaagggacacacagcccccaatggagaccattgtaagtggtggggctgggagaggaggaacagaaggaaagccatagcgctctcttgccccttggcatgtaccccaaggcctgatggccactgggctcagcctgtcccccactcctgcctgcttcccggtgagctgccccccacacgtgcagcccgggctgcctccagggtctggctgagtgggatcaggtggccctccaactcagcacaggaaataagtagaaacatttcagcaggccacctcccctcatcttccccgccctgtccagcgccctggcaaaggctgacaactggctgtcttggggccgaacagcccctgccctgcctctgagggcccaccagcctgtgctgcatacccaccgcccagcttctccctgagggcccaccagcctgtgctgcatacccaccgcccagcttctccctgagggcccaccagcctgtgctgtacaccccgttagtccctgatcccaaccttctccctcctgccagcacaccgatgcacacaccggaagtggcgagcccaagccctggggacaggtgtagggagaaaagcagccccaggcctcagactcgcttcccatcctggcatagagtgggggatggctggagggtgtctataggtacagcccgctctggctgctgccaggtgggcccctgccaggggtcctcacccctgtccaccctgtgcctggctgtccctgcacccagatacagcaacatggcctgtacccagcagagtggtggcaccaccatggttacagcggatgccccgagactctgcttggtaaacgtggcagagcagaatgggaggctggaccctgaggaagggcccctctcctggcatctgtctcttgctacctaagcctgtgcctctccctaaagagctgcctccctgctgccgagccctggtctggccacgagccaccactgcctcccgctgctgcccacaggtggtgccgccaatgggcagtgccctcaggccgaagcctcaatcccccatctgagccaggcctaatcctctaatagtgatggttggtttgtcctcccataactgcaggtggattccacctggggaatgaggctgcgtgtcgggcgtctgctggccctgagacatccagtcttccacactcaactgtgggatgggagggtggcgtggccttaccccatgaggctgtccaggct

SEQ ID NO: 65123 - DNA, 1051 bp, Homo sapiens
cccctgccccaggcttggacagaccctccccttttctaaacctcatttgccccatgaatccaggctcctttcctccccatccccccaggaagcttggatgtggccgccatccagacccaaatgccctctcctgggccctatgcctccagggctggctctaaggcaccatgcaacctgtcagatggggtgtgctgtgtccacctacagcagaccagctcccagagcctcaggggcctggagagcatttcctcaacccatttgacaaggaagccagctgtactccccctactgccctgggctcgtggggaggcctcagcaggcctggtgtggggtgtggccttccgctagtcaggccccttcccctagggtctggaagctgggtaggaactgtggcctgaggccggtgtctcccctcagcccttctgcagaggccgggctggaggagaagatggcggccaagcagcccccgcctctgatgaagaagcacagccagacggacctcgtgagccgcctgaagacccgcaagatcctcggcgtgggcggggaggatgacgacggggaggtgcatcgctccaaggtggggtgcagagcaggggcctccggcacccactggggaggccaggctgacccaccattaggggagaaggttagcccaggcccaggtagccgcaggagttctaggacttagctgattttcctagaaatgtaacagcaatgccaggggaataacgagatcattagaattaagtgcctattacgtgcccggttttccagcagttgctttttaaatcttcttgttggcactagaagatgcagatactgtaaaatcattcacccattttatagatgaggaaacaaaggctcagagaggttaggcaacttgcccaaggccacaccggtaagtggcaggaccaggcttcaagtctgcatttggcagagccctgagctttcatacgtcaccatcatattttcagcttcttttaaatcctagtgtcaaggggaagcaggagagggggtggcctcatgtgaccctccccacctgggggaacct

SEQ ID NO: 65124 - DNA, 1035 bp, Homo sapiens
ctgctcaatgacaggagccagcctcaaaaggttctacgctttatcattccacttacatggcatatttgaaaacacaaaagccatagtgtcagagaatagatcagtggttgccagggtggaggtgtgaggggagggagtggccagcgccagggagtttttggggtgatggaactgctcgttgtcttgatctggagctggtggctacaaaaatctatacgtgtgctaacattcaaataactgcacaactgaagcccgtcaattttgctgtatgtattaaaagataaaaggccatggggaggctggaagaggaagggcgtgggccaggcaacatccttggctgaggaacaggtgaaggacccggttctcaccagtggcttagtgactttcagggcagcctcgcctggccacgggagggacgtggctaattgtagcttctatctgggttcaccagaaggcagtggctagcagctgaggtgtcaggacggcgtcctgggccctccaggagccgggtgatgaaaggttaggccctggcttccctggcagggtagggttggcctcctgtcctgatggctggcacacaccgaagcattaaccgggagtctcttgtgtgccgggtgtgggactgccgtcacagttaccacccgccgctgtctcctttcaccatggggcctgtgtgtggggaggagaaaggcgtatccactcctttttgtggatgaggaactaaagccagggggcgtaggagggtagtttggcctggaaatgacatcacactcactaaagaccgccaatagcaacttttgcagttttttttcccaatgcgacatggtatactgcctccctagttgatccggtctacagccacattattcacagaccccacagtttgaaactgtgttctgatatttgttcgggtgctttattttaagacaccaggaggctcaaaaatgggaggtgacccggggacatccccgcactctgcctctggcagccctggctggggcaggagggtgagatttgcctggggccacagggcac

SEQ ID NO: 65125 - DNA, 1050 bp, Homo sapiens
tctcccctgcgcgctctcccctcgccgcccctccctctgactcggtttcccctctcccccggctccgcggtcgccctcctcctggactgcttatttcgtcctcggccactgcctctcgggctcgagctttctgcttcagagcaggagagaaacggagcgaaagcagtttctgtctccccggggtctgactcggtcccccgcgctcggttctctgtcccctccccctcccgccattgttcccggcaggaggagtgcgcggcgcaaacttgcgagttcccccagtctttgcccccgcagggccgcggacggaggtggtggcggagttcccgctgcccacaagtctggcccgaccttctggggtgggggcctgggggcaggggccctgggccggagaacccggggccgcctaacggctcggagctcaccgccgggggacaccggcgctgaggcctgggtctcagaaagtgggtgagtgtctggagcggggacatcagggacagattgcagggggaggggcgaggctgagagagtcccccgtccccaggctggaaaggggcgggcagaaacccaggccgcgccttagcccagttagggggtgggtaggggacgcacaggtggagacgccccccactctccccaaagtcgcgcgatctgcaggaagggtacagtgtggggccactggccgggcgctgggtgggttagggcccctgccgtgggcagaacactcgcacctacccgggggaggctgtgtggaggaagggccagaacgccgcgcccaccccggcgcgccccgctgggcggggcggggcggggcgctcgccttgggtcccctcgctctaccttccttcgccctgacccagtctcgggcttccgcctcttcctggagcccggggggagtgggtttctccgccggagagatggaggctggggcaagagcagcgcggaggccaagaacccccaggctcctccaaagcccagagcggctggccaaggccccctcaccgccccactaccctgcacttcctgattggtttctttcaaacaaacttc

SEQ ID NO: 65126 - DNA, 1102 bp, Homo sapiens
tcactgagcaagtaaatatggaaccgcccccacaatgtcagctttcccggagtggcttctcccactatctctcactttccccaagggaaaggggtgagggccaggaaaggatctggctgcccgatgccaggggatggagatggccggcttgggaggctccacgatggccaaggggcatggggaggagcccaccagaccctcagccccagaaggaagtgagcttctcttgggagcagccaactgggacccagccagggcggactcagcaccgtcatggcccaaggtacagagagggcgggctctgggggttgccgggaggtggttggctggggcttgtccctgacctcacagccctttactgttccaacccaaacagagtgtcattttcccaggggccaggggtgcccctctttaggccggctgtgttccaagagaaagaaagaccagccagagggggtttgcatttggagagggggtgcaggggtgcctcaaggaggggtggagagggaggaaggaaaagccccttagcctgagggaggcagagggcagggaggtgaagtcctcaagggaaatcagcaagcttagcagccagggaaaccggcagtctctcttgaccccagagaggagatattgggtctccagaagagcaagcagaaaaggaggatccagggcagagtgtctggctgccagaccctgggccttttataaacatcagcgacagccgagcccaaatgagtgtggacgggcatgttccattcaaccctcatagctgtcccatgatgctagtgttattaggtgcagtttacagaggtaacattgaggcccagagaagtgaggtgactcacctaaggtcacacagctatgaaaggctgagccaggatatgaacctaggtctgtctgattccagagtctgagctctttatcacagcatgggactggcttgctgggactgcagtgggagataaggtcagccatccatgctgggcaggagtttggatggctaacttacagattccaagttccttcccctgagatgatgggcagtgtaaagaaagtacagcatatgagccactgtggctcaggcaggtcaccctctctgtgc

SEQ ID NO: 65127 - DNA, 1054 bp, Homo sapiens
tcaacatgcctcattaactaggtctccagagtctttttaagcagtaaaaagaaggaaattctgccatttgcaacaacatgggtaaacctggagtacattatgctaagtgaagtaagccagacacgggacaaatactacctgataccagttataggaggaatctgaaatagtcaaattcatagagacagagagtagaatggtggtttccagtggctgggaaagagggaaatagggaaatattagtccaagggtataaagtttcagttatgcaagatgagtaagtcccagagatctactgtacagcatagagcctatagtttactgtattgcatgcttaaaaatttgctaaaagggtagatcttatgttaagtattatcacaataataataataataagagcaggaggaatcttttggaggtaatggatatgtttatatcatagtttgtggcgacggtttgacaggtgtacacttatttccaaactcatcaagttagatatgttaaatacatacagctttttgtatgccagtcatacctcaaaaagcggtctaaaccgaaaagaaatttgaaaaaaggacgagttcatgtcctttgtagggacatggatgaagttggaaaccatcattctgagcaaactatcgcaaggacagaaaaccaaacactgcatgttctcactcataggtgggaattgaacaatgagaacacttggacacggggtggggaacatcacacaccagggcctgtcgtggggtgcggggaagggggagggatagcattaggagatatacctaatgtaaatgacgagttaacgggtgcagcacaccaacatggcacatgtatacatatgtaacaaacctgcatgttgtgcacatgtaccctagaacttaaagtataataataataataaaaggaagttttggattaataaaaggaagttctcatttccttatcagttaaattagggcagatgggttaaatcatggttcttgagcttttttgaatcacctaggaagttatactcacgtgccaatgttcacaaaatgttgcacacatt

SEQ ID NO: 65128 - DNA, 1078 bp, Homo sapiens
atacattgtatttcaaatgctaagtttcagaacaacaaatacaacaaaatctgaataagcattgatctgcctttgaaaatactttgtgatttatacaacgccttgaggttagctttccaaatattgattcttgatggatagaaaaagaccagaagatggaaagttaaattgacttgagtctttctaaaccttttgacacaccctagaagttgctcttttgaataaataaatcccagataggaatgtatttctcatctagctttttctcttgatgtcaagtgtcagagaaataattctagcttttagaggttggtggttgtttagaaactggaagaaaaaaaggagaagacagtattctccaatcatagtgctatgattcaagtgagtcttgtgagaaaaaagacgaatgaatggtttcccttttgtatctgggagcaggaaagtttggaacaacttctattctgtgctaaccgcaaggttgattatttttggatgtcaaatcctagactctcactaaattggggactggaaatattttgcatattcagaagaaatctcagctatggagaaaagactgactcacagttgtagaattgagattgggaattattaatttggagtgacttctctcactccaaattaaaggaaaaggggctcttttcctttctcttaagtcctttgttaataacatcctggctgggtgcgtggaaatcaccctgtggtcttcactactcagggatagcgatgcttatatccgatgtgataagaacaccgatgtgttggggctaacagagaacacagacctaggacaagatgcaaattctggcggatctaagcaccgtaaatcttgcaagttctacacctccatggtggagcctgtggcttgcttctctcaaaaggttgaagcagccaaagccagcatttgctctcccatctgccttggtcttactccttctgaggtcttgcagcatcctgttgccagaatggattgttccctggactccagtgatcctccttggaaggcaacagcctcctcccaggctctccagatgagcaaggcaggatatagatgaggggc

SEQ ID NO: 65129 - DNA, 1061 bp, Homo sapiens
tcatttgtttattatccatctgaattcttctgtgaatttttgtttcccctggacttttccagatataattcattgggctacaccaatcagacagactttgatttttgtcccttgtttttgagacaaaccataacataaagaagtttattttttactacaaatttcctaggtgcttgtgtagctcagaaccctaaaacgtcaactaatttcctcttgccctctgatctgtacaccttcactcctcggcaggtgttccctcatcccaccttttggaggtgggtagggtggtgggctggatgtcgcacatgttgtttcagtgagaatgggcgagggccatagattctgagggtttgacagaactttaaaggttttctgggcattgccgagttggtgctttacatgcccacataggagccatgagttacagtgggaaacgtgcataggactcaaagctccatctcccatttattagctgtgtgactttgggcaagttgcttggcctctctgagcctcagtctccttaccttaaaatcatttagtaagattaaccagtggttgtcaaccttttgtagtctgttatttaccttcctcccctgtccccactggagcccccattttttaaaagattttgatctttagcatttattaattgatctcttggacaccttgtcacaggggctatttcagcaaggctttgtgaaatactggaaacagttgaaggaccccagccttaccaccttcagaggcctgtgggtatctgggaaccccagtggttaaaagttagtgaagagtagaagagataacctttcagtttttcaatcacttataatatttagttgatatattttccatatggtgtgaggcaggcagggcaggtgtcatatccagtctcagaaaacagagattcttagaggtttggagatctgcttgaggtcccacaacacggtgacgttgggacagggatgggttctggctggtgctgcttctccggacagggcagctgctctgctgatgttcacatgggcccacgtgcctgtggacttctaaccatccacacttgc

SEQ ID NO: 65130 - DNA, 1056 bp, Homo sapiens
ggaggatgatgaccaggaagtcgattcagcagatgaatctgtctccaatgatatgatgacagcgacggatgagccctccaagatgtcatcggccaccgggcgccgaatccggcgctttaagcaggaatggctgaagaagttctggttcctgcggtactccccaaccctcaatgagatgtggtgccacgtctgccgccagtacacggtgcagtcctcacgcacctcggccttcatcattggctccaagcagtttaagattcacaccatcaaacttcacagccagagcaacctgcacaagaagtgcctgcaactgtacaagctccgcatgcacccggagaagacagaggagatgtgtcgcaacatgaccctgctcttcaacaccgcctaccacctggccttggagggcaggccctacctggacttccggcccctggcggagctgctgaggaagtgtgagctcaaggtggtggaccagtacatgaatgagggagactgccagatcctcatccatcacatcgcccgggccctgcgggaagacctggtggagcgcatccgccagtcaccttgcctcagcgtcatcctggatgggcagagcgacgacctgctggccgacacggtggctgtctatgttcagtacaccagcagtgatgggcccccggccacagagttcctgtccctgcaggagctgggattctctagcacagaaagctatctccaggcacttgaccgggccttctcggccttgggcatccggttgcaggatgaaaagccaactgttggcttgggtgtagatggagccaacatcacagccagcctccgtgccagcatgttcatgaccatccgcaagacgctgccctggctgctgtgcctgcccttcatggtgcaccggccccacctggagatcctggatgccatcagcgggaaggagctcccatgcctggaggagctggagaacaacctgaagcagctgctgagcttctaccgctactcaccgcgcctcatgtgcgagctgcggtccacggcggccaccctttgtgaggagacagagttcctggg

SEQ ID NO: 65131 - DNA, 1054 bp, Homo sapiens
agaaattcatgacaatgagtattactatttgcctaatggcaactcattgctctccatgtaaatgtaatcaacagatgaagagaatataattgctctgcttttccactaaaactccatcttagtgaattttaaattatccagagatgtcaaactgccaaataaaaatatttcagtagtctttgcatcagcttaccttgtaccagaaacatttccaatttactatcaaattatagtaactgagcctgtgtgaagtatctcatcattttcgaaaggaacaccttgtgtgatgccagtgagcatttctaaaaagggtgtgaggtagaggtaaaaataaggtgagagaccatttcagaatgcactgttgctcaaaaaggtgatctggttctttcttcagagatttctacggggatagaaaatcgggagtctgccctcattaatctgtgattccacctcttgcaccaaatcaatatctatttgttgagcacttattgattaagaccttgcatatgtctgtccattttgatttgagatacaactttttgtgtgggttgaatgacaaatcactccaaacaaagctgggcacagagaatcagctaggagaccagttattcagggtccatttctcttggatgtaaaggagtcctgggtaaaatgtggctgtaacctaaaccaactagtccttgtgatttgtttctgccctctgtgtttcctgttgtcaaatgctaagtgtgtgttttgcagtcatgaactaaagcacaaaaagatgcatgagacattgtagtcatatgtctggtgtgacactttggagcaaaaaccttgcagtggtaaataaaaaatttccaacagggtcagctgcctggtgttttctttttttccgttttacctaatattttggcatataaaatgcagaagaaatcatctgataagcacttatgagccactgccatgtttaataaaacttgacaactacaattgaagtaccctcagtgccctttactcagaagaccatgaccttggatttggggtttatcatcccaggcattccctcatactt

SEQ ID NO: 65132 - DNA, 1046 bp, Homo sapiens
gcggagaatctaaggaggcatttgaggggtctgatgcacatctgagggtgtgattcttctatccagatgtgcatgcaatgccaagaacagctgtgcacccatcctctaattgttgaatgcctgtctccactggaaatcttccctcattcatcctgcagatatacttcccaggctctattcctgggcttcaagggacacgtagacagagaatatctgattctaagtcctgtccctcctgcacccatggtggaaggctggagcaaggtctctctctagggccctgctaccctgagcacctccttcccccagacattcttgttcttcacctagaaccctctcccaggctccctctctcaacccctgaacctattttctgtttctctggcactgaagtttcagctatttaagtgcaaatatagatgcatttgaaagatgtgatggaaccaggtttgaaatgcaataaataagattgcacaagagaaggagataggtaatcagctgctgcttttgctccttgaaaagactcatgtagctgtcatcagactctgctcttggcctgggcaaaggctgtaagtcattcccagctaaagccagccatttgccacacaggataaagtgggataagaataaacagcaaatgaggatgccttgggctggatgcagagattcaagagggtttctttctaccctaggcccagtttctctacaccagggtcatgatctcctgtgatgcttgaaaaaggcaatgcatcagtttgggatgctcttggctgcaaggcacaaaaatcccaattcaaactggcttaaacaataagaacagtactactcacgtaacttgaaatgcagaagcaagacagattgctggattggttggctgagcagcttaatgacattgccatcaaggacacaggttctttctgtctctccactctgctgccccaaggctgactcaccttgcagtcacaaggcagggccacccgcttcctgtccagggaggaggggacttctactactgtggaatccaagtccctcccttccatctgggt

SEQ ID NO: 65133 - DNA, 1026 bp, Homo sapiens
aaccatattaattttaattatcacaatagccctatgaaatatgcataattattatttttcattttgcagaagaaaagtaaaacacagaaagcttaagtaacatattcagtgggagagctgggaatcaaatttacaaaatttggcttcagagcccacacttttgacgactaggttgaagattagcagaaaaaagtagtcaaaattttatttgagccattgtgtttccccagatatggcataaaagtgtctataaatacacatctttgtaggtcaacttcagaaacctttcccaatgctttcgattgctttgctgccgccatcacacttcaggcattgggtgcagcccagggccctccacagaaattttacacagtaaacatgtttgggctggttgcttagcaacgtggaagacagtatgaatttttcatcaagaaattagcatagattctttcagggagatgagcacatacccgctggaaatactcttcaaagcactcacatgtggacccctaagcctgtgtccctcagtcttttttccagtgacaggtctgacctgtcccatctcccttcctcccctagttccttctttgggtacagtttgtagataattcagatacatggctcttctcttcatggaattgatgattcactagcaccttttgttaattctagcagaaaacagtgctgcatcctttccagattttcagatactagtcaagttgtgaggaggtacctggggcacaggaggagggatagagaggccattggatcatgacgaaggaaacacctgaaagacaaaccagagggggcccaagcaaaggcagaaggaagagaagagaccagcaggagagggaagcatcagacccagaagacaaagaggagaaaaaataagacacaaccattccaggatcaaagacctacgagagcaatccgaatatgtggagacagtccctttgttgtccacactgacctacaatctcccaataaccagcagcagttcacctcccgcttccaccttcttcttac

SEQ ID NO: 65134 - DNA, 2053 bp, Homo sapiens
tgaggggacccggggctgggtggcggggacgcagccaggaccctgaccctggggtgaccggcgaacagcacgatccccccaaccccgccacggctggaaggccagaggggagaagccgagaccggggaagtaattcgtcatggtcctaacgcgccggtgggccagggttcagcctctgacaaagcgcgttcgcactgttacccctttgagcctcacaactgcctgtggaacggagatcatgatccccgttgtacagatgagacccttgagccctggagacccaaagtcgacctgcccaaggacttgtagccagtgagtggcagaacaggggctcctggtctagggctcttacggtctactcagggaggggcggaagggagataacgtagtgtgagggcgggacgggtttttgctcgcattcttcaagagcccgttgctgggctcggggagatcactccgaagcctctggctcgtttgaatccgccctaccacccatcctggctaccctgcacccagaccgtcctgcctctaggggtgtcaagtgaccctggcttagcattaaataaggtcttctcccctatattataaataaagaagccaaaggcgtcttcaggtggagtcgctttatgttcaaagctccagagaatccaggggattctccaaaatgttttaagccctgctctggagctttgacctcgatagaaaaatttaaaagaatccaaagtgtcaccccgtcatcctcttgtcatgattttagaggacagtagagccattagagatgagacttttatgaactgttgtggtaaggttagggagcaggaaagccatgatatcaagggcccctctgatgaccccccaggagatggagtcgacatgatcatggaaaaagatgaacaggtcgttagtgtattttcactgtaaacagtattcaaactaaagagttttgagacataatgtacccatcgctcttcagaacacctagtggcagtcgctcggtttgtttgcattgttctggggaatgtttgcttgtggccttgttgcatcgatggacagggttatttccaggataccgtggctctcggcacaccattcttttctctccaaggtgtgtgccctgctaagagagtgagtgctgctagcagtgggcctgttcagtgtcccctcctgcccagaaggaacaactaaggagtcctgtggagagcctgcccacagttttcaggctgccttattgctctgtctctgctccagttttctacagataggaggttgggtttgacaagcatcatcaaatgaccatccctagtgtgcacattaagccaagcctcagactttgccctgcaccagtcggagccaggcaaatggaatccgactaccttcttgttacattgtcacagagtttcttcttttattgggttttgggggacattgcatagtactgcctactcttttttgatagggaagattaaaaatcaacaataaaattcctgttgattaaactccagtttgctaggaaccaggtgtttatggatttttgtgggtcatcattttgtgatcgtgctatcaatctagtgaagaagaaaaggaatgtggctcagatgcctgagtcaaatcctgaagtcagaggctgtgtaagaatgcagatattaattgatcacttaataagtgcctaatatctgccaggtactgctctagatgttgctagggatacagcagtgaataagcagatgtgtctgtgctccagaactcctggagcctacattttaccaacaaacaaccataatttagtgaaacgaagtgccatgagaaacataagataaggggacagactagagcagtggttctcaatcttggctgctgtgcattggaatcccataagggtctttaaaagatacctgggcccctttcccccaattctatttttttttttttttgagacggagttttgttcttgttgcccaggctagagtacaatggcgcagtctggactcactgcaacctccacctcccgggttcaagcaattctcctgcctcagtctcccaagtagccaggatt

SEQ ID NO: 65135 - DNA, 1048 bp, Homo sapiens
ctgtctattgcctccgtgtggtggctgtcctgagccctcccttcccgggttgactcgggagggaagttggaagaagcagagcatttctagcaggccaaaggggaggcagaaatatggatgctcaagagagaaagtttagtacaaacaaactagaagcaaagaaaggcaacttgtaacagagactagaagtaaagttcagttttctagagtagtgcttgtgaaactttaatatgcaaatgaatcaccaggggatcttgctaaaatacagattctaattttggaggtctgggttagagcctgagattctgcatttcaacagactcctgggtgtttcacagccaatgctgctgattgtcagaccacactcagaggaggaaagatctggcagcagaggtgttgctggcctttgagttggcctgtggtgctccctaatggctgagcccagggcagcacagcctcagtgctctgtttgttgagaggcagtggctggctaaaaacgaacatgtcaagcctgacagattgcctaggtttgaattctggccacttactaggtatatgatgttgggcaagtttcataatctctctatgcctcagttccctcatctataaaatgggaataataatattacctacttgattgggctgtttgagaattaaatgaggtaatgtatgtgaaacaagtagaatagtgcctgtcattgtaaatgcttattaaatgttaatcattgccattattatcattatttttatttagttgctgggttcagagttgggccttctaccagcctcacatctctgcttcctgctataaacatcttttgtgaaagaagaaaagggctctcataggattagctgtactttagagatgctacgaggaatctctccttttagtaaatgaggtctaaaaataaagttctatagaaggcagattgctacatgttctggaacctagatttcatgtgcattccaaccttatttatagcttcaaatcaaagtcctatgcagcctggtggactgtgaaggaaaagacccccaaagcgcatggcaa

SEQ ID NO: 65136 - DNA, 1078 bp, Homo sapiens
ctcccttctcccctcgacattgccctttttctcccccagcaactcagaggccaacccacttatatcccagagatatagctaggtcatccattcagtcatgtaatgtatttttattgagcttctgctaggtactaggccccatactaggtataagggtaatgatgatgagtgagacaacatggtttctgctctgagagttcacactaataggggaaacaggcaagtgtatcattgtcatataatacatgctgcagtggaaaaaagacaaggtgcagaagaattatattgaaggaggaggtcaagaaggcttcttggagaaaatgtaatttaataatattgttattcacaggttacaatgagtattcagtgatgtaacctatatgaactataagcatggtacctggcatatagcaagggctcaatcaatgtttaatgctgatatcctcgaatgagggataactggccctgctaaggacccagtccccgggcagggctgagtcaggaccagaccagcctgtgcatggctaggacatttgcccctgtggttcagagctttcagagactatgaccagagactttggagaatgtgtttttcttcttgcaagttgcatgctctagggctttctgtgggttgactgtacaaccattcactgggccagcttgctatgagatctagaaattcctaccagaaatgactaaaggcttaggaaagaacttcctccttttcaacatgtagcccctctggtcagtttcctctgacctccagactaaggatcgcttcccctttcctgactctctcagggctggaacctattagctctgtttgctattggcctcaggagtgttgctgtggaaacaattaagacacttcacatagcacaactctgccaagaaaactaggccacaagtctgcagggctgtgaggagctctgggaaaagcttgctgagcaggcagaaggctgtggtcctgtcccacctgtgagtcagtgccactctctgggactgggggtttcccaggagcgttgtatttatggcctcctgctgcattctcctacctcaaggacacagcaagtgcaca

SEQ ID NO: 65137 - DNA, 1038 bp, Homo sapiens
ccacgtcactccagcctgggtgacagagcaagatcctgtgtcaaaaaaaaaaaaaaaagagttcccaggttctatgactatctgggtttccaggccatgttgcttggtggcggggagggctctagagatccctgcagggagctgctaactacagaggagcctcctcccctggtgacagcctctgtgctttcagagattctaggaggaaatcctctcctccccttccctgccatgccagagctgtcaccctcctgctgctgctgctgctgttgctgctgctgccaagccagcagccgccgccgctccccacccccacttcccaacccagtgctggctgccaagaagccaggtcacacagctgtgcacgtgagccgggccctcaggaggagaggctgggtgtggagatcctcctcctgctgcgtgccagaggagagggaggcatagcagaggcagcagccgaccatatatctccactaacgtggggagagcaaactgagaaatgaactcacccagccagatgggccttgcgtaagctacttcttggccaagaagagccccgggaatgtggctccataccatcccaattcatccttatataaacagcctccgttctcttcttcgccctctgatactccttccttcttgcatgagtgcagttatgttttccctggtcatgaaaaatactttgtaaactacaagactctctttaagtatcagttgtggctatgaactctagctccagtctctgaatttgggaggataagctgtcttccacctctctgttcaatgttctaataaatggaggctaagaaggggatgattttccaagaaaggaacatgtctgctattccttatgatgttagagttaaaaaaaaaaaaaaaaaaaacatgtcttcagctcttatcaaagaactttctccagggcttacatgggtggtagaggcctatggggattcccttagcttggacagataggccaagtgccaagcaggctagtagggatttttctgtgattagagattttgtcagtctctgtct

SEQ ID NO: 65138 - DNA, 1073 bp, Homo sapiens
tccacagaagattggaaattttgttcttatttaatagatacgtagctgagggaagtaacaacgtgttcacagtcaccccacaaattaaagagcaagtcagagaatgacatagactcgttgtttggtctgatggtggttccgtctcaaaatcggctggacaagcacagtgttccatggctccatggctggctgttctgtgaccgtaggcagattccttaaccacccaatgcctccattttttcctctgttacatccaagcctttccttttgccaccttctctttctgctgtaggcctgggttgccaactatgagagaccccgaatgaacgccaactccctcctggccagccccacaggcctcagcccctacctgcgctttggttgtctctcctgccgcctcttctactaccgcctgtgggacctgtataaaaaggtaagggggacatacctgcccacattgcacctaaggcctgcagccaggccttttgggcttgtcagtcaccctaaaaaaggcactggtgggtgggggttgggctatggcccctggaagggcctaagtgtgtgcagatagtccggaggaggagagaagactcaatatccaagagggcagagccaagcacagagtgaactgcccaccagaatgaagcccagaccatcatgtagagcagaaggacaggcagaaaagcaggcctcaggtgtgaccctagaggtggcatatcctctggcagctggtggacaggggcgaggtccccagggtgagaggcatggagagggtgaggctggagccagtctgaagtggaagagcatagctgcccgctctggagctgtgtccacagcattcaaaaggggagtccaggaacagcagttgcccatcagtgatggagggagtggtgtggaggggctgcacacagggctgtgctatacagacaagaagcaaataagcctgtgttaactgtccccagaaggagagagggcaacacagtcagcattcagagggatcacctcatcttgtgcctatgttttttgtttctgttgtttatttaagagacaaagtctagctgtgttacccaggc

SEQ ID NO: 65139 - DNA, 1034 bp, Homo sapiens
gaggaagggccttttatgccactcttggggaaatgtaaattcctgtcccctctgagtcatcatctcaagctgttccttatgcaccatgtcttcgtcattagattggagggtgatttttctccatggagctgataggttctttttatcagatccctcttacttcagggccaggccgcagccatctggtttgagtgtctggatttgtgtgctcactgagatgggcatttgatgcctgcacccttcacctttcctgggctctttgacatagacattgctgatggacagatgtgtgctatcttgttcctgggagtaccagcaacctactactctctcagttatctcttagctctgtgatactaagcaaagttcatcctgtattacaaatttggaacttgccaggctgacactctgattttcggatgagaagaccaaagaacagagaggttaaatgtctgggtcaaggttgctcagtaagctaatggtgtccaattcaacatgaaattgttgccagcaggtgggtgaagaagggggagcattaaacatataaaatgtgatgtgctgtccatccataaggattgaacagtctgcttagataaaaaggaacaataacctagaattcctggacaaatgatacagactatacaagcttagcagaaggctgctggtgtggtctggaacaatcagggaacatatcacagaagtttgcgctagggggcctgaaaagtgaattggattcaggcagtgagcagggcgcttaggacaagaaaaacagctgaaggtttatgtgatcttgtacaaatgacttaactgctatgggactcagtttcctcacctataaattaggttgctgttgcaagaattaaatgattaaatctgggccgggcgcagtggctcatgcctataatcccagcactttgggaggccgaggtgggtggatcacctgaggttgggggttcgagatcagcctcatcagcttggagaaaccccgtctctactaaaaatacaaaattagctggcatggtgacgtatgcctg

SEQ ID NO: 65140 - DNA, 1871 bp, Homo sapiens
taaacctatttaaacagacaactcagcattgtgacaggcgcactctgtccttcctttattatcagggatgaagctgtttcttctctttgccccagattccggatgtcataaatctttaaaatgagtcatccttgtgtctcctctctccctcctgcccccacaatcttccagcactgtgccagggtgctttcatctatatgtggaaatgtgctcacctgctgattgtaaactcagtcattgccttactcttcaaaattactggtcccagcgggcttctcttccagccattttttcctgattctccatctctggcagcagctgctgtgccttgattcagaagctgcccttgtcatatctgagcaagtatcccccagggcttcacgtgactctcacatagccttgtcctcctcctcctctgctgtccgcagccctgggtggagggcctgcagtggggagcttgtcctgcatcagcacctcagaggggcagtattccctcatcccagtggcatcccagcaacaacctgtccccaggtaccgtggccctttcagctcactctttcagctcttctcaggtcccgctctgaatgtccccagagaagcagccagaggagcttgtgtccctgggcaactgagcagcctcctgaatgctccttttgcacttgtttttctcttccagctgcagagcccttgctccgtgagcaaagcctgggtgcccaagcagccaccgcagcagcagagtacaacctgcagagaagctgatcaccgggcagagatagagcgagcatgtgtgtgtgtgtgcgcgtgtgcagaggagggagtggtgtgcctgtttgtgtgtgcatgcatctgttgacactcatgattctgaatgttgcctgggctgggggagtacctgtagcacgccagtgctgtttcccggcctccagacacaaggctcgaggttatggcagtgactttcagctgagacctgttcctgcaagccagctgccttgtctgaacagaacgtagtggtaggaccctagctgggattctggcatctgcctccctagacctccttccctccctcctcacgtcaggctgtggagcaggagcacagcagttctggctgttgtccaaagcatgggattctggaggcagccagagccctgctgagttcctgctttctgacctggaggctgagcaggccggagtggatggatgctgtccagacgtagccacctggcctctgtttcttattttaaaattctctgctactgggctcagtcccaggcccttccttgggcttctgggactgagcatgaggccatagacagatctaaaaagtttccaccaccctacagaagtacacacagatacctgactggtgtggggtatgcctggtactgtaataggagcctaagacagcacacctaccttttcaggatttagaacctaaaattagaaagagaatcccagctgtcattgttccttccccagaagctaagagccagcctcagagcctacccaggagctgtgaaggggcaagggtcaaactgactcactctaccaggaggagaccaggttgcagtggcgtaaggccccctggtttctctggccacactccaaggcaccacagtgctgccagtgaggacagctgacacccagccagggaaaccattctagtctttattctgttggcttccagggcctgtcctggacttgtcagcatccagactgccatgtcagctatcccagtagctgagctccaaggactcaggcagagggactcagggatggggactgccaggggcagttggcaaaagtccaagtagagattacacccagaacaccattccttccaggagcagtaggtgggaggtttgacccagaga

SEQ ID NO: 65141 - DNA, 1050 bp, Homo sapiens
tctgcagtggaagcacatggggcttagagggacctgggttcaaatcctagctccactactttctaactgcatgacccaggcaggtttttgtcctctctgggtgccatctgttaagtgggctaattaatattgattcttgcctggaaaggagaaaaagcacatcaggtcagtgttcaacaagtgtcagcccccacactagcagacaacactacggctcgctgctgtccagagtgtcttcccaaggcccctcctttaaccctcataactgccccaagagagggtagtgacctgcccattttatagatgaggtgattgagattaacaaaggcagggtggctcatctggagactacaaaagagtcagagactaaggctacactgggacccaggtctgtgcgtgtttagtccactctacgtcccagccctgcctctggcccagtgggcagcttttcttcctcgacctgcttccccaggtgtcatagatgctttaatgagaggagctgaggaagcagacaccagccagtgaatgtgtggccagctctgcggcatgtgggacaagggtggcagtaggccacgaggctgaggtgtgggccagcactccagaacatggtggcctggctgcggagacaaggccagtgcgtgggaataataagcgtcagtgtctcaggccctgccggcctgccccgctgctcccaaagcccccgctgccctttctcctggcccgcctctcactgtgcttggccaggctccacttaaccctgggtgggtagatagtgctttcttgtggctctttggtggagtcatagatccaactggcctgggtttgaatcctggctggcccttcttacctgtgtgccctgacactgggcacttaagccctctgagcctctgagatgccagcactggcccctgctcaggatggtcctaagaatcagatgagataacacgtgttgagtgtttcaagggctgaggagagccgcctgtaggcagggctgtgtgtgtgcacacacacacaggcgccttgacccccagtgccactgtcagctcccag

SEQ ID NO: 65142 - DNA, 1678 bp, Homo sapiens
tccctgacagtggagacgcccctaagaggtgccccaagtccagccttcaggggcttgtcatcccaaaccacatctgttcaagggtgacttcagttccatcagagccagctgccccctaccacccatgccctcttttctctctttagactatggcatcctccccaagcacccaaggccgcgagggcctcgacccctcctgtctagggcccagcagcgcaagcgggacgggcccgaccttgccgagtattactatgatgcacacctatgacccaaggccctcataaagataccatgtgtgacaaaggcttggctttcctgggctgggagcgagacggggacgggaggggcccatgcagatacatccactgcagtccagacaggaaatggcactttaatagttggggccagggtgacaggaccaagatggggctggcctgtgtcagtcaggaagcctccctcttctgctgggacagggccttgcggcagctcctcctccccgcctgaggtcctaggcctgccacaggccagcatgccggtgaggtcagtggcaggagccacccagaagccccgcagatgacggagctgagaacagggacttcacctccacgtgttgccatttcctcactggaaagtccttgggaggtggctgggctcagcctgagctcagggctcttcggtgggggttggggcaggggcagggcgggcacttgcaggtggcacaggcttcatcaaggcaggacacgggcttcatcaaggcaggagccacagcgcccgagccctggcaggggaggtaaggcccaggatggggcagggccgtgtgctcctggaacggacatccttctctgccagagacctgctccccaagccctgtccctcccaatccccaggcagcccactctgccctccatagatgaatctaatcccatatattacaataaactgcatttgcctctccccattgccccaccctcccctaccctgggccagcggcccccacttccttgtcctctggcggtggcaggtgcccctcctcaagcagtgccacatcctgtcagcagccagctgtcctggcactggcctgagggctgggggacgcagagggcggggctgcacagctactccaggtagatatcttctgtggggcaggtgtactccacaaactgcttgtagaactgctggaatgctctcctagaagccaggggacacacagatggctcagatcgccactggcaagggaggaacaggatcccgacccagggttttcccgctggagccttggggcccaagtgcagctctggttcctctggctggggccacttggctctgttctctacagaattgccatcgcgtttcccagtaagatgtcagttgaagacatggcccaacagctaccaagcttggaagctgctcctcaggctcaccctgccgcgccaccctccctccaggccacccgcactggggtccggagatagttctccagagctgcgggggaaaccgaggggcaaagctgagcgccaggaagcagccccagggcctgggattgggcgtgctccctcgggctgggtgctcagcagggtgtacacgtaccccacggactctgccagggctttggtggagtcttcagacacaaagacgtggcaggcaaaccggtggtcggcggggtgcttggtgatgaacc

SEQ ID NO: 65143 - DNA, 1050 bp, Homo sapiens
ccttagaagggcagttgtaagaacatcctgccgggcgcggtggctcacgcctgtaatcccagcactttgggaggccgaggcgggcggatcacgaggtcaggagatcgagaccatcccggctaaaacggtgaaaccccgtctctactaaaaatacaaaaaattagccgggcgtagtggcgggcgcctgtagtcccagctacttgggaggctgaggcaggagaatggcgtgaacccgggaggcagagcttgcagtgagccgagatcccgccactgcactccagcctgggcgacagagcgagactccgtctcaaaaaaaaaaaaaaaaaaaaaaaaaaaaaaaaaaaaaagaacatcctgagccgggcgtggaaaagctctttgcagatggcgcttccatctctgcgcccctcggggtgggggctgtcccatgttgctcctgctggggcctctcaggcttcctctttgcccacccaaaaggaaaaatccactgcacctccacttggtgactgacgccgtggccagaaacatcctggagacgctcttccacacatggatggtgcctgctgtccgtgtcagcttttatcatgccgaccagctcaaggcaggggcccagcccttcccccctcccctcagctgtgtccaccgctctcctctctccaagacctggtggggttggagaagagaatcatcagtcccccctccacctactgaagcgcaaacccctctcttttgggggtttaccccctctcctctgtgtcactgcaagcatgtgttctggtgctcataggcccctctctgccatctcatctcctgcctttcccccacacagccccaggtctcctggatccccaacaagcactactccggcctctatgggctaatgaagctggtgctgcccagtgccttgcctgctgagctggcccgcgtcattgtcctggacacggatgtcaccttcgcctctgacatctcggagctctgggccctctttgctcacttttctggtgagaggcctgggagcctgcctggcctgcccaggatccctgcatccag

SEQ ID NO: 65144 - DNA, 1027 bp, Homo sapiens
gatcctcctacctcagcctcccaaatagctgagactataggtgtgtactaccatgaccagttaactttagtattttttggtggagacaggtttcgccatgtcacccaggctggtctcaaactcctgggctcaagtgattcacctgccttggcctcccaaagtcctaggagtacaggcatgagccatcatgcctggactgtagcacttcttgggggaagaaaatgagatgtggtatctcatttatgtaaagccagacccaagccactgacagttttagcatactgtacacagaaaaaggaaaagtccaggtgggcagattctctgcactgggttgtaggactcatgggagctctggggaaaataccttctttggcaggcattctgagcacagaggacatttcaaagaattaattgtcaaaaaccgttcctttttttttttttttttttttttagcaaaagaagaagagaaacagaagttacttaaatggagttcagatttaaaacaagaacgagaacaactagagcaaaaggtgaaacagctcagcaattccataagtgtaagtaaacctcatgccttcagcagtcgatacataggtgcagagacctaggcctttccaatatacgtaacagtacgtgtgggccccaggctgtttcgggtccttctgtttattaacgtgattaacttgggcaaatgcagtttgccatccagttagagttcagacctcaggtacaggcggccagttggtaggtggtgccttacccaagctctgtaacatcctcttggctttaatcagagagaggattttcagtcttcaggctgaataagtaacagctacaacagtgtagccatggccctgcgtattcctgacagtgtgtggggggagtgtagcgcctcacctgacactgagcagacacagaccaggtcccctcgtgtgattcttcctagtcacctgagcgagtgggcccatccgtacggccctccctcgctctttcttccacaccatgctgattgcatttcccggttttc

SEQ ID NO: 65145 - DNA, 1098 bp, Homo sapiens
cggaggtcacaccactgcactccagcctgggtgacaagagcgagactctgtctcaaaaaaataatactaataataaaacaacacccatttcacttttaacctattttgttatatcaggctcagagaactaagtgtaaagtgctgtcgatattttatagacttaaaaggcaaacatattagtaactgtcctagcctccctcgttctctctttggtttctggtcgccttttctcaactatgcatgtatatttatgtctttatgattttattataagctgtctcaagtcttttttagaggtaggcaaagtataaataataaataagcaagcccaatagctcagcaagtactgggattctgctcagttctttggaatcctgctttgaacaaattctggttttcccttgtaatattgtcctcatcctgcagcctgtggtgcagcggaacacttctctcagtgtcctcctcctgatgctgctttgtgaccttctgacgatttttgacatagggtctagattatactttagtatttggaactaatatttaattttcttggtcaggctgtctttgagggacatcgaaatctaaaattgagacaggcagcccatgtcaggtcaaggacgaaactgccagtggctgctgccatcatgctgatgtgcagcttttgtgttggtggttctagctgtcgggagtggttgggtgtcatgtggcgtgtgtgaaaagataggaatgctcagccaagtcccagctccttctaagcctgggctcaagtgtcctggctcttcctgccttgaacttgattctcctaagctgatatttggaactttttagtccagaaactatagaccagggttttgcaacactgctaccataaatccttcctggattttatctgccagtagccacagataccactgctagctgttacatagaggatgtgtgtttaaacctccttctcaaggtaaaattctaaaaatcttttcagatgctgaagaaggaagaagcaattccatggcctggaactttagcaattgttcattcctatattgcctacaaagcaggtaaggagttatccatacccacttttttgtaagcttcccc

SEQ ID NO: 65146 - DNA, 1040 bp, Homo sapiens
tgtctcgctttcctgacttttggcattaataattgacacaggtttcctaactgtcctgttaatgagcagcagggtctctctcagaaatcttgtttgctagcgccaaagattgtcccaactttttctcagttgaagtattgccaaaggatcaccagctcattggcctcttggtagagctctccctctagggtggtacacaaatgctaggggacagttgattttgtggttctgcatgtgagtctctctcctaaacagtgttgtttttgttgtattttttgggtcaattgggattatggttttctttgaaagattgaacccaaaggatccactcatcaactcacaaactaagagcttctgccaggtttttttaaaaattgaaacattctttttcttttcagaaatctacaggtaaaagaaagcttttctaaagaactccctaagttaaactcagcagaaggtatttttaagataattgacttctccttttacagtatcccagtagtggcagtgattaaaatcaacacacaggtctctgtatgtttgctgctgggtagcataagttccaacaacattaattaaacaataacacttgagaggcaggcatttctagggatcaataaccattttgagggacttggtataatacaaaacctaccagacactaatcctctggatgtaccgtgttgccactatcatcatttttatgagaagggaagatacgttaacataattataaaaattgtttagcacatgatgaaattgcagttggtattgccagagtgcttcctaaaaacatacgtcctcagcgcctagcaaagcatcatgggccagctgtttttcaacttacctaccgtctggtttatagtaataatttggtcagtcatcaaagcctaagcattttgacctggtatggtgcctccgtaggacttcctctgctctttttaggcaaagagccggttctgtatgggtaaaatgttttggcattttatattcatttctatgggcagcagttctcaaagtgtagtctgggagtccccgag

SEQ ID NO: 65147 - DNA, 2012 bp, Homo sapiens
gactttactaggattctggcaaagctgactcaggggaatggcttaatgtagcatttctgccccaagcctgccaggccatccatgaatagcacagtgaacagaaccccatgtaaaaggaagcatttgagagtcattaagcagaacagagcactgccattgccaaggtgttcctaatagcgtcttggttgtcctgctgccggcaaggccagagtgtgacgctgagtttcttggagctgcagactttccaggaaggaaagaggtagccacacttgagaacttagaatctttgagaagagggcatctccaactaaggaagaaaaggtcactctcaaaacaggctccctaaagaacagattcctaaagagctccaatcccatatttcagaccttcccatggacattccagaatcttactcttaggcagagcagaaaaaatagcagtagcagcagcagtgtctctcaccatgcaagtctaaataggtcttaacagctcagggtttgagctcataaacaaggtactgaaatttttctttgatgtcagtaatacatcccaagatccttttctccacatggtaatgtgtccctgaattatagttgcaggctagaaaggttgcagagtgagcggagtagcatactaatttttgcatgtgcacacacagtctcagagctactggaagctcaggaggtcatcctgaccctttgtctgccttaggcaggactacactattaccattccctctccacaaaagagatatacccacccttagtaacccattctaatgtttcatcagtcctgtccttcaagtactcaaaaatatttagatgggaaaccctaagtcatggctttatattgattcctgggccacagtaaccagtactctaagttatttttgttttgttttgttttgttttgtgcttggtgatttttttagtgacccctgatgcagttctcggaaaggagccccccagccagaagccacaataattggcctgatagtgggcagtatctgctaagaggacaggggttaaatgagccagaaagaccttggcatctcttgctaaggtcagaggataaaagcttgcatccacagtgcctaggatatgccttttgtgggtaaacaagagagcattcatcttgttcttccccttccagcagcactgaactccctagaaaagataaaccagtacgatctgtctttgtactataggcatcaccaatttaatacagagaggtaatatttttgtaacatctgacagaatcatgactcttgtgcataatcctaatataaatgataactgttggcaaagtcatgatcctacataccatttaccagtgcttataggcagttttgtatctctctggcccttttttttcctttggtgtgttgggcatatacttttgatcactcatagcttagaagcaatgaccttgcccctagaagacaagggccctgacttagatatgtggtaaggcaagagtggctgacctagactttctgtacccacagggctcattcaagttcctttgtagccttgaagtttgagtcaaaatgctcttacacaaatcaggtctctcagttaggagtgctgatgggagggcctttcctgagacttttaaacagccccaatttttagagatgtagtttatcaggatgtttgtcatgtaaagtgggggagacagctgccagtcaactggggagggtatccagggacagaaatacttaaacattaattgctaagcccagagcatcttttaagctcttaggtttcagctactcccagaacatgcctctcaatagctctaaaagcaagggataagaatagttaacttgaattttgcctccttgctttgccggtctccaccctcataaaatgcagacagaatagagaaggaaaagcagaaatcctaaataaatcagtttgtgggaactgagaatcattaaagtattgtgagaatgctgattgcagagaaaccttagagaacagtatgcaagatatgaaaaaataataaat

SEQ ID NO: 65148 - DNA, 1030 bp, Homo sapiens
actaatctggctgtcaaggggataggtgcccatctcagtttttgaaataagaaataatataaaaacatttcttcaggactctgaagttaccagtaaatgacatttctatgttctcaagtggcttgctgaagaagtttattttcaaataggctgaacctatcacttcaggccaaagtaggataatatcgaggataagatgtcaggacttttaaagatcaaattgtggtataaataactctacaggagtatgtcttttacaattgaagatgttctttattcatcagagaaataaattgataatgtattatttggcatatttagaaactgcatgcagtagtacaacagaaaatgaagacacacttttcagaccacatgcaagcaaagaaaagaatagaaatcaatttgtttccctctctggcttgaagagtcttaacgttccatcttcagggcccagtattttgaccagcttagtttctgatggagccctaagagtggtcttcagagagaaattgctccataatttttaggttcatgtgtgattgaaaaatcatagtattcagcagaaacacctgctgtcattcctgaaaatcatttagctgtgagttagcattgtggcagtataaatgtgagaaactgacctagtcgtgacaagtgaaacactcaggatttggagcttgttaaatgggaggctctttaaaactctctgcatgttttgtgagtatgaaatcctcttctttttaagaggatttttctgtggggcgggtcactcggatcacacaagatactgatttctgtcattgagaaagaagatgtagaccccagtccttctcttttggccctgttagaccagagagcctctagagcaaactttctaacctgtggcccaggatggctttgaatgcggccccacacaaattcgtaaacttccttaaaacatcatgagttttttttgcgattttttttttttgaagctcatcagctatcattagtgttagtgtattttatgtgtggctcgagacaattcttcttc

SEQ ID NO: 65149 - DNA, 1004 bp, Homo sapiens
attgaaacatttcatttatatttcctgaagtcagattttatcttaaaaaacgaggctagagacatacaagtaacctgcaaaaatacttgaaggttctgtagcagaaagacctctgaaaacaagaaggatttataggcagtcaccgtatcctatttgaaaaacgactagtgatgagaaagaagaatttggcaaagaaaagcattctctctcaagaaagttgctttaaaaagtcatcgacctatttctaattgttcagtcttgacttctcatttatctgaaaatagtctgtggtgatcctgaatcttctgcttctggatggaccatgattcagagaggctgttcagatgctgcctgctgccttagtcttcttgagcagaggaacctatgcatagggtactagaccttaaacccaggcagctcacaaatgcggcagaccttgcattcaagaagctagttatcaaaatctgtgcttaggaaacacaagaacacatctcaattcctggggaacctattcaaaccccaggaagtgctttgagaaacattcagaaataaattattattattattattattattattattattattttgagatggagtttcactcttgttgcccaggctggagtgcaatggcacgatctcagctcactgcaacctccgcctcccaggttcaagtgattctccttgcctcagcctcctgagtagctgggattacaggcgtcagccaccatgcctggctaattttgtatttttagtagagacggggtttctccatgttggtcagctgatctcaaactcccaacctcaagtgacctgcctgcctcagcctcccaaagtggtgggattacaggcatgagccaccacgcccagcccagaaataaattatttacacatattttaacacagaaaatttcaaacttattgacagcagaactttggtattaaactactgagagtcagatgctcaagcttaggagtttgggtggggacctgttgttttgcac

SEQ ID NO: 65150 - DNA, 1027 bp, Homo sapiens
atagtatatcccttctaggctcctgctggatttctcagtttccatcattcttctagcataccaaattcccctttggggctgacaagggaatatggcatttctgctatctgctcaaatcactacagaagcgtcctgacaccaaggactaaattcagtgcattatctgaggtcaaagtatgacttgattttagggggaaggtctccttcacagaggcatacacactgtttcatttatgtctccctctcccttcactctctctacagtgttttcctgtgaaacttgagtgcttaaactctcttgtgctgtattactgccttggtgaaaactccctgataattcttttagttttaatatctctttaaattgattgtacccagaaagaactggagttagttgaggcactttaaaaatattcaagaaactcacaaattaaccgtgtcagtgcccaagttttgttcaggaaaaaaaaaaaatccctttaaggaggaagtacttgaacaagaattttcatgagagttctaggatcaagccatttagaaaactgatattctcagaagcttgggagaaatatatctaaattttgatgtaaaattcccttaaaatggcacctaagagctcttggtggcttttgaataataccagtggtgagtgaaactagagagcaataaagtgaaggttcaccgcttatccaggaatccttagagaagcaacgaggtcactcaaccagatactgagagttagaaaattttctataggaataaagccattcactgttagcttatatcaggaaaaagcctatttggctaagcagcaagtttgattttactttggatccagtcttgacttttaaaatatgttaatgcaaaagttcttgagtgtcaaagaaaattgtctaagatttactgagcctgctatgttctccattaggtgtaggaggaaacagaagtgtggttggttcattttatagggtaaagcacacaggtgggagagttaaaaagtttcctaatgcagtgttaattcagatga

SEQ ID NO: 65151 - DNA, 1052 bp, Homo sapiens
tcccctcttctttagaggataattttgtggcacattctgaagactgccctgtctccttcctgcatcctcagcgttgatgaatattggtgtgacttatcaatgcagtggctgagttttagttagacggtagaaagtcttttttttcctctttgagtaagttctgatctcatcaacaaataaacatttctccaggttagtttttccatacgcgtaaaatttagtatccttggtttcattttgagcaattggtgtgtctgaagacccagaaagattttgagtaagatttgatacctttctgcatttgtgaaaagttacaagtctctatcagcctctggtataaagagtgaaggttgtatttttaaattgcatgttgattcatggaaggaataaaaggatgcatctttaaggcaatactgtgtaagaagatgtcttgagtgggtgtggccctctaataattgatacgcaacagatactgccatgtagagcacaaaccagtggagtgactgaatgtgtgaaaaagcagagacttgcagcactgacatccagttgtggagggcagggtcttggagtttcttttgagagaagctttctaaaatttgtgggagcaatttttgataggaataaactggtgggttgattgggtgggggcagtccttccgtctctccgtctcccttctctgttgacaaaagccatggaacgtgacttaaacggtggaaaaacgaacctgattttctgttgtattagacctataaaattccgtatttttcttcaggatctgtcttgctgtcgtgtgaacacgttgatagtatcgctgaatgtcacaatattgatcaccgtgactacctgtcttggaaactgtgacttgaagtgtcagaggctctgtgaactcttctgcctgaacaagccctgatgaaacccagtgatgcgaatgtcaagggaatctaaggctccttgttacatgctgggtttatggagcagttcttgacagatggattgaagtgggcggtactagcagttctggaggcctggcatgttggcttattgtttatag

SEQ ID NO: 65152 - DNA, 2064 bp, Homo sapiens
aagcgtcttattaattttcaaaaccaagattttgtgatagttttatatctctagaaaagtgttttaaatatggcatttggtgaataaattggtgtaccacttgagttcctatactttaattttgtgattatcacattcactgtaccatagactaacatttacaatggatacatttgtgcccaaagaaagtaagttagtagtcagcagtattgttaggataactattgaccttttttaggttactgtggttagggatatactcagaaacacaaactgctatgatggaaactttattctgagttgctgtgaaggctgttatgccattagttaaggcagagttataaatatagctaccttttgtttcccaaataattgggatcctattcaagattaattgtgccaacacctactttcaaaattgcctttcattttatctgctcaagcatgtacacctagcctttgctcagggtagaaaaagcactaatctacctttgtgcatatggagagtagcattcctggcactgcattaaaaactccaggagaatgcattattaatggaatacgtttctctctctctctctgtctctcaaaaagggaaatcatttatgtggccactgtcaaggatgatagggacagacttagtgctagttcttaaccagcatattttttaagtgagttactgagcaatacataaagagaaatgctttagcaagtaaataccacatgtagcttgtagacaccaatgtgatctaattgtaatatagatcactctataatgtgtcaacctgtaagctttactaccttgagtactagatcctatgtttttaataggatgccacattatcaaaggttagaaaaacaataatggctaggcatggtggctcactttgggaggccgagccaggagggtgacttgaagccgggggtttctgaccagcctgggcaattcagtgagacctcatctctacagaaaacttaaaaattggctggatttggtggtgtatgcctgtagctctagctacttgggagactgaggtgggaggatcacttgagccggggagtttgaggttataatgagctatgatcacaccactgcactccagcctgggtgacagtggagaccctgtgtctaaataaataaataaaaattatttttttaaaaaaagccatatactgaaaataataatgaatttggggtttgaatattatgaagattaccagaaggtttttgaatcacttttgatttaaataagctcccatcatttgtttactggtttccagctttatgtttttggtttgtttttgtctacacatgtataattgagctgaatatgtgtgccaataagtaacagagctgcgttcagcttctgcttaagtctgcagtattaaagtcttccttttgttacatgtgctggtcttgcagactctgtagagccttatcaaatgcagccagttggtgctgctggtatgaaagcacaggggagctctcatgtggaaggttaatggagtgtaattataaagaaaaatgaactgctcaaccactctatctcactctacctgcaccaagagtgacaagtgctctgatcttttataaacccgggagtagaggtttaaccatctaaaattatgacagtataactgtcacacaaacatgctgtgaagtataggtatgcacccctgtgtaagaatgattccttcctgttaggggagtctctgttaggacaggagcaccttcagccaccaagagcagctgcttgttaaacattgcacttttgtgtcacttcttttccactgaatttgttccattttcttttcctaaaagtgctttctcccctatgattagtggcaaaagtggatagcctgctgatgagtgggttcgttccactgtatcccatcagacaacaaatatccatgctttctccaagcaagcctatcacacttgccttagcagccaacctgaaatcagctgtattcttataaaggggatggaaataattgtctcttctcattctcaacatctaagcagagtagactctaggacgcttaggtacagtctgacaatta

SEQ ID NO: 65153 - DNA, 1073 bp, Homo sapiens
aacttgttaatatactacatctgttacaatactatatactcagtaggcatattcatttaatattgtcttcaaaccttatactgcctaccactctatccatggccctaacatcctttcacatctaagatgagagagtgattagcacagtgcttgcaaagcagcaggcaaattgatatttgtggatgactcaaaggatgttctgagaaccttttctaaactgctttaaatttgtgtgctaataacacagatggaaacctagctgtgagtaagttaccaatctttaaaacaaagacgactagaatggtttgtatttgtagttcatattcttgtcctctgggattcagtaatctttttagcctctctccacagtggtacatgtatattcctgggtagcaggctgattgctactgatggtactgaaatgttttgataggagcaaaactgtgctgccatcctccttacgagcccagtgttcagaggtgacctgtttgcacatgggcctgtggtgtatcacttttttatacaagagcagtagaataaggtctgactcgagttgattgaagtggtagttttaggttctgataagaggacctattgctggtgagggaggttgaaattgcagaatgagtttgcagcatgaggcaggtctgcccagcagcaggttgatttgcaccgtgagacaagcagcacacataaacagatggcccaacaatgagtcagaacaacagatcctgaacaggtagattggcttttgtctgattcttaacgtggttatagagagtggaattttaatttgtctgccacttttaaggctgcaaaacaagcatttagtgaaagaaattctattcattgggaaatgaaaaatgttattaggcagaggagaaatctgattgtcactggatctagacattgagaaaccagcattttcaggagctgtttcacgtaggcatgggctggcttcatcttttggcatacagttattcaactgtatcattttgctgaatcctctagtatgtaacgtgcagcaagaaaatagtaaaatgatgtcctttatatttggattttaagaagta

SEQ ID NO: 65154 - DNA, 1921 bp, Homo sapiens
tgcctcagcctcccaagtagctgggattacaggcacccaccaccacacctggctaatttttgtatttttagtagagatggggtttcaccctattggccaggctggtctctaactccaaacctcaggtgatctgcctgcctcagcctcccaaagtactgggattacagacgtgagacaccatgcccagccataaatttatatcttaataggaatgtttcagaggggttggattaaaatcattagacaattgaatttgacagatcattggtcaattttaagtgtctttacaacttttcaaaagaaaaacgttatagagtctttaaagctgtttaaaattattcaccatttgactgttacctagtttctggtaattgtgtacttgtctttagtcccatatcgcagctaatggtcattttcagcagtgaattcagaagtgctatgagtactatcatatcttgatgagagagatcctgcaactctcagtagagtatgaagaagtagtgcttagcttctgttacagctagaggtgagagaatatattttctaaataacactgtattccttggcatatagtgtagaagtgaataatttgtttgcatagcatagtgagggaaatagtgtagcagtttcttcgtgctaaatatgttggtttcttctctatagtttgctgccttcactaacaatttgactggtactattgtgttgtcttattttgcttacacctatcaagcagttaaaagggctaatgtactgtcctcagctctctagtcaatcgaaaaattagaatctcccctagatcattatttttacttatcaatgttgtttaaaaagactagagatgttgctggttgtttagtaaatgtcatgttgcagccttgcagaatattgcgactttctcttagcacagaggataagacaagccttcctgttcaccactgctatgcctcatcctcaagagaaaagttacgatgtttctatatactggaggcagtaggtgcttgaacaaaatgaaacatgatgaatttctcacccactgggatacataaattctcatgtaggtatcagtcccttatcatctctgtgctttgtcatcactaaataagtaacataatatttggtcctttcaaatctgtgtttttagatgtatttctgcatgttattgacattgttcttcctcttctaacccactaatccattaaatattcagctcctcctaaattatacattttttgtcctctatagatatatttttaaatttcccttctcaaaataagcttgcattttgaagtacatttgttagaaacaaggtagaataattctactttctagtctcaaggaacagtcttctaaatgtaaagaatagaacctggtggaagtatatactatgtgctatttcactgggtacatattagtttatctgtttagagacctataatcaaccactagcagggaaacttgccttactccatttctgcaaagtaataatttttaattattattgatagaccaagttttatttttaatctcaaaaaagtttccttgagttagcattgcacaaaatatatactctcccaggtttgatcttgacctctgtttgtggtcctgttttctctatttactgctctcttctctgtttacatagtttttaaattttctaataattttctttgttgatactctgtaagaaatggtagggttctggccgggcacagtggctcacgcctgtaatcccagcactttgggaggctgaggcgggcagatcacttgagctcaggagtttgagaccagcctggccaacatggtgaaaccctgtctgtgcaaaaaatataaaaattagccaggcgtggtggcaggtgcctgtaatcccagctattcgggagggaggctgagggaggagaattgcttgaacccaagagtcaga

SEQ ID NO: 65155 - DNA, 1038 bp, Homo sapiens
tttaatattcatgctagcagtttatttttaatgtgaataaaattaacagtaaaactatcataaaagatagatggggccgggcacggtggctcacacctgtaatacccagcactttgggaggccacagcaggcgaatcacctgaggtcaggagttcgagaccagcctgggcaacagggtgaaaccccatctctactaaaaatacaaaaataagctggacatggtcgtgggcacctgtaaacccagctactcaggaggctgagacaggagaatcacttgaacttgggaggtggaggttgcagcgagccaagatcacgccattgcaccccagcctggacaagagtgaaactccatctcgaaaaaaaaaaaaagaagaagaagaaaaaaggtagatggaagtatcttctgtaaagtgccacagattcctggcttcagcgctacctggattccttgaaaagacagggggcccttttctcatctcttagaacctcactatcactttgcatgtttttgaacacatggtaggtatgcagtgagctagtgttgatagatgtctcgtcacgttatggttggttggagggaagaaagatcactttttaagttagtcactctatatttaagtgtttttgtaatgggaaatcacctgtaaaacgagcttgcaggaacgctctaaagattaaaactgtgaagtgtgtggcatatgctaggcacttaataagtaaataatagctcttgttattgttatctttaaattttactgactgttgttctgactttgactttgcattttctgagatctttgaaaatacatattgttagtacctgttgatttgtattttgtgcctttgaaggaaagaatagaaatattattccaagggagggttgttggtcttaaaatatttttgtgccatttttattgtaggcaagtatatcacattctaataggcgtttaagacagttcaatacttaatacaagtgtatctttttaaataagacatttgaccagctgaatagattgtagtaacctgttgtaaactagt

SEQ ID NO: 65156 - DNA, 1602 bp, Homo sapiens
aagttttataaaggaaatggaatgtgtcagaaccctcaaaggtagatggttaaacagaattgggtgaaagaaaaaaggtactccaggaccagggaacatcatgaacagaaggtgagaaatgtgaactaatggccgggcgcagtggctcacccctgtaatcccagcactttgggagaccgaggcgggcagattacctgaggtcgggagttggagatcagcctggctatcatggtgaaaccctgtctctactaaatacagaaaattagctgggcatggtgatgcacgcctgtaatcccagctactcaggaggctgaggcaggagaatcgcttgaacccagggggtggaggttgcagtgagccgggatcacgccactgcactccagcgtgagcgacagtgagactccgtctccaaaaaaaaaaaaaaaaaaaaaagtgaaatgtgaaccaatttgttgagttcactgagcagggaagagtccagtctgattgaaggatctgattaagatggagggtgaacactggtcaaataagtagtggaatgggagtggatagggttgacaagattattttgtagttgcattcacattttacagttgcaaacatagcattttgcagttgaatttacatttatttacttaaatctaacaaaaattatattcagatttatttatatgagatatgtaaaacatatattattattttccttttattttataaatgaatatactggaactcagagagtgtgacttgtccagcagcaccaggttttcatacacaaaaccgagtcacatttccaccatatcttgccatttctcttcctttgctagatatacaggtaaatttgacagccaatcaaagcagactcttttcccgtcttctacctttgacccatggagtagctttcaagacattggcacttctctactgaagcaaatctgggtcaagatgagatgtatgctgcccatttcctgagtccttcaggaaagcaagagaggaattttgattaagtttagctcatcttttcagaacccaggccatatgtggtccatagtgtcccggatatgcttcacagtgtggaactctgctctgtattttctttaataaggacacacacacaggaaaatttcaattgaagacctcacaaatgttttgagattttattgagttatcatctgaacattatggattagtctaggatttcacatgatagagtgtatgggcgtatgtgagtaaacaaatacacattgtaggggaaggtgctgaaatgttaaagttaacattcccaaatagaaaatgggatagtttgcaggttactttctgaacttcacttcgtgttaattttcacctaccagttggtgggtagaacaacattaaacacattttactttagtacccttctgttcttatctggagcatggtaatcccaagtacagacagaaaaagaagaagcagatatgcgattaaaaatgaaaataacataacaacacggattattgtgatagatcctgtacctttttaaagactctgacattccacttaggagtaagatggaaaagtcccttgttctaaaatttgaaaatgataaaaataagtcatattaat

SEQ ID NO: 65157 - DNA, 1072 bp, Homo sapiens
ctttaaaagatacagcagtaatccacaagcctggtaagcacttccatccgctgcgtatgtacacggtgcttccctcctgctgctgcgcaaagacccatcgaacagtgtcagagcaggcgctcctggttcttggtggcagttctgatgaaaaattggtttgctgcaggatactagcagccacttcagggaattctagtgttgtccccaaacatgtcataggatcttactctgcagatgtgtgaatgaaatgccatgtctgagaatgtcaatagggaacaaaagaaggcattaggaaatgacaccactgatgccacaaagtagggatcaaatccaagaaaaagtaatcatattcccagcctgattacttttgagtggtagagttgcccatttactggtggtcattaaccaggataaataaaatggagtggtgagaaacctgccttcacaatagtatctttgttttagtatcatcattcaggtctcttcataatgatggctaaaaaaaaaaagagtcaaaatgtagaaaatagcaaaatgcccttaaaagaacacaatttgaaatgagatgacatgatgattaagattattaggaaccctgaaagttaagcatatgggctttcctgcttcttaatggttgtgtggtccttttctacctaggagatgtaactcacagatgtaatatttcttacttgcttctgtgttgcaatgttgtgttatcatttttagagcagagctactgtttaactgtcaagcagaaatataaaaacaaaggaaccagttaaatctaaccggagactaatacgactaaatttcattgctaagattggaatgccgtctgattgcttaagttaatataaaagtaaagcatttggatcttggaaaaattggtcacaggtgaatagagtgcaatttatagcatcagaaagaacatagtactccataatatctactccagaacttgttcaggggtatggtagagtatgtttaactaaattcctctgatccctgcttttagccagctttgcctggattggccacatcttagggctgtgtggacctggttcattcccac

SEQ ID NO: 65158 - DNA, 1031 bp, Homo sapiens
catataaaatcattaagctgggagatatccccagacaccaccttgccctttccttgctttcataaccaattgcaactaatccagtatttcccaaactgtgttccttagaacatcagtgttcccacatgttacaggttgctacatgctctatgccattcagtgattctttttgtttgtttgttttcgagatggtgtcttgccgtgtcgcccaggatggagtgcaatggcacgatcttggctcactgcaacctccgcctcctgggttcaagcaattttcctgccttagcctcctgagtagctgggattataggcacccgccaccacacctggctaatttttgtatttttagtagaaacagggtttcaccatgttggcgaggctggtctcaaactcctgacctcaggcgatccgcccacctctgtctccaaaagtgttgggattacaggcatgagccactgcgcctggcctccattcagtgattcttaacacacattagcaactgaggataaagaatcctttagtaaaaatctatttaagtgtgtttaacttggtatttggtaaacttactaacctctttttcaggaacacaccttttcatatctgaggggataccagtattccatatgacacagtttaggaatgctgacctaaccctttctagaaagagagcagtcttctttcttaatttccttacctggttttggaaatgggttttggcacttcccaaatggtagtctggttccgaaatgttacctaaatcccttctgctcatgacttcttactctgggcaaaatagctctgtgcaagacagactcacaaaatgttcaaaatagaaggggcctcagtaattagccatcagctgtctctctgccagatcccggcctgccttatggaaggctaagaaaccattgcttacacttaaactgcatcctttcataagtccctggcttctttcacagaccaaataatacaaattcctttaacttttcctctctttttttctaattgtttttgttccttttccagattgt

SEQ ID NO: 65159 - DNA, 1029 bp, Homo sapiens
gtattattatttttatagaaattaatatgagattgtttcaaaagaaccatgactttaaaagttcagggacagtcctgagtacatgtacttgaaaattgaaataattttgcatcctgacaccaaactctttggaatgttgaaatttttgggataggaatacaaatgcagtttttgcacaactttttcaattctttttttgttgtatcccctcaagcccatccttcaaaaaaaaaaaaattgtccccagagatttccaactcaagaatttagagaatcagctactagcctattaaatttcaactgtagcaaatgttaccctgtttgtattattaggctgtagtgaaatgaattccttactgacaaataaaatggtaggtgctggctgcttccctttggcatgagataggctatgtcatggatagggactgacagttctgagatgttcaaataagaattttctatgtacttactacaaataaagtaaaatattggcttaagtatttttccagtgtgaattatatgctgaaaacaggataaaaagaagatataaatcattgtttaacaggtatcccctgaatactgattcctgggacagtagcttttccatatgggaacaataggcgtcttctcatagctctgtgtgttagtcttcatgtgatggaaggtgaataaggagaatgtctttagcacttgggtattttaaagatcttaagcagtgcatttcgttgattggcttgcttcattcttgaaagagttgtgtgcattaaagactgaatcaaattgcattgtattttgtgtgtttcctgtgcaggcatctgcattcaggtgtaggtagtactgttttcccatcccagaaagggcagggtgctcagttgcctttataaaggcaatttcttggttgactgcgattgagtgcagaattataatactgaggacttaatttataacagaaaaatgcaggagtgcaaacctgttaaaccccttatacatgtataaataaggtaaacgatggcagattagcatggaata

SEQ ID NO: 65160 - DNA, 1051 bp, Homo sapiens
cctgatctcaagtgatctgcccgccttggcctccccgtgtattaggattacaggcgtgagccactgcgcccagccagtgaagaattttttaatccttaaactcaaagggaatatagaataaaaacaagtctgttttcagaacagttatttagctgggcctctagaaaaaaataaaatattgttttgggaacctattatgtgaggaaaaattcaacaagtatttgttagactttgtgaaagtcagtatcaagtagaattaatcagtgaaagagcatttccacaacattaaatgcaaaaaaattgaccaaagattatgagacaagaagttatcgttgacttcttgagttaagcccttaatttccacaaggtttagcttatcatgacagataacactcttttgcaagctacattttgttttgaaaaggtaatggtcagattaataaaccatgattgcatcaatattagacttgtggtacaatttgtagatccaatagaaatgaaagaggatctaacagtctgtagtcaacttgtgttcatatagtcctttggggcatagtaatacacattgaagcaaataaaaaattagaaatgccttaaaaggcaagcctttgctgggcgtggtggctcacgcctgtaatcccagcactttgggaggccgaggcgagtggacgatgaggtcaggagttcgaaactagcctgaccaacatggtgaaaccccatctctactaaaaatacagaaattagctgggcgtggtggcgggcgcctgtaatcccagctactcaggaggctgaggcaggagaatcacttcaacttgggaggcggaggttgcagtgagccgagatcatgccactgcactccagcctgggcgacagaacgagactctgtctcaaaaaaaaaaaaaaaaaaaaggcaagcttttaaagtataaagtaatattttagcatgtaaacttaaaagtgagaattacaacagaatcaggaagtcttagagtttcaggagggaaaaactttttttcctcaaaatgcagtagattgtataattattattcta

SEQ ID NO: 65161 - DNA, 1040 bp, Homo sapiens
taagaaaaagaatgaattcgtaccggctgcatgaactactaggttaaatcctgccagaccctcacctcatgggtcctgtgtactatctttgggttcctgttgccaggctccagctcccattaccttcccttcctactctgggcccctccaacagtaatagtctgtgattctttgttgttgtttatccaaggaagtgacataatcaatctgagctacattttcttgctattaatctggcagtgctatatggaaaggaagaaatggggtgtgggagtatagttagaattatattattgtggcttaaggctaaggaaacaatttctgacactggtaagggacaaaaggtatggaaagaggttggaagggacattattgcagaacaatcaacaagattaggcattattgggaactgggccacaaggtagaggaagaaagaatgataagtgactctgaggctttgagcttgggtggctaaaaatgtatagcactggaacacagcttttactacgtgatcgcttgtcgtacatgaatttcctgtaaaagttcactcactggtgtaggctctagctccttatggctctgcattatttgcattttaggacatttatttatttgtgagcaaatattgatagatgctactgttttaaaatcagcaatttctctggtcagtctcctccacttcccccaaaaagtagaaattgctactggaaacacacacacacacacacacacacacacacacacacacacgcacacacacgcacacacacacactatgtggtttagaagaaatgatcgtcaccttcttaaagttacaaattaaaaaaaaactgaagtaaatatagttgaatgggaacataaaatatttgaatgcaaatgtgagatttagtgaaaattggttttattatgtttatgatgcagttgtttaaaagatacaaatatgtgttttaggattaaagaatctttttgaattttgtgttcaaggtgatataaaagttaaattttagtaacattcagagaacagactaatgaaaagtagc

SEQ ID NO: 65162 - DNA, 1057 bp, Homo sapiens
atcagtagagaaagatggatttttttcaggaaatggtataagaacaattggctgtccacttcaggaaaaaatatcaagtgaggctcctagtcaggactgtcttgattgcaaattacacattcagctcaaactagctgaagccaaaaagagagcggacatattgggaggatgttaaggtatcacagaaaggagggaataggtgaacagtattccctcaggaatgcaagaagcagcaaacctcttcagtcctcatagactagttactctttcatttatatcatatgttctccacttcatttttaactacggtaggctaactctgtgtggcagagaatgtagcctttagcagcttccaggttttgtcaccttttgaagaaaagtgttctctggcatgttgaaaatacttgaggaagtactttgatttgtgtggccagggtcacatgcccactatccccttgtagggctcagaccaatcactatatcctgggaaactgggtcatgtaagacttcttacacatatgacatgttggtttctgcaggtgcgtgtgtctcagtgtgtggatttggggaaggatgaacgtgaaaagaaagcctccccaggaaaggaggcgagtagcacagccatagatagccactgggagacctgtcatgagctggatagtcaccgtaatttttgtctgctgttatctctgttttacatcatactaaaaaacaaatttaaagtggattagagatttaatatataacattataaaaatactaaaagaaaacagtttttttgttctttttatcttggagtgtggaagaccttccttagtatgataagaagaccagaaaccatacaggaaaggacctaataacataagaggataaaagaaagaagagaaaccttatttaaggcaaaggcagtaaaagcaaaattgcaaaaacagcaataaaaaattcaagacagatatttttaacacatgtgtgacaaagggttattagtcttacatataaagagttcttatgaatctctaagaaaagtatgagcctcccaagggaaaagtatgcaagg

SEQ ID NO: 65163 - DNA, 1235 bp, Homo sapiens
gacttatcttttccaccctccttactttttatcttttctagcgacatattagtatatattctaaaaagcatttgtgtgtattgagaaaattcagttacaaaaaaaggtgactatttccgcttctgtatttgaaactgtggtggtgggctatggggaaagagagaataagaaggtggatttttatacatgtttaaaaaaagagaaagaagtccatgcatctagtgcttgccttattatattcaccatgaaaagtcagtgagggcgacctatttactgtagaggcatgttcaaatctagtgcattgacaaaggatggggccaacctgggaaattcttactgtggctagatcaagaaccttaattgtgcgtgcgtgtgtgtgtgtgtgtgtgtgtgtgtgtgtgtgtgtgtgtgtgtcttcctgtcagtgtagttctaagggtgaaatagatttatatttaaccaaagaggaaagggggagctattcctgggcttttgctatttaaataatcaattcatgagaaagaatcagtgttataagaaaaaattgcagtggtatttaaattcgaacatatacagaatcctttgctctccaacatagtatgcagtttcatgtaagctgcttcaggatagaattgtgagcaagggtttgttaccagcaggaccttttaatacagtccttcagcacatactgttatttttggtgcactagattgtattagttgctaaaccctaattttctaatgtactgcagtaatgagtaatccagtcttttactctcagagtcattttacattgtacaagggctacagagccccaagccgtcacccctccccactttttaaatatcactattcagacattttctcttctacttataattagattgctaagttattttggaattaaagaatgctaaaaaaaacttttattgtctgtgccaaatagtatttttctttgtttataactaccagtagtgtcatcactgtagtgcaggtatttccttccagcacctccccaccctgcctccatccttcctctcttttccactgaggtgagaccattatgtttaatgaaactctgtttcctatgtgacttgtattatgttctacccactaaagtataatagtagagtgaaaagtcacttgggattactgccagaggttgttcagaagaaaccacatctagtaaccctgttatatctggcacagttcatactcagaagccagcacaaaaag

SEQ ID NO: 65164 - DNA, 3910 bp, Homo sapiens
atttaatattatttttgtcttgtggcataccattaccaacccttttgacagagaagatatatgagggaaatatatgcacaaaatgattagaaaggcctctgtgagattgccttagaatggcttctaataaccattaaaaaagcagagtgaagcctgacccaaacagtggaaaacattaaatcctggcttttctcttgccctgtatgacgagctctggtttcttgttgaggctgtcatggcaaggttttttggtttgggtttggtttgttttagtttttggtttctcttttgccatattgatctctcattttgcttgatggggaaatactttttttgcctccagaagtgggtttcccttgcatattagccttgttggtgtgctgccccataggaggatggccccagtgctattggcactgtcctgtgtacagttaattaaacctcctgctgtggacctggatttctgctgctgctattcactgatgtgtgtgaattgagtgaagcacatgtgcataagctcagggacactcttgaaaacaaaccctgaaaatagcaaaagatggagtcagggcagagccttcagctttcaaataagtttggtaatctggctagctgaatgccagagctcacaaagctgagaattgcatttctgaagataagacagactctttttgtgtttttatcttttcttcccaaaatgtattgagttttaatacggtactttatctctgtaagcaagaaaacagagccagttgtgaactcttgggctattgagtccaacccagtgaggagtttatcctcatttttctggtgaccacatctcaaggtaaaccatgagcagagtcttactaagacacctgcctgctgtggtctcataaaggggtcttggagcagaaaggggttaagaaactcacagaaggcaagagtagggcttccaaaaagtctagtaacctacgtgttttagagaacagatagtgatttcctttgaagttaggccccttctctttttcatttaactaaatattcagagagagaaacttgatttctaaccattctttttttgaatacattgtagtgctttgagtccttgtgattctgtttactaggacataaaatgctaattttagaagctctaaataaattttttccaattcctagcttgcttacttgggtaaaatatagcaagtaattagactggagtaatagtagtgtcctaaaaacatatcagccactggatcagacaacctctctgttctttctctacctttcccaactcccctcagcaagttttgactatgtatttttatatgaaattaatcagccaggaagtatattttcagcctctcctttgtgttagtacctggtataataatgtgtgctaatgcttatgatctttcatagggaaaaagaaataaacacacatggtagaccagggcagtacatagtgaagagttagcatgtggtatagataatgagaagagagaaagcaagaacagcttgggaacccaattgggactttgctccagaaacagaaagaatggaggcattctaagtcaggggaatcacacaagctaaggcagggatataggaatgaacacaaaataaagataagaactttgctgtatgtttaacacttttcataaaaagtgttgggccacaatcaaaaataggattaagtagttatgacaggacctggtactagaaggccttaaatgaccatactatccttgcctagaactagacttgctttgaaagcttcgatcagttcctatcttttgaatggaatactttagcatttgaagggtaaaatgaatttatattggaggaaataaggtttcattggcctgtctgctttttgtatatgtttgttttgctaaggcaatatattcagagaattgaatcagtgctttatcttgtagaaggaagtcaggcatatagttaagaaagcagatttttttttccttaaaaggaattttatttcctaattgtgaaattgtggcctgtttgcttagaaatgagaatgtttatgagtgaaagcacaggtttaatgtttaaaagagtttggataaccgttgcagaagcaaaatggatttctaacattgcttcctaatctgggttgcccgaaagagtaagagaagtcctgcatatccctgtgtgaaggttacacaggttgttacttgaaatgctgcttgtttggaaaataagatatgaaatccaaatgggggtggaaaggggagggggaaaaagtagtaccggggtcactggaagtgtaaagattgggaatttctgttgtaagttttcactatagatttgagtaggtcagctgaccctcaaatttctaattacttcttttaccttgcatgaattttctttttttttcctgctcatttaaggtacatttggtttaataatgtattctcaataaagccaaaaggtacctctagctgtactataggacagcttttgaatagtagtttgatttattttccagtttgttttcctgtgtcttgtgttaatagttgctattatttatctcatttaaacagtagtgcttaggttgaaacttgattctagtcaattttattatgatgagtttaccatcttctcaaatgtagtactcctctaatgcattgttactctatgaaggtaaaaacaaatttacagctgttaaccacaatcttaacctttcctcagtttgtttgatttactacaaattaaattctgtgcttgatataaatcattaagtatataatttaaagcagttgctgcgatccatcttttactgttttctgcactcacatccaaatgtggaacttcaagtctgaaaaacagtgaaatgattagaaaactgcccttctggagtccaaagtgagcattcatttcaatgtgggtatatgacagcggggtcctctcatctctgagtgggagatgcagacattgcattcaggatggaatgtttgcttcttgacttgtctgcctgatttaaatattcatacttcaccagaaggaaaaagctgctgacttctaaaagtgggtcagtttttttttttaatggcccttttggcactttgtaacgtgttaatactgccttagagatggagaacagtttggcagagctcgtctttatcacttcaggggccaaagcttcactaggccagtggaaggagaggcattgcagatattaataactaatagaccgtgatatgggctttacttgccattctgtttgcttttctagatatagaaggtagtatgttaaccagaaaggattaatttgaggaaaaccttgtattgataaaggtgatgatgtgggtaaacagaagtaacctgtgtcttcagatgcatggtgtttctgaacaaattccacaattgcataaatctgttttatttttctatttggacatgataactttcgaaagaagtccttggatagaataggatcattgataggttgtcagtcttattcccacatcatttatttctgcttaattattatttaaagtgtactttacattgattgaatttcttacctctaaaggacccaaatggcatttaaacatgaatgccatctttttatcctcacaaaattaaaatttcaggtatcttttatggaaaggaggggtaggacagtaggatgagaaaggaaggagagttagagtaataataggaattctagatggagagagatctggagatcctgattaccacatgtattagttcattcaggctgctataacaaaatacctcagactggatcatttataaataacagaaattcattgcttacaactctggaggctgggatgtccacgttcaaggcatcagcagattttgtgaggacctactgtctgcttcatagatagcaccttcttgctgtgaggacatagcaagaaggtgctatctatggcag

SEQ ID NO: 65165 - DNA, 1050 bp, Homo sapiens
ctcccagccctcaaacaaaaatttctacatggatgttcatagcattattcatggtacctaaaaagtggaaacaacccataaactgatggatagttaaataaagtgtggtatatccatacagtagaatattatttgacaataaaaaggaatgaagtactacatatagaatgatacatgctacaacatggatgaatcttaaaaacatgctaagtaaaagaagccaatgacaaaaggccttatactgtatgattctgtttataaaaaatgtttagaatatgcacctccctggagacagaaagtcaattaatggttgcccagggctgggggaattgtggatatgtgtgggtagttggggaatggggagtgactactaatgtcacagagttcctttttggggcagtggcaatgttctggaattaattctggagttgtgcaactgtgaatatgttaaaagccattgaattctacacttcagatggatgaattgtgtgatatatgaattgtatctcaataaatctgtttaaaaaagtattacatatttcatttggtctcagggcactgaattgtcttttaattcaaaattgtactggctaggagaacccatattttcaataagaataccagcctaataatggtaataacttatttgcatagtgtgccattgtttacccagagttttcacatgctttatgtaatttgatccccactggacctcaccatgcagatgaaattgacacaaagaaaaagtgacttctcttaagcttacacaaccaagaaatggtagagcaagtatttaatctcaggctttctggttgttagtcactgccttcttgtcagaacaatgtcagaacattgcaaagaaaaaataatatctttcagactcttaattatgctttaaccctttcagttcttgaatgtgactagaaaagtcattcaccttctctgtcttgctttccttacctgaaaaatggagataataatgcttcctaactaaaagtcatttacctttttgtctcggtttctttatccagaagaacaagccaggaatat

SEQ ID NO: 65166 - DNA, 1565 bp, Homo sapiens
tttttttcttctcagagttcagaaaactgataggcagtgaggttgaatggctagtgcagaggtattcagtaggtatatgagtgaagactcttctgctttccagtgatagaaactcaattcaatgttgttgaaggaaaagagatttattggtatatataagtagtaagttcagggatatagctgctttcaggcatggatggatttaggagcttcaggacactttctccctcttttggcttcatttgcttacaggctgtcctgtactggcagaggttgcctctggcagctctaggtttacagcctgccatttaatcaactccattgaagagggaaagttttttttatttgtttgttttttcctggaagtaccagcatagagcatgggcacaagttttaggtccattcttgaatcagtcatccttttgtggccagggaactggagtcccctcattaggcctgggtcatatgctactcctggatcatctcaaccttgactattgactattcctttgactgttttcataggagtaaactttgggaggctaccttatatttggaattctactagtagtttgaaacacatatgggggaaagaaggcttgatagaaaagctatttttggatattttaactgttccaaccattgcaagaggctcctggtttctgtacagaagaatttttgtcccagtttatcttttcttcttctgcatgtttccccacccccatcacctttgtttctgcttcttagcttaagtccattccttcatccaatcctttgtcttcctctaatatcttccttcgtggtagcagagaccagtgtcctcacccccttgagttgaggcatgatgaccattctcttccttcaaggaaagtactacagaatggaattgcacattggcatgcttaaaaacagctggttaatgagaactcagtttttcttgtgtagacaagaagctttgtgtttctgaagaccaaagttagagtactctgtttgaggtttccttaggcaatttcaacccatttatctctcgaggccccagaaggagtctggacactggaaatgaaggcctagtaaactcttttgtgcccaagatggtatgagaatggaggtgggaggtaatggtaaatgctctggttttcattccggctgtcacaagaataaaaatgacctaactgtattttgggcccccaggcagcactgaaatgacatgccacctgctgacctaatccatttcatttctggtactaggatagccaaagcaatttgctcaatttgcaattgactatttactctttaaagcagcaatgattagatctagtataagaaaccacatactttatttatcaagaattaaaacttgaaaggtggaaagttatcctttttggaagaagccatttaaatgtggtgtattttacctcagagagactaactatgcttttagaaagctactttttgctgctgtttcccaggaaggagtacaatctgctgatgaaatttaagataacagaagtgtttctcagcagcagctgaatggcacagagaactcggagactgctatatttatc

SEQ ID NO: 65167 - DNA, 1048 bp, Homo sapiens
ttcagcctgtatgaaacactgattaaggttagaaccccatgctgagccatggggttctttttaccagtcatggtatacatataattatatatataatgaagaaaaactaattgatgtcaaagatgttgataacatcttaaaataaaatatcctcttaagaatgatttcatttatacttaatatttaggcccagcaactttggaggttgaaagtatagcacatttatgatttttcttcctagctcttgcaaaatattagttgtgcatttcttgcttttatttatacacttatatcaaaagaggactagaagttagtaccctttacttttaggtatttgtttcactaataattctttcatattgatattttgtaaatcagttacatatattataaaaagtgttttattctgctatccatgagagatgtgatctagtgttctgtgaaaccaaacatttatcaggacactaaatcaacttctaaaatacacattacatttaattacaaattttgaattgaaaatgtaatcctaatagttcagttctgcccttagaataataatgctttgggagggggcacattactcgaggcccttagattttcaccttgttgtgtagaggtagcttcttttcatccctgatttgccttcatgtgagaattattcttctacttcatcttgtagcacatgtgtatctgcatgggcactcacacacacacatgccccttgaagatggaactgttaattttccctttctgtgatgcctttgcttattcatcatggtaagcctggtaagatggcttggtcagagatgtccaagaaggtggaaaaggcttgttaactggaagtaaaagggaaaatatttaaagacttactaggtgattaactgctttgataaagatttcagaggctccaccagggcacatggtgaaaaactggtagaaatataatgttttcttatcagcactagcagctaggagcaatttagcttcatgaatatctttcttcttctatccctaccttctgttttagttaaaatattgttagctcctg

SEQ ID NO: 65168 - DNA, 2219 bp, Homo sapiens
tcatctaatataggaattggggaaaaaattaacaactcctttcctgtggagtcaagaagcacaaatgaacttaccctgaaaagttctgttacctgaaggaaaataatcaagtgaaattgggggagggtgttaatcgacagaacttgaaatttgtttttctgagtatgtgattttatttattagagattctagaagtttgtcttgaagttgagacaaattcacataagattttgagttaatccaccagtgccttttaattataacatttataaacatctgtcataaaaactgatttctgcttatcctatgatgtgggttcatcagatgaaacagtatttgcaggttatcaaaagtgctgcccctaagcctcatcagttcctgctaatagctgataaaattatatataactctttaaatttctagtattcctttttatagcttcccttcccctagctcttacttgcttaattatatactttatgggtaaagtggttttagccattacttcagggtatccttctgaagagaaattgattagttctccaaaaatggaaagactagtatgattctgtagggcagggattggtaaaactatggcttgaacctgggcaaaatctgtcctgccacctgtttttgtaaaattattagaacacaatcacactctttacatttacatattctctatgactgactgcttttgtgccacaatgacagagttaagtagtcgtgacaaagacagtatggccttacagtagttactatctggttatttttagaaagtttgccaatcttactctagagaaatttaaccagagaggcactcaactcagagatactaggcatcatgtaacagccttgggcaggagtgagtgctacactgtatatagactgtatgtacactgaaaacagggtatatggtgtatacagaatagtaagagctccttctcttataaacatgccagcccccccggcgaattcaattcattttgaacacctcatttttttagccacttttattttttattctcttcgtctctattcctctccccacttctctcttataggtttattgagtcataattaatgtaaaataaatgatacaccttgaaagagtaatttttgatggtgtgaaaccgtcatcacgatcaagatgagcatatgcatcacctctgaagtgttcttggtcgtctcgctcatccttctgtcaatccagtccccaggcaaacactggtctgctttttgtaacccagtttttagctgttacaaataacattaatttgaacattcatgtccaagtctttgtgtggagatctgctttcatttctcttcagtaaatgccttagtatgtctgggttgtatagtaggtgtgtttttaactttttaagaaactgccaaaatgttttccaaagtgattgtactattttacattcctttcagtagtgtatgagagttctagctgctccacattcttagcgcttcaatcttaaatatgaacatagccaagaatcactagatatttaagggaagctgctaatgtgcaagtcagaacaggccaagagaattggaagggaccattcaaaataactataaatttagatccctagatccgtaaaagaagatattgcattagtgaaacaaggagaggatgctagaaataaaggaacaattagaaaacagaaacaattcttgatttaaaaaaaaaggttggaaaacaaaattggagttgtttctcaataaatagatggaagagacaaagggggatagacagtagaatagagaaaaattttaagagggtcacccagaaagtctcatgcctggctaataaaagttctgagacaagggaacagagaaaatggagaagagaaaaccagccaataactaatataaggaaatgtcccacaaccgaagggcatataattccagattaatagaatccactgagtgcctaaaactgtgaattaaaaaaaccccacaccctcataccaaggcacaacgtggtgaaactttagcaaaacaagaataaaagatcctaaaagcttccttagaggaaaaaaaaaaacaaaacaaaaaacagttgcaaacagggattgggaatcagatgtcatcagacttctcagcagcaacaaagaaagctagcagtcattggaatgatgctttacaaattctgaaaagcagtgatttccagtatagaattctatacccaacccatctcttgatca

SEQ ID NO: 65169 - DNA, 1100 bp, Homo sapiens
tctggcttattttgttcaacatgtttatgagactatatccctttcttttgaagtagtaaaaaactttttacttggaaataattacagattcacaggaagctgtcttttgaaattttaaatcactaaagaaaaaaagtttgtcatctcttggatgtgcccgccctaacatctcatggcatagtcaggtggtttctcttctgtgagccagtagctccttgctctgtgacttttgtgtagctcttaccacatatcttttaactatttgtttgtgtgtcatttcttcctctctagattgtgagcctctgtgaactgtgatcccttcacccttatacacccgctttataccctagtgcttcacacacagtggcgcttaaacaacttttgttaaagaaaaggagtaaattctagtcctggctgtgctagtcactgacaggctttgtgtccattgaatttctctgagctggtttcctcaactgtaatatagatgttataattgtatcagtacagatgcttttagctgtagtttagttgtagttagaaagtccaactaaaagtggctaagatagtaagtgaatttattgattcaaataaggagaatttgctagaattgctcagttcagcagctcagcaacactatcaggacccatattcattctggtcatctttcagcactgccatgctcagcatgtcggcaaccactgctgttgtcatgggatggctgctgtggtgccaggctttacatcttcacacatcaacatcctggggcaaaaaaggaccatttcttattaaatatctctttttatgattatggaaaactttaattagaagcctttcaacagactttgcatctcattgaccacagttctgtcatatgccaatgcctagttcctggcaagaaggaggagtccaagactgatttgtgtcctggagctggagattttctccttgagcatttggaagctagatacctaaacaaaactcttttttgttatcagggaagagaaagggtggagaagaatggatattcaagaaagttaacaatgtctgtctctataacactttcctctactaatgtaaattaaggataatgtatatctaaa

SEQ ID NO: 65170 - DNA, 1363 bp, Homo sapiens
ttactatctctttgagaaagagatgcttgattgagtaacttatactttaataacgtgccacattattatagggcattttacctgagtatggcagaggaaatcaagtcagttggttacttgtaccagatgcatcagtttgctgagttaaggcagagcaatcctcttgtaagtttatcctaataacgtatttttggtgctggcaaatggaatgacttttaaaattcaaattgaatttcttagcccttgtcatcaggtgttatatatgttgacactgggctactagaatctactgactggaatctactgtattttttttttccactttgctcatctattgcttagctgagagcagttgcttcaagctatgaatatcaaatcaaaggccaagtttgtggaatgtttttcaagcctgtggtatctgtcttttttcttttgcatagaacatatctgtatttcagaatgtttagggactcttccactctttggagaacgttaatttttgagtgataggcagtgtgaataacgaatgctttttaggagccaatataactgacaccacctctctactatatcatgtgctttcaaataatgtgcatatattatatatatgtatgctttcaaaaaatccattcccatttattcccttttctctaggatctgtgcttttcagacttctttatcattcagagtctgattcatctgttttattccacatatatttattgagagtttactctggtgaaaggcatgatactaggcccatggaggatgcagagaatgaaaatcttggcagtgttacttccatgtgactggttatgacctacaaggcattcaagctcattagcactgatacctttagcaactcattctcatacataccccataaattctctgctgtcacctttactccctgggctctctcaagactgtgccttcttcacacatcctcttctctacacctggaattttcttacctttttacctgattaattcctatgtatcctttgaagactcagcttaagcaaggtcttctataagcttttcttgacttctttctaccttccaagcagagttagacactcctcttctgtgtactcatggtacttggtacttgtgcctactttatttggcgctcattgtggtacttatttgcactcatcaagttgtattgtaattatttgtaagatcctcacaggcaaggactgtgtcttgctcacatttgtacccctcaagtctagaatggtagatgagcagcaagtgtttttgaatgttattaattcattatgccctcagaaagctggtaaggtggccaaggatgtccctaccaagggttcaccatcaaaagaaaattcccatttaaatg

SEQ ID NO: 65171 - DNA, 1026 bp, Homo sapiens
ccagctgctcaggaggctgaggcgggagaattgcttgaaccctggaggcagaggctgcagggagccaagatggtgccactgcactccagcctgggcaacacagtgagactcgtctcaaaaaaaaaaaaattatagtcaccatttcttacagatcttttcaatataatattagatgaaatacttttctgggtttagtaagttcatcttgccgtttatggaatcattctcaattttaaatttgaatatattttaatacaagattctgaagcttttgggaaagaagtttctgtccctcctataactagttatgtttctgatctataggacaacataatttaagctaattaggtaactgaaacaaaggactgggtagggatgggggaaccagaagtttgattctattcctgactctgtaatagacttgttgatagattttaattattgaataacttaatatgtctctttccatattcgtggaatgtttggattatgcattgaggagttaatgcacgtgtatccattgagtgcatggagttcttttgtaggtgagttctgtttaaaaggaaattgttggctgtagtcatggtggttaacttcatctcatatgtaacactttcatcttacgtgtaaagtactacttttctaagaagcttagaacatttaacatttaactcaatcacaagtgcatcattgtgatacataaactgagatgtgggctttatgacttaaccattattgtataatttatcagtatgagattcaatactagaatccagattgctgtactcttcattcagttttatttagtaactgtagacctttatctatcaaatattttttgaaataggacattaggcaaaataattacattgcctttaggcttcattaccttggagtcaaataagtaagttagatcctatagtccttgtgttggttacctgatatatgactatctccagcctctaataccagttactgtaaaatgttaccctccgtggttcacagccaaactagtgtgactggcac

SEQ ID NO: 65172 - DNA, 1069 bp, Homo sapiens
ctcccgccaaaagagccacttatcctctggcagaacctaaccaattttccttccactttaataactaaaatctgaattaccttatccgtatgactgatattttaagttaacattaattttttgttagaaaaatttaaaatacagaaaagtttgaagaataatgtcatatttcacacttaaccctttgtcatatttgcttctattctttttctttgtgcatttttctgtaatcatttttttcaatatttattagaaaactttaattatacaaataatggactcatatattctcttcttttgttttattaaaaaaagttgcatctgacaactttttttttttttgcatctgacaaaaccattgcagatagtcactatttcttgcggtagacactagttcttattcactgttgccacttcaatctttgatacttactcagtttctcccttaaaactatgtaatcgtatgctccatttgggaaaatacagcctttagtgagcatccttcatgactaaaactcagtgaatttcactgaattcttggttggaagggtctagtgcttttaaagtgtaacttgagatttctgaaagaaactctggcagatttcaaagtcagcttcttgacctgcagggcttcaatttgtggctgacagttttaactcagaaaatccctgacttgattggctacataaattatatgttatatagccattaagatcatggttttggaaagtattttaatgatacaggaatgtgctctgaaataataagtgagagtatacacaactttatgtgcattacagtcccatttttatgtttattttgtgtatatatgtatgtgggcgtgtaaacgtatgcaaaaacagtgtcagtataaaatattggaaggtggttaagtttacaggtggtttattttttctgtatactcttatgtatattttctaaatgctccacaataaattacgtttcgcttttaggatcagaaatagacaagaaataagatttaaaaaatttttttaacatcaagctcttgtctgtttcaggcatagttcacatttaaaaatctaatgac

SEQ ID NO: 65173 - DNA, 1536 bp, Homo sapiens
tactttgctaaataagggagagggcaagtggagaaaacctcttatctttgttgataatgctgtaaagcatgtagtgtgtgcatacttataacctccattttcctacttttgtgtgattagtggagctttgggttttctgtcaatggatactttctataaagaataagaatattttagtggacaggtactcttaccgtacaagatgctcaaatataaaacttcatgtaatttaaaacagttgcagaggagctgctcctgttttggtgcaaggagcctgtatttaggatctgtgcattaggtgatggtattatggccacagtgtaatgcatgacagatttgattggctaaatgcttcgggttgcttcatcatttgtaatgcagtatgcatagtcttcctgctactattctgttaacaaatgaaatatctttctcacagatattttttctttccaatcagaatgctgacttaaagaaacagcttcatgaactccaagccaaaatcacagctttgagtgagaaacaggtaggggaaaaggggaggggggcatatttttaacgttgtgttctaaagatatgtctgctcgaggcttctaagagaactgctatttttcctcatgtgtgaaaataagtgtgggcagccagacttggttttaattttgtttgagctctgtttatctatttttatttttggttgaaatcagtctctagagtatcccatggttatatgttactggcaaatacctaaaagcaatgtggcaggctgccgttaactgtgttaattaaactctatagtttacctataggggatggggtaaaggcagttagtgagaataggtgatagagaatcttgtaggtgctgcgtgtaccttgttacctgtcttaaagccttgagctgacattaaacttactgtggagagaatcttcttgtaagtagattgctctaaatgtaggtttcccattctaagtatggtcatgcctttatgttaatctctattagatattgacctactattacgtgaaaaaacttcggtgaaatgttattagacttattctatatagggcaggagaagaacatcttgcttttttccaaggacacctggaaaatattctttggaattttttgtatgatgacctccactttaccaattcaggcagtgcctgccaccaggtggagtgtggcaattgatagagctataagtaaatgtttatggtaatcccacaaagcatttgttttcttgtttcttccccaccactctccctctggttagaaagagtggttttctgtcttggagtaggtgaatatattaatcaaaagaataaggtgatttgcagttgatatttcatgccagtgacattttattgaggatttttgactaaatagttctcaataactgatttttatgttgttacttaatgttatttagtgaaataataacaatgagaataattcatttctggagattttttattgtgtttctattgtgttttcatttaactgaggggagaaataaactttgagaattatgtggaagagat

SEQ ID NO: 65174 - DNA, 1006 bp, Homo sapiens
agcgtaccacacagcaggtctgaaacagcaaatttgagctgggtttcagggttgttagaatagtagcaagagctgcgcatggtggcttacgcctgtaatctcagctactctggaggctgaggtgggaggattgcttgaggtcaggattttgagatcagcctggataacatagtgagacctcatctcttaaaaaaaaaaaaatgctggatatggtggtgtgcacctgtagtcccaactacttaggaggctaaggtgggaagattgctgaagcccaggagttggaggctgcagtgagctatgattgtgccactgcactccagcctgggtgacagaacaagaccccatctttaaaaaacaaaaaacaaaaaaagaatagtagcaaaatgtgctggctgactacttgacgttaaggagtggactggaaaactacaatgtggatttaagaactttaacacatagtagtttgggaccttttttgtaaggaacctattgtttatagtttagtatattaatataatcattcctctaagtatcaataaaagcttgatttttaaattttttttcttctttttaagaagttagggcgggtggctcacaccttaatctcagcactttgggaggctgaggcgggaggattccttgagcctaggagttcaagaccagcctgggcaacataacaagaccctgtctctacaaaaaattaaaaaattaaccaggtgtgctggtgtgcacctggggtcctagccactcgggaggctgaggtggaaggataacttaagcccaggaggttaaggctgcagtgagccatgatcacaccactgtactccagcctaggtgacagagcaagaccctgtctcaaaaaaaaactagtagttagataaatatatagtatattttagaaaggttttattttacaactaaacaatttaaaagtgccttgtcaccaaaagagagtgacaaatttttccattagatgaaaaattgacttgggtaatagcttattccc

SEQ ID NO: 65175 - DNA, 1021 bp, Homo sapiens
taaacactctcttactattcatattaactgtcagctttgagcataaaattaatagcttttatattcatcctttatacaacattttgcttgtgtgattataaacatttatttatatgtcaataatattttaacagagaaagcatatatttcactccagttatatctgtaatactttactatttttgaaaaaataatttatatggtgtcacctacacgattgttgatcatgacaaattgaggcatgccagaaatgacatcaaggtaggggtgttggttactaggctgagaccaaagccagaacatacatttgacgaaatagtgggacaaaagccacgctttgttgcatttccagttagggaatgagattagggctgaaattgagcttactggatagaaaatgtgttctgaaactatctggtattgtggagtgaaaacatatttttgttctttgtgttttctttatgaatggtgagatagttatgaaagtagcaatgtacacatagttgatgttcagtaaatatttaaataataatgtcctgtgatggacatctcatctttttggggaaattgccttttttcctcctcccttttttgatcttatttagatttgatggaagtcacatttaaattttcagggtatttactccatatggaatggagaatagtataaagcagaagttagcaaatttttttgtaaagggacacacagtaaaatatttctggctttgtgggtaatttatggtttctgtcacaactactctgctctgctgttgcacagagaaaacagccacggacaatatataaatgaatgagtatggcttttttccataaaactttatttgcaaaaacaggtggtgggccagatttggcctatgggttgttttgcttacctttggcatgaagtatatcctcaagaaatattgccgcattctggcggaaagtaacctaactttgttaacacaatgtcagcttaaagttactagggatttggatggtccagtaagttggccagctcgtcctg

SEQ ID NO: 65176 - DNA, 1074 bp, Homo sapiens
gcaggaggatcacttgagcccagcaagttgaggctgcagtgagccgtgatcgcaccactgcactttagcctgggtgacacagtaagaccctatctcaggaaaaaaattttttcaaaatattcagcatgtattcgtgaccagcctgggcaacatatgagaccccttctctacaagaaaaaataaaattaaacaaacaagattcaacatgtacctgccttgtttttgtaaactataaatacatgtctgtaatttgtttctttccgcacagaccagtctcttaaaattactatccagaaagagatctttctgaagaaaagaaaaagaatttcaaatgaatcttctaatccttcatatgtttttctacaactagtcctaacttttttaacccttttagttttattttgaaataaaatgagtaattggcatttagagtccttgctgaataaaacttcatgcctttgtgtatctctgagaagcagacaacaatctgatggagaaagtaaaagccatcggctcctcattaacttgagttgcaggcttattattgtgcgaggcactctttgacatttacagtcttcaagttaaaccctggttttaactttttcttttcctgagcattttgtttgatagtataatgttttctgatgctttatctacaaatccttggttaatgtcttcttgtttaaaaagatgtgcatattttttatggaaaattttgaaaatatcaataccccaaaaagaagaaagtaaataactgacagtgctactacctagagataaccatcagcaaattgcgaagtggcacctgacacaaattctagacagctcagagtattattatcttataggtcttcagtttgatagacaaagcatataatcttagttatatttctgtgtcttaaaagatggaagtttttcatgtttgttggtcattcttatttcttctgtaaattgttttttcatagatttttgttatcaatttttgagggccctaaatatataaactgtattagccctttgttatgtataatgttaagttctttgtgttttaacctgccgttcatttccagagtt

SEQ ID NO: 65177 - DNA, 3012 bp, Homo sapiens
caagattaattgaaaaaaatgccttttatgaggaccaaactaagaactagtgatgttaccttaatttgttaatgtaaaacaactgacagtagaggtcacttgttggggatgaaggagtagttgtatgttatttaaatgaggtgcatttcatttctatgtgtctcttaggaaaggaaaattatcaactacttacttttgcttgtcttgaaaaactatggaaaagtagcaatttaactgctcttgagttcttttctttgctgtaaaaattacctattgcttctttttttcttttgggttttaaaactttggaaacttgtgtgtgttttgttttttcttcttaaaatcagtaatctttgagtcttcagcttttaatgacatgtcataaatatgtgtgtgttgtctaattccattttcccgttcttctgttatagggggctagagagctgaaggagagccagtttccccaaaattggtaagtactttgactaggtagacatcgtgtgcctgatcctgatgctagctggatagttattcaaatattgtgatttttttttttttttggcaaataggctctctctcagaaatggggctttgctatttgcactaagtggaaatgaattgtctaatttcacgtagctatacttcaaacgcatttgtgtttctgctaatacagctaggcctgcatgttccaccgttcgataacctgttaaaatgtaaaagtcccgttttccaaaaatgtccttaatgcaatggttctggttgagaattcaaacgtcaagaaattcaaaagttcagattcccagccaggcccagtgggtgtgtgcctatagctccagttacttaggaagctgaggcaggaggatggcttgagccaattcaagtcatccagcttgaagctggcaacaaaacgagaccctcatctcttaaaaaaagattaagattcctatagtgttttgtgttacttaatatgctgttctatttgatggccttagtatatgtgcagagtggcttaggttaatttaactgtggaaacttgactttgaaatttgggactcgtgtttatttacattcttaaaattaatattggattagttagcttcatgtctgatagtacatttttagcatgtgttgttttatataattcttcaaaaggaaaaagagagaaaaagagagagaaatgtaattgtggggcatacaggcaaacattttttcctaatatctactttgagaggtttttttaatggctcttcatcattcttaaacatttctttgaatgcacagggcaatctagtgactagccatcaaacaaatattaactttattaggagagtgtgtattatgaaaaaaattacactcaaataagatagctggaatagggtagtcgcctagtgcaagactactcctttttaaaaaaatttttaaatcctctctcaaatagtaattaacttggtgggtggagtagatatagtagatatttggccaaggtttccttttgatagtttatggtgcttgtggtgtctctcttccttttggggactgggatttgaacatgtttaatggaggcacttgaactagttaatccttgcatttactacctttttattctacttgcctttctctcattaaaccttttaaaataaataatcaagatcctatagctctttactttgacatgggatggaatcttagagaagcgaccttaacccatttataccagaggttgcaaattttttttgtgaaaaatcagactttggcaatgaacttgagcagtaggatataaataactcccacaagcttagtgttccaataatggaacactaggtataaatgggttaagggccttctcctccagtattttaccttgtgtggcagtttcttctagatccctgacaggttgttattcaggtacatattgaataccacatttaaaaaaaatgtagctcattttctataatgtattctgaggaattctacttccacaaaaaataagtattattgaggtggggtgggggtgggaaaaggcttctgtggtcaagtaatttgggaaatgctgcattaaacaaagttaaacaggtttctttactgcaggacttctcagaacctttaatatgctaatgtgcattgtgaatctccaagagggggatatgatatgcagcattcttgaatacttctaatgacagggagcccactacctcataaggtaacccattccttttttgtacgactcttatccttagttcttccttttccttatattgatctgaaatctatctcccataacttccacttctattaagtatttattggttatgctgagactaccacacccacttgcattatcctttgtgtggtatatatttgtaagattctggccaggcttgtctggacagtttttttttaaatagtcattaaatattaataacattctggtaaatgtgacaactagttctaaaaccttggcctcattgtcactatgctctcataccttactccccaacctcctccattttcaatttctgtgtattttaaaatttactcagttttccttttgttggatgtggttgggataatctagtagacgtgcctgatttttgtaaagaaagttaggaaatagaagaatgtgtatattcagacagcctggaccccaggaagcagaggtagaaactgtatattgggctgagcactgatgatggtagggaggggtccaggacactacacagacttgtgaaggagggtgctatggggaaccctggcctggcccaaggcaccataatagcctgcacgttgcagtggaggtatgacctgtgtagagattccttttttaaaaaatgaggacccgccccccaccccctccaaaacaaatagagattagaaagatattttatactcacatacattcagacatttagatatcataaatgtaatgatatgtatgcatatttttttatttcataggaaacaacattattaaatataatttaatagtatagaaacatccaactagctaaggag

SEQ ID NO: 65178 - DNA, 1024 bp, Homo sapiens
acaaacatttattgagcatttactatgtgcctggtactgtttgaggcaaccttttgagtggcacagagtcctgtagatatcagtagtgttaagaatccactttttaataactgcattgttctacagattgttgcatgatttctcttttggttgagagtcatcctaaccttggtgattaaaattgttatttgcatgggcctgagaactttaaaaaggacagctgctaaagaaaaggcagaatagaatagcacattgactttctttggaaatgagtgctaactgcatgaactggggcccttttaaataattttatcgtatgtttggtataactgtacatggttaaacaaagatttacaatctgggagacatgaagctcttttgaaatattccctgaggcaatgagacactattggagtaatatcagtcaacaaacaccatatttaaggcaaaaggaagacatgtagttttagagcatagcatatagtggagtttaaataatttaatactaaaatattaagggaaaagttttaatttttgtttcctaatattggattgggatcccaaaacctaaattttctttctggcttcatcactgattagatatgtggcatagaaacaaatagcttttgtgtatgtggtttacaatctaaagtggtaagatgtggccaggcacagtggctcacacctgtaatcccagcactttgggaggttgaggcagggaggattgcttgagcccaggggtttgataccagcttgggcaacacagtgaggcctgactctacaaaaaaataaagtaatagccaggcatggtggcacacttgaagtcctagctattcaggaggctgaggtgggaggattgcttgagcctgggaggttgaggctgcagtgagctgtgattgtgccactgcacttgagcctggacaacagagtaagacattgtttcaaaaaaaaaaaaaaaaggtgagacacatctaagaatgtgaaaaaaagtttaattaaaattctgactatacattattataaa

SEQ ID NO: 65179 - DNA, 1121 bp, Homo sapiens
ccttaggtttaaaggatttcatgatttgtctttttttgggacggagactcactctgtcgccaggctggagtgtagtggcgcgatctcagttcactgcagtctctgcctcccgggttcaagtgattctcctgtcacagcctcccgagtagctgagattacaggtgcacaccaccatacccagctaattttttttttgtatttttagtagagacttctacgaaataattattattcaccatgttggccaggacggtctcgatctcctgatctcgtgatccacccactttggcctcccagagtgcaggcatgagccactgtgcacggccaggatttcatgttttaagatggcttatgtgatttttctttaaaactttatgtgcagacttttccaaaaatatttcgctagtgtttattgtagtttgttttttagaagagtaactcctgcagcgggttaagagaaagtgaggtctagtggaaaatgaactcagccaaggaatctcgggcccataagctcttctccagcttcactatcagctagctgagtgacctttggggaaatcacttaacttttccgggtttgattttctatgcgatttctgcagtccctacaaatagtcttatgagcagtttcatgacatcatgatttcaggatatcatggcaaaattctttatcagttcaggattggccctgctcctcatttttggagaaaatgccttggagataagatatatgtacattgtgctgccttttgttgaatatgacttttcagcagcatttattaatactttctcaaatgctgtataagttaaaatcccagtcccatcctcatcactttgaatttcaacatattttatatattgtgggtataagcctgtgttgattatacgtaatataattatcacctccgattctgtggtttaccttttcactttcttaatggtgtttttttgatgagcagaagttcttaattttaattttgtccaatttatcagtcttttcctttttactatattttaaaatggtaatattttacttcctaatcaacaacttggatgaaaacagttccagaaagtcattcatttaacaaataatgctgctggaaatcgatgcataagaaatt

SEQ ID NO: 65180 - DNA, 2185 bp, Homo sapiens
ataaggagtgatttactaagtctgatctataattaagaagttttcgttatgatcattagactcagaaaacagcttcgtgagagctatggaagcttgtgaataaggatttttgtactttatagagtgaggaagcaagatttcttctttctatttatttctgctatttcttctcaaccataaaaaatggttctaacagtttttgtttatattgtaagaagacttagaaaaattgttttgttttttattctacttaaaagccttcctgtaattaccctctggcctcaaagtcttttattagctagtgtggctcacatttttcaagcatatagaagttaatatgcactgttttagaacttagacactacaaccactggtcaagtaatagataatcagtgtttactacacccatctgtgaattgtggatttttattacttccatttatttatgtacagtctaaatctttgtagattttagctagtcatctggacttcttggacctctgttcctccatgaaatgaaggtatggatctgccctctgaggtgtccattctagttttaggctgtttgaaggcctactttcctaggtactgaaggaaatagagtactgtaaggcaggcagtggtttctaatcctggctccctattagaatcttttgggggaacttaaatacagatctatgggttctaaataagacataatatattcaatatctttaagggtagggcctgtgaacctgtattttttgaagttttatgtgttatcctgatctaggattgagaactacttgtacaaggtattctattcttttgtgtatgtgtgtgtgtgtgttctagttagggagatgtcatataggtcagattaaaatgtgaggcagtgtgtggttaaacttgaaaatgaatgagaaagaggataaacactttaggagtttaaacaaaggaagaattgggaattaggatggtttgagcagatctctgttaatcagtgagtctttatctggaccctagtgtgtgggtgagatttggatagttagagagagggtaaaaaggtattattcttgttataaggaagagcataagtaaaagttggggagcggaacaattctgattatagttttagtctttattttagtattcttttgctcctgaaactgctgtagatttcctcaataatttgagggagtgagccatgaagatatttggaggaaaagagtgttccagagccccaagaagggaacttgcctggagggtctgaagtacggaaaagaggccagtgttgctggaaaggattgagcgatagggagatgggacggcttcgagtggcagaggcccaaatcactcagtgcctgtgggccattgaaaggaacttcatcttttctcggagtatgatgggaagccactggagggttttgagcagaggagtaacaagatctgtcttggattttgaaaagcttactctggcttgcgagagaatataccttagcggggctagggtagaattggggaggccagttaggaggctgttgcaattatctaggtgaaaggtgaaggtgacttggaccagggaggtggtaggagagttgaggcaagggggtcatggtggatatattttgaaggtagaggcacatggttggctgtcggagtagatgtggagtgtggtaaaagaagagtcttaagatgacttttaggattttttcttctgagggggtggagttaccatttactgagatgggaatgactctgaggaggaagttaggggagaggtagtcaggagtttagttttggatgtgttgagcttgagatacctatttgaccagtgttgagtgggcagttgggtatatgagtttggaattcaggggaaggatatgtgctagagataaacattgggaattgccagtgtgtagatccttctatagccatgagactgtgtgagatcacctaaggggaagagttccaagaactgagtcctgggacagttccacattttaaggtgttggaggcaaggaggaaccagcaaaagaaaccaaagagagtagccagagagttgggaaagaaaatcaagagaggatggtctcctggaagtcaagagaaaaaaaattttgaggaggaagaaatgagcagtgggtcaaaagatactggtcaaggaagtgaagactattttctgttggatttaacaactgttaaatca

SEQ ID NO: 65181 - DNA, 1042 bp, Homo sapiens
cccagctgtaccatttgataaaggtctagtaggtgaataggtgtgtttactataggtgaattggtgtatattttattttgtccctgttcctaaaacattgtatctcatttctgaggagaaattccaacgagttttttaaaaaataaagtggtgtactttggctcgacaaatatttttaaaactaagcaattttataatgggttgtatagttatctttcaattaaataattgtaatcttactttgcaatagagtgaccagtaggtaaagcattatagttttaaaattagcatagcaaatatatagtattaagttttctttactttagctctttgcagaatctgtaaaagttgtttccgttggttgaatggaattgtggaaactttagaagtatatttcattttgataaatatgtgttagaaagagattctacaagcgtttgggggttgagttaaagaattatacaattttgaaaatcagtttgtccctgcttaatttgtaaaaagtggtgctgtatgtgacgggggtgcagtcccatttcagctctgcaggaccctgtccagccggtggtgctcctgtgtagagatgccgccggtgattgcccagactccctgtgttgcctttcctctcctgcttctctgcttaccctcttgatggtctctttccgtcccctgcctgttattcatccttcccttcaagccaccactgttttatttctatttctcttaaaaacaaaacactgttgtaattattagtttttaaacagggagatactgagctattatcaaaaccttaagctttaacagtttgtggggataccccctactttgggccctcagctggaatttggagaatggatagcttaaaatcacttgcacagtaactgaatatttgtaaaatactttatatctggactaagagagagaatagaaaaatacctttttacctcagaaattgctgtattttctggttggggtgagatagaggcaaagttgaggaagaggcaggcatgttacttaactaaaataagcattaatttattag

SEQ ID NO: 65182 - DNA, 2441 bp, Homo sapiens
ctactcccattgagatggcagtgcctttttctgttgttaggcagtttatagaacgcaggatagcttggtaagcgtcttctctgtgcctgatgtgacgtaacattgtggagtatgcagcatgcatgttaagtacaagtggttgtatttggcttgttgctacagcatttttgaagatgtcttaaaaagcaattatcagtggatggagttggatatgtgcaaattattgaaatcatcatatctcgaagaccaaactttgtaacttgaattattctatttagtatttgtttacttcccccaacccccaacacctcagagcagaattctttttctgaaaggaacagatgccgttaacttatcaggacttgatactaaaaagcctacaaaaatctttgtgctgtttattttctttatttaatctatatgcaaaacatattgtaattattgctgttagagagttttaagctgatggttcccccccacccttttgtgctcaggggagatagattaggaatgccaaattgacaacttggtataaagaaataatgaccattgaaataaaacaggagttcaaataaaaagcaaatcagatacaaatgtagaatgaaaatatcttttagtaaaatgttagcatgctgtacttggaacagatgccacattaattcaaaagagagcccagaaaatgtggcaactttacgatgtcaatggagggagctgcaatagttcctgttttcattgtgtcaggttctcagtacctttaggtccagtcctgttccttgtatttattttctgtatattacatgttagtatacaaatattaaatccgtgcctaatacttatatttgtgtaattaaatacattgtcatgctattagatattagtataaaaagcccaataacttatactgcaatagtcatgttttttgttttaaatacacctatcaagatattcagaatctgaagcaaaaattctctgcatccttcaaggcacatttatgataagaaggtagtctaagaattgagtctttcaaagaggcctagtgctttttaaatgtaaaatttggacaagttacaaaattatgagaattttgcttttttctcatttaaatttgtagttatcattggacatttgttatgatttttaagtagcttagactcattcattccttttgtgtttttttttatggtgtttgggaagaagaaggggtgatggaagggtactgtacacactgggatattttcagagtgacattcattttatagaagattgcacagggacgtctctgaattgcccatttcttgcagttcctggttagtgtgggtctgagtgtggagaaaggtgggctgggggctcttaaccagatttacagttgtgctacttcctgagtcgtgcagtgatctaatcatcaggggcatgtcctgtgtgcctgtaaagacgtctggcacacatgcttggaaagcactactagttttctctcagtgaagcttacaatttagtaatttggtaaaaaggttaaaagttttgttttcatgtaattcgagtgaaggggagtttatagcgtgtcagtagaacacagaggttaagaatgttagtgcaggagccactttgcatgggcccagatcctagctttgccacgtattagctctgactgtggccaaatgacttcctgctctgcctctgcctcagtttcttcacctgtaaaatttgaataaaatgaagtggttatgaggaataagtgagttaatgtgtaaactagtagaagtgcctgacacatagtaagtactaaataaatggtactgaagcttagttttctgctcctttcttctcttctcaaggattgagacaagtattagtataagagcctgagctttggcatctgactccagtatttgaatctcagtataaccacttaaagtttaatgtgtgaccttggactaattatttaagctcactccaataaagatgtatcacatacgtgctgcataccactgtgctggtcactgggacttcagtttcttcatctgtgatacagagatggtaataccagcctcctagggttcatgtgacaataaaatgaggaaatcttgagacactcaatcatgatagctgctcttatcattattattgttattattacagtcccactaaaagttcatgggaaaagagtaaatttggaacaatttagctggagaggttttttttctcccttgaaatgcgtggtgagaaagagtatagatgataaaagtgttatctaatgagttcttatttgtgaatacctctgggaaaaatagaaaatacatgggaatatgtcagttttaacagagcctgctaaatattttaggggatttaatgtttattaaaacccatagtgatataagcttttctttttttttctcaacagctggtgagaccagcaccaagatattgatgcagtttatagtagg

SEQ ID NO: 65183 - DNA, 3154 bp, Homo sapiens
ttttttttttttgacacggagtcttgccctgttgcccaggctggagtgcaggggggccatctcagctcactgcaaccactacctcctaggttcaagtgattctccttcctcagccttcccgagtagttgggactacaggcatgtgccaccacacccggctaatttttgtattttcagtagagacggtttcaccatgttgggtagactggtctctaactcctgatctcaagtgatccacctgcctcaccttcccaaagtgctgggattacaggcctaaaccaccacgcctggcccaatagacaaattcttgacatgtgtttacgtgtgtgtttatggtgtagttcttaacagtatacacattggtacatttgtgtgtatattataaatataaatgtactggtgtgttgtcatgggaatgaaaaattttaattatgagcttttgtgttttaaaaattttattttactaactatataaattttatttttatgtgttaatatacaaacttacataaatatatatatttgtgtttggagaagtgacatacacacattttggagaaatgacatagattttaaatgtttgacaagttgtgaacggtttttgtaccttaggtttatctgttgtcatcaataataaagagtgtttattatgtatagtgctaagcctttttacacataggatcttatttagttttaatcctcacagcaatattctgaggatttactattattatcctacctccattttacaaatgaggaagtagaggtttccctcggatcacataggtaacaaatgatacaacctggattcaagcccaggtttgattcctgagcccttgctcttaaatgtccaaaatgctatactaaactatgtaattcccatagatacctagaaatgaattactaaagaagttttcaatttactgaaatggccacagctacagtgtatcattttgaggctgtttcatgttgattttggttgggttaggttgagtagtttgaaaatagtaaacattggaatgggatggaaatgaagacatttgggacagtgcctgctttgtttatccttgtatatccattgccaagcatagtgcgtagcatggggtggggtctaatagctatttcttaaagtttggaagttgggcactttataaagcacagtgtaagttagtttaatactttttttagtaggtgcaaatggtttacattcactatttcagtcagtccttatataacgatcaacgttttagagtgttagataagtgtcctttcaagaaatattacaaaagctgtgcatctaagttagaaagtcattctagcaatatagatacgtataaagtagaaaattagtcattccgttctcatcctacttttaaacttttcctgtgcatttacatatgtattttatatatatatatatatatacacacacacacatttttaaagaagtttaattataccataatactctcaaagtttacttttttccaggtgactatttaaaaaacttgtttatttttgaaaatagggctcatgtgggaagtgggagtaaggttggaggaagagaggtgggtaagatttatacattaagattccaaacctaatgccttagattgattgtacctcatgctttaggaaatggtcattgttattttttaaacttaaaaaaaaatcagtttaaaatgacaacattgttttctgtcctatataagtaatttaggaggcatcatttctgaattaaatgattctagtttattctagtagctacttataaagagagcaattgtgttttcaaataacatttaaaaaaactggtaatctctcttcttggttgttaggacacatttatttcacatttacaaagtaaataggcaagaattggggcaaacctgtaaaaaagaaaaaataaaaagtaggattttaaaaccaagataatacatgtaatattttaattaatagaaactcaaagtagtactgcttaatcagcgtaaagataccctacataggaattagtcctggtcttcacaacttcatgtgagtagtgtgggctgacctcatccccatcacctatccctactcactcaaccactaccaaatgctatgctgataactcagtattttttaacgcagttaaaaaaaaaaagtaagttatttgagtgctgttcattttttctggcattatatttagaaagacatactaaaggccttataatctacattaaatagaactcttgattccagctttgagagttttaacttgttgctgagattattagtgataattcactgttgtaatttttaaattaaaaaattttgttacacaggtaataaaaagttttcgttataaaagtttttaaaaaagcctttctaatcctagaatacactccttgcatctaaggtgctttatgcttctttagatccacgaagtgctaaagccttgccgtaaaattctaagaattggacctggtagaatgtagcagtttatttaaactatagagtagtcaacgttttttaccagccaagtttagtttttctcattggtagcattcataaatatgcttttccttttgagtggctcagaccatgtcctacagagtattttattcttgttcattctagtctaatagtgtacagagggctcaattaatgttatggatggtgaaactgagagacaagaatttgactaagttagtggtagagcctagttttccttttttattctagactcagtcatcttgaccagtactctctacacttttaaaaattatggttaccagttaaatgtatgatagtctaaactagtgttttatgcatgttgtcaaacatataggaaatttgaaatttttaaaaggatgagattttaaaatataagttgtaataatttcttcccagtggctcccttcctcagggtacccacacccacttggagatgagtgctcaagataggccattcttcctgcagaagaggcagccgtggggacagctggaggacagttggtaaaaggtgtgggacttttaagttggagtgatcttttgcagctttttaattttaaagaaacagcctttctttctgtgaaaggctgaaggattcaaagtataggcctggagagaggtgagctttaaaagacagaaatataaaccttacttgttttcc

SEQ ID NO: 65184 - DNA, 1110 bp, Homo sapiens
aaaccaatctgctgtaataatactagcctccccccccacatagttgtgatttaaaatttgttaatatggccaggcgcggtggctcacgcctgtaatcccagctctttggtaggctgaggcgggtggatcacctgaggtcaagagttcgagaccagcctggccaacatggcaaaacctcatctctactgaaaatagaaaattagctgggcgtggtggcaggtgcctgtaatcccagctactcgggaggctgaggcaggagaatcgcttgaacccagaaggcggaggttgcagtgagctgcggttgtgccattgcactccagcctgggagacagagcaagactctgtctcaaaaaaaaaaaaaaattgttaatatgtagattagacattaaatagattccttagatgtgtccaaaatgtatggaatctggtctgatatgcttctactttataagctgttttatttatatgacatcaatttgtcttttcaagacctaatattaaaatgaaataaattcagcagttacaaaggagttaatacaaagggctaaatataaggagaaaaatagtccctggtgttaatggccaatatagaaaatatcaggtttgtaggaattctcattccatatttttatcattatatgtacccatgtgattactgaaatactaaagttggaaatcaggagaggaaataaggagagtaaaactgggcagccatgtagattcagtatagagacctttgacacacctaaattattgaacacagttttcttttttaatgaaatgccccaggccagtataaaggaaacagttgtgatgatgtcagaagacttggtcttaagtgtactcctgtcacgtagctgtacactcttgggaagttcatccttgctgggctttagtttacccagtggtaaaatggggataataataagggcctgcttcactatgatattaaaaggattagataagataatactcatgaatgtactttatattactaaagttgtgtatgtaaattgaatttttaatcagcaataaggggctgggttttaagatatttatctgtatcatgttaataatattaatattatacaattttaaataatgagttag

SEQ ID NO: 65185 - DNA, 1658 bp, Homo sapiens
tttttctaatgtgaaaatgttggtctaaatattgatactttttccggtatgtgctagagaaactgtgtgccacatcagagaacatacaaatttgatttaaatttgattagactctgataataagatatagtcaaattgtgctagatagttcagactttcttgaaacttgctgtgataacgtggtttacttactacaagtcccagtatgcattgcagtttttgcttaacttcagattagagcactgcatgctgggacctgtagttgatttaaacagtacggaaaacccttccttcttgtctgctccattttattatacacagcttcccagccctctaagaactttctgctaagtagtttgattactaatattatgattattatgctgctcaaattctaaagtgagtcttcagaaacaacctagtgttttagtttaccttagattagtttattgtattttttatcagctactataaggtttacacacaaaataatatattgaaaacttgacttagcagatgtaaattatttttatgcatgtggcgatacaggtctctttataattatggcatcattcattgctagtgtgggcatgagaagcctcttattatcaagcctgatatatatgctgttcctttttttttaaaatggggatagttgttccgtaaggttggatggaaggttttctgtgccagtatttaatttcagagttctgtgattcttctgtaataattgtcaacatcttgaatatctgtacgctttaactggaattcctgaaaataaatgtggttttagtgtaaatttaatacttgaaaatgtagtctgaggcagagaaagaggtgaaatgtctttaataatttatttatatttttatttggaaagtttaaatttttttggtgaggattctactttaattttattaactaatatcagagggttgttacagggattaattgttaaaatctatgaccgtacctagcacggtgcttggcacataataagggctcagtaaacgtttagaattagcagcagcagcagtagtagtagttactgttattttaaaaaatagcacgcttcacatttttttcctctctttttacaatataatttgatcagaagctcaggctgttctaagaccttgagatttttggcttatggtaatgatgtgacaaattcctgagaatgtttttgctgtgtgtaaaatgtccttgcacctcagtttctccctaagtgatgtatgcccccaaaaggactatcacaccagtaactgaatattttgactagtattcagctctgcctgtctagtactcattgcatccataccacaagcctttggttgacttcagaaagttcaaaaggtaatgaaaatttattgtttacaatgtttgcactgttagaatatccaaactagttgattaaggaaaataagatgctgcaaaatgccccttttgttacagtgtatgtaaccttggaaaaattctgttgtgtttagaagcatgtaccaatctatcactgtagttcacagtgttacaggattgatgtattggaggccagtaaacagccccagaaagaaagtgtagtttcaaaaaatcttaattctttacattaattttctcttttaggacactgacttcttttaggctcttgaacttgtattttt

SEQ ID NO: 65186 - DNA, 1305 bp, Homo sapiens
tgattttttttctgctgcagatccaagtattgttaaccatgtgcatctccaaagcgacatacttacaaatcaaacagtagttgattatttcactcaattaacagtcagaaccctaaattgtgtgtgttttttttaaattttaaataagtacccaaaactttggggtaatgacagtaatttcctgataaaagtgggtatagtaaccatggcaactgctatctctggccttatggacagtatgttgtattgacgaagcttcaaatcctttatagtagcccgtcacttttatggtgaaatgtagtagcatgtgttgcagatgatttttagctggattgcgttaaatttgtgtgccagcttatctttccttgttaggaatttcttggactatattccaaaacatgtttgtgaaggtgctgttgcctgaaaataacccaccacctgtgttaggcctcctgatgcagattgcacttagttctttcccagcctccttccacagacttgcagaaaataggagggtgtgtagcaactgtatatatgtaaattctagctcaaacttatcagcttgtgtttggacgtgttactgatagcttaaaaaatcttttgtgttttcagaagaggtcagtggatgagagaagtgggcttgtagttggaatactgtttttctaagtgttctttgtagaagcgtgtgtgtgtggggatgtgtgcgtgtgtgtgtgtgtgtgtagggaattagaggtgaggaatggagggcataaatattgagtaaggacttgacaaaagcagaacttcagtgttttttgtttgtttttgtgatggggtgtgtgcgtattactaaaaaaattatttcctggtgggcaatattagaatatggggaatgtttgcttctgagaattttcttcaagaaaaattatttataaaatacatcttgaataattgttaaaaagcaacctgttaaaacaattaaactttttttttttttttttttgagaatgaatctcacactgtcaccaggctggagtgcagtggtgcgatattagctcactgcagcctccacctcccaggttcaagcaattctcctgtctcagcctcctgagtagctgggactacaggcgtgcgccaccacgcccaactaatttttgtatttttagtagagatggtttcaccatgttggccaggatggtctcgatctcttgatctcgtaattcacccgcctcagcctcctaaagtgttgggattacaggcgtgagccaccgcgcccggccaaaacaattaaactttttgtgggggaggattagagaatgttga

SEQ ID NO: 65187 - DNA, 2041 bp, Homo sapiens
tggccggagcagcgttggggaaattccgcttattcttcttcttctgcaacttgttattccggagagtctgcctgcacccctcaccccggggccggccctcccgcattcgcccccgccgccggcggccgcggggcgcccccgggaccccgagcgggccggggcggacaggccgctccgagaggggccgcggccgcccctcccccgcccgcgcccccgccggggggaggggcgcgcggagtgggactctttccgtttggtccagccccgtcgtgcacgcagttcccaacacttctcgtcatcctctctttggtctctttattctgctgagcggtgctgttaggatttcttttttttttttttcccctgaccacgttcgcgatggtgggtagcagcaaggtggccctggtaggggaggggttggtatcgagattgggcaccggaggagaacgccttctttcaactttgtctgtggcttgcacccccggagaaggccacaggccggttgtcgggtgcagatgtgccgagagtgatttctaagtagttgagttgttgtgatgagggtacgactgctaatggtcggcaggttttgttttcattggtgaatctggtgtcatcatattccggtcatatgttgaaatattctttgtttaggtctggaagtagaggatctcactctgcacgtccacattgtgttgtttttaaaatgatgtctctgggagtctggatttctagaatttcaaatctgagtgaaggtccgggcatgtgtgggcctcatcacctggccttgacagtgaactttgtggctgtgtttcagatttcaaagatttgccccatagctggggaaggagttgtgcatttttgctaatagtcggtgtcaggaatgtagatgctcgagctgggaaagttagagagggaagaacatttatatataaataatggatagttgaatattagaatcagattaatttgggctgatgaaagttttttttttttaaagcagttgtgcactctgggaaggaagtcttttcacaggttcacttgatagggattctttaaggcgaggggctggaattatctcctttttgagcgagttctcaccaacatctgtagctttattgagggcctggtaagggtactgaaattgaggctaaaccatgtaagcgtacttttcagtgtttatgatatttgtttacatctggtgttcactctaagcaatagaaataaataggtcagctttgcttttggtctttgaagactggccccctccttccttttttaagtttcacaatttatttggtttacagcattgttggaaactgttactacatttttactggaaatactattattcattttaattttggtaagttccttcttattctcttcttctgtctttacttgtttatggaatcggtgttgtgggcttaaaactagtttattttagggggtcattaaaaatgtctgaaaaatacattttcaaatcccaggacctatcttttcatggcaaagaggaaattttgtgtacagttatgctaatgtttataaaaaaatttctgtacttaaaacgtttgtagatgtacaactatccttaagtgaagagcatagtaatagtgcacaaagttctcaaaacacaaacatctggctaacatgttacgaatattccaggggcttttttttttttttttttaacatcagacttttgcttttggtaacataatagtatttacagtttgactgacattgcttggctgcccataataaagtgttttgcttgggtgctattgaatgctttttaacttagtttttagacaattttgcaggctttatttaagcatgttgtattttggactgaggcaagtctttgtggaactggagtagtaatagatgaaaaagacacctacctgggctaaattgtatttttagaaggtataagtgatggatggggcctatttcttttagctttgaagggtccatcctttttcctattcagtcttctggaaggagctgcctctgaaatactcttcttctgcttacatgaaga

SEQ ID NO: 65188 - DNA, 1098 bp, Homo sapiens
gatcccgttttttagagacagggtcttgctctgttgccctggctggagtgtagtggtgtaatcatagctcactgcagcctcaaactcctgggctcaagtaatcctccttcagcctcctgagtgactgggattacccaccacacctggctaatatttttaaatttttttttttttagagatgggatctcgctatgttgcccaggctggtctcaaactcttggcctcaagcaatcttcccaccttggccttccaaagtgctaggattacaagtgtgagcccccttgagtggcctagaagatctctcttcatgtaaggtggagaatgctctggagagggatcagagtttgagacttggacttacccttcattgtcacaccattggtcagaaagccttttgagagcaggaactggatcttgttcatctctgtatccacaaagctgggcacccagtaggtgctgagtaaataccgaacaaatgcatgaatgatgaataaatgaatgtgactagatgcccttattctccagaggcccctgcgccaaccccggcactcggtttccggtgtcctaagctgccctgcagggatcccctggccgctgcctatagaccagcatctccagcagccagaccgtgggctgctgtgccctcggaggtgccagacacagctaatcccagccctgggcggcggcactcgctgccatcgcttcctcctgcccagacagtgcctggtgcccaccccagggttggaccacagcgcatgggctgcctggtaagaagatgccaggggctggctgggaaaatgaggaagctatggcctgaccaggacaaggttaccagtgtcaggaggggcaatggaagggccagactaacagggctagggggctgcagagaatacacaccctccccaggactctgctctgccttgaagtagcccgcggctggcgccagcctgctgattcctctctccttcctttctccagcacacactggcaaagaaaagctcagtccccatgttggcgctttcttcagtcccagccctcagtgtcccagccccatgcaagcccggggctcccaaatctccctcactggtgttcacatga

SEQ ID NO: 65189 - DNA, 1012 bp, Homo sapiens
aagtgctgggattacaggagtgagccacggcgctcagcctgaacatttacttctcaccagtgttaagtattaacactcacagtgttaagtgtcttatgtacattatactacttaagcctcagaacttctgtattaggtacgtcctgttcctttccccattttgcagatgaagaagctcaggctcagagaggttaagcaactagcctaaggtcacacacacagccaatcaagaggagtgtgaatctggtgcccaagctcattctgtaagctgctgaatgaagaggatgtcctcacctcttctggccccagacaactcctcctcacctcacaaccaccctctttcctgcctgccccctggtctaccctaacagctctcttcagttcagcctagggtagctcccagggggcaggcagggggctgagacctctgccctagagtcccctgagcctttccccttcccctagatgcagagcatggagcatgggcgctgggacacaaactgtgctccatcatggtgaagcaggagcagagcccggagctgcccgtggaccctctggctgccccctcggccatggctgccgcggccgccatggccaccaccccgctgctgggcctcagccccttgtccaggctgcccatcccccaccaggtgagcctgggaactgtttgtagcggctgagggagggaggagggctggtgggtctgtgggaagaggtgcccaaagccctgtgccctggggctctgtgaacaggaagacatgagcctcagggctgagggtgggaagcccccgcccagcccaggcctccgcctacccccctggctgccccctcaccataccgcaacgggcacaagccacagcccccttggagtaactgaggctctcgtctgtgcagaaaaagacagcttgcagggctccaggcaggggtggcatcaggagcccagtccagggtctcagaggtggagacagcccaggccactgacttttctcaaagcttcagtatttttaaaaaa

SEQ ID NO: 65190 - DNA, 1252 bp, Homo sapiens
gaatttcacccagatccactccctttccagatgaggaaactgaggcatagagcattgtgtgccttgcccaggtcatatagatagcacatggcagagcttgaatttgaacccagggctgcctggctcctaactaccacatcatacttcctacagaaattacaggggacatcagggccactgctcctgacagaggaggagaagcggaccctgattgctgagggctaccccatccccacaaaactccccctcaccaaagccgaggagaaggccttgaagagagtccggaggaaaatcaagaacaaggtaaagcctgccaccctggggcttcagagggcttccttggtgggtgggctcccctggcataccagctctgaaattggggggcccaggaagtgaatatgtggcagtgctaacccttgttttcgggcctccccctctagatctcagcccaggagagccgtcgtaagaagaaggagtatgtggagtgtctagaaaagaagtaaggggcttgggaggggtgggcaatccactcccttgcctgacctgccctcccctaggccctccctcagggggcagcagaggcagggggcacagggagtgtgatggtggtgggctgggccgaggagctgttgtgagtctgggggctgcccctgagcctgtgcctgcttggcccctacagggtggagacatttacatctgagaacaatgaactgtggaagaaggtggagaccctggagaatgccaacaggtgggtagtgcctcctgcatccaacctggccccctgcccctctgcaacccgtgcctggctctgcatagctctgggagacaggggagaggagagagaactaagtttaggatgacagggaccccagaaacacaccctgcagccttgggccacttacatcctgcccctctctgtgttcccatttttcctcacctacacctggcagggctggggagttgcttaagtgagcagatgttttcaaagtgtggtcctcagaccagcaacaatccctgggaattattagaaatgcttattctcgggccccatgccaggtctactgaatcagaagctccaggggtagggcccagcgccctgtgttttaataagccctccacgtaattaggttgcaccctcaagtttgagaaccactggtgtaaatccttgttactcaaagccagctgacccagacaggcaacatcagcatcacctaggagcttgttagaaatgcaggctgggcacggtggctca

SEQ ID NO: 65191 - DNA, 3259 bp, Homo sapiens
cagaacccaagaggggaggatgaaagcgaaggtgacacaggatgtggcttggcagagaggcgtgcacacagaagtagtgggcagctggtgtgggcagcagggtggtagggtttggggaggtggaagaccatgcttcccagctcctggcctcccttcgtcagccctgcgggggccatcagaaacagccccggtgtgtgtgatggctgtgcccctacaggtgactgcttgggttccaattgctctcatttctggagggggacggcctcggctgcattgtggggtgtctttgtgtgtgcatgtgaggtatatttctggatgggagtgtgtgcatatgcacacacatacatatgtgtgagggatgtggcaaccggtaaccattgtcctgggagtatttgtatgtaggagaaaggtgtgtgttctgtgtgggcatgtgtgcttgtgaatgggagtgtggtacctgttgtccttctgtgtatttgtgagtgtgtaagggctgtgcaggtgattcccgtagcatatgagatctataggttctgttgaatactatgtcaggaaaatgcgatgtgttgggcctgggtgagaaggttggaaaccattgtgaatagctgtggaaggatgactttgtaggagaaacttgtgagttctttgttggtgtgtgtgcgagtcattaagtgactttggtcactgagtgcgagaggctggggtgggaagtgttcgtttaagtaatgagtgggcataattgtgtaagggatgtgtttgttctgcgtgcatggggagcactgtgtgacttttgttcccctgggtgcgatttgggggagccaaggaggtatgggtggagattgtgagtggctatgagtagggtgtgcgagagcggaggggaggtggtgacagcagccctcgcgagtgtacacttgtgagcgtgcagttgtttggtagcggagggatcgggggaggaaagatgcgcgtctggatgcgcgcagtgcgagtgtgccaggccgggagattcagtcccatccaggcgggccgggccgggctgggggcagggctttctgctgccccgcccattcgtcgccccgcccctcggaccgccccagcgggctgcagcgcagcgggcgtccggcagagggcgctgcgggcccggtgccaccgtgcggccgagggggcgtgctcggcggcgggcaggcagcggcccggccagctatgcggggtcctgcggccgcggctggcggcacttcctggagcggcggcggcagcggcttcccgggcacctgggcgtggggagcgggggcgcgcggcgcggggcgggcggagcgagcgcgcgccatggaggtggcgggcggcgcggagcgggcgtgctgagccccggccgccggcccggcatgggcgtctcccgcgggccctccgccggccggggctagggccggatggagccgcgggacggtagccccgaggcccggagcagcgactccgagtcggcttccgcctcgtccagcggctccgagcgcgacgccggtcccgagccggacaaggcgccgcggcgactcaacaagcggcgcttcccggggctgcggctcttcgggcacaggtgagcggggcggcggcggggcaggcaccgaggcaccggcaggttaccgctccctcaccgggggacattcctcggccactgggggtccgggccacttcggtactgacactgagtcggggagaggctggcaccggcggcacgagccgtcttggcgtgggcacccactgggagtcatcccccagggccgggacacgggcgggatcggtcggcttggcactgtcaccgggtgggggtcattccctggcaccggcagtctagtgcgcctcatgtgtagtaccgtgggaggatcggctcccaaccctccagcaggaagatggaatcaccccagcccccggcacaagcaggttgggcccccaggactggtcacccacgccttcttggcactgatagaacagggcctctctgagcctcctggcaccactgaggtggggatcacaccgccctttggactttcgtgggaccaggttgcctaccatcactgcgtggcatctgcagaacgtagccccgttgataccgtcaccacacatggcttgtccccaagctctggtcactggtttaattgtttaacatgttaagcttctccttggggttgggggtgcctgatcatctgccctaccttgctcttaattagcagagagaccccagcccatccctctgctaggcaggcagcatgtctccctctaccctcttccagcccatgctgggaaagggatggggtgggctggagtctggaatctgctggctgttcaagcttcatcttgccccctcccccagcactccaaatgtcaccatcttgtgcctgtgacagagctttgaccaggactctagcggggaaccggggggagagtgtggaaagactgagtgcaggcagttcatggcaagtgtgctgctcttggtcgtgagccgctgcctgccctggtagccgtggtgtaaggtaagggacgtgaggccccaggagtacctgacctggctccctgcgcttcttcctgaccgagccttgcccttccctggtggccaaggagcttgtagccaatcagccaaggaccccagagccacctcagactgaactctgaccacttggagtctgcccaaggcctccctctcacttttctgcagctgcctagacttggtggcattcacccccaccccgccccttagctttgctctgccccttccctgggtagactttacccaccaataacatgggcggttttctcctgtcgtgtgggctagcatacccgtgatgctgacttgtgccctctacccgtctcacccgggctagggcccactctttgcacctgcactctgtctctgagcacatgcacagatctgaattcttacactggcagatggagctccgtgggctcctgtgttaccacgcaggcttcaatgtcatataaaacagagcagggagtgaaacttccagtagctctgttttgtcacccacagccctgcaagatggagcagtttacacccagctctgcaggatgtagcctccagtattcacaggctccgcagggggagggaggggcgccaccagaggcttcctgttgctgcccacagggtatcaagtgttgggttcttctgacctgtggctgtgccccttctgaagggcacaggtttgtgggtatagggatgagcacattcgggaggaagaacaagaaaccagagaac

SEQ ID NO: 65192 - DNA, 1056 bp, Homo sapiens
ggcttctggattagctggttttacaccccaggggcatcagaaattacctggcacctcacacatgtagacataaggagccttggcctcagagcccctaggagcctgagcgtctgtgccgccatcccctgcccttcacggtgctcaaagtcacaagctcccagagggcaggaggcacacctgcagaaccagtgtgagacaatgggtcccatttagaggcactgccacacggccccagcgagcatggccctgaagtcagggctgcagagggtgcccagcgggtgcctgagcagaagcagcccctgtttgagttggttctgcaatgaatagggagggacgtgttgagggacgcctcttttgcagaggtgagaaccctgtctatggtgccagggtgtctgggagcgaaaggaaacctctttgagtggtttgtctcacctgggctaatgctgggagcagcccaggttgctgtgagaggcagggacaacctagaatccttgggttccagcaagtttgggaaagaaaaatgggcctcagtggccgagctgcgttcatctcactgtgtttgctccccacacaaggtcaggtgccagagtatacagctggcccctgctgggaacccagtgtagaattctcacagtctccctctgtgccaaacgctgtcaggggagggaatgacaattcttgtcattttgtctccatgccatactccaaaaaggtcagatcctgggatgtggagctgcccaggattctcggttggcacaggagcttgagagttggtgtcccctcaggcaaggacagaggaaggactaagtgacccctggtgagagaaagctgaggctccaggcagctgggctgggggagagtgagagaaacgggcctgccctcctcggctccctggaggcctctccagaattcgccagtggcccccccggggcagaggtgaaagtggagtcataggttagccctgagtcttaggccgcgcgggcccctcggagaagcagggatccggagcccttccacccactttaaggcaggagagaattgggaggtgtggaagca

SEQ ID NO: 65193 - DNA, 1102 bp, Homo sapiens
cagctgcgggggcagtgtgtgcaggaagcgggatctgccacacctgcggccaggttcttccgctccccgagttcctgggccacccctgagcggtgccaggcactcattccttgctcttcttggctctcctctgttccgtgtcggggtcagccccacatccagcctgcagtgtgggtttcagcacaggacttggctggcacttgggtcacaggtgtggagggtaggccaaaactaaccaaatgccctggaagagctatcattctgccatctttcctcttcaccccctgcctcgctgaaacaccagagacgtggttaggtcgggaaagcaggttcgagtgagaccaagggctctgtggccgcggaggggagggagaggctgaagagacaggagtggcgttccagctcctctgtctttggtgattaacagctgccagaagcttgtaaattcatcagtttcatgtgatcttcataacatctttgtagttggtttgattcccattttgcagataagaaaaccaaggctcagaaaggtcaggggcctggccaggatcccccagctcacactggagcccagcccaatgatcttctcatgacattgggccactctacttaggagtactcttttcttctattatttgccatccctaaactgggaagacctaagaagaggtttgagtgctccatggggtttagtgaaaggtctttgcctccggtgccaacggtgtgagacccatgagataatctgacctggacccccaagggagaatggccaccaagatccctcaagtcaggggagcaggctggactgggagagacccttggtaaagagactggggctgtgagcccgtcatcatgtggcgtccgggctgggtctggcgtggaggacaagtctgatctttttccttgctttaagggcgcagggagtctaaagcccaatggacatgctcagaggagcccccataccacccaggggtcggtggctggtctggggcagggaagatcgcttcactcgtacccagtgcctcatggtgagaggtctgagaggagagggagggccccagcatcctcctcatctacactgagacctcctccccttgctcct

SEQ ID NO: 65194 - DNA, 2262 bp, Homo sapiens
tgggctcagccctcaccgctgcccacgggtgcagcggcacctccccccactgactgtggccttttgttttctgggtgacagtagcatcaggcggtgtgtccgggtgactaatctcctccaggctgggcagctgtcacagggcggcctgaccaggcaggcaggaaagctgacaccctggggagggctggcaggccggtgccctgacggcagggggcagttgggccttcaggctcctcttcccctgacacaaagcaggccccaggtcgggaagacccgggttcaggtcccgaatgccgctgactggccgtgggactgtggcatgttactggccctcttgaagcctcagtttccccatctctagaatggagctgcaggtcctgcttacctcacagggctgtggtgaggattacacgagatgataaagtacttagcccagggcctgtcacgtagcaggtgttcgttattattccctatctggttccctttcctaccccatcccagcctcatgttccaggaggaaggaccctgcaacccaccccatttctgggacgcaggctttgccgttaggtagacttggactccagcactgactccacactgacttgccgtggactctaggcggtcacctctgcgtcaacttcctcatcaggaatgcagtgtgatgcagtacctattccttggggttgcagtttatgaaatgatctaagtgtttgtcaggggcttagcacagtgcctgacacataggggctcagtaaatgtcagccgtgacactggtgattttgggggagacccagcgctctccacccatgcctgctgtcctgcccctgcagctccctccggcccaggtggtctgctttgagtggggcactatttggggtcataagagcactgccctgacctccctgtcatctgaggcagctggaaactccaataggcagagaccaagagctgagctgtgcagaactctgcttccctaggcacctccaccctgtccatctctcccccaacacccctgtacctggcctgaagctgctcaagacctgcagggcagtagcaaatcagtgcagtgtatggaaggagaaggtgctagacgtgcggcctgggcctgactcctccagcccttcatctttgccttcatccttcctcctgcccaacatgcgtccagggcatcacccaccatgcctaattaatgccagccttcaggggaccacagggcttcttctgtcagccccaggcagcactgtcccagggctgtgaccttgacctctgtggctgccagcggttaggatgcatcccccaccagtctctccccaggaccagggcccaggagatcacctgctgtggggcacaggtggcctcaggtacctggaggcatcgccagcctgatccatgccaggcaggctgcccttcccccactgttaggagaggtagggcacaggagctcgatgctggctgtgaagaagggtaggcagggctgaggtgagctggcagagggagcaaagcatgagttcaggatgggtccatggaggccaggtccaggtgggagctaggatgatgcccacagctcctgcctgcctgcaggagggagctctgggctgtgcagcgtttggaattgtgagtatgggggcttccagcatcagggccgcagaagaatgtgcagtcacaggctccatcaggagcagagtcagaagggtttcccggcatcacccagcttcaccctggggtatccgtactttgtcccttcagaaaggtgagacagagcagtcgagcaccagaaagttcttaccatcagcacttcagacatacaggcacgcacacacccagaatccagaaggctttgcttttggcccaagcctattgtcacggccccctgggtgtgaagggagactgagcagcctctctcccaggagagccagacagtgactctccagttccctgagacctggtctcccctgagctacacattagaccctctctatttccaggagtcaccttcagcctgaccccaaggctatgggctgagagactctgggggtcctgtcaggattaagttcctttgcagagagcctcattttgttatagcttggtttgctccatgtcccatgaggggacacctaacctgcccccaccatgttggtggcaaaacaaaggcccagcaagtgggaagccctgccctgggccccaccgtccatccaggcagaccgactccccattttctttttgttttcttttccatcagcttccggcagggcaggtggaggc

SEQ ID NO: 65195 - DNA, 1065 bp, Homo sapiens
cctcaacaccctccccgcccgcctccagtgtgatggaatggacttgactcccaagatccaggacctgaaaccccagtgtgttgttttcctgaacatccccaggtgaggagggggctaccggagctggggggagccctgctgtccttgtcctgcagagactgtgttttgaggcccatgtcatcgcccgcctttgcaggtactgtgcgggcaccatgccctggggccaccctggggagcaccacgactttgagccccagcggcatgacgacggctacctcgaggtcattggcttcaccatgacgtcgttggtgagtgggccctgggcccatggtgcctgggagcacagcccaaaggtggaaggggtcacccatactcacctccatgggccacggcggcctagttcaccctcacctcccttctttgtctcattcctctggcttgagagcggcacctaccccctctcctcactatgcctcgggataccttcactccccactctgactggagcgtcaccctcattgcctctgtcccttccctttcctacctggggtctcagcctcccctctgccctctggccaggggtcactctcacctttgttctctggctagagtttctgcttcggaaggagcagagtctgggacccccctgcccccagccctggtgccatctgacccaagcttcctgtgcccacaggccgcgctgcaggtgggcggacacggcgagcggctgacgcagtgtcgcgaggtggtgctcaccacatccaaggccatcccggtgcaggtggatggcgagccctgcaagcttgcagcctcacgcatccgcatcgccctgcgcaaccaggccaccatggtgcagaaggccaagcggcggagcgccgcccccctgcacagcgagtacgtcccaccctgccacgtgccctgggtgccaaggccagaccctgccctctctgggccttgatttccccatctgtaaaaggggctgactgtccctctgccccaggggtgttgggagtggagcgggaccttctctcggcaagtggtttggtgccaggccgagggtggcac

SEQ ID NO: 65196 - DNA, 1011 bp, Homo sapiens
gtgctcatggcagaggcttctccaggtctaccagccttgctgcccctcggcccccaccgtcaggtgccctgacctcccgccctgacctccccccacaggagcacctcaactatgtgactgagatcgcacaggatgagatttatatcctggaccctgagctgctgggggcatcggcccggcctgacctcccaacccccacttcccctctccccacctcaccctgctcacccacgccccggtgagtcctggtgtcccgtccctccagcccctggctttcagccccacctgtaagccgatgacttctgaatccctgcttctagcccctccaccagttaactaaatggtgtcaacctgaacctggccaaagcccacctgacggccttcagccctgtggttctgtggggaagcggcctcacgtccaccctggttccctccctgacttctccctcctctggacctcatccttcagccagtcctggcagcccccggacccaccacctgagcactcctccccacccctactgccaccagcccttcccggctgccacgccctggcccccagctcttatatccctgtggccattcgtgccctcgaacccccatctccataccacggtcaactaaaaatgcagagcataccaggccactccccaacctagaagcttctttctcagcagccctttggacgtggattctccccaggccccccgtcattgcactgggctcccagccccctccctgagttcacctccatggtcctgccccactctcttctcttggttctttgaggcatcaggtgtttgccaccactggacttctgtcatcgctgcctccaactcttcccccatctttccggagctcccccacccccatccccttcgaatctcagcttggctgtttcctccttggagagatcactcccaggaccccctctgcaggggtgccacatcacctgttctgaattcttaagagcacccctgctctcagaactccttatttatttgacttgtt

SEQ ID NO: 65197 - DNA, 2460 bp, Homo sapiens
ggggtctgagctgcgtcctgggctcgaggcgtcccccggggagtcgcctcttagcggtgcgtccgggctagcggcgaggggccgccccaagtcttcccaccgccgccaccttagcagcccgacttggggcctggaaagtggagcacgcggaggtgggagggccctgcacgcggcccccggtggggaaggggacgggccagggattcagactcgggctctcccctcaggatgcagcaccgaggcttcctcctcctcaccctcctcgccctgctggcgctcacctccgcggtcgccaaaaagaaaggtgatgggggatgatcgaaggagggctggggacgggcaggcgaggcccctccacttctgggctgggccgcctgggttcctagcctggaaccccaggaaggcggctcccgagggagtctccccgtgccccagtcctgaactctgttcctcgcgcgttgtagataaggtgaagaagggcggcccggggagcgagtgcgctgagtgggcctgggggccctgcacccccagcagcaaggattgcggcgtgggtttccgcgagggcacctgcggggcccagacccagcgcatccggtgcagggtgccctgcaactggaagaaggagtttggaggtgaggcggggcgcagtcagagggcaggagacggggggcacagcctcgccgaagcctgggcggacccttggcggagggcggggccgcgggccgcgcagcgctgacctgggccgctctctcgccagccgactgcaagtacaagtttgagaactggggtgcgtgtgatgggggcacaggcaccaaagtccgccaaggcaccctgaagaaggcgcgctacaatgctcagtgccaggagaccatccgcgtcaccaagccctgcacccccaagaccaaagcaaaggccaaaggtcagcgaaaggagaagggggtggggctgtcgcggggggctgcccccccccccccccgcctgtgaggggacaattccaagttaaaccttaagttttgagtcctggccagtggcttcctgacatcgcctcacttggcttccctgcctggaaaagtctgaagatgggcactacaagagaggccgcaggtgatgctggggacataaatcctccctggcccaaatagggaccaactcaaactactccattggagcatctggcttaggacccagggagagtgtcctggaacggcttgcctttgtcagctctccagccacgggcagcatttggtcagctctgccctttctagtgttgggaggaggtcaaggcccaccctgggcctctcagctcactcgtgactcagcccagcgaggccagcagggcaggggtgaatctgcccgcttctcaggtgaggaggctgaggatgcccagggctgctgtgaccaggactaggactggaaacttgaaggttttctgatcccaagtggaaataggaagctggggatgtcccatgtccacatcacaatggctgccccatcccctgcttccgagtcagctgattggaaaccactagggggcagaatcttctccttccctgatgcccgggtgtttgtggagccggcggtctgcaatgggtcagcctaactgctgatatggtattaatatttctttcttgttttacagccaagaaagggaagggaaaggactagacgccaagcctggatgccaaggagcccctggtgtcacatggggcctggcccacgccctccctctcccaggcccgagatgtgacccaccagtgccttctgtctgctcgttagctttaatcaatcatgccctgccttgtccctctcactccccagccccacccctaagtgcccaaagtggggagggacaagggattctgggaagcttgagcctcccccaaagcaatgtgagtcccagagcccgcttttgttcttccccacaattccattactaagaaacacatcaaataaactgactttttccccccaataaaagctcttcttttttaatatataaaagccccttcccaaggagtttgctgtggaaatgtgtttgggagtgggaaggtggggagaaagaccaggctgtagggactggtgggtttcagggggcttggtggtgggtgctctccagagctcatggaaaaagcagaacaattacaaacatttcttccagggcccctgaaagggtgctccccatcaagtcacctaagcctttcggtcctcatctccctcagggaccagggctggggaagggaacctggctgactcactggaaccaccacacccatctcagcctcacccagtcaaaggtcttttgatacaacccacagccaatcaggaaggttctacccatgggggagagcagatgcgagggctgcgtgcctacctcactgcccacctccccccttcccactgtcatggaaacccgagtgagccaccaggttgacccctttcctcttgcctgtgtgacccagg

SEQ ID NO: 65198 - DNA, 1071 bp, Homo sapiens
gggaaggcaagttactgggactgggctgggagtgaggccttcagcctgaaggtgacatgctggggctctgggagcaggagctgccaccttcagaagtatgtctgctggtgtttcacctcccagagaattctctgctgttttcttggttagcatgcagcccatttctggcttctagtcaattataagttcctttcattcttttggggggatggggacagagggtggggcagagggaaggagctcttttccctggttttaggaggcaagacctggttcctcgccccactatcccctcctcctgtaaagtagagtaggcggtagaggatggccccagctaagctgaggctctggtcagcgggagcagcaggcagagtgagaccgggcagctggctgcttctgcctgcctgcatccctgcatgctctgcgtataccctgtacccacagctgttccacacaccatacccctttcagaaaccagtcagggcaggggaggtgtgggtcagagggtatgggcacttgatggatgggtgtcattctccagccttgtccctcctagggcaaggagccttgctctgaggcactcacaccactattgtgctgtcagactcttcaggggagcccagggatcagggctctctttgagcccagatttccccatgcagaggcagctggcaggttttgtattgacaaaaccagagctgcaagagcatggatagtgaaaccctctggtcagggagttcagctcttctgggctgggctagaagggagatcccacctgtactcacacctgctacaggcaccaagatttatttattttgtttttattttttgagacaagatctcgctcttccatccaggctggagtacagtgacacgaacacggctcactgcagcctcgacctcctgggctcaagggatcctcccacctcagcctcctggcacacgccaccacgcctggctaattttgtttattttgtttgttgtagagacagggtttcaccatgttgcccaggctggtctcgaactcctgggctccagtgatcctcccaccttggcctcccaaagtactgg

SEQ ID NO: 65199 - DNA, 1085 bp, Homo sapiens
gagaagctaaacccaccattccaggcatttaggctattagagatttgtctgaattgatccagcactgagcatcctgatgaggcagcagctctggtcttggtttcagctcagccccaggagagagaaaggatgggcagccacagtccacaaagccaggagtttcaggagctcttatccttccctctctaatgcctttcaccttcttctttacccttcccaactgatttttagggccttaaactctggtgttgagtactactgggaccagctgaacgagacggtcttcactgtccattccaacagcaggagcagcgagcggcctgggtatgtttgggaagtaggcagggagcagctggctggaggcccatcccttcctcctgcttttgatgggctcttaagcagcgccctctagggctctgggtccctcctcaaccagagcagcacctccttgatcttttgtgtacagtttcatttgagaaaagtgttgtgtggctaagaaagagaacaaaagctctgctctcagagtcttgctgtagaaccaccccctggccctctcccatcctggccatggtgcctgggcacacttggggtgaggagagaagatagggcctggagaaggatgccgccccatgaagtctgctccatggcccaggctcttccagatgaccaggacctcagggaccaagctgcccagggctgtagcccagggacaaatcctcttgaggcacccattagtagaaatctggtactgatcctttcatcacttaattcactaatgaagactggaacaaagcgctgggttgttgataaacccaaagcaattgctacttcccctaggaattgctgagcatagctggaggaatagtcccagaagcagctagaaatgtgagtgtctggtgatagtctcaaaaggcctgggctgcctctgctgccagctccagctattccaaggcagtgcctgggagatgcccaaggaagggggatgctagcattggccagaaccttccttgtaggacagcctgtgctccctacctgcaagggtctgttttcagaaggccctggaaagaggatcccagaacagcctc

SEQ ID NO: 65200 - DNA, 1062 bp, Homo sapiens
ggggaggcatagtggagcaacacatctgagacaggaagtacggcccctgttctgttggcagtggacctcttcagtcagtagccaaggtcacagccctgagccgatgatgctccatgctgctgcctggatggaaagcattcgaggggaccttttggccaccagcattatgctgacagtcccagctcagacagaaggccttcttgtggcctcttttctgaggtaggaaggaaggttccgggtcaggaagtacatggtttgttgtaggtctgatgtgaacagtttgttgtcactaaccagccctggctagcaagaattccagaagagggatttggcagggacccatgtggtattgcaacctgtcaatacatcttgacaagtttgtaaatcagtcttcctggcagccagcttcacatagtatctaacacagacaggatttgctcaccaaaaacagagatgagtttgtttttggaggcctctgctgttacttctggccatttacctcttgcataatgtaaggtagccttttctcatctttgccctccaatgcccatctggttctcagacaatccccaaaccccacaaaaatggctgtttagaagaggaaggataaacagttggcccttggtatctgcaggttccacattcatggagtcaacaaaccataaatcaaaaacattttggggaaaaaaaaacagtgaaaattaacaatacaattagtctgggaacggtggttcacacctataatcccagtactttgggaggctgaggtaggcagattttttagcccagaaatttgagaccagcttaggcaacatggtgaaaccctgtctctacaaaacaaaaaacaaaaaaaattagccaggcgtggtgaggcacgcctgtagtaccagctactcgggaggctgaggtaggagaatcacctgagcccagggaagtcagggctgtagtgagccgtgatcacaccactgcacttcagactgggcaacagagtgagatgcaatacagtataataactatttgcataatttacattgtattagtgcaagtaatctagagatgatt

SEQ ID NO: 65201 - DNA, 1047 bp, Homo sapiens
ttctgttttctcttttctccccatatgttgctccagcatcccagagtctcagctggcctaagccatcttgggctgcctggggaactctcttacccaccaggaactcaagcctcttccctgagtaagatggcattagcactggacacattgaacagtgtcctgtcacagaccaagttgtgttggactaagaaaactagtttagcccatcttttttggttgctgtttctcctgacttcttgggtcaggttggcaaatgcctcaagccttagggcccaaaatgtaagggtaccatataaattggacatggacatgacttaagttcttcaaagcttaggcaaggaagactgtgtgtgagcaatatacacctaaggaagttaagactcctctgaggcctcctaacagatgacagaactagaattcctcactttactatccagagcgcttttcactcaaaaacccctttaaaattctgacgaaagcaatgtacagtcttccacagaaaaatatgccacaataacacacacatacttttgtaactctttaagacctcaggtaaagaatgcagctttagattgtgttgagacatttcagcaggtcaggcatggatgcaggtggaaatgagagaggatcagtgagcgcattcatgtcttttgagcggtctacagatgagtggtctccagtctcaaatgaggagaacaaatagggaagtaggagctcagggttcttgtgtgtctcataggcagctgcctatccctgggtgatacagctccctggcacacccattcccaagggcacaggatccagccagccagctgggccaagattgcagccctccctccgaaacaggtggctgtctgcctttgtcccaggcacaggcagctgcaccccattttgtgctctcaatactgctcttgatttctcctccattgtctttgcctcagcagtctctccaagcacaaagacagaggaacaagctccttgggcatctcttggtggtactaaaacccacttggcagtagactaaggccttcaaaaatcctccatctc

SEQ ID NO: 65202 - DNA, 1056 bp, Homo sapiens
tgctacccagaattccccttctgtctggtgttacctcttggaattcactgtggtaatgttcagagaggcaaatgtgttgggccaacagacattcccaggagaacatcctccagagcattgatttattttaagatggcactaagtgacatctctccccaagagatgatctctgacacaatcccatatgaaaactcttctgaaaatgaattgctaattgctattagccttgatgcacttactctaagcagttcttcagacttctggatcagtgcttctcaaactgtggttcttggacaacttacagtagaactacatgggtccttattaaaatacagatccatttcagacctaaaatcagaataagaatgggagtcagagggacccaggattagtatttttaaaacaagatttcttcattttaggtgtctgccctcagcctcctcagcaaggcagagtcagtctcaggtctacttgccattgtggttttgtgcatggtgctttgattctttgctaattatgttgcaggcacagtggtgtttgtcttctgtttcctaccaaactcagcttttttggctgtctgcgcctcacctcccatcttttctaggctgttgctgctttccaggtttctcccttgaatagctgtatgtgctggagtcttttctttatgttgaatcattttaatttttgtccttatttctaggatctagggtccttttgatctttcccttctctgtttatcgtgctagtcctcccagttttaatgatgggtaagtcaggaaagtaagactgggcacatattttctctctcccttcccactgtccatttgcgattcctccagactggatatgctactctctatgactcagaatcttattttctgtctgattcccttctgcttgagccagagagggctttttgttaatttttgttttgtttttaggttaagcttttagagactgctgagctgaagttttgctgaattctcaaaacactaaactgcctgtgttccctctcggctttcattttctaattggaaccaggcacagtattgtaac

SEQ ID NO: 65203 - DNA, 1049 bp, Homo sapiens
tgtattcttaatcatcccattcatttcaccagtggagaaaaggtcctgtctaggaccctgtcttgtctaaggcacgtctctcttatattgccataaaagccttctgggcatcctgtggttcgtggccttttggcctcagccagactaacgtgcctgagtgaacgtcccacatcccataggtgctcatttagccagggttttgtcaaggggattcaagcatttgaacagttctctaattagatagtattcaagctttgtcagaatccaagaacctgtgaatttccttagtactttgtgcaatctgtaccatttatagttggatgtacttgttggtccattttttgtcttctttagctgtgtagcgtatgtgtttaatccacccaattcggttcagtgtaagctccttagagggatatccctcaggtccctcatttagtgctgtgcatgtagatggctgttgaatatctggaatgggaagcatttgttttaaataaaaaaactagagatagcacccattatatacaaagtgatagaaagtgggtggcctggtgtggtcctttcctctccagcctcttctccctcctgtctcctacagatatcctctgtccaactacactgagccacttttcaagcttcttgaatttgtcaaagtgccttcttgccagggtacctttacttggaatgccctcctgtcccctatctccagctacctgcaagctttttactttctgtggcatccatcttaatagaattgatcactcgttccttgtgctatcattgtacctcttacacattctcatgtcagtacttgtcacaccaaactgcagttatttgtttccatgtcactctcttctcctgggctgtgagctccttgagaatagagactgtgtctgttttatctttatgaagtccaagaacttcatgcggaacctgacacttagtagaaagtgaatgaatgaatgaaagagaatctcaaaaaaaaataaataaataaaaataaagcatcctctttatcatttctaggtggtaactagcagaaccaatgatgg

SEQ ID NO: 65204 - DNA, 1012 bp, Homo sapiens
aattacaggatgttaacaattttttaaaatgttgataacaacggttagcatttattaagtactttctttcttttttttttttttttttttttgagacggagtttcactcttgttggccaggctggaatgtaatggcgtgatctcagcttaccgcaacctctacctcccgggttcaagcgattctcctgcctcagcctcccgagtagctagtattacaggcatgcgcaaccacgcctgactaactttgtatttttagtagagatggggtttctccatgttggtcaggctggtctcaaactccctacctcaggtgatcccccgacctcggcctcccaaagtgctgggattacaggcatgagccaccgcgttcagccttattatgtgctttctatatgtcaaacactacactcagtatgtatatgccttctcatcatactcctcactacagtcctatgagataacaccaggatgagcaagtgaatatgaagattagagaaaaagacaagagtaagagtgaaagttgtttccttggaatggccagaagcctaggaaatatttctctgttttgttggccctcaggtcccaatgccatttcggtgagcctgtccccaatgggcagatatgtaatggtgggcttggcctcacgaaggatcctgctgcacccctccacagagcacatggtggcccaggtcttcaggctgcaacaggcccatggtggagagacctccatgagggtgagtgccattgcttgtgccttcactgtatggcagctcccctaggcttggaagggtaatgaggggacagtggtgtgacctcccagccaggaccagagctatcacacagtcataaggagtaaggaagggctgtagtcaagcccatccatgaccagcaggcttcatttgtggaagctctggactatcaaaggcctttcctcacaccctagaatatgtgctgcattccccagaggcctgcaagtatcttcagataaactgaatacttccttacttctacg

SEQ ID NO: 65205 - DNA, 1120 bp, Homo sapiens
atacatgtggaattaaggtccagtctaccccctcaaagaaatgtatgcttgtctgttccttttccaacctggaacctggacattaaactgttgaatattttgtctatcttcccttttggctttgatgttcttaaacgttgaacgttagcaaatgtcatggagacacacccataactactttcttgtaaggaaaccaaggacttgaattcttctcttattcataattaatactttgcattccaagttataggtagcactgggcgctggaggctgcctgccagataggctgactagggtttgaagttagttgggttgctattctactttgcagaagaacctaaaatactttaattttttttctattgataagactgtttttcagtttaagatatattcaattcacctcactcattttctcctctcatctcctctccaagtactcaggttgatcctatgggaacataatgtcatcctcctcatgttatacatatatgcggactttgtcaggctgagccttaaaatgtccatttctcaagcgcacactgtgttctttctctttcgactatcttgctttttgttttttttcactgttctggctctgatatgggttagctgccctcagtgaaccagtactgtatttctttccttgaacttaactttacctgctagccatagggaaaatccagaatgagtactaatcctttctggatttccccctctgtccaacagacagtatagtatagatgcttaagaacaagggtagaggccaggtgccgtggcttacgcttgtaatcccagcactttgggaggccgaggtgggtggatcacctgaggtctggagttcaagaccagcctggccaacattgtgaaaccccgactctactaaaaatacgaagtcagccaggcgtggtgtcacgtgcctgtagtcccagctactcgggaggctgaggcaggagaatcgcttgaacctgggaggtggaggttgcagtgagccgagattgtaccactgcactccagcctgggcgacagagcaagactctgtctcaaaaaatagaacaaggttagaaattgggcctctgtttatgttgagaagtatatgaatagacctgttcgtattgat

SEQ ID NO: 65206 - DNA, 1057 bp, Homo sapiens
tgctgaacaaaccacccccaaatttagtggcataagacatttcttgtttctcacaattctgcgagtccaattgcagtttgcctggtctgcatcattggctcttctctgtggtcaattaatagcttggctggatgtggatgatcttagatggtttagtaggtaaaataatgatctgcctaagaggtccttccacatcttaatccccagaacctgtgaatatgttactttacatggcagaaaggactttgcagttatgattaagattatagatcttgaggtgggaagattatcctgatttatctgggtgggcctcatctgattacatgagctattaaaagtggaagaggaaggcagaagggtcagtcaaggtgctgcaatgatcaaagatgggaatggcctctgctaacagctagcagcgagtgggaacctcagttctgcatctgcaaggaactgaattctgccagcaaccgaaatggacaaggagacagacccgaacacaggccagccaacacctttcttctagcccaatgagtcctttgtttgacttcaggcctatagaactgagagataataaatttgtcttgtttaagccactaagtttctgcttgttgttatggcagttatagaaaactgataacagatagtttcacacatgtatctggcatttggcaggctatttggcttcagctgggatgacttgtctcctttctattcaccagtaaactaacctgtgcttcttcacatagtgtctcagggttgtgtgtgtgacggaatctcgctctgtcgcccaggctggagtgccgtggtgtagtctcagctcactgcaacctccgcctcctgggttcaagtgattctcctgcctcagcctccctagtagctgggattacaggcgcctgccactacacctggctaatttttgtatttttagtagagacagggtttcaccatgttggccaggctggtctcaaactcctgacctcagagttctgaaaagaagcaggagaggtcaagtcctactgcataagcactttttgaatctctccttatgtcatgtttg

SEQ ID NO: 65207 - DNA, 2048 bp, Homo sapiens
ggacacaggaaggggaacatcacacaccggggcctgttgtggggtggggagagcgggggagggatagcattaggaggtatacctaatgttaaatgatgagttaatgggtgcagcacaccagcatggcacatgtatacatatgtaacaaacctgcacgttgtgcacatgtaccctaaaacttaaagtgtaataaaaaaaaaaattaaccgggcggttgcgggcgcctgtagtcccagctactctggaggctgaggcaggagaatggcgttaacctgggaggcggagcttgcagtgagccaagatctcgcccccgcacttgggcgacagagcaagactccgtctcaaaaaacacaaaaaaacaaaaaaacctttttactgaacggtgtcacttctcagtacgacttctttgacctattacttttttgggagtgtgttgttgaattttcccatattttgaatttcccaaatttccttctgttgttctcttatttaatttgatcatggtctgagaacatactttgtgtgattttattcattttaattttattggaacttgttttatggcttagtatataggctcttctagagagtgttacccatgtgcttgaggagaatgtgtattctgcagttatttagtggagtgtcctgtagatgtcggttaaatctacttggtcaatattattgttccagctttgtatatccttgctgattttctatctagtttgtcagttattgagagtgggtattgaaatctctattattattgaattgtgtatttttcccttcaattttgtcagtttttttttttgttttgttttgtttttttgagacagagcctcgctctgttgcccagtgatgcaatctcagctcactgcaacttccgcctcttgggttcaagcgattctcctgcctcagcctcctgagtagctgagattacaggcgtgtgcccccaggcctggctaatttttgtatttttagtagagatggggtttcaccatattggccaggctggtcttaagctcctgatgtcaagggatctacctgccccagcttcccaaagtgctggagttacaggcgtgagccactgcatctggcccaattttgtcaatttttgattaatgtattttgtgactttgtcattaggtgcacatatgtctacgactgatatgtgttcctgatgaattaactattttaccattgtccctctctgtctagtaatattttttgtcttaaagtcaattttttcttatattaatatagctactgcagttcttttatggttgttgattacatgagatatcattttccatccttttactttcagcctgtttagctctttgaatctgaaatgtgtatctggtagaaagcatatgattggagcttgttttttatctagtctgacaatctctgctttttgattgtttagtccattcacatttaatattatcattgatatagttgggtttttgtctgccattttactgtttgttttttgtatttctgatgtttttattcctctgttccttctttactgacttcatttgtattaaatgggtatcatctaatgtgtcttttaaattccttttttgatttttgaatgtattttatcaggatcagtttccaatttattcagacttaattctggtaagatatagaaacatttttcactatctgttgttcccctgtggctccattcccttctacctcttttgtgctgttatatatatattaatattacatctatatgtattacaaacccaacaatgtggtgttaacttattgattaatacaatcttttctcaggcatccttctgtttgttgcctggtgtgggaaagacagagctatacttttcataaaatttacttttattttcatctaactttattaacttgttaataaaattgttattaactttatttttggttaacaacaatttacttgttattattgttaactttatttttggttgtcctctgcccctctcatctcttttatttttattttatttttagagatggggtctcgctctgttgcccaggctggagtg

SEQ ID NO: 65208 - DNA, 3073 bp, Homo sapiens
caggtaaggaaatgtttctttggcttttgaaaatgtgaagggccaaggagccagataaagcttctccctcctttacctatgttgatgtgatggtgtcttggcatctgtctgaaaattctattttggggtcctggtttgatattcagttccttacttgaaggcaggaaatggcagggttgaagaaaaatgtttctcttaccctattcccactttccctagacctttttttttcttttaaattatttgtttaaaccatttgtttcttaatccagcaattaaattctagctatgcttttaattgaatgataaaggtgccgtgtttatgttttggttggtgagatactcatgagccagatcctgtgatttaattaggagcttagtgcacacctctccactcctttggtactgccagcatgtggaatttccaggcagtgtggaatcttctgaggaaggaaaagagggagacgcccttggagctggctcagaaatctccacagaacagaaaatgggctaggcaagccccactgaagcagttttattgtttatttacttatttatttttgagacagagtctcgccctgtcacccaggctggagtgcagtggcacgatcttggctcactgcaatctccacctcccgggttcaagcaattctcctgcctcagcctcccgagtagctaggactacaggtgcccgccaccacgcccagctaattttttgtatttttagtagagagggggtttcaacgtgttagccaggatgatctcaatctcctcacttcgtgatctgcctgcctcagcctcccgaagtgccgggattacaggcgtgagccactgtgcctggccagcagttttatgatggttgaatagcttagtgacagatgtttttcggctgtgaggcatgacgtgactgtgttctgagacgttgtgtgtgctattgcttctggtcagtctctagagaaggaagtaaagcagaattccatttttatatgtggcaaaggttgtttccctgtcacagtctttccctacctccctcccacctccactgccgacttataaatttatgaatgcaaatgcataaaaggtataaaaatcaagccacatttagaggtatctttaataagcatctttattaaaagttttaaaatgacattctgttttggagaatctgggccatgtgatggttaaaggtggggagggatctactgaggcagtggcactgtctgactgtgagaatgttacaagctttatcttatgatttctaaccaagctgctgtgacagcatcaaggccatgggatctggcctttcctaaatagtatgtttgatccaacatcaatgcttagaaattccagaaacctcagtggtttctctgtcagacaccaggacttcataggctctggcctggcaggagagcagactataccacaatctcctgacagcctcatctgaggaggctctggccctagttgtaaaacagatgctgtggtccgtgcctctccttgcctggcacttctgtgtggcttaaccgaaggcacgttaaagcttttttcactggcagataataacttgctgccagacaatactctagagctcttctccacccttctttgttccagacatctgcctccaccaccccatacagcacctcctgcttctctactgccggcagatctctgtttccttggcatttagctttgggggaacagctgtatgttgtttttttctgccttgcctccaagacctccttacttcaatttcctgtttcctactttatgccttgtggtctgaccccaaatggcctaattacacttatggatgcctttgaatataggggctgtgttgcagtgggcagctgtttacagatgtgaaatctgagaaaatctatcaaaggatgcagaatgccattaggagaaggaactctagactccctagaacctcactcttgagttagattagcagatggttttcattcaccattaaactagtttctaccaatttttcaaaatacatattacagagtatttatttatcattcgttgatattttgatgtccctccagattctattggcagttgtatcatttgttttcttctcttgagaaaattccaataataataatatagcaacaaaagcctaacatttattgagcacttgctatatactagggagtgttttacgtgctttacacatatttcgtttctgtcttgcagtaatcatatgagataggtgcgattacctaattaacagtggaggaaactgaatcccagagggctaacttgcccagagtaatgcagctaagaagtagaagaatggagccagtagtctctaaaccaccttcccgatccgcctcctcgtagttgttttaaaggacaaaacattaaaatgtcattctttttcttaggactttataagagggagagagctcccagggaacttcagtgtttttcttgtttgttttaattattctatttaaatggttcctagacataggtttttatgatccagtggtgcttgctgaggaaaatcttattatgtaaccgcccttttcctgagccttcttgccctcctggatacagatgttttgctttttattaaacttacttgtgatcatgtaattgagctgctataataatagctttcagagtgaaagagcaattgaccttttagcagtaagcactcccaattttcctggaaaggcactttgtcatgtatgattggaatgagattgtaatggtcccagaacaattacatttagcagacatttgttctacagctgtcatatgccaggcagtgttctaggttaccagagtgaataagacagactatgatccctgccttcctgtagctccaagtctaggtggttagccatgactcagtcttactccagacataagtggaacttttgcatggtgaatggctttttgcagggatgaagcttggaaatttggcagacctggagggacaaagcagacacacacctgcagttttagggggtgtgaccagtactgtagtgccaaatgagtcttcagtggaccctaagcaaagccattcagaatcatcaacaaaaatgggttt

SEQ ID NO: 65209 - DNA, 1010 bp, Homo sapiens
gagcccggtatttagcacccttcactgttcctaaactgtctgggtctgcctttctctcacttttcatctggcaaatatcttccaattcactcatattcagcctctgcctgcctgaccaaatttgtctccttctatctcatagagccttggcttgatgtcgaccttgtatcagcacggaagtgagtggcagatttctgtgtagttttctaagtatatcattattttaagtacttttaattcctgtgctcttctattggaacttatccctctcccttcagttcttccactaaatatcccatgcattgaaatttcttttcccaccccaacccattatctctgaatcttcccctctttctaaactatagaatctagagagtcatcagttactgtttctgcctttagttatttggaactgtgcctttggtccaggatttctgtgtaccagtactaaaactgatggccttttcccctcttcctgtcgaactcgtccttttgtagtatattttgacctttgccaccttacccattccggtattcaaggttttacctgctcagtaaatgtttgagctggtttggttataggctattttatcctagaggtctgtgggttcttttctcccataggcagcatctcatattgtgtttattatgtttcacattttcctggtcgtgctgggtcctctcctgtcatttctccttcagagttctcaacacttggaatttgaaatctgctctgccttgtattgagatgacatttagctcctatttctccattcttagccaagatgttaaataaactgaggaccagcatgagcacctccccttacttaacatgttgcctcttttatagtgcctcgtgtaaccttcagtctgagactgcgtgtatttgagccagctgatctcattcttgttttcctttatatatcccccactaatctctaaacactataaagccattatctctgaccatattttgcaccctctcttttccatcagtttttaaaaatgtt

SEQ ID NO: 65210 - DNA, 1057 bp, Homo sapiens
aaaatgttctgttcttgtcttaccttccctttctcctgctaccacctcctctctctctccccttccttccccctcgattttcctgtgtcagactgcctcctccttatgctccccccagcccacctgtgcgctctcccccaccccctcccctggctttagcatgacctgaatttacatttccttcttcacctttcatgcactgacttactgttttttctcagggggtcttatattgctccctggttagtaacaatggactgatttctctcatactccttggaaagtcccttctggggtgtttgcctttctttttgggctgatgtagactagaatcttgtttttaatagcagctgtggattagtcacctcaacattagtagtccaggtcttctagtaaaggatgttactggctggttgaaactgactgtttattctttctctgtctccttccctgcccacctccctctacagtaaactgaatgctgcttgtggttgctcctgtcctctgagtgtccacgtgctctgtgaggagggagaataacaaagaaggaatgtaccagcacattttaatttttctgccccaatcttttgccttagctttggtaactagaaggaaagtcagaggcatgtgcagtcacgatttatatttttttcaggtacagagagacatgtaaggtagatatggcgagtaatcctcctaacaattaggttaccattaagacagttgttcctttgtttggtatcctcaccttctcagcacttcatgctcttgcctttgctacctcactttgatgacctctccctctgtttgctaagtcatagatcattttgccatttttgggcttgtcacatccagttgtatagtgttctcagaaaaccaagggagccattactcagagcccatcttttgtggttctcttccatttgaccaaatcagatatgtctaaggttagaggacaggagcaagcatatttagtgtctgagttttattgtcctgctgatttaaaaacctttgaaaatgatgtaccaccatttttgagcctttccaagagcttgct

SEQ ID NO: 65211 - DNA, 1260 bp, Homo sapiens
agtcctgttactatctcttaatagttatgtgccacagagtgatacactttaacttctgggcccagtgttctcatgtatgtagtcatacctacctttctaggttgtggtgaggtttaaacaaatacatatgaagtgctcagtattacctattacctggcatcaaaaaaagtgttcaataaaatgtacgtatcacatatgatcagttgagtttgttattgggctagattatataagtaaacgttgtcagttgaaagcctatggagtactcttatatatatttatatttttaatagatatattatagttatatatctgaggagtactcaattctcacaaaaaaaaaaaaaagaaaaaagagcgtaggcagagcagaatggatagacaggaagtagatgtggatgatgatggcatggaggaaccaaacaacaagataaatgttagcactatgtgataatctctgtgtgtgcctaatttttcactcctgtgttgatccgaaccttctatttgtctactggaggtactgcaaatagaaagaagatcatgtctctgaagcacttgttcatttctcattgaagagcagtattcagcagaatgcagtggtcatgtccagtgtgggagttttgcagctcttcatttatttgtgtctctacctacttagcttgtagaagggtgtgatcccagataacaggcgttagctggctgcaaaaggggaaagttatatatctctccctcatttttccttatgaatgacctctgagttggtaattgacagggattattgccatttttttaatctctgctaggaggctgctggaatcttccctcatttcattatcccgttatgatggagcaggatccagagagcacccaatttacccagacccagcgaggtaaggccaaagtgagaaatggcactaggtggggggaggggcggcccttggggttgccacactgttggaagctccgttctgtgcctctctggtcctggtgctcttttattcttcagttacagttttgagacaggtggttcaggtgatggggaagtattgcaggtaagtgaacagtacctctggtgacagagggttatgaccaagctcttgtcctttgggactcatttccgcaagtgtggtgctagaggaggaacctggagaggccacaggtagtcataggatactctttttctgttggccagagaggctgttgtcattcagatggacagccaacaggggaacaaaatgtttttaatttatagggaaatta

SEQ ID NO: 65212 - DNA, 1043 bp, Homo sapiens
atctacactgtaggcactgtggtgtctttttgtagtatgtctatttttttcctgaggttactagcattttagcagtggtaccttgccttggcccacctcacatcaggggcaggaattgcctgccagtctctgctggcaactgcatcacatgctttaagtgcacccctcaaactagggggccctgcagcgatcagatgaatgcctatcgttggataacttaaacgataattgctagtgtgtgaaatggggaggcttggatgcctctgcattagagcagagatgtcaatttggaaatcataatagaggtgtcgtttcagaacacacaattattttttacaaagaataagggcttgtcatctcccagcccaggcatgcgccaaggcagagatcggggagttgcagagtaagattcagaaatgaagaaagccacagtgcgttcaagtttatttggcctcctgccccttcatcccctggcaaacattgccctctttcccctgtgggggtctcttttggcaatttacagtccaggagcatcagtggtagtttcccaggcaagtagccagcctctggctttttgatttaatgagcctcccagggaccagactgcactgcatttatcaggacaactatgtcagcactttaacctgagcagcataagtgaccagaggggatgaaggtgatgtaagcagtttctgaaaaccttgttccttcaggagttttagtgtgaggttttgggcatctagcaaccttgtctgagagtcttgtcgccagtgaggggcaaccagataggtcttcttgcttattcttccaagtctggttaggctgctgattcatcacttaaatatttgttggtttcctattacatgttaattaggatgtgagttttgatggggataaaaagatgacttggatccagtacctgttttcatgtagcaaagacaagacataagttactgggtgacttgagaaggcctcttaagagaggtacaaaatgctataggggccgggcgcggtggctcacgcctgtaatcccaacactttgg

SEQ ID NO: 65213 - DNA, 1366 bp, Homo sapiens
agtaatggctgtttattagactgtactggctactgtgcttgacacaggttcttaatcataataaccatgtgaaataagagatttcccctcaaatgtggaagcagaggataatgaacttgcccaaggtctcacagccagtgggtgacacaagatggaatttaaactgcagtctgtctgattctaaggctcaaacactaaattgcctcatattttagttactcagagttttcttggttagtctcagaccattaagatatatcaaaaggttttataacagcagcactattgacatttggggctggataattcctcaccatgggaggctgtcctgtgcattgtaggatgtttggcaccattcctggccttcacctgtcacatactggtggtgctctggcacccagaagcaaaaaccaaaaatgtcagcagacattgccacatttctggggggcattccactccccttgaaaagcactggtaaattatttcatgatttgttgtcctttgatcttgctggtttttaaaaatatgacattaggccgggtgcggtggctcacacctgtaatcccagcactttgggaggccgaggtgggcggatcacccgaggtcaggagttcgagaccagcctggccagcatagtgaaaccctgtctctactaaaaatacaaaattagctgggcatggtggtgcatccctgtaatcccagctacgtgggacgctgaggcaggagaattgcttgaacccaggaggtgaaggttgcggtgagcctagatcatgccattgcactccagcctgggcaacaagagcgaaactctatctcaaaataaataaataaatgaataaaactatgacatctcacaaggaactgtcagtgggttcaaaccatcttcttatgatagttaatagtactgcctggttctggtggtcttgtgtcacgcctttctctcattgcttctctcctcttctgtcttatcttttgtcttttgtctctgatttttctaaataaagcgcatctgggtaaagcggtgtttgtgggactttttacacaggtatcgatttagcaggcattcagaactctgagattatagccattagtgctaataaaaagaaggcaatttacatcttctgattatagtacagggggaaaatgcataatttttagcaagcagggaattgaatggcttccagactctacagagttaatcctcctcagggtagtattgattgacatgctggaggacgttaatgtgcgaatctttttgggaacgggggaggagagtggaaattgcagtttctctactaattgtactttaggtgtcgtttatgacaatttcatgttgtctagacagagggaaatggtggagaaatta

SEQ ID NO: 65214 - DNA, 1930 bp, Homo sapiens
cttcctggatgagtttggttcttcctaataacgctgagagttgggcttgtaaactgtgattgatccatgcatccatccattcactcattccattaacagatatttaccaagcacctgctggatttcaggtgctatttattttactttattttgagatggagtttcgctcttcttgcccaggctggagtgcaatggtgcgatctgggctcactgtaacctccgcctcccgggttcaagtgattcttttgcctcagcctctcaactagctgggattacaggcgcctgccaccacgcctggctaacttttctgtatttttagtaaagacggggtttcaccatgttggccggactggtcttgaactcctgacctctggtgctccgcccgcctcggcctcccaaagttctgggattataggcctgagccaccgcacctggctggcaccaggtgctatttaaatgccagcaataattctctcattctaatgggagaaagacaataaaaaaataagatatctagtatgccagacagtgataagttctatggcaaaaaagagaaatgtataaaaaatgtaggggatgctgcaatttgaaataggatcatcaaaaaaggtttgataaggttacactggagcagaggagaccttaaagaagtgcgaaaacaaaccccgtcgacactaggggaaggacattttagacagaggaaagggcgaatgcaaaatctctgagatgcttggcaccgtcagccagtgcagctggagcacagcaagggatggagtgatagaagatgaagttggagaggtgacaaggatgagattatgcagggtcttctaagccatttaaaagatttttgccttttcctttgagtgacttgggaaaccatcagaagtggagtagcatgatcttatattttaaaaagataactgtggctgctggttgagaatagacctaggagctaagtagcgtaaattaaagctaggccaactctgcacacttttagattgatttgtgtcttgagactgtgttgagaaccaaaaaggaggagtgacttgttctgtcaagataagagaggccttaaatgtttgggtgaagagctgatgaacggttgaacaaatgaatgaatcaatcatctcagcaggcatattacctgcaacaaagcccctccactcttccccaacctccaaacaagaaggcgtgttatcgaactgtgaggaagggagagcttgaaaaattaatagtaaacaagagatcataaatggaaatgaaattcctgttttttgctaattacaaaactattgtcaattcatttgtaaaaaatcaaacattacagaaatgtacaattgtagaaagtggatatcctcttaaagccactgctcagagatctgctattaacaatttgtgtgtgtgttaactccagaattttttctatgctaatcaaaacacatttttccatttattttaattcttttccttttttttttttcttttgagacagagtctcgctttgtagcccaggctggagtgcagtggtgcaatcttggctcactgcatcctccacctctggggctcaagcgattctcgtgcctcagcctcccgagtagctgggattacaagtgtgtgccaccaggcctggctaatttttgtatttttagtagagacagggtttcaccatgttggccatgttttgttttctttttcacagtgttgcaggatctttgtgtacttaagtgtttttagaagatgaagttctagaagtggaattgctagtgcccaagagtatgagcgttgttagtggtaaatgaaaattaattgtatgctactcattattactaatgtaagatatataaagtatttcttatttcctgttttatttaactgaacattatttcatagatttcatagattagaactcttaaggccgggcactgtggct

SEQ ID NO: 65215 - DNA, 1510 bp, Homo sapiens
cagctccagcaggctggagttgagcagctctgctagtccgcaggaggagaggactgtgggggtggcctttaaccaggagacaggccactgggaaagaatttacacccagtccagcagatctggaactgtgtcacaggaggccttacatcaggatatgcctgaggagagctctgaggaggattcactcaggaggtaagcagtcgctttcctatcttctgcatcccttgcttttctccttgtatcatttccttgagtcctatagatgttgtggctgtatctggagtgtctgggacccacgcatctgcttctgatctcgccattgcattttcttggaaaatcttgctctggtggcagagataggatagggcctagcagtatgagtcagttggctgcgctagctctatttcggctaagctcaaggttctggctttagccttgaaaggagagtgtagattaggttagagaggcatgaggagatggaaccattgactttctctgcctgctttttgaccttgtcgagacattgtatgtgcaggactacttattgtagtagtcccagagtgcctaggaataagtaaaagagaaccctgcatggtagagattagtatattggctcttcgctgattgtattgctttggacaactgagttcacttcctaatccttatcttttggaacactgcagtttgacaaagggaaaagaaaaaaaaatacatatatgtatatatatgtatgtcaagaaaaattccaattttttcagagatacttgtttttgggcagcctattgctcagttgagattctctgaatggaccttccaggtggactttcaccttggggtggagaagaagaataattcatggaaggaaagactctccatactcagattggcatcctagccaactctttcatgggagaaacagagtaggtgtagttgatcgcccaccatatgttccatgtatggctatgtgcgcatctatcttgatttattagggacttctttctgtaattttgtaaaggtcaaagctagcataatcaccaactccaagaatatgcctgttggatccaaacagcatattgcgctgcattacatcctctgtcgaagcaactgaaatttctctgacataagcttctaacaagggtgggaatatgaattatgcacataatgtacttgttattttgggaggatgctttagacagtcactcagtcaataagtattagttgaatggttacaaattttctaacactgtgctaggcactgtgggaaatacaaaagaagtataatacatggtctttacccacctgagtctacagtgttattgtggaggcaagacaacgaaatttttcaaaagtatagatgagcaaatgcttcattgtatggtaccgagattggatgtagtctcagagagagggaagtatcatccaagaaggctttgcaaaatcaagtcttgaaagatggataggatttggagagagcaagacctttttattttagggaaacagcacatgttaa

SEQ ID NO: 65216 - DNA, 1097 bp, Homo sapiens
ctcctgacctcaagcaatccaatctccttggcttcccaaagttcggggattacaggcgtgagccactgtgcttggcctgatcctttctttagctacaaggttgagctatggagaatatgagagtatgaaatatttttggaagaaaaattctgggaggaagggtcttttctgagaaagtgtcattaaataggaaaagtataatttcccttttgagctagaattgtatttgcaattagaagcttctcgttgcagaagtcgttctttgacattattctttgttccttaagatttccatgaggacaacttacaaggacctgtatggcctcattttagctgcttcagtgtgttggagctgttacttgctccttcatttcctgggcctggtgtgacagtggctactgagcgccatgaaggttgtcccagaaaagaatgctgtccggatactctgggggcgagaacggggtgctcgggccatgggagctcagcggcttctgcaggagctggtagaagataaaacccggtggatgaaatgggagggcaaggtaaggaaaatggctatatttcacataggatttgtgctggtgatggtagaatgagaccttagaatgggttaacagcagagagttgggatatatttatcttgtgtgggagagttgacatatctgacttagggagttgtttgtaaatttgaaagaactaatgtgctagaaatatctttttcctttagagctagacagttttcctgaaggtaatttaggtttatctctctcaatttgtagcttgatcattgtctccagtttttaagcctacactgtgaatgctaatctagaatggttaatgtgcttttgagatacggtgaaccatggtctacaaatcatgtattttaactttttttttttttttgtctcccagagagtagaactgccggatagtccacgctctaccttcttattggccttcagcccagacaggtactcagtatttatctataacttaagatttgtgataacagtgctttctgtatatttggcctggcttgatcttccaagtcagtccctaaagtctctctgaagtactgtatgaacagcactttggcc

SEQ ID NO: 65217 - DNA, 1012 bp, Homo sapiens
gagaaggagctttgtgctgacttgagctggcaaacttctgtcatacttactgagtgatttgtatagaagaacactggggaccttttgcccaggcataagaattggtatttgtcatttatagaatatcagcggaattgaagccagaaccattgtaaggaggcaaatgtgagagattatctgttgcttttgggaagatagctggagttttcaaaccatgccactttgtacttccttgagggtaacacttgccacatttcagtacagtggttatggttacagtatattgcagttgtagtctccccacaagctctcagaggttagaggccttttttgttcatttattttttttccagttctctatccctttcttggagtagggcttgctgcatcgtgtagtcttccaaaagtatgctaaatggacaaaaatagttgaaccaagatcagcagatgtatttagaaaatgacttgtgcctacatgcttgttaactgtcttgaattttttctgttgtcatgtgttaatatagaaaaacctgataaagggaaaaaacccagtgttgtatcattaacctacagtttatctcttactggcttaaaaaaaaatattaacagcaatcaaattactgttcaatgggggggcaagtaacatcacgttgagctagggttttgtctgtaaaatgggagtggagtgggaggagactttagagatggggtatataaggcattggcacttaatagtggtcatacctcgtattacaaatgaatgtttttaaaatgatcagcaatatacttcacatttctacctgaagaaggaatgtaattttggagaagcttatacatgggagaattatctccacttgtcattttctgctgaaaagatataatttcgtacttctccctctgggcccacaggatagttccatggaggagacttagagtggggatgggctcctagagtagctgcagaagaccttgctttttttttttttttttttttttttttgagacatggtct

SEQ ID NO: 65218 - DNA, 1079 bp, Homo sapiens
accatgttggccaggcagatctcgaactcctgactttaggtgatctgcccaccttggcctcccaacatgttgggattataggcgggagccactgtgcctgacctgaagttgtgtttctttaaaatgagctgaagcaaattttatatttcatgatttcatcacttatttctactctctagaatagatcacaggtatatatacctatagtataatgaagcatctgaaattttgctgagttggagaggattaataagcacatttgatttgcagagaaaattggagtattttattctaggcgaccactgaaaacaggacagaaaaatatctctccccagacttttgaatagcagcatagtggcactgagtcctggagccaagcagcctggttcaaattccagcacccctgcttactagctatacaacttgggcaagttacttagtctctctgtgcctctcctcatctgtaaaataccatacagttgttgtaagaactaaattagttaatatgtataaagcatttagaacagcactaggtgctgtatatgccagttgttagtaacaatgttattataacaaaataaagttttccaaaagaacacatgataatgattcttagattgaagtttagatgctttgggaaaactttaatagggaataggaagttaaaacagcatatttgtccctctttccccacagtacccttcaaaataaagtaaaaggatataggttcaaatcctagctaggaaaaaaaaagtaaaaagatggatctttatttttaattaaaaaattatttttttattattttttggagacagtcttgctctggtgcggtggcacaatcttggctcattgcagcctctgcctcctgggttcaagcgattcttgtgcctcagcctcccgagtagctgggattacaggtgtgtgccaccacacctggctaatttttgtatttcttttagtagagtcagagttttgccatgttggccaggcttgtgttgaactctggcttcaagtgatctgcccacctcgatctccctaagtgctggaattacaggtgtgagccagtgcgtccagtttta

SEQ ID NO: 65219 - DNA, 1375 bp, Homo sapiens
gctggactcaaaactcctgggctcaagtagccctccccaatagctggaactacaggtgcatgcacctggcttacatttttttaaattaattttttttttgagatggagtcttgctctgtcaccaggctgcaggcagtggcgcaatcttggctcactgcagcctctgcctcctgggttcaagtggactacaggtgcgcaccaccgcacccagctaattttttgtattttagtagaaatggggtttcaccgtgttggccaggatggtctctatctcctgaccttgtgatctgcccacctcggcctcccaaagtgctgggattacaggcatgagccacctcgctcggccatacatttttatactgtataattttcacaatattttcaatatgtgttaggaaacttataaaacttttgttttgatcatgtagctttatggtgcttattaatatcaaatccaaacattttggtcctcaagcatattggtgaatgttgtctgtttaagttgacaatttttagaccgggcgcggtggctcacacctgtaatcccagcactttgggaggcgaaggtgggtggatcatgaggtcaggagattgagaccatcctggctaacacggtgaaaccccttctctactaaaaaatacaaaaaaaattagcggggaatggtggtgggcgcctgtagtcccagttacttgggagactgaggcaggagaatggcgtgaacccggtaggcggagcttgcagttagccgagttagcaccactgcactccagcctgggcgacagagggagactctgtctcaaaaaaaaaaagttggcaatttctctcacacttccaatttatctcactcttaaaggaataagagaaaatgttttgttgttagcacagagaggtgtctttttctaagatatgcctcagccttggtagagttattttggagtggaatccgcatttttttgcccagtggtttggtttaccccaaaaaaacttaggttcctttaatcacagtcattcttgtttcattctccaattgttcctcataaactcagagagagctttcagtgtcttaatttctgtttgtatagaaatgctgtggtacagcctgtcctgtggtttggggtcatttatattttatcttttcaggctcccccaagttaatgtgatcaatttttttttgcacagctaaaattagttactgatggataaaaattttatgattagttattgtcagcatgtatttatgtgtccagtagtatgtggcagcctgccaatgtaatgtaaggagaaaatagattaagtaatcaggagatctgggtttaagccctaggtttactacctgagaagtcttgtacaaattatttaaggaggctgtaggga

SEQ ID NO: 65220 - DNA, 1062 bp, Homo sapiens
atcctccttctccccagcctctttggaaatcttataactatggtgtttgtggttagaggttagagtctagtagaggatggtcaagactttgaaggcaaacgcttgtcctgtgagggtctgctttctggggagtatccaatggaaacccaaggagtctgtctctcttttttcttttttttttttaagacaggctagctctgtcgcccaaactggagtgcagtggcgcgatcttggctcactgcaacctctgcctcccgggttcaagcgattcccctgcctcagactcccgagtagctggaagtaccggcgcgcgccaccacactcggctaatttttgtatttgtagtaaagacggggtttcatcatgttggccaggctggtcttgaactcctggcctcaagtgattcgtccacgtcggcctctcaaagtgctggaattacaggcatccaccgcgcccgcccagttttgttgtatttgattagtagtttggtcactgcacatacaaaagctaaaaaaggctgtgtgtagaaatcattcaaatattgagatatttaaatgaaaggttaacgctttgggaactcctttgtggttcccttttccttcccagcttggaaagtctggggactaagtctgttattttcatcggattcagtaccatgatcctaatttgtgtcacttcattcttggaaaaaaaaaaattcagcctgtcgggcgcagtggctcactcctgtaatcccagcactttgggaggccaaggcaggtggatcacctgaggtcggaaattcgagaccagcctgactaacgtggagaaacctaaaaattcaaaattagccgggcgtggtggcgcatgcctgtaatcccagctacttgggaggctgaggcaggagaatcacttgaactcgggaggcggaggttgcggtgagccgagatcacgccgttgcactccagcctaggcaacaagagcgaaactccgtctcaaaaaaaaaaaaaaaaaaaaatcagtcttgaggtcattctgggttggataagtttccaaagtatgtagaatcagtaagagagcgtt

SEQ ID NO: 65221 - DNA, 1070 bp, Homo sapiens
ttcctcctttgatgtctggggcgttcttgtattcggtgatcttttgcgccgtcttcttgcttgatgtctcctgagcggcggcggcgccgggtcgagggctgagttgtccgcgaggccccgcgctcaagccgccttctcctgccggtcggtagaacggaccccttcctttattcctgtctcctctttctttttccctgtggctcagcccgttcgctggactgcaaaccgagctcccgtctgccttgcaggtaggcccaggaggagcctgggaggcccagcccggcatccttccgccgcggggttgagaagaccttggcgccggcgggtgggcaggctggccggccgccgtgacactgccagaggaggggctaccggactgcgttgaggggcgcggccggaggggcagcccggaaccgagggagaagccgaaaggagggagagttgctggggcttcccggtgtggttctttagggaggagatgttgggtctagggcacccccagtgtgtggcgaaaatggctttccaggaaccgatagagctttgcgcactttgaccctccttcctttctccttttccccccaccccgaagtctccgggtgtcatgcctcaattgcactggggacccctactgagtccagcctttgaagggacctttgagtaggtggaggcttatggaacaaggccctctggctcttctgagcgaagtgttatgttctcgcctttttctgggtgggtaaactgaggctgatgtctgggacgtgacttccccacatatccccaacagatcattaaattcactgtaagtcactttttgtcgtttaccaattcccttccccccacttaccagtcaagttatgaaaacagtgagttattgtttgatcgtctgtgatcccaattttcctaggaatatagactgttaggaatatagatcctgtcacaagaggcttcagaagtaaaggaaccatgtggtttcttggctgttttgcttttcaaagtctgtatcattttaactagtgtagcaatgacagtttctttttgtttcttgataaccttgttgtctactttgtttc

SEQ ID NO: 65222 - DNA, 1034 bp, Homo sapiens
tttctttttaccatagcattttccgcttggtttttctagtgtgctttggcgccagaggctgttgtattttcttgtccattgtcagtatatgttttctgaatttcacttcctgtttctattccacttatagtcatttatgatttatttgggccttccccacaggtgacagttccttctttcttcgaacctggctcatgaccccacttcacattcctgaaactccagcagaatatcgctataacatggcccattctgcaactcacagtgtgattgagaagactttccgaaccctctgctcccgattccgctgcctggatggatccaagggggcactgcagtactcaccagagaaatccagccatatcatcttggcctgttgtgtcctccacaacatctccctggagcatgggatggatgtttggtcctctccaatgacaggacccatggaacagcccccggaagaggagtatgagcacatggagtccctggacttagaggctgaccgtattcgtcaggagctaatgctcactcattttagctaatgtagaaggtggagaggagggatacttcccaggagttgtgacagactttcctcctcatcaccttttacacagttccatcatctagcatgactgagtatacagatacttgtcataaactgacatttaatatgtgtgttttggtaaggttggggctatgccagaatatcttgattcatttgcatatgcattaattaaactgaaaccaagacagcggctccctactatccagtgaactctaggttgagtaccactaatttgaaagctcagtggttgcaaacatttatgactgtgcctacaaagtcatagtaaaggtcaggagttcaagacaagaccagcctggccaacatggtgaaaccccgtctctactaaaaatacaaaaattagcggccgggtgcggtggctcacgcctgtaatcccagcactttgggaggccgaggcgggcggatcacctgagttcaggagttaagaccagcctgggcaacatggcaagac

SEQ ID NO: 65223 - DNA, 1692 bp, Homo sapiens
cttttcttgttagactggtttgaacaccccagcatctgtcctgtatttgtcaggtgaaaccagaagtctttggataatgaaacccgtgaccaattcttacccaaggtggttatgacatatgtcagctgcttcttggcctatatagttagaagccgacctcttttaccttgtgaataattatgtcatcacctccattattcttttggtgttctcaattgaaatgccaagcattaaatgagccacaaagattgaattcccattatccttgaatcagagcaagcctgtcgtgcagccatgagttagtggagaaaaatccggagttgtaagtacagtacgttttgcctcaacaaaatggaaatttgtagaaaaggagctgctccagcctttgagtcactttaaagtctttggtaggttcctaatgttttttcttttaacatttacagagagaagattataaatggcagagccatttaactgtggttagctgttggattctgatactttcttaaaaatacgttcttgcaccaacatcttcattgggaacagttcagaaaaagcaaagaggagagccaacattcacatttaccatggctataccaataacagtgcttgactgtgacctcttgctatatggccgtggtcaccggacattggaccgttttaagctggatgatgtgactgatgaatacttgatgtccatgtatgggtttccacggcagttcatttattacttggtggagctcttgggggcgaatctttctaggcctactcagcgatccagggctattagcccagagacacaggtccttgcagcattgggtttttatacctcaggttccttccagactcggatgggagatgccattggaatcagtcaggcgtctatgagtcgttgtgttgccaatgtcactgaagcacttgtggaaagggcctcacagttcattcgctttccagctgatgaagcctccattcaggctctgaaggatgaattctatgggttggcagggatgccaggggtgatgggggtggttgactgtatccatgtggccatcaaggcaccaaatgctgaagacctctcctatgtgaaccgaaaaggcctgcattctttaaactgcctgatggtgtgtgacattagagggacactaatgaccgtggagacaaactggcccggcagcctacaggactgtgctgtgctgcagcagtcttccctcagtagtcagtttgaagcgggtatgcacaaagatagctggcttctgggtaagtttgcaagtgtgaattttcattttgtttggaggcatagaaaagttatgtaggctgggggcggtggctcacacaaccccagcactttgggaggctgaggcggtagatcacctgaggtcaagagctggagaccagcctggccaacatggtgaaatcttgtctctactaaaaatacaaaaattgggcatggtggcaggcgcctgtagttccagctactcgggaggctgaggcaggacaatcgcttgaacccagaaggcagaggttgcagtgagccgagatggcgccattgcacccccacctgggcaacagagcaaaaactccatctcaaaaaaaaaaaaagaaagaaagaaaagggaccgcacgtgtagctcatgcctgttatcctagcactttgggaggccgaggcaggcagatcacctgaggttgggagtt

SEQ ID NO: 65224 - DNA, 1434 bp, Homo sapiens
gggccaggaagtacggaagaccagacacattggaagtcgggagcgaaaaagaggctggccgaaccaggtttgggaagcgactctgccacttttaaagggcaccctaaaaacggatgtcaaagtctgattgcgccggccactcagttagcccaggcccgtcacccacctctccgcggctgccaggttaccagccacacttcccacccacccagccgggttgggccctcctccggaaccggcgactgcacagaggccgccacggcgcgcaacagcggcaccgccccttccgcgtcagcgcccgccccgcgccgcgccctcactgccgctgccgcggctacctgcggttcatctccgcacattccacacgcggcccaaacggtctctctctctctctctcaaacaccgcctttccgtctttgttttatcttgagtagcttagaaagattggagaagaaagcttacgtggaatgaaaatcaacttttatggatattttgaggactaaaagaataaatagggcgtccgtactgtagcgaaagtgcgactaaggttaggcatctggatttcccccgtagccctctttcaccccccccccccggccattaccgaagcggatgaaaacaaacactaacgatggcggcgccgggaagcgaccggctgctgggcttaaggcgggagtgaccgcttaaccagtgagggaagcactgaagagcgccagtcgacgtgggtgcgacaactcgcggagtcttaggagcaaaacgtctggggcctgcgagccaggacccttctgaagccttaggtgtctatcggcgacgtgtacggtcactgcagctccggagcgcggaaccctcagccaggaggcgcggctggtcggtcccaggtcccggcctccgtaatgagagcccggaaccactctttgtgccgcagcttcgcaggtactaacttttgcgggggataccccaagatctctcagcgcccccgggtgggaggctgtggatctgcggccccttggctgctgcttcgtggaagtagaagggattagccacggttcaatcccctgggcccctgagttttctgtgggaagttgagttggtctaggccccgttggcccctgcttgtttggcagagaatcccctccaccccagagctttcctctccactttttcagctccttgggttaggtcgtcaggcgttttggaggtaatttggggggccataactccggggttgggtgccaatatgagtgaggtaggttttcattcaatcaagatttgctgagtgccaaatatgtactccgcgtgtaggtgagggtgactgttgactagtgaaaaaagggacccatggttcacgactgtcttcttactggcagtggaacgacctgtggaaacctgtgatccattctcattaaataaatctctgggtaagtggctaagcac

SEQ ID NO: 65225 - DNA, 1037 bp, Homo sapiens
tttctctctgtctcctagtctggagtgcaagggtgctgtctgaactcatggcagcctctgcctcccaagttcaagcgattctcgtgcctcagcctcccaagtggctgggattacaggctgcggcaccactcctggctaatttttgtatttttagtagagacgggttttgctatgttggccaggctggtctcgaactcctgacctcatgtgatcccctgccctcagcttcccaaagtgctgggattacaggcgtgagccaccgagcttggccttttaaaagttttattttaattaagacataataattgttgtacatatttataggatacagtgatgttttgataaatatatacattgtgtaatgatcaaatcagggtaattaggattgcctgagtccaggagttcaataccaacctggccaacatagagagacccccatctcttttttaaaaaattgcatagcaagagttgcaggatttagtaactggatagttaatagcaaagggcagaaaaaaggaagttgttcaattgcaggtttctttaatgtttgtatcaaatttacctttgtattcataggagcactcaaagaaagaattttgcaaagagcaaagcgtaaagtaaaccttacatacatttatcttgtagaggatgaattgactgcttggttaactggacctaagggaacacataggcctgggagataactttttccctagtggagactgcaccctttttggctcaataactgtagttacataatcctttcaatgctaccagttgtacaaaaagtcattggagccattgtgccgttataatgattgcattggtagataatctgatggtgataatccaattcttacctttagtgtaagataagggcagtataatcctgcagcgcatttctttctttctttgtttttcttcttcgtgagacagggccttgctctgtcacccaagctggagtacaatggcacagttgttagtgttctttttaaccaaaattaggaatgtctgaagtgggtatatgtttcaaatgc

SEQ ID NO: 65226 - DNA, 1433 bp, Homo sapiens
tcatgaaatccatgaatccccatgaaattatatgcaaacattcctatatgtatgtttttttctggagaaagggcttttgtcaatagattctcaaaagcccataactccccaaagttaaattgatttagtggcctttgaaggaatataaattaactaatgtgtgttcagcaaagtttatgtctcattaaaatttagtcctgaatctgctggatgatgaaataattttgaatggataattaaagctcaaagtttcagaatcaggtaaaatgttctcattcattttttaggttcctagatgtagctcagtgtggaatctgttttcctcaagagatagtatctcagtatttttcactttggtatctttagttaaaggaaatttttttcctcccactcccacatgattattcctaggctagtagacaataccatctctgtatgctttgatgtatcaatgcctttttaaagatattagtcatatttttttcactttttttttttagattcctataggcaatggaaactgatctcaattcccaggacagaaaggacctggacaagtttattaaattttttgccctcaaggtaatgtgtccattctcttgagcctagaactgttagaaataacttccgtgcttctcccttttgcgaacaactctctttggaaagtagcataacagcttgcagcttgcccattttaagggatacttctgtctgttgtcaaccaaactgtgaggtatgggggcggtattgggggtgtagctaaaatgtagcttccaattttccacagctacttgttcaaaaaaaaaattttttttttttttgcaagtctgtttgcagaaatgtcaaactgttatgccaggttattggcacagtatgttccctttgggtgggaacaaagaccatcagctggaatgggcagcattttggacatctttccttaagtttcaagtaatcctgaaatgttcaacttttatatattcttcccttcctggtaaatgaggaattaaaattgaattttgaatgccatattttcctaaatctaaaaatcatttctacctatgtcactcctctcaaccattgccatgctagaacaatccatgtagttgattttagttgtaaaattatgtggaagacttttgccatatgggccaaatgatatgaataattgtggaatttttgttttaaatctaccatggtgttataagtttgtggcagggaatatttaaaaccacagttggacacgtttctttatgaacatcatagccaccatgctcagctttccttctgccatatgagaatattacagtttccaagcctcaacctgtaattcctttcattggttgacactgtaccctcaggaatgtttataaagttattttttgtatgtggtgttttttctgttctcaaaaattaaaattatactgtttcccaaa

SEQ ID NO: 65227 - DNA, 1032 bp, Homo sapiens
taaatagcaacattcccatacccaggggtgatggagggtgtgattagagaagaggactttctatgtcaaaggggcctcaggacaaaggagagaatagaatgactttggagaacctggtgacttcggctaccagttctgcgcaggcttgtgctccacacatctgctgggcttagcactgaaacagttagctcagcccctgggaaaacggggagcaaggaacttatttgaggcctttgggaagctccacagcttggaatcccaatcccagtacaaacaagtctgtgttttcttctctaataacggcctcatctgtccctaacccctatcacgtcaggccccctgcactgtgggcatgtgggcgggagccattccttatctctctactgagccatcttgtttgtcacgctctgggattgcctattttttccttgcctttccttttctcctctttgtttttctcttgcttagctctcaagctctcgcctttcctatcagcctgctgccctgggcgttggatcagctgacctggcttatccagtagtgtttgctgctggcttaaatgctacacaccctcaccaggtatctttaaagatggggaggactatgggtttccagtgctgcctcccctgcccggaggcaattgaggggtctctcaaggcagagggatatgttctaagtgctatattctgaagcaaaactctttcgtgacttcagagaccaaaagtgactcgagaggaaggagcctcttagacttcagaaaggaaagaagacttttccaggatttttctccatttcctttttcctctgtagtcattagtcattaccgtgcatttcttccattaactgagtttcagagaggataaagatccagggattgctgcctacttggtggcagcgttggtgatggaaaagtcaaaagcagataccatcatgctagaatgtgaagttcccctcctgcctggcatgccatgattcactgtctctttccatttttccccaaagctgatggttcctgggaaggaaggtggggta

SEQ ID NO: 65228 - DNA, 1005 bp, Homo sapiens
ctagacctagaagcatctactgcacttgatccagatttccttcatagggatcagatgtgctggtgtagacagaagggatggacaggtggagtctggtctggggagacattttggaggccgataaacaacaaggcattttttgtcatgcctttggttaaaattcataatgaaattcaactctaaatggagattttccactgatacccacttaggtcctattcgtggctaggcaaggagtttgaaggagtgggacataaacttaactagtggagaggaatattatcaccagcattagaagtgaacagtctgggagagaaaagtgtaaagatttctctccctaagataagcctgaaagaaccttttgataattgctagaaggaaagacttgttcatagcttatctcctctgtggttcaaggcaagctaaactgactctgtcttgtttttgaagaaaccagctttttctaaagatgacattcttccgatggacctggggaccttctatcgggagtttcagaacccacctcagctgagcagcctctccatagatattggagcacagtccatggctgaagacttggtatggaaacgtcttcctctaccacagtgcatccttatttgatggtcattcctttgccaaaggcctaggaggcctaccaccttctatcttccctgtaataggaaagagacataattagaaaattatcttttgatcactcttgagattggcattgtgcccagcagtcattatctggaatttgcttgagcttggttccttctttctctgcacattctcagcattacttacatgctcctgttgttctgtgcctgacgtcttctccttgcagatgccactaggccaagttgctctaacagccattgcattagctatttagctttccaggcagatgccagtggtactgggcagaggagattgtgaggtcctgagtatctgtgttcttgctctttcctcagagagctcactccgtcatctagcagttctcac

SEQ ID NO: 65229 - DNA, 1043 bp, Homo sapiens
tagagacggggtttcaccatgttggccaggatggtctcgatctcctgacctcatgatccacccacctcggcctcccaaagtgctgggattccaggcgtgagccactgcacccggccagccctgttgtctttcaaagaacctcggccccagtgatggctgatctcactcccactgtctcgtagaattacactccttcctggggatccctcttcctgcagccttgtccttggggagtacagggaagtacctgcagtgaccctgcccccatgaccttggccaggcaggatgattccagagcccgtactgtggggatcctcactgaccagcccagccccatccgcaagccaggctgggcctgggcataacttcgctgggctctcccaagaccatcagcagtgcatccagccccctggggcctgggctgctgctggttcttcatcagtcccttggtctctagcctcggccagggctgctctgctctccgccctcctttgtgtatcaagtgtcgctcacagccccattcactggggagcctttcggatctatttggtctttctcatgtcccccactggtctgtaccccagggagcgggtgcttgtactgtgtgaatccagtgttcacattcacacttaatgacttccttggcaccaatcatgtatttcaccgtttgcactttttgtatttcaataaaaatgttgatgcaaaactgctcatctggatgttggggaaatgagttgggtgtggaagttggaaactggatgggaagtgtggtgcggtggaggaagaggaacagatggggcctcaggaagtcccctccccagtccgtctgccgcttcctcatcttgtgcactcgagtggtgatgagggcagcttcctgaccagcttctaggcatggaggtgtccacggccaccttcccgttgtttgtacccccagcattccagcaggccaccatgtgctgcatcctatgaccagggcctctcctgtttcccaactggaaggtaccggaagtttgaagggatcttagatttatctaaggcaagca

SEQ ID NO: 65230 - DNA, 1092 bp, Homo sapiens
tcttccctgggaggcgcctaggcccgaaagcctgcagcgcacctgccccaagtccagccccaggcccaacagaagagatggggactcactgaggaagcccaccacatgggggtagaggtcaaaggtgagcaggggctcaggaagctcccggaggaaggtcttgaggatgactgctggcaggtgcagctcattgtactggtcgaaatccacaggcagccctggggtgggggcagcgtgagagaagctcggcacagcctgaagggcagcacccatctgcagacaacgcgggccgcactgcctgactgcccctggacactgcataagcccctcctcccaggggcgccctctgacacctgcctccctcttcctctgtgatcagagaatgcaggttccggccatctggggaagtggggcccggcacaccccaccgttattccttgcctctgaatgtgcctatacccaggacccgggagcccgaccgatgaggcagcaggcctggcagaagtaggacttatgtgacacccagagccacggaaacctccagcaggaagagactctgagactctcatttacagggcagcagagggcagagaagccccctaccagtaacacacatatggccctgcaacagcccagggctgctcacccatgttgtacttctgctgcacttcccggaccacttgggtgttggccgacctccggaagatgccctcggtggtgagagctgggaaacagtagggcctggtgagcctccgagcgctgggcaccggctggattccctgccccttctctgtcttggggttctaggcagggctgggtggggacgttgaggcttgcaggacctccctctgccctgcccagcagcttccccagcttcctgaagggagccgggagacctggctggtgaggaggcaggcccggcactcaccgtgggcctgtaagtaggcaacagtctccctgagtacaatgggaatgggctcctgctctggattcttctcctggaggctgcgggaaaaaggctggtgagccgggcctgcagcccttcccgccccgccgtggcccagccacctttcatacttactgctgcagcga

SEQ ID NO: 65231 - DNA, 1003 bp, Homo sapiens
agtgggcggggctcctggaaaggccatgtttggggccggaagtgggttggaggtgtggcggaaatggttggggatagaagagagcgggagggggcggttcccgttccaccgcggagccggatgtttgccgagccttgacaggcgtggcagagggagcagtgcccgagcgcggtgagctgctgggcgcggggtctccccgggtggggatggggaaaggaaaggagctggccaggtcgtccgaagggatggggtccggatggggaggaccggagcagatccgaggaggggaacgggggtggaactgggctcagaggcctggccttcctgcagggtttctgccccattttggcgcctgcaataagaggacttaatcattttcactaccttcttcctgccttccccagggcagagtccaggccggatcgctgtcatccagcaagccggcgggagggggaaatctcccagatctgatctggcaaagcactaagaagaagaaatttgggggaagtgttcctccttgccacttattaggccacgctttcagttcaacttatttatttttttaagacggagtttcactcttattgcccaggctggagtctcggttcactgcaacctccgcctcccggattcaagcgattctcctgcctcagcctcctgagtagctgggattacaggcgtccgccaccacgcccggctaatttttgtatttttagtagagacagggtttcaccatgttggccaggctggtctcgaactcctgacctcgtgatcctcccgcccccgcctcccaaagtgctgggattatagacgtgagccactgcgcccggcctcagttcaacttcttaatctgtgaaacaggataattgcaaaacgtaacctgggctttgtaaaccgtgaagctctatgcaaacataattgtagttgagagttgtaattgctgttgtattgtggtgggatttgcaactgggaggccgattccaacgttgagaatatgatttct

SEQ ID NO: 65232 - DNA, 2122 bp, Homo sapiens
atggctggaacaattagttccgctttcccagctagtcgaatcactggtgcacctccggaatccgaggttcgcattgctctcggacagagttctgcctccccagtactcccaaactcccagtcctgtgcaccaatgaggtccagctctgaggcttctttcctgagaaaaaaatttggaagtccgtgactgtttcctggaggagctgagaagaggaagctcacttccggcgtagggaggctttctgacccggaatggaggaggcggaggagctgctcttggaggggaagaaggcgctgcaactcggtgagtgacctgcgatgtccgcgaccctcaaccttggcccaggtggatctgacgctctgtggtcagctttctcctcagtcttctctcctccggatcccaggatcctccagtgccctcagagtcgctgggggcttctgaagagcccttgagcctcctcaaaactttcagggccctccttagagccctcacctgtccctcgggctccgcaggcccacctggacctgcggtttcctcccacacttttccccacctcccaccttcttgggtggctccctcactgtcttcccttctctctgcagcccgcgagccgcgcctgggcctggacttaggatggaacccttccggagaaggctgtacgcagggcctcaaagacgtcccacccgagccgacccgagacatcctcgctttaaagagccttccccggggcttggcccttggcccctcactcgccaaggaacagcgcttgggggtctggtgtgtcggggaccccctgcagcccggcctgctgtgggggccgctggaagaggagtctgcctccaaggagaagggcgagggagtaaagccacggcaggaggaggtattgaaggatagagcgacttccctccgcccttgaaaatgtaggggaggtttggacattgctagacagcttttcaatttgaagaaagagagtatttcaagagataggagatagtcttgtcccttctcttcaggactgtctcctctcagcagcagtagttaaagaatcgaggtttgaaaagttgttgaaagctggaatcatacagtgtcagcagtgagtgaggaaggtcaagagctaaggtttttggaattaagaaagcatgggatcaaattccagctttgtcacctagctggttaaattacgtgccgcatttaattcatctgtgaaacaaagcagtggctctcttgggattatatggaggagctgatgaaatagtgaagataaaaggtttcactgcacaataagtaccattttattttatttatttttcttttttcttagacagtcttgctttgtcgcccaggctggagtgcagtggcacgatctcgccttattgcaacctccacttcccaggttcaagtgattctcatgcctcagcctcccgagtagctgggattacagatgtgcaccaccacacccagctaatttttgtatttttagtagagacagggtttcaccatgttggtgaggctggtctcaaactcctggcctcaagtaatccgcctgcctgggcctcccaaagtgctgagattacaggtgtgagcccccgcgcctggcccaataaataccattttaaaaagctggtgttccttattactttttctgtttagtactcactggaagacagtaatgtgttcaatttagtaattctccatacccttgggagggaggtgaggagacagactttttggtccttactgaatgaagaatcagacagcactgtcctgttagaggagaaccagaggcttctaaccttccaggagtttcatcttaaatttgtcccaggaaagtttcatctagtttctttttttattcctacccgacccctcgaacacatttgagaaggacttttgttggtttatttcagaacctgtcattaggcccatggggagacgtgtgtgcctgtgagcagagttctggctggactaggtaagtcagaggagagtgtgtcgttcctttgaggttttctgttgtggtttgggatggaacccggtgctgactgtcatttcctattcagtgctcttttgcagtgaatgttccaaaggcacggcgtcctttaggacccagactgcttggggactg

SEQ ID NO: 65233 - DNA, 1232 bp, Homo sapiens
ccattcgatttgcttccaaattgaagcgcctgtccctcaaggagctccatgggtgtgaccatcctggtgctaagcaaccagtcagcagtagcgctgccaacgaccactgcctcactgggtcccttcagcagcgcttaaacaataagcaccctgtggcgttcctagggaaggaggcagaacaacaagctctaccggatgtcaattcaaacatctctacttcagaagaggtttgacctagtatgcttggaacacgatttggtggttcttaagcaggaagggaagtccttgatctgtctgtcatagtagactctaatccctactaggcaaccccaagaaagaagatgcagacacgcagcagtgagaaagcacgagtctttatggagctgtgtcagcaaaaggcaaagctgtcaggtgcccatctccacctccaccacctctgcccaggcgccgaggcccatgtccttatggattagcaccaggctgggggcggcatctggctcctctggcaccacaaagcacttctcctggctttctgaaatggtgacctcaacaacatccctggcgggggagacttcctcctctctgtgtgtgtccagcagttgtggctcagcctgcaggagcaccacagtgggctcagaagcagcagaaggcacagagggtgggctgcagggtgcctcaggccggtgactgagctgatgccgcctgaggctctgcgggagggtgtagcccatgccacaggtggggcagcggtagggcttgtcctccaagtgagatttgaggtggcgccgcagcttggtggccagcgtgtaagcacggccacactggggacagggaaagggcctctctccggagtgcaggcgctcgtgagctcggagcgtgtgtgggtctcggagggccttgccacacaccgggcacaagtgggcctccccggtgtgtgagatgagatggcgccgcagttcaggcagctgggggaaggcatcggcacagtgtgggcagcggtaaggacgctccccggtgtggagccgcaaatgcccacgcaggttgccccgctgacgaaacgcccggccacagtgcgggcacaggaaaggcttttctcctgtatggagcctcatatggttccgcagggagccctggttggccaggggccgcccacacacagggcatgggcaaggggcaggggcagctggcacctggtgggtcttgcgatgcagccgcagggagggccggcgggc

SEQ ID NO: 65234 - DNA, 1528 bp, Homo sapiens
ctcctagggagcagaaaaatctcatccttccttgttttgagattttggtcatgatttccctccaattatcaccagtcgtttcaagaagctcttgggcatcctaccactttgctgaccaaaggcacacaagattgcgcccagagattggctgggcttcagtggttctcacactacaactagatttgtgttcatttgactaatggagtttgggaaatcttagtggtttgctgcttggttgtatgagtctcttttggtccaggctaacagttgcttcacattcagtcagagtaaggatgagaaagtgagctgagtattcacctctggaataaattccacaggacctccctccacagtcagaaaaactcttcaggatgaaaaggttctggattcaggaggagattttgggcagttataaagttcaaaggaactttcctattgtagcccaccttcaattcaattgatgtccaagaaatgaaagattgatggaagattaatcctgtaaaggttccagtcatcgttttcaggtggccccggagcctcctgaaattaaacttgtctctcctttatagtgggaacatgggagtgggtatttgttcactgaagggatgatggaggcgtttgctgctatagtggaaagacatatttagaaagaatggctacaaaggctgggcctggtggctcactcatacaaccgtagcattttgggaggctaaggtgggtgaatcacttgagcccaggagttcaagaccaacatgggcaacatggctctaccaaaaaaatacaaaaattagctgggtatagtggctcaagcctgtagtcccagctacttgggaggctgaggtgggaggatcacctgagcccaggaggtcaaggctgcagtgagccgtgatcactccactacactccagcctgggcaacagagcaagaccttgtctcaaaaaagaggagggaaacaaaagaagaggaaaaaaaagagtggctgtactcctgtctggaattagcacagctgactggaaaaacccaagtccctagagcttacaacactgaccgctatgtcggaagaaaacagacttatgagaatgtgtgttcttgtttaaaaagcaggtcctgcatgtcacaagtaattctgaatcccttcccccttgatcgagttgatgccctgggctgccaaatcctgcaagctcactgcctttcagtcaaccagaaccaaagaatgaggccaaggaactctgtcctgtttgttttctgatgtgttgaaaaatgagaaaaaaaaaaaaaaacgttatgaggagggtgctaaagatccctatctcaggtcccttcccgtggaaaaccacgttagaagatcctaggccaggtactgtagccacagggtttccctgctccactccactatcctgtgcctgaggcagacgttgatcttcattctttccctgagctcatggatgagacttctcaagacggagccatgctccatcccacacctgtgacctctgccaacagtaaccgtgaagaatgtgctctgaaa

SEQ ID NO: 65235 - DNA, 1066 bp, Homo sapiens
tgttttgttttgttttgagacagtctcgctctgttgctcgggctggagtgcagtggtgcgatcttggctcactgcaacctccacctcccgggtttaagcaattctcctgcctcagcctcccgagtagctgggattacagatgcctgctaccatggctaatttttgtatttttagtagagacggggtttcaccatgttggccaggctggtcttgatctcctgacctcgtgatccgcccacttcggcctcccaaagttccgggattacaggcgtgagccaccatgcccagccgatccatttacattcttctccatcttggttgatggcaactttatccttcgagtttgttcagatccaaagcttttgagtcttctcttcctttccgtcaggaaattattttggctctacctgcaaaccatatgcagaattcatccacacttctcttcactgctaccaccttggtgtgtgtgttctctctcatctgtattactgtactatcttcctgcttgatctccctgcttccaccctgccttcctctgttcttttctacacatagcatcagaatgactctaatgaaacattttccagaggctctccctttcactcagcaaaagcaaaaggccctttaaaggtctctgaggtcctgtgtttataggacccgccagtgcccctagtacctcatcacctagtcctcttcctgttgtttcactccagccccaccagcccccttgtttcttttagagtcagggtctcgctctctcactcaggctggagtgcagtggcgcaatcatggctcactgggttcaagcagtcctcctgcctcagcctcccgagtagctgggactacaggtgcatgccaccatgcctggctaatttttgtattttttgtagagacagggtttctccttgttgcccaggctggtctctaactcctgggctcaagtgatccacccacatcggcctcccaaagttctgggatttcaggtgtgagccaccacgcctggcctccccctggttgtttctggaacacaccaggcatatgtcttcttagggcctttgcactggct

SEQ ID NO: 65236 - DNA, 1006 bp, Homo sapiens
gccacatttatagccctggccatcttttagaagtgagctcaaagcttagggaagatgaatggtgacaaattatcctcattcttcagtcactcctaactcttttattcttttttcaatagtgtctctggagaatggttcgactgttgcctgataccatcaatagcattaacctagacagaattcttctggatatccacattttcatgaaggtcttccccaaagagaaactgaagcaatgcaaaagtgaatttcccataaggaccctaaagaccctgctacacaccttatgcaaattaaaagggcccaaggtgagtaagaatcgcaactggtctctgagggagcttgagagaaaatcatggaaatggcagtgctatcagtcatgcatgtgtctccctcagatcctggaccacctaacgatgatcgacaacaaaaacgagtctgagctggaggcccatctctgccggatgatgaagcacagtatggaccagactgggagcaagtctgataaggaaacagaaaagggagcatctcgaatagtgagtggcctgacttgaaagattgagggacatgaggctacaccggaagtgatcttatctaaggtgtaggtcaccaggatatgctttccgaaggtccaaggtgaaggctcatggactggttgaatcagtctcctgctgtggtgcagtaaccatttccaccttgaaattttaaaatctaaactaagtataaccatgtgttttttggtccccaagaaagatgcctaaggcattggtcaccagataaatagctagttctgcttaacatggaaagaatatgtcagttccttctccatcaagttgaggtggaaatctgagactggaggcattcagtaacacagaatgttagtgcttctgctgcaagacctgcatcatcggtgcatctgttatctgtaggaacataccaataaggcccagattttgagatattttctgttcatatccaaccatcagttcctaattaataactcaag

SEQ ID NO: 65237 - DNA, 2406 bp, Homo sapiens
tacagctttctgaaaaggatatgagcatgctcgaggagaggattaagcggtcagcaaagagaccctctgctgcaccaataaaacaggtggaagagaaacctcagcgtgcacagaacataagctccaatgccaacatgttacgcaagggaccagctgaggacatgtcttccaaactcaagtatgtagatagagatacttgtctgagagcatctccatggcctttgccttgtgtgctcacagcctgtcctgtaacataatcttgagttcttgtagccattatcatgcatgacagagtgtctgggtaaatgtattgtaaccaaatgtttgattcttcagtcttcattgtctttgtctttgtctcaaaaccacttctaaatggtcttgtgccttctttcactgcttttccgtggacagaattatgtatcgcacttataggatgtaagtactgcctgctaatttctcattagcagggctcttatatctttctaacttctgacttggattcatcccctctggagggtgactagcttagagtttataatcagggtagagggtgtccataagtaccccatgaatcaagtcttccacaaaagttcaatgtcatgtggctaaaatactgattcactttcttctttgtgttatacttggttgtgcttagtttcctattcttgagataaggctaattaaaatacatgcaacccaaaattggcttagggactcaaaatactgcctcctaagcaagacagctctattttgggttgtgtcatgagtataattttaacgaacttgaatttggaaactttgaatccctatttcttggatgtaaagctggccctgacctgtcaagagtgaatattctaaaaaggggtgactggtggtctcacaaaatataaaatgtgctgaacacggcatggaatggtacttatgattagcaaaattaaagcactggttaatttggtggaaaagaaccagccagtctaaatttttcttatatatttgctcataagtagtgaactttgagtcaatacaaatatattttattgttttctgccccttcaggaatagaaatacaaggtttgttggctttagtgaactagaacaaatacttataacttggcaggtaatgtaagtacaaattaaagttatctgccctcttaggatattcatgaaccaatgttgttacctattaaaggcacttgcttagactcagggacttaaatcattcaggggggctgaaaccagaagttgaacatctgtcctgaagctttggggcaactgacagtgctactcttgccctttggttaagaagtctcttttagttcaggagcctccttttgcttcccttagccaagcccgaagcatgagtgggcatcctgaggcagcccagatggtccgccgagaattccagctggatctagatgagattgagaatgacaatggtacagtccgatgtgaaatgccagaacttgttcagcacaaactggatgacatttttgagccagtccttattcctgaacccaagtgagttaaactctttcatttaaatatgagcagttcatgatgatcagacggcctacgtgaaatgtgccctttgtaatgtgcagttaaaactttttagaactgattattttttgaatgatagcagttgttaactaagacctggacctagtggagaattgtataactccaactgactgggatgtcttgtaatagaggttgaagttttctctttgttctgctatctaggatccgggctgtttctccacacttcgatgacatgcacagtaatacagcatccacaatcaatttcattatctcccaagtagccagtggtgacatcaacacaagtatccaagctctgacacaggtaatgggtgtgctcccgtgacagggattccattggtggacatagaggctataaatgtgatgaattgcacactcgcagagtcatagcattaggggatgcaggcagtgtttcatactttcccgaggaaagaaatgcacaggtgccactcagtcatcacttgcctcagaggatgtgactctaatagagccttatttttttttttttttttcctcttttgagaccaggtctcactatgttgtccaggctggagtacagtggctattcacaggcactatcatagcacattgcagccccaaactcctggactcaagtaatcctcctctctcagcttcctgagtagctgggacaacaggcttgcatcactgcacctagctaagccttgcattttttataattgcattgattcaccagaggctagagataaaacagcagctaacaagtaaggaccaactctcatggaacttatttagattttagtggacagagacaagtaaacaagaaaatatcacacagttgtaacaactgtgtaaatataactt

SEQ ID NO: 65238 - DNA, 1104 bp, Homo sapiens
atcccctatcttgtcgtcaaggtaatgtggtgttctctctctgggagactgcttaagttcccagctgacctcagtttctgtacttttatttcctctcccttttttactgattatatcacggtaccttccctacttatccctatttccctattctttcaaaacatagtaatgcatgggagaatcattgctacttaggaaatgcctcacttaatcattattttccttatcgactaggttggagaaccaaaggatgtcattcgtaaagatgttcgtgccatcctgaaccggatgtgccttgtctacccagctagcaagatgtttccctttatcatggaaggaaccaaatccaaaaactctaagcagagagcaggtgaagcaaacagtttaaactgagatgtgaatctctgcagcagtagcctatagaagaaatagtttatagatgaacaaataaatttctccagtgcctatgtagttgattccaacctcctgatttagactgtgagagtgatgagttgcacactggtggagccatggtatcaggtgatacaggcaccactcagtatcaccctggtgacaaaatcaagtgcacaggggccatctgactcacaggcatctcttcctttcaggagcacttgctgaaataccattttttcactgataaaaggcagtaaacaaaaaatcctaggcagagccagagtaaggttttagtccttcatatatgccaagggaaatttctctagtaaggataagtctctgtcccaaatatgtgttgtctcattaatctagcctttctcccccatcagagtgcctggaagagctgggatgtctggttgagtcctatggcatgaatgtttgccaaccaaccccaggaaaagccttaaaggaaatagctgttcacataggagaccgtgacaatgctgtacgcaatgctgcactcaacaccattgtaacggtgtacaatgtacatggggatcaggtgttcaaactgattggaaatgtgagtgacttctctgaacactgtcagcatgtcgtgaaaagaattgcaagatctcctaggtgttaggtttcctgtcctctcaactgtagctaagtttttactacttt

SEQ ID NO: 65239 - DNA, 1012 bp, Homo sapiens
aggctaaggcaggcaaattgcctgagcccaggaattcaaaaccagcctggacaacatattgagacttcatctctacgaaaaaaattttttaattagctgggcatagtggtgcatgtctgtagtcccagctacttggggggctaaggcagaagaatcacttgagcctgggaggttaatgctacagtgatctatgatcatgccactgcactctgccatgcccaggcaacaggtgagactctgtctcaaaaacaaacaattccaaaaatttttattcctagaagattttcagagttgttaagcttcaagaagtatgacaccttgaaatttgcattcatatttaattacaaatgaatattgttgaatttttaaatattttattgttcctgcagctgcattatataaggctctctacctcatttcagttgaacaccctgtagccccttttcaccgtttgttttttccaggtgctaaagtggaattttactaccccacgggatgaatacattgagcaactaaagactcaaatgtctagctgtgtggctaaatggttacaagatgagatgtttcactcagactttcagcatcataacaaagcccttgctgttatggttgatgtaagtctgcaatagataaatatacatgtatttcagacatgtaaaaataccgagccctatgaaataatctgaagtttgcatgacttggaagtagaatatactatgttctctatttttagagctgtcttgttatttggtagaataaatgaatgtgtgtgtatattttttaggtcttaattgaaggcttaaaaatctgtcattttctttttgggctccaataaaatttaaaagacacttgcctagtagaattaagattttgattattcttatttgtgggagttttgttttgttttattttaagcacttggagagtgaaaaagaaggagttattggttgcctggatcttatcttaaagtggcttaccctgaggttttttgacaccaatacaagcgtcctga

SEQ ID NO: 65240 - DNA, 1027 bp, Homo sapiens
cttttaatattaatgtaaattaatataaaaatataactaattttcagtcaatttattagcagtttcagtcttaaccattatgatgtctttaacatttagaatttcattctttagcagacagacatggacgtaaatgcccccaactactcaggaaacaaaatataagagttattcttcttacatgatattttatgcccagatcactcactgttttgcctgattaactgagtacacaagttttacaatttggagttttatatttctactttactttggagttttagtacaatcatagaactagtttctgtttcagagaagatggtttcatgtatgttcatgtgggccttagataaccctccattgttcatgttcataaagcaacagtgatcaccccctacctccaaactgtagtagatattatttttgctgattatcttctccatttagaacaatgttcgagctgctgccctagcgactgtgaatgcttgggcagaacagactggcatgaaggaatggctggaaggagaagatctttctgaagagctcaaaaaggaaaatcctttcttgaggcaagaggttagtatcataaattaatcatgtgcattactcatgtcatttacttccataggggcttgggcctgtctgataaatacgcatttatggttagaatgagtttcattataaaacagttaataaaatgaaatcacattcctggggcctttgtattcatgtgcttccattttttcctttcacatgcttctttatcaataacgctttttagaggactaggctttttgtggaatttttcccttttcttaaacatttaaatggtaaaatcagaggttttgtgttttttttattattatttaagctctgggatacatgtgcagaacatgcaggttcgttacatgggtatacatgtgccatggtggtttgctgcatccatcaacccgtcatcttcattaggtatttctcctaatgctatccctccccttgccccgctaacccccgacaggccccactgtgt

SEQ ID NO: 65241 - DNA, 1038 bp, Homo sapiens
tattacaaaggaatgagagtttgacacaggcaccctctctaatttgtttgttcccatatcctatataaatttcattagccttactcattcatttgtgtatagatgcagggacaaagtccacctgctccaaccagaggaatttccaagcatagcacaagtggtacagatgaaggagaagatggagatgaaccagatgacgggagcaatgatgtcgttgatcttttgccgaggacggagatcaggtaggttccagtctgtgaaatggtttatttcattcattgtattgaattcagaatgttgtcttctttttgaattcagtgaggggaacttaacgtgatatcatcatttttttggagtctggaattaaaggttattttctgtttttcagtgataaaatcacttcagagttggtatctaagattggtgataagaattggaagattaggaaagaaggcctagatgaagtggcaggtattattaatgacgcaaaatttatccaaccgaatataggtgaacttccaactgccttgaagggtcgactcaatgattcaaataaaatcttggtatgtagagcatacggctgttctttttatctcccctccccactgctgcaggagttaccttttcagtgtagccttcacttgcaaaaaataagtggttactttatttgctttgaactagaaatagctgcctttaatttattaagtgtatctcaagatatgatggtagttggcagatttattcatcaaatttttatgagtctcagaatttgctttttgcaggaatccaatattgaatatatttgtataaaactgcttgtaatacatgtaaacataatgatttctgatttttaaatgtggatttttatgtcaggatttccttaaactaggttttaccttaaagttgtaaagtactatgatctctggtctaaaattctgataatctagttttacgaactgatgataaaaaggccactgcctaaaaattaattagaataatctaagtcgaatagcatgacaagccagtgtctctgtctct

SEQ ID NO: 65242 - DNA, 1024 bp, Homo sapiens
agcccacgagcttgaggctgcaatgattgatgattgtgccactgtactcctgggtgacagagcaagaccctgtctctaaaaaaaaaaaaaaaacattataatgcagagtaattgctgcaaagctataaatagtccagaatgcctttagtcctactatcatttcacctcattttcttgtgtaggttcactcttgttcctaaggcattcttgcagttgttttagcgtcagaaaactagtttaatgcacatctgccttaatgtcatgctgtatttctataagaaatacgagataaaacacagatctgctgtttttcccttttcaggttgtgtcaatggctttctcacaaaagaatcccaaaaatcagtcagaaactctgaattggctatcaaatgccataaaagaatttggtttttctgggtaagtcagaacgaaatcaagtggaaaatagttaaatgttctgtcagtctctaagtcgtgctgtttataataatagctattgctgtttatttctgaagagtgagagctggattgtctcatttatataaaagaaaattacctttgttctcaaaggtctatattggcttgtgttcctgctttttgatgttcactgaaagagttctctacgttatttttccttaagcattaatagctgtcccacagaaaatccagttccaagaatttctagtcaaatacattaggaaatttctgtatataattacatttgtttaaagacctatagtatgccttggcgaattaactgctgtcagaaatcctgcaatagaagagcttgtttaactttgtttaacccactgttcccaaacttatttgcttatagagcacggttgtttatttaaaacaaaactttatacagtttactttatcccaggtacttttaaaaagcactttctaaatcataattcatttgatttaatcatcataacaactaagcgaggtattatattatccctatcttatagatgaggactaaggcacagaaagtttaagtaatttgggcccatcatag

SEQ ID NO: 65243 - DNA, 1116 bp, Homo sapiens
taatgaggaacggtaaggagaaacactgcaagagcactgtcacttatggcagaagccgtctagtcctgcgtctgctgcccattgggtttagatctgagtttgtgcatctttgatattcggtactttagaacttcaaatctattctgctttgctgtttttaggaaaatcaaggaagagaaaatacatataagcagtttctgccacacactaggcaaatgaaaactattattttgcatggagcaaactatttgtgaattcctgaaatgtgagataaacgttcagtgatactaatttaacagccatataccaagcatctagcttaagaaataaagcattatagacataaaaacacaaagaaataaagcataacagcggaagctatataagctccctcaataaccctcctcagttctattccactcctttcttcagaggtaaccacttacttgactttggtatttactcttcctttggaagtaacctttaacccttaaactcttattctcttattttacttcaaggctgttgagctaatggaccgaactgaaatgccatgccaggcattagtgaggatgctagccaagaaacctggatggaaagaaactaattttcaggtattttaaaatgtgagatttgatgtcttttattgaagtaatttacattacatcatcctatggagtaatacagcagaatagttttcgtaatgatttttttttttttgagacggagtttcgctcttgttgcccaggctggagtgcaatggcacgaccttggctcaccacaacctccacctcctgggttcaagcaattctcctgcctcagcctcccgagtagctgggattacaggcacccgctaccatgcccggctaattttgtatttttagtagagacgcggtttctctatgttggtcaggctggtctcgaactcctgacctcaggtgatccgcctgccttggcctcccaaaatgctgggattacgggcgtgagccaccgcgcccagcttggtaatgatttttaatgaacaatggggtgtgtgcattttgattgaacacataactacagttgactcttgaacaatgtggtgattaggggtactaccccttgtgcagttgaaac

SEQ ID NO: 65244 - DNA, 1438 bp, Homo sapiens
tcattttaatcaaatttttaagggagtgtgtgactcaataaaagtttaaaaaccactgttttaggccgggttcagtgatacatgcttgtaatcccagcactttgggaggccaagacaggaggatctcttgcagccaggaattcgagaccagcctgggcaacatggcaaaatcctgtctctacaaaaaaaattttttttaattagccaggcatggtagcacacgcctgtggtcccagctacacagtaggctgaggtgggaaggaagatcccttgagcccaggaggttgaacctgtagcaagctgagcttgtgcagctgcattccaggctcgacaacaatatgagacactgtctcaaaaaaaataaaaataaaaaactccactattttaaatccttaggtggtttaatttttattttttaaattgtttttaggctggtgggccaccaaaaaaggggaaaccagctgcaccaggaggcgcagggaatactggaaccaagaacaagaaaggactggagactaaagaaatagtggagcctgagctctcggtcagtattaacacactgagcctgaaaatcatgaaccctgcaaagtgagaccaatgagaagactggagttctttgctgggttctacaacgtacagttaattgatattttttagcttattgaaactgccttggacaatctcctttatcaaagtataatagaagcctcagaaactatagcatacctatgggagtattcttttagttttggctggagtatgtttacgttcttgtcatctgttcccttaagcaattcctaattctaatatgtttttgtatcttacagatagaagtatgtgaagaaaaagcttcagctgttcttccccctacctgtatacagcttcttgacagcagtaactggaaagaaaggctggcttgtatggaagagttccagaaggtagtgcatagggaagaattgagtgtgaaagaaaattagattatatggaagcagcgaaattgatgaatgaaggatttgtcctaattgctgtgttttataaccggtgaacacgttttatggcattaaagatgaggtgggactttttatttcttgtagctgtgtagtgtttgctatctttaaacatcagtattctatggcctttataagctcatgacttaatacttaagaaaattagattcttattctgaattataaggcttagattatttttttattttttgagacggaatcttgctctgttgcccaggctggagtacagtggggcgatcttggctcactgcaagctccacctgctgggttcacgccattctcctgcctcagcctcctaagtagctgggactacaggcgcccaccaccacacccggctaattttttggatttttagtagagatggggtttcaccatgttagccaggatggtcttgatctcctgacctcgtg

SEQ ID NO: 65245 - DNA, 1578 bp, Homo sapiens
aatggattggactgaaattggacaacattcctgtctctttgcatcatggctttgtctcttgacagttatagagtactggtagttttgatgaggagttcttgattttttttaaattgccatttatagtaggaaagaaatgcataattgaaacaagttttggaggatgctctctggtactttttgtcttcaattttgtctgttgttttattaagaaaaaaatgctgatatcacctcaggaaatttatttcatcctccactgatagttcagaccgagtttgaaaacttagcttttgagaatttaagtttcattccaggctatgatggtgataattgtagaaatagctttcaaattataaccgaaaaaaagctgagtgaccaatctgtagagaaggtgaaaacagttctgtgagataaatttatttctaaggtccagaaaattaccttcttatatgtgaatgtcttccataaacaatgtggtcattttaagtttattacaattctaatttgtaaagaaataaaatgtaagattaatatcttacgtatgtctatctactgccaaaaaagtgtagataatttatcttttttgttgaaagggaaattttttctctgaaaattttttttttttttttttttttttggcaatgaatctcactctgtcacccaggctggagtgcagtggcacaatctcagcttactgcaacctctgccttctgagttcaaatgattttcgtgcctcagcctcccaagtagctgggattacaggcgcctgccaccacgcccggctaaacttttttatttttagtagagatggggtttcaccatgttggccaggctggtctcaaacctctgacctcaagtgatccacccatctcggccttccaaagtgctaggattataggtgtgagccaccttgcctggccatttctctgaattcttatgtgtagttgtggtttagaaatgtaataacgtagtggttgtgtttcaaagttgggcttaatgatgttcatctcactttcattctccagatcaaagaatgttcagaaaaggtagaactgatacatggtaagaaagctggactagctgctgataagaaggaattcaaacctctgcctggaaggactgctgcttcaggggctgcaggagataaggacacaaaggacatttctgcacccaaaccaggacctctaaaaaaggcacctgctgctaaggttaatagattatttaaaaatagaagttagtaaggaagggtctgagtctcaggttcgtggttgttcctctaaaattattttgtttgagaaatgaattcattggccacattaaaaatacagcagaaaatctgttaatgaagataggatattccagcaataaattcagctgtttggagctttaatagagataaaaatggtgatgaaggcacagaagtgtgttttgtcaatttaacataaaatttactatcttaactttttttttttttgagatggagtctcgctctgttgcccaggctggagtgcagtgatgcaatcttggctcactgcaacctccgcctcccaggttcaagtgatcctcctgccttagccc

SEQ ID NO: 65246 - DNA, 2936 bp, Homo sapiens
gtagggactagataaaattcaaagtagactggaggcattactcttactgggaaaagagtgaaaaaagaagagttgggggcatttaaaaataaagcagccgtgtgtgtgtgtgcatttataaataaagcagccgtgtgtgtgtgtgtgtgtgtgtgtgtgtgtctgtctgtctgtctgtctgtctgtcttgctctggtacccaggctggagtgcagtggtgcgatctgcactcactgcaacctctgcctcccagattcaagtgatccttttgcctcagcctcccaagtagctgggactacaggcacacgtcacactgcctgtattattatataataaagcagctttttaacaccaactgattgggcagtgtaccacagtaaaatcttaccaggaaggaacccagtcgtagtcagtatcttgttaaattgacacagatgcagctactacccgtgagtttagataagtgctgggctttgtgggttgtggcataggagggcagtaatataagcagtgctagaggagaatcgactgagactctgaattgaagcttaaccattattagatgactgaagtggcagcctcaaggccagaagctccctcagaagaatggttctcagaagaatgcagtagcattcacaatttagagtccccatggacttcctgaaggtacctgcagccgtttgtactggtgcttcttggttatgaatattagagctgttgccctgtgatgtctttcagagatacattgccttttcattttccttgtcccaaagcaaagtcagcagacctctcgtctctctgccattatcagggtcatttcctgcacagttgaacagtgctgacagcccagactgccactactggatagtgagcaatttgatgttgtggttttatctatgttttattagtagaactttaagatagaagactaaacataatgaagggaagctcccaaattcgatacaatgaaagaagaatttctcctctgttgtagtaaataaaattggtcatatattagcataagagctttcagagttcttttttttttttgagatggagtcttgctgcgttgcccaggctggagtgcaatggtgcaatctcggctcactgcagcctccgcctcccaggttcaagtgattctcctgcctcagccttccaaatagctgggattacaggtgcctgccaccatgcctgcttaatttttgtatttttagtagagacagggtctcaccatgttggtcaggctgatctcaaactcctgacctcaggtggtccacccaccttggcctcccaaagtgctgggattacaggtgtgagccgctgcacccggcctcagagttcttttgagaataaaatttcaatacccttctacatggctgtgactattttgttttcctttttacccccctttgtaggttgttggaaaggacaccaatgtcatgttggtggctttggcagcaaaatgtcttactggcctggctgttgggctaaggaagaaatttggacaatatgcaggacatgtaagtaacactcctttttagatacagatcaacaaaatttatcaaaaatggtaggcctagtttgctgtttgctttaaaacaactccttggcatagatgtgtatatactgtacaaagtaaatttctctctgttttgttaatattcagcatagatatatcttagaaatttcagtagatgtcagttgtaacaaaatttataggccttatgtagaaagtcaggcactaggcctaaagtacttagttgagtttatttatttgcttattacttatttacttactagtatcttgctttgttcttacaacattatacacatcataacaagatgaaacaaaacttgtaacgaccaggaccagaatgaaaatgagagtcggaaaggcaatgtaaaactataaatgtaaaactgtgaggttaatatataaaatgtgttttacattgttttcctattttaatatataatttacttacatatttgagacattttatataggttacaatgttatatattttatataggttatctccgttttacttattcaaagaaaatctgactggagacatttgttgacttactatttgtataagtttgtttccaatcaaatttggtaataattttaattaagatgttttctttaactgtggcatctgtcctttggcctctaaatccggtctgcattactaagaatggctcagcatcctaaaaattgaccttattgatctttagagtttagcttgctagccccttcatcatttgattccctagactgacttaggagtttcctaatagtccctagtcatgtgtccattttatattgtgaagctaatacctagcctcacatgagctatggtatttggagcttgcttactcatagcattaaaaataatctcagagaacttaactgaagaaaaagaagacactaccaaataaaaataaatcatgactggcttattactagggaaataaaaataagggtctgtaaaacccttagacatatacatcataaattgaaataaaattaaaatctatttttatagcaatcaatattatataatatcgatgtgtatatgccattttgatcaattttatattacttaggatattttacacttttatattgggaataatttttcaagataaaaaacaattttttcctacaccacttaaatatcagttcagagaataattttagttttttttttttgagacagggtctcactttgtcacccaggctggagtgcagtggcaccatctcagttcactgcagccttaacctcctaggcgcaggtgatcctcccacctcagtctcctgagtagctgggacttcaggcacaccccacaccatgcttgagtactttttgtatttttggtagagatggggttttgccaccttgcccaggctggtctcgaaatcctgagct

SEQ ID NO: 65247 - DNA, 1108 bp, Homo sapiens
gaaaatactttttatatatgaacaaaaatttatatatatgaacaaaatgttctgattgcctccacagttttattttttattattattactatttttttgagacggagtctcgctctgtcgcccaggctagagtgcagtggcgcgatcttggctcactgcaagctccgcctcccgggttcatgccattctcctgcctcagcctcccgagtagctgggactgcaggtgcctgccaccacgcccggctaattttttgtatttttagtagagacagggtttcaccttgttagtcaggatggtctcgatctcctgacctcatgatctgccctcctcggcctcccaaagtgctgggattacaggcgtgagccactgcgcccggccagttttataattttttaaaaaaattatgtatctttgaattagcagagtgcaataaatagacttttattccgctctcttatttcctgttacaaatgactcatattgtatcttgcaggaggcaaaaaaatggcaagagagaaaagaggccctggagtctgtagaagtactaataaaaaaccccaaactggaagctggcgattatgcagatttagtaaaagcattaaagaaggtaaatatgaggacttgcagtactggtattgtaacagccatcaggcctttgaatttctcatcagtcatctttttaattacacatacattgccacttaaggaacattactgatggtatttgaattacagacatacatttttaaagggttgttttaaattcctgttgtgggttagtttcattttcaatctttgttttttgtcactttgactttaggtatgctatttgatagcttctgtaactctctaggaaaagagagttgctgatctagaactacattttccagttttataattctataggatgagctatttaagttagctgtatttaattggacaaatattaaacatgaagatagcaaatgataacacactactttgtatcagtatgtaaagagtatacgaatatgaggtcagttctgaaacagacaagtactaagtaagagataaacatttttaggaaataatcttttggtattgcaagttgaatgctgctggtggaca

SEQ ID NO: 65248 - DNA, 1444 bp, Homo sapiens
gtaaccctacttttgtaaagtatatttgtatgtccatatacacacacacttagagaaaggtctggaaggagggatatcaaaaagttgaaagtagttttctctgggtggtgggatttcaagggatctttaattttttgtttgaattttctacatttataaactgttactatgcctgctatgacatgtcttaaaattttatgtttaacgttaagtttttaaaatattcttgaacataaatttaaaaattaaagactcatttactgtatttctagcatttgtaaaagtactagtacaccccctttccgtgacctttttccaattcttactacttaagtgggatttttgttctttataatatgttacagaaccacaggagaagttgtgtcaggtgttgtaagtaaggtgttcaatcaacctaaagctaaagccaaggagctgggcatagagatctgtcttatgtacatagagattgagaaaggagaggctgttcaagaagagctcctgaaaggcttggacaataagaatcccaagatcatagtggcctgtatagagacactgaggaaagccttaaggtaagactttgttttagctttgttaactagagcagcagtccccaacctttttggcaccagggaccagtttcatggaagacaatttttccatggaagaattgtgtgttggggggaatgggggggtcgttttgagatgaaacagttccacctcataaggagcatgcactctagatccctcacatgtgcagttcacagtagggtttgcactcgtatgagaaccttaatgccctgctgatctggcaggaggcagagctcagggggtaattctcgcttggtagctgttcacctcctgttgtgtgcctggttcctaacaggccactgtactggccacagcccaggggttagggatccctgaactagagtatctcaattgagtttggattccgggtttaaacagaaatggaaactgcagaatttgacttggcatgccaaaacaagcaagaaagtgacctgaataaggaaagtcattccccaagtgtggcacttcatgttgactaattttagccttcaagtgtgttgtgtagttattttatctgaatccctttctaatgaagatgaatagagatttctgacctgttatcagattaagaattaggcttttcagttgggggcagtggctcatgcctgtaatcccagcactttggaaggctgagttaggaggatcacttggggccaggagtttaagaccagcctgggcaagatggcaagacccctgccactataaagaagctgaggtggggaggatctcttgagtctagaagttctaggctgcactgagctgtgattgtgccactgcaattcagcctgggtgagagagcaagaccctgtctctttaaaaaataaataaatatggccaggctcagtggctcact

SEQ ID NO: 65249 - DNA, 1601 bp, Homo sapiens
atttattaaacacctgttgaataaattaatgaaaaaagaatacctcagtaaaaatgtccggaatctactagctgaaattaatatacagtgtaatataaagctacctaatgattatacaaaaatagaaccaaaaaacagcatatactttggagacggggcagtttcatcagggtgatttctcatgtttgagttatcacatctttaatacaatattataaagaagtaataattcttagatacaatgtgagattcatttataatggcctattatgaatggcagagtatcataaacactaaacacttgtaagaagtttattagctaatcttttttgaaaactgccaatttcttaaactcttttttcatttctagtcatggggtcctttgtttacattacctgacataggatattcatttctattctcacaccctccccccccagattaatagtagatgataatatcattaaattatgttttgtttcaaaatactacttttcttttagctgtggaaagcaaggttaagtgggtatgaagaggccctgaagatcttccagaaaataaaggatgaaaagagcccagagtggtccaaatttttaggattgatcaaaaaatttgtcactgattccaatgcagtggttcaattgaaaggattagaagctgcacttgtttatgttgaaaatgcccatgtagcaggaaagtaagtactttctttccaactttactgataaaaacccctgtttggtgttacataatgtatgtttgtagatcactgtccttagttattagcagttttagaatagatgaattttcttactttcgtagtttcttgatacttgtttttcattcagtctttattctcagaaatctaaatggcacatgagatctgtagaggagtaaattagaaataatattttgagggtttaccttaaggtttgatgaccaagtggttttccttttaagctttttgtatgggaattattctaaactaaaaggaagagtctttagtaacttcaaaaagaaactgagagattgtcagtaaaggaattatcagaatttcactgaagacatttgggcattatagaaaactaaattttttacaagggttgttagataggtgatgttagaatcatgtctttctccctttgttcattaggcatttttatttcttgggggaggtaatgcttactaaacaacctcagtgactcctggccagtttaacttgatctgtgaatgacagatttctagtcatcctactatcccatacctcatagacctgattttcctaactctagtctctgtgtcattgaaaggaaccctccatacaaaaaaaaaagttgaaacacttgacttaattgcacaagaaatatatacttgacttacttcaaagattataccaataaagatcatcattaatttgacaatttggttaactggcatcactgggtttcctttaccgttagtaaaactatcactttttaatttctcttctgatactagaagcggttttttgataaatgctgcatgtaatctcaacccactcagttcttctgattcccggtagtgtaggtttcatttcatttagaggagattcaaagcagtaa

SEQ ID NO: 65250 - DNA, 1057 bp, Homo sapiens
aattctattggccgggcgcggtggctcacgcctgtaatcccagcactttgggaggccgaggcgggtggatcacgaggtcaggatcgagactgtcctggctaacatggtgaagccctgtctctactaaaaatacaaaaaaattagccgggcgtggtggcgggtgcctgtagtcccggctactcgggaggctgaggcaggagaatggcgtcagcccaggaggtgtagcttgcagtaagcggagatcgggccactgcactccagcctgggtgacagagcgagactccgtctcaaaaaaaaaaaaaaaaaaaaagtcctgttaattgaattaagtggggatctgacgaaagaacgggatttttactcttgttgttgcatgaatgataaaataataatctcagaaaagttatttttgtcttaagagactgcctggttgctaagcaggtttctacctttatctgaccaggaaatactcttaattctaaggaaaacctggaagcacaatgggagatgacagtgagtggttgaaactgccagttgatcagaaatgtgaacacaaggtaagattcttctggaattcgattttcagtgtcgttggcttgttttgtgagcagttatactatcatcttacttagaagtgtgtgaaaacattggcagtttcaaaaatactgatgccttgttagatatgttattttttctcattgaaaataggtttctgtagctcaactaaaaatttttttgtctctggaaagaattcaaagaaaagatattagtgaagtgaaaagtaagtggtatctatgaaaagtaactggctagttttttcatctccttgtatatacagtacaatatacttctggtacctaagtacttactaatattttattatatagagactcttcttttgagatgtgttctgaatttggccttagaaatccagcattttttaggttctctgatttatatgatcggcattccaatatttaccctcagaatctaccaatctttattttctagtttatgctagtaagatacaatttattacatcatgtcattatttggt

SEQ ID NO: 65251 - DNA, 1101 bp, Homo sapiens
gccgcctggtaatgcagaatactccggcaagaggataacacttgtccttgttaatgggaaatacctggagacagtgagttttttttttaatttgagggaaagtgttgtcatttttgccacctgctactcagagatgggattttgtcagattttggttaaataataaaaatcttaagttttctatgacagttacatagttgttgtgtttctttaatccagttgtccttcctagacatggtttgagtagatttctgggcatgtgtatgcattgcttttttaaaaaaataatttctttttttttttttatgagcctatcatcacactcagtggtcattcaaatgggttgctttttgatggagcagaagtttttctcaaacttctgttaaaatcattctgtgcttctgcaatagcatctccttagccagaggtgagagtccaggaatggtaatcaaattcagatctcttgtattgtgatagtgaagagcttttgtaggtcaagagcttgggaatttgccataaaaaagtcatactgccagtggtttttctctaagtagaagagaaaataatctgtacagtagctctgtaattactcttatagactatcaaaatacaggaatttaaactaaaaagacaccacacttgggcccatgggttgtagggaagagagacagactgagaagtaggagacataggttctaggcccagctctagtattactcatgacttaatctctctgtcccttttaaatggttggttaatgagaaaatgcacagattttggggtctcttttatgatgggatatagtgcatatttaataggaaatttgttatttatttgaacactaaactgaaaaatcagacaatttggaatttattctaagttctgccttcatgtataaccttgaaaacatttcttaacctctagtctaaaaataaacaattatgcctaaaccttttcagcaatagcatggactatatggtatttgagctcttaggaagacatttttagatcagtggtatatgattataatatatctgtaaaacatacttactttagctgacctacttgtctttgcctcagttttagactgggataaaatct

SEQ ID NO: 65252 - DNA, 1040 bp, Homo sapiens
atagataaaggtgaaatcaatttattttgcaaccataagttaaatctagttggtaaactcatgtaaaaaaatttttaaataagattttaggctgggcgcggtggctgacgcctgtaatcccaacactttgggaggccgaggcgggcggatcacgaggtcaggagtttgagaccagtcgggccaacatggtgaaaccccgtctctctctctctctctctactaaaaatacaaaaaatggctgggcgtgatggcgggcgcctgtaatcctagctactcgggaggccgaggcaagagaatcatttgaacccgggagacagaggttgcagtgagccaagatcccgccattgcactctagcctgggtgacagagcgaccctctgtctcaaaaaaaagaaaaaaaattttttaaaaggctgttcactgaggcaatggcaagcaaaggtattccgtaacaattaacatgccttttactttattctccattactttaaagtcttgatcagttttgaattatgtttgaattatgaacagtgggtgtggtaattccatcgcagtcttctactactgacagttcagttttagcagcacctgtttttttggtgttttttgtttgtttgtttgtttgttttttaccttcacggtttattgtaaaggatgctacaaagcatacagatgaagagaggcgtagggcttgtaggtatgggagaagggtgtggagctcttatgctctcatatgaagtgtgtttgaatataccaactctcctgtaaacttttatcttaattccatcaacactcactttcttttcctttttttttttttttaagacagagtcttgctctttcgcccaggctagagtgcagtggtgcgatctcagctgactgcaacctctgcctcctgggttcaagcgattctgccacctcagcctcccaagtagctgggacttcttgtgtgcaccacaatgcccagctaattttttgtatttttagtagagacagggtttcactatgttggccaggctggtctcgaactcctgacctcaa

SEQ ID NO: 65253 - DNA, 1370 bp, Homo sapiens
cattgctgagcattggtactgcgacggtgacaccgactgcaaagatggctccgatgaggagaactgtcgtgagtggccccagacctcaggctgttgggttggatgagggcagacagttctgcccattggctaagggcgaggctgaggagtgcatgtaccaagggcaaggagcatgggtgcctcagcagcagctcctcctaggctgagctagggagggagcaagttccccaggtgggaagggaaggcttcctttggtccacctgaatatgggcgtctataagggctgtcccagatgaaacctggttacatctcacttgaagaagctctcctgcctgagcatcctgcctgcttgaggaatcagggcccctctccttcatccaggcctgagtgtgtgcccctccccacccctgccttccctccagcctcagcagtgccagcgcccccctgcaacctggaggagttccagtgtgcctatggacgctgcatcctcgacatctaccactgcgatggcgacgatgactgtggagactggtcagacgagtctgactgctgtgagtactctggccagctgggaggtggggaggccaggctgggaagaactgcttgggtggcaaggcacagtcgccagctggggcaggagttcagagaggagtttctggattttctggtccctcttgggaagagatggaggaactgggattctggggctgtggccttctagtctgccatgggacactgcacagactggctagagacagaagtcttgtgtttccctagcctcccaccagccctgccgctctggggagttcatgtgtgacagtggcctgtgcatcaatgcaggctggcgctgcgatggtgacgcggactgtgatgaccagtctgatgagcgcaactgcagtgagtggggaaatggaattaggttgggcttgaactaaggagaaggcttgtggagccaaagaggccactaccggctgggcgcggtggctcatgcttataatgccagcactttgggagaccaaggtgggtggattgcttgaggtcaggagttcaagaccagcctgggtaacatggttaaaccccatctctactaaaaatacaaaacttagctgggtgtggtggcgcatgcctgtaatcccagctactcgggaggctgaggcaggagaatcgcttgaacctaggaggcagaggttgcagtgacccgagacggcgtccctgtagcagagtgagatgacatctcaaaaaacaagacaatccgggaggtgaggggcgcctctgcctggccgcccctactgggaagtgaggagcccctctgcccggccagccgccccatccaggagggaggtgggggggtcagccccccgcccggtcag

SEQ ID NO: 65254 - DNA, 1003 bp, Homo sapiens
gctcactccaacctccgcctccagggttcaagtgattctcgtgtctcagcctcccaagtagctgggattacaggcacctgccaccatgcccagctaatttttgtatttttagtagagacagagtttcaccatgtttgccaggctggtctcgaactcctgacctcaggtgatccacccaccttagcctcccaaagtgctgggattacaggtgtgagccaccacgcctggccaacctattcaccctcaatctaatgaccgtttaaaaccactccctacagaatagattaataaaatatttcctgatttaaatttttaaatacctgtgatttttccatttgtttttatttttatacattataaagttacttgtatgtgtaagcctaaagaagactatacttatagagaaaacaaaactgcagactggaaagccctaggcattcagtgaaacccaaaagctaaagttgagttccccttggttagtgtatctggagacctctctttaggattatggtgtaaattacagggatacctatccaaagaatatctagagatatccctttctccctgctagctagggattgtatttacctttctgactattagtgaagaaatcaatcttttatcatgttgggtaaactgatcctttccccactgactttgtagattaggaacctgtaatcatggccttgcatggcttaagatcttaagatcatcactaaagaatagcttagtgatgttcatgtctgcagtcatcagaatgtagtgataaaaattgtgttaatgcctaggcctgaagagagaaaggagagtctggtaaggagatgaaataagtatagaccctctctgtaggacccgcaaaaggtttccagccttatgaaacctacttagtggaagcttctgccagaggctgaaggtgtgtctgtgtatctggttgggtgtggcgagctctctagagccaaagggcagcctgttctggtcccaggtttgccaaacataccaccta

SEQ ID NO: 65255 - DNA, 1359 bp, Homo sapiens
tgcactccagcctgggcaacagagcaagactccatctaaaaaaaaaaaaaaaaatttccctatccaagtgtgtggatctcttgaatttaatccatggacccttctgtttagaaaccctacacattgggaaaagtggcactaaatgctcagctcacctttctcggttttattctctcataacttggccttgtcattcttcatttgccttggtggctctctgatgacttcagacaattgtctttaataatttatccatttttttctcagccagaagagttagtctgaattacctactctacttttattggaggaagaactcttttaaaacttgcattctgatggaacatattaataattagttgaagtagaaaatatcatacactgcaagggatcataaaggaatctaatttgactcatggaggactagtacaaggtaaaaagcaacaaacagaaaatatataatgaggatagggccagtttgtggaaggctcaattatattgaaataagtagaaaggtaaaatggctgagtgtggtggctcatgcctgtaatcccagcactttgggaggccaaggcgggagcatcagctggggtcaggagctcgagaccagtccggccaacatggtgaaaccccatttctactaaaaatagaaaaattaactgggtgtggtggcaggcgcctgtaatcccagccacttgggaggctgaggcagaagaattgcttgaacctgggaggcagaggttgcagggaggttgcagtgacccaagatcgcactactgcactctagcatgggcaacagagtgacagagtaagactctgtctcaaaaagaaaaaaaaaaggaagaggaagaaaggcaaagacagtacctcataaatgctgagaaactcattgtttggtcttctttcaatttttaaaattcagtaactatttattaaatagttatcatatgccaatcactgtgtgtcagatatggtcctcaagaaattcactgtcatgtaaaaattagatagtgacacaaatacaattaaaatagagcattagaagttctggactagtgagtaaactttgacaggaaaagtgattatttatacggtcaggaaagaattcacagaatagtgacattaatttagttttaaagaatgtgtagataattatcagacagagaagagagaatggaactccgggaagcgaagactacttgggaaaggagtggaaataaaaagtagatcccaagtttagtgtgccttggcaaaaagaggaaagtggatgggaatggagatcatgttgagaaatgaaattcctcaaaagagtgggaccagcttttcttcaaagagtctcactttatacaaattccgtag

SEQ ID NO: 65256 - DNA, 1018 bp, Homo sapiens
aaaaaaacagaaaaaaaaaaatcaaaactaaggttggggaaggggggaaattttcttttaaaaaagacattaagatggagacttttcaaacaatggaatcagaattcacttttagcagttacttagttaacaggactatattctgtttgtagtgtataccctaaatgctgtagccatgtaagtgataattacaatgtatacaagtcttcctgagaaccatatatttgaaattttaagtacaaaatgtcagccataaagttttccttattgaatttgtgtattattaagtgctttcaatgttcaaagctctatgccagatgaaagatatacagggagctccctcattcatcgattcgtttattcaacagtatttttttagtgtgtcctctgtgccaggtattattctaggtgctggtactaaaagaataaggagaatatagttctatttttaaagagttcacagtctcgtctgaaagaaaatggacatgtaaatagttatagaccctctagaaagtgtcaggccaaatacatgtgtttatttgctgtctctgtagagcacactaaaattgtaatacgtcaggtgtggtggcttatgcctgtaatcccaggactttggggaggccaaggcaggaagatcacttgaggtcaggagttcgagaccagcttggccaacatggtgaaaccccatatctactaaaactacaaaaattagccaggtgtgatggcagatgtctgtagtcccagctacttgggacttgaggcaggagaatcggttgaacccaggagacagaggctgcagtgagccgagatcgcagcactgcacttcagcttgggcaacagtgcaagaccttgcctcaaaaaataaataaataaaataaaataaaagtataataaagagggagaaaagatgtaaaggcacaagaacaaaacaaaggaagacatgacaggaaataatagatatccaccaaattttagacggtggacagcagaagcataagtaaaaactgatttggtaaag

SEQ ID NO: 65257 - DNA, 1043 bp, Homo sapiens
ttcttaattttaaaaataggttatacatgaaaatgacaaaattcaaaagggtatacaatcttatatactttaaaatatactttacttagtctatcctatatactttaaaatgtattttacttagtctaatcagccgtgatcatttatttatacgtgaggcatgacaggaagaaattgaggcacagagttggtatccaatggaaggccacccattgatggagaaaccaaaccccagtgagtaaaaccagactttgtctttcagaattcttgtgcataaatgaagttgggtagattcatcctgatgccactggatatttttcattttttttctttactttttgtatgcctgccagtctcagtgaaagataaggatcagggttcagaaagcctaactattgtgtcgtttcccaggatggagagcactatcatttggttcacatttttattaaaataagatgagtgattcactcacattacaggcaaaggatcctttaccaggaaaccatactttgaaaaacaaagctgatggctttaaggaacagtaactactaacatcaatttcctttcccatcaagtcccaaaagagtcagacactcttctttctctagctgcctcattctcttcccgatacatatccatataattatagatagggtacattacatatacccataaaagacaaaacagcaggaaagacaaaggtagattcatctgaagagatgtgtgtgtttatctatatccagtcttctttctggttcttgctgtttctgttccttacgtctgtttttttagttgataggtagccgtaaatccatcatcattggtggaagctagtggattctgacgagaaaacaggctgtggtcttcataagcacgcctacatgctggccaccaccctcccctgctcgcacacccatcaagaactggagaacttagattgttgcttttttatttttagtctgtcttggttccactcaccctcagtgagtaaccccgttagccactgcttctgtttatatttatttagaaaagaaggaaaatgc

SEQ ID NO: 65258 - DNA, 1025 bp, Homo sapiens
cctcccaaaatactgggattacaggcatgagccaccacgcctggccagtagtaatttcttgctgttacaattatgttggtattattaatagtaccagattaaaagaaaaatgagatgttcctgggtttccaaaggcaatgcttcctggcctttttgcacttcacagcaatcagaaaataatatataacaaaaatctccagtaaagacaagacttcttgtgattggcctgcaggctctggcctcctcccagctgggccaaggggaccatcacatctgtaagtcatttgaggccgaagtgacaaagggttgggaagctctgctccaagggtgaagatttaaagcactggttctcaaacttgagcatgcatcagagtcacctgcagggcttgttaaaccacacatggccggaccacatccccagagttcagtaggtttagggcggggctcaataatttatatttctaaaaaattcccaggtgatactgatggtctgggaaacacacgttgagaaccactgatttaaagtattgcctgccattttttttttttttttttttttttttgagatagagtcttgctctgtcaccaggctggagtgcagtggcatgatctgagctcactgcaacctccgcctcccaggttcaagcgattctctcgcctcagcctcccaagtagctaggactacaggcacgcaccaccatgcctggctaatttttgtattcttagtagagactgggtttcacactgttggccaggatggtcccaatctcttgaccttatgatctgcctgcctcggcctcccaaaatgctggcattacaggcgtgggccaccgcacccggctgtattgcctgcattcttattctggctgggcatggtggcacacgcctgtaatcccagcactttgggaggcaaaggcaggtggatcacttgaggtcaggagttcgagaccagcctggccaacatggtgaaaccccgtctctactaaaaagaaaccccatctctactaaatacaaaaattagtcgg

SEQ ID NO: 65259 - DNA, 1045 bp, Homo sapiens
tcaccggggtggggagtgggggtgggaaatggctacgggaaaccaaacctgttgctcagtccctaagggtacttgtgccacacaggacagcttacccctctctttgtgtagaaaagttttatacaaggagtactctttccttctctctaaaatgttaaggccagtctgtcacccagtaaattggtcaactacagtggtcttgcctgagtgaaagcagtccttttgaagtgagctaattgagagcctttcagtcaacaactggtttgggggcaaatggcactgttacattatgaccagcaagggccctagaatgcctgggccgcgcagaacatcctgcggagctctgttccgcagccagcagtccgaccccctggggctggggggctgggggctgcatgcccgttcctcacctgtacttgtgccgatcacacaggttttccagacactggtagaacagcgacgcctccacgccctccagcgtgccggccccgcccaaggcaggtcgttggcggtgctgcccactggacgacgtcggcacaatcactgtgttggggttcttgcctgacagcaggtcctcatagatggcagccacactgtccaggaattctggaaccgtgggggtgggggtgtgggtgtggacggctcaggcagggaggacatgttttgtctgttcactatgtcttcccttctctgtcagcccagttccacaccagcctcagtgctcagggcatggtgtcctgagagcagaagttctcaaccttgtttgacaacacattgatgagagatgacactaatctgtgtttttgctcaaatgtcccatccttggctcagttgttcctggaccaggtgagacctgccattgcacactttcatagcaccataggcttttttttttctggcacttagccagtgaggagctttctgtgtcattaattgtctaatctgtctccttgctggaatgcacaaaggcggggtcatgccttgttggcctctcctgcctagcactgtgcttggcacatattaaggccataaatattttttggag

SEQ ID NO: 65260 - DNA, 1953 bp, Homo sapiens
aaaattagcggggtgggggcggtgtggtgcatgcctgtaatcctagctactcaggaggctgaagcagaagtcacttgaacccgggaggcagaggttgcagtgagactagatcgcgccactgcaccccagcttgggtgataaagtgagaccctgtctcaaaaaagaaaaaattacatatatatacatacacacacatactcttagacgttaatgggaccctttaaatttagggaagaaaaggtgtgtgtttgtgtgtaaatccttagcttggccacccctttctcttgggggcttctgaaacatctctgtgccaccttaggagtcctcacggtagttacagaccactggtctgggaagtggatgattagaaaggatgggcagagggagccagggggctgtaagccagggatttgcagagtgtaggtttgggactcattcagctttgggatcatctggaatttctggactccatcccaagttgatagagttagactctctggagcttggtaatttgcatcgtcagtaggctttcctgtgattctgaggacaccaggatttgagaaccatgtctcttatgggctgtgcatcattgtgggcctacagagctcatcacgcagcctgagcttttttttttttttttttttaagatggtctcattctgtcagtcactcagacgggagtgcagtggcacgatcatggctcactgcagcctcaacctcctgggttcaagtgatctacctcgggtctcccaagtagctgggactacaggtgcaagctaccatgcctggctaaggttattttgtagagatagggtcctactatgtttcccagggtggtcctgaactcctgggctcaagcagttggcccaccttggcctcccaaagtgctgggattacaggcaatgagccactgcatcctggagcagcttcggggctggaatgcctagtcttggcctcagctctgcaggggtttgggaggcagttcctgtaatgatccgttctgggtagggatgagcccaaggaaatgtgtatgcctagtagtggtgacatccaccttcagaggaggcagtcctgttctgcttgggcttctgggtgggttttgctttctgggggaccccgccccttcagccctcaatccaaagaagttgaagacactcgtccttacctgcctccagtcttggctgggatgtgtctgccccaggctgtgtctgtctgtctttcacagctgcatcccactgttctaaccccaagcaggtgcttggcaaatgttgactgaaaccctggctggaaggctgtgcagtattaaccctttatggccacggtctttaaagttatgggaacctggccttgaaccctctgaacctgtttcctgaaggccgttccagctgtgagcacttttcctctggaaggttgctcttgtgcgaagctaggcccctctgctcgttgtctgaggcaggtccccaggtctgagtgggccactggcctacctcctagtcctaccagaaaagcaccgaaaacccaaactccccctctcccttctcccctcagcctaggagctttagactcaccagttaccagacatgagggactttttattcgtttcacatgtttgtttagctattagacacaaaggggtcaagacttgaagcagtttttgcaagtgaaatcatcttctggcccacccttcatattaccaaggctactggctgttctccaacaggccacagcggttatgtcctcctggtacttgcgtcgcaggtgtcacccttgatggtgcaaggccctgcgtggctattcgggttctcccccttaatggagttgctgtgaggagatgaaccttattgggggacccgcagaggctggctcagaagagactgctcttaagaggttaggaggactaacaggctacggcgtgacaaggtggcctcagcacagtctgtcagcttggggccta

SEQ ID NO: 65261 - DNA, 1038 bp, Homo sapiens
gcggacttgctgctgctgctgctgccagtggcctcttctgggtgccaggagaggggaaggacctttgtctgggcgttaccaagggctggaaactttacctggtacctaaaggtttcatttgggatcagaccggagacccttgggttctcccgtctcaccacccctttctacagtaagcacttggaagattgtttcagggtgtctcagggtccctctgtaccatctgctgtggaatgcaggaccctctgtgacattctttatcccttcttccccgggttggtggccatggagggtcttgtctgctgtgattcgactctggatgctgtgagcttgatgctggccagggaagcagaggatgtgagaggcagaggcaggctcctggggctgagctccttcctctgcatcattctgggcttggcctggacagcacccgccagtgagagctgtgggcctcaccctctggcagctgagccaagcactgtcattcttggtgccatcttcccctgccgcaccggcagtctcagcccagcccccacctttgggttgtaggttgggctcccaagcaacacagaccactcttccccttgcccctcccccagagggacttgactttctttctggactgtttgtattgaaacaaagtggtgtcaaaataaagcccctgcagggcctggctccctgttggtctgagtgaagcagtgtcctctggatcctgcctccctgcccagtgccggcccctggcctcactctctgggctcccaccggtaatggtagggcgtcggtaccgaagctgaggacactctctccagggcctcctgcttctctcttctctgaaagccaaaggcccctggctccttggctctgtgctgccgtgaggtccggtgcagcttcgacctcaccaccctgtggcacgcagaggaaagagctggcattagttggccctttaactcgctggctgagggcgagcgagcaacctcagcagtcctgccccttgtcacggcagtaggcttgactggggatgggtttcagtggagttta

SEQ ID NO: 65262 - DNA, 1059 bp, Homo sapiens
ccttaaaatgtggttggtgcaactgagcaacaatttctgatgtagtttaatttctgataaacgtaaatagccaccagtggctggtgcctgcctcattagacagggcagcagtcaggcttcggtttgagttgtgctttgtcatcatagagggcctggcagcttcttttgcttggggtccatttctctggccggaggagcctgattgtatgcttcagtcctgacctcctttcaggggttttatgtctccagcccccttcttattttttaaaaccctactccatcttaatctgggatctgtttagttgacataatatctgtgagttatccccgtataaaatgggaacgtaactacttcatagggtctccggaaatacctggcccagtgtccacatactcagcgtgagatgagagcaaccatctccctttccacaccaggatgcttttgagagtaaagggggcagtttgctattcatagttatgacaagagtaggtataaagccaggcagaccgacacatatgctcattgtagtactaggcaagttgtcactaggattagggtagcagcagttgtgtggcctcctgaatgctgacgaagctgtgtgcttttgggcaggagcctaggccactgcaggctgtatttccaccctgcctagtgcaggttcctaagctctctgggccttggcctcaatgtggagaagggtgactcctcaccaggggagaggggcccagagccacagagccacagacagaatgggacctggtaacccatcaccaaaaggccactggtgctctgtttggcctctgtactctgcctcccctgatgataatgggaggagtccgagatattccacatcttcccctcagagccacaaaccggagggaagtggagagccggagctcaggcctcgagtctagtgaggcgcgtcagaaattcgcaggagccaaagccatctcatctgacatgttctttgggcgggaggtggatgcagaggtaagtggggctgtctgccctgaggtccgaggcagcaggcagaagcatgagctttctccctgccgctg

SEQ ID NO: 65263 - DNA, 1460 bp, Homo sapiens
taagaagggggctggagacataaaacccctgaaaggaggtcaggactgaagcatacaatcaggctcctccggccagagaaatggaccccaagcaaaagaagctgccaggccctctatgatgacaaagcacaactcaaaccgaagcctgactgctgccctgtctaatgaggcaggcaccagccactggtggctatttacgtttatcagaaattaaactacatcagaaattgttgctcagttgcaccaaccacattttaagggctcatagccacatagtagtggctaccatattaaacaacacagagaacattcccatcaacacagaaagttcttctagacagtgctgccttagaattctctaccttcagcttgtttaaaaaaaaaaaagaaagaaaaaagaaaaaacagcccactctacctttctgaaataggccggatgcttgagatggtcacttctggctccttctcctctaccctgtccataccccaggcagcatctgtatcccagcgggagccaaagctttcccctaaggaaaagggattgtccttgtacctagggagacagtagagtggctcagagaagcctgatgaggaacacagcagccaagtttacagctagaaaacagccttactttgggggtccagaggcgaaagtaccaacatcgtcaaacaagtccagctgcgagcgagaggattttgcactcactggggtttcctgctcaatcacctgcatctcagacagcacggagtgggagacagagctgcgcagcaaagcagagccaggcatgagaccaaaggataggcatcagcatcaccgcacaagagacaatgcccagcaactgggttctccttcacggagcgtcacccagagccttctgtccttacccaagcacagggctgggccagaccccaacagaaggctagctgtgtgtggtgacctgtgaagcacacctcagaattctttacacatcagctttgtttattccacgtaggagttccctggccagtgacggtttgcctgttataatttaattttatttatttatttgagacagattctcactctgtcgcccaggctggagtccagtggtgcaatcttggctcactgcaaccaccacctcccaggttcaagcgattcttgtgcctcagcctcccgagcagctgggactacagtgcacgtcaccacacccagctgattttttgtgttttttcagtagagacagggtttcgccacattgcccagcctggtctcaaactcctgagtacagacaatccacccgccttggcctccaaaagtgccaggattataggcgtgagccactgtgcctggctcgtgttgtaattttaatattgtgcaccagatgccagtggtctctgtcctgaacaactccctaccttgtgcactatgaaccccatccttcactgatggggttcacaaagcaaaggaatggatgaagaaa

SEQ ID NO: 65264 - DNA, 1051 bp, Homo sapiens
tgtaggttgacctcatttcaatcctcaccagactcttttatatgctgtgcctgatgtcacctcccttgttaggctgctggggtccttgagggcaggagctgggtcttgggactgattgcccctagtggctagccctgggtctagcagcctatggcagtgtctggtaaacactggtggagtcctgggtggaagaaggtctggttctcaccaggcccctcctctcccacccagacaaaagctcagtatgagcagacgctggcagagctgcatcgctacactccacgctacatggaggacatggaacaggcctttgagacctgccaggccgccgagcgccagcggcttcttttcttcaaggatatgctgctcaccttacaccagcacctggacctttccagcagtgagaagtatgaactgcctggtgggcatggagatctggggtagtactgggtctcctccatctccccgaggccctggctgggactgagggatgcagggtctagacttcctagactgaggggtgtgccttgggtcataggttccatgaactccaccgtgacttgcaccagggcattgaggcagccagtgacgaagaggatctgcgctggtggcgcagcacccacgggccaggcatggccatgaactggccacagttcgaggcatgtgttccaggcggggtggggatgggaggtgggatgggctcccactcagctcggccagggctagggatgaagtaagtgaaggtggttcagatggccccacctgactataagcactgtccccacaggagtggtccttggacacacagaggacaatcagccggaaagagaagggtggccggagccctgatgaggttaccctgaccagcattgtgcctacaagagatggcaccgcacccccaccccagtccccggggtccccagggtgagagccaggagcgcggctgtggcaaagaaacagctctgcctcccgccctcctttcctttctccttggtttcatttctttcacacctgaaatgggttgaaaattggtgccagggacctgagggcc

SEQ ID NO: 65265 - DNA, 1304 bp, Homo sapiens
caggcgtgagccaccacacccagcctgggagacattcttatagttggccatcgcttctcacttccccatgctgccctggacgccaggcctttggagggcaggcccgggttgtgtgttccccacggagccttgcgggccctcagtggatgtgtggagtgagatgagtatcttccgtgactgcagggcccctcgtatttctggtgcgttgcttggtttgagtttcacaccagccctggcatggcagctgagcacacagaggagttccatcttagagggagctggggcctccttaggaggagacagttacatacacttgttcgggcttcctggccaacacagaagccaggcctcttggttcccttcgtgccctcctcagtacagggagctactgggatgtggccaggcaccctctgacttggcctctcgggtaacagggttgtcttgtcactcaagggaaggcaacagaggccctagcctgggcaggagtcctctcatcggcagttgggggagtggggccttctgcccaccgcccacccccgcctgccatttaatccctggctggatcgtgtgacctgcctggcattctcctccctggaatccggcgcttctgacagcagttgctatattgggggtgccgggcaccgccctggacgctctaggcccccaccctcacccccgctctgttctccttcaaggcagagtcacggtggcagcattgagagttggacacccgggtccttgaagtgatctctaggccccaggtatgtgggggggcggggggggaagtgcagagcagtgagaggaagagctttgagactccatcctcacccatcctggcccttcttagggtcttcagcaccctgcctgctaagtcctagctctgatgactccttgggtggtggggatggcagtggggcgaggcccaggtatagagagggtcttttcctatccccagaaacataatgtccagctttcctgcttacccctctgccctccacagccccaaatccgccaccattccgtgctgcggggacaccatggctccagaagaggacgctggaggggaggccttagggggcagtttctgggaggtgagcagctgggtcctgggctcagctacttgtctaggggaggagcccatctgacagccccagccccaaaggaagcttctccctggtgatggcacccttttcctgtatgcccaggctggcaactacaggcgcacggtacagcgggtggaggacgggcaccggctgtgcggggacctggtcagctgcttccaggagcgcgcccgcatcgagaag

SEQ ID NO: 65266 - DNA, 1149 bp, Homo sapiens
ctgctcactgcagccttgacctctcaggctccggtgacctcagcctcctcagtagctggcactacaggtatgtgccacgacactcagctaatttttcttttttttttttgacatagagtctcgctctgtcatccaggctggactgcagtggtacaatcttggctcactataacctctgcctcctgagttcaagcaattcgcctgcctcagccctgccctgagtagctgggactataggtgcataccaccatgccagactaatttttgtatttttagtagagacgtggtttcaccatcttggccaggctggtctcgaactcctggcctaaagtggtcctcctgcctcggcctcccaaagtgctgggattacaggcatgagccaccacgcctggcctaatttcaaaatttttaaattggaggaagacgcggtcgtaggtgctgtgagtctctcgtccgcactctcctgctcctgactcactgctgttcactctcgctgaggaaaaagtcggtcaggaagccacgcagcagccatggcttttaaggataccggaaaaacacccgtggagccggaggtggcgattcactgaattcgaatcaccctaacaagccgcaacataaaatccctggaaaaggtgtgtgctgacttgatcagaggcgcaaaggaaaagaatctcaaagtgaaaggaccagtccgaatgcttaccaagactttgagaatcactacaagaaaaaccccttgtggtgaaggttctaagacatgggatcgtttccagatgagaatccaccagcgactcattgacttgcacagtccttctgagattgttaagcagattacttccatcagtattgagccaggagttgaggtggaagtcaccattgcaggatgcttaagtcaacaattttaataaattgattaccagttgttaaaaaaatttttttttaattaaaagtttatgttttctcttttttttttgagacggagtttcgctcttgttgcccaggctggagtgcaatggagcaatcccagctcactacaacctccgcctcccaggttcaagcaattctcctgcctcagcctcctgagtagctgggattacaggcatgagccaccatgcccggctaattttgtatagtagagatggggtttct

SEQ ID NO: 65267 - DNA, 1045 bp, Homo sapiens
agaccatcctggctaacacggtgaaaccctgtctctactaaaaatacaaaaaattagctgggcgtggtagcgggcacctgtagtcctagctactcgagaggttgaggcaggagaatggcgtgaacccaggaggcggagcttgcattgagccaagatcacgccactgcactccagcccggggggacagagcgagactccgtctcaaaaaaaaaaaagaaatactaggaaactggacagtagccaggcattgcatgaccaagacaaagccagaggaatggagggccttggctatagagaccactgtctcccagccatcttcttcgtgggccactgccctggggtgaatgtggcagggcggggctgaggctggcccgcactgaaccttgggaagtaggatcggacttggcaagtcagagacattctcctcctactcacccattgcagaggccagcgtgtcccccatgggattgaattcattaagctgcagagacaagagtgtcaacatgaggagagggtgaaggtattagcagagacacctgatttctggtcacttttggtcaataaggtaggttgaatccctgcttcctcccatcattatttgaggacccaagcctcaccgaactgatgccagaagattctgggtcatagagctgacacatcatcttccctgagtttccatcgaacacgtcgatcgtcctcaattcataaggggtacaacttttgaaattaggatctgggtatcggcccacaacaatgaggttgtagcgaggatgccaggctgcctaggagatggagaggccggccatgagggtaaacacagaacatgatcaagggggacatcaaaaacaaatatgaacaaagaggaacatcaaaagtattctttgggctgagtgcagtggctcacacctgtaatctcaacactttgggaggctgaggcaggcggatcacgaggtcaggagatcgagaccatcctggctaacatggtgaaaccccgtccctactaaaaataccaaaaaaaaaattagctgggcgtggtggtacatgc

SEQ ID NO: 65268 - DNA, 1053 bp, Homo sapiens
ctggccgctcagcctgcctggctgccctcaccgctgcccactgcaggacttccttcgcctcacagagcccgtcgtgcccaaggattggcagcaggagtgccagctggcaagcggtcctgcagacacaggtgagctgtcaccggcctccttgctagtcatgccctagaccagcctgcagttcacatccacgcatctcaagagctgtcgcacttccagccatttgactgcatttgctaggagttccctccccgaccccagactgctttataccttctccccacttctcaccctcgggtgatgtctcacttgtatcaccgagaaaataagagccaagagagaattggctcgttctcccaccaccaggttacttcctgggggaagccaccgcttagggtggcctctccacccgcacttgggttctctcctcatctctgcaaggagctctgacgcctctgcttctctactggatcacttccctcccaaaagcccatccatgacctctgagagccacctcttccccagccaccagcctcttccctctcagaatggaatccttgaaagagctgcctagaatctggctctgcttcctcaccacttgttctcttagactcacattagacagtcttgtgtcaccttccactaccctgaagccatacttgtctggtgaccagtcacctcctaccaaagccagtgactaattcttagcttctctcacctctcagcagcattacataattggtcaccccttcctgaaacactttcttggcttctgactttcaggcgtcccttcctcactaaagaacggatgacccaggactcatccctggagctttccccatctgtgcacactcccaagtgatctcatgcagcctcatgactttatgcccatctccatgcccacttctgtccttacgccctgactcacagattcacaacctcttctctgagctagagactcatatccagctgccaacttgagatctctacatgcatgttaagtaaggcatctcaaagttgcaatgtctaaaaccagatgcttttccttccacagct

SEQ ID NO: 65269 - DNA, 1050 bp, Homo sapiens
agtgggctcacctcacagaagagtgtgtcatagacattccagacggtctccagtgtcaggtctgtaagccctgtctcgttggccaccatgtccagaaattgctatgaaaaatggatcagggtctcagtcctgctctggggaaaagacagcgtggtgagctgcacctctgcccccactcactgcattccgagaactctcattctgatactctggtgtctgccgggtctcgttctgcagctgctcataacggggacatgggcccaacgggaacttcagcagctgtagagcgaagcggggaaacaggcagcgggaaaaggagcctggcatcagcaggcctacggccagagctgtcccctcaccaccccagggaagggctggccactcttaccctgtcctcagtgatgggcacagtgtgcacaggaataggctgccacgagatgttcgggttgaagcgctgcatcccgttgggagggaagagtccagccaggttggcctcagcactcatgagagtccggtcaaagtctgtgcttcgcacataaacctgcagcgatagcaacacaagtcgtgtgtgtgtgtgtgtgtgtgtgtgtgttggggaagttttggtcaccctgaagtggagccttgtatgtatgtgtgtgtgtgtggtgggaagttttggtcaccccaaagtggagccccagaggagaacctgttcctgatggtcacccagcaaactaaacctaccatacatctggccctcaccctcctctggcctctggccttccccatcccccaaacactccactgggggttgtcaccactctgtgaagaactcttgtgggaatggccttagttgaaatgccccttccagtcaaaagtgctgagtcaatcagtaaggctctctggtctgtctggtttcataacaacacctctctccctgtctagatcagggtccttggggcagaaactggctccagtgacgacccttagagaccagggagaaaaaaataagataaagggctgggcctggtggctcacacctataatcctagcactttgggaggccaa

SEQ ID NO: 65270 - DNA, 1017 bp, Homo sapiens
cctgcattggcctcccaaagtgctaggattataggtgtgagccaccaggcccagccctttatcttatttttttctccctggtctctaagggtcgtcactggagccagtttctgccccaaggaccctgatctagacagggagagaggtgttgttatgaaaccagacagaccagagagccttactgattgactcagcacttttgactggaaggggcatttcaactaaggccattcccacaagagttcttcacagagtggtgacaacccccagtggagtgtttgggggatggggaaggccagaggccagaggagggtgagggccagatgtatggtaggtttagtttgctgggtgaccatcaggaacaggttctcctctggggctccactttggggtgaccaaaacttcccaccacacacacacacatacatacaaggctccacttcagggtgaccaaaacttccccaacacacacacacacacacacacacacacgacttgtgttgctatcgctgcaggtttatgtgcgaagcacagactttgaccggactctcatgagtgctgaggccaacctggctggactcttccctcccaacgggatgcagcgcttcaacccgaacatctcgtggcagcctattcctgtgcacactgtgcccatcactgaggacagggtaagagtggccagcccttccctggggtggtgaggggacagctctggccgtaggcctgctgatgccaggctccttttcccgctgcctgtttccccgcttcgctctacagctgctgaagttcccgttgggcccatgtccccgttatgagcagctgcagaacgagacccggcagacaccagagtatcagaatgagagttctcggaatgcagtgagtgggggcagaggtgcagctcaccacgctgtcttttccccagagcaggactgagaccctgatccatttttcatagcaatttctggacatggtggccaacgagacagggcttacagacctgacactggagaccgtctg

SEQ ID NO: 65271 - DNA, 1068 bp, Homo sapiens
actaaaaatacaaaaattagccgggcatggtggtggacgcccgtagtccagctactcaggaggctgaggtagaagaatcacttgaacccaggaggcagaggttgcagtgagccaagattgcgccattgcactcctgcctgggccacagagtgagactcagtctcaaacaaacaaaaaaattcctttctttgagtaattcctcacatccattttttattgattgattttcttcttcctctgcatgctgaacacagtacctgaaggtaacacatgacaaagcttcattcccttcctctgccttatgtgttgtacaggaacaccagtagataacactgtgtttatttttaggaatccctgctctcatttgaagggcctttagaaatctttttctgtgttgtctgaagtacttagtagtatctctagatgctatgtttgggtttaaatgggtcattgtgtttcatccctctcacctcagttgcttcatcactgctaatataatatgataccttgttactgcagagtctagtgggaattttaagttcagaaagttctctagctgccttcacttgctgtgttttcagtcttgatgattgctttagtatgactaatgagatggagaggttaataaatggaattatatttaattaaattaattaattaatttatttatttattttgagatggagtcccactctgtcacccaggctggagtgcagtggcacaatcttggctcactgcattctctgcctcccaagttcaagcgaatctcttgcctcagcctcctgagtagctgggattccaggcacacaccactgtgcccagctaatttgtttgtatttttagtagagctggggtttcatcatgttggccaggctggtctcaaactcctaacttcaggtgatccacttgccttggcctcccaaagtattgggattacaggcatgagccaccgtgcccagccagaattatattttaaatgtttgtaggagctaagatccttggactcattgatcctgtgttctaactcctgctattcaaagtgtggtttgtgaaccagcaacattagca

SEQ ID NO: 65272 - DNA, 1026 bp, Homo sapiens
tttcttagagccttggttgtctcctggtcacttggcttccagctctgaggtgcccaagaaccaaggttatgtgcattcctcaagctttgggagaatgctcagattatctggcttactgctcctcggaggggtagaggggttgcggtattgtggtacacctactaattgtgtattttgtgtcccagtatttgggctaaatactctaatggagattgttactgaagccggccccgggagtggtgaaggtgggtcttgcctgtgagctgtgcatgatcttttttttttctctagcatcttctgtgcctgcccgagggccatccttctcatggagcaagcagcgtcacatgagtgacctgcttgccccgtcccccgtgacgcccatgcttgcccatggggcttgctgctggtgcatgtggagtggcctgagtctccatccccacctcctccacattgccatggctggtttctacctacgtatgatgccttggtgctaccctcacccagcccttctgaggaacgggcatggaacatggctacttagggctgtgctggcatgagctcctgtactacaatagtgatgtctctcattcctgccttccctgccacaggaaacaggagggcgttagtggatcagaagtcatctgtcattaaacacagcccaacagtgaaaagagaacctccatcaccccagggtcgatccagcaattctaggtaataaatggtagagctgttttaaaagttctcaggcagaggtggggtggttcctctacagaactttagggatgctcaagagtgggagagaagctctcaatggggtagatgtaatcaatttcttgccagcacttctcattctggcttgatctccatgcaactgaaagcttacagtgttgaggggggttaatcagcagcggtgggtatttggacaaatcgcgtgctccagagaggtggggatgtggtgcacttggacattcagagacatggctttgtgttttacccctggaggcagacatctagtctgggtgaaag

SEQ ID NO: 65273 - DNA, 1036 bp, Homo sapiens
agctggtgtttcttatctcatcgggcccaaccttttctacctcctttagacacatttgtttgggaagcattaagggacctggggaccattaaatggtttcaggtaccagtgaagctcagactcttgagtgccatggaatgtggtttagacatttgttcgtggagcttttctttttttttttttttgagatggagtcttgctctgctgctcaggctggagtgcagtggtacgatcttgcctcactgcaacctctgcctccagggctcaagcaattgtcgtgcctcaacctcccgagtagctgagattacaggtgtgcatcaccacgcccggctaatttttgtattttttggtagagacagggtttcatcatgttggccaggctggtctcaaactcctgacttcaggtgatctacctgcctcagcctcccaaagtgctgggattacagtcgtgagccaccatgcccagccttgtggagcttctctgttttaagatgatttgctcagaattttctcaggttgagaagatggctggagaacccattgagaccaggtctgatttgtcctacttggttcttaaggcatctggggtcctctttttccagtgggtcctgagtggggggtagtccttggaaaggtgactaggatgggctgaacgggtctgggaacagcctgtgctgccgtcccaccccctttaccagcctgcccctagcctttgtgcacggagtaacagaagtcttcccctactcagggcctgaagtaatcaaacctgtctttgaccttggtgagacagaggagaaaaagtcccagatcagcgcagacagtggtgtgagcctgacgtctagttcccaggtttgtgacaaccttgttgaaatttgcaagtattaaatatgctgtctcagaatacttctttaagttaaaatagaacagtcagacagccgggcacagtggctcatgcttgtaatcccagcactttgggaggccgaggcgggtgggtcacctgaggtcgggagttcgagaccagcctgaccaacatggt

SEQ ID NO: 65274 - DNA, 1073 bp, Homo sapiens
ggatggtcctaaggtctttggggttggctactgccctaagtcctaaattgaaaatatactaaggggctgctggcagcctgcgcagccatttcctgttaaaccaaagctgcccagctacgttcctgaaagagagctacaacggctagcggagggagggagacagccacgtcagtcaggcatccacctcccctgagggtctgcggcctggccagggtctgtggggcttcacacatttgggtctggctcagagcctcagggagaggaacccggacatcagggaaagaggagggaaggcacttgtgtgaggagtcagagctgtgaacggacctgggatgatgcgctggcctcagaaaggaattagcttaaggaatgtccactgagagaaaaaggtaacactgtgttaaaagaccaagagagaaaaaaaaaagtcagctcctatggtggaattacaatgagggaaagatgtatccacaagtgctccccaatcaaaagaaagggaatggggcctgtggagcaggggacagagtgggaacactcagaggaaggaaaagaacaggaagaagaatccgcagaagaaaaaggcaaataaacacactccagagaggacagatacaagctacttacacacaagcacgcaggcacgcacgcacgcacacgcaagctgcacgcacaccagaaagacacaaggagatcggccagtctagactctcaaagcaaaaccaccaagcagaagcatatcctgggaatagaggaaggcagagacactgcaggggaagggccaagtgagacgctcccactcacactgtgtggagtccaacggatggggcagcgtggccacctggcctcgctcctgcccagcctcccccacgggctccctggtgcaccttcacagcgccaggtggtcgccaacgtcactgtgccctcccctggggtttctttcctgggtccagctgctccagttctccctctagctccagagggccctctctcatgcttgctggggaagtactgggggcttggacattggtccttcttacagatggaacgacagggagcctcgtgctgccgctcgc

SEQ ID NO: 65275 - DNA, 2874 bp, Homo sapiens
cgctagccagcctccctggcgccgctctggtctccacctggcctctgtgccagacaaaggggcaccgggcgtcgcaggcagactcacttgagggacagaggagtctagcgggacagctgtagccggaagctgggagccagcgctagggagtggtgtagtgggttctcaccctggggctttgagttcctgctgtgtttgtgcttcattcttttgtgcccctcatcgctgctatgaaaaccttcgttctccagcaggtaaagtgacctcggctcgtgctgcctctccccaggtctctgccttgggccctgccctgggtgggtagctcccatcgaaccagctcctcacactgccagctcgtctcttcctttctcccctaccctctttcttcctaccttgcctcccccttctcaccggctcactggactttcctccccgtgtgttcccttctctcttctgtcagagagatacttgggggaatcttccaactcgggagaatggcctggggcttcttgctctacctttgatgagtttattccctgctgaccctgggttcccccaaattctacctcccagggtcagaagaaggtacggccaattctcctcctgccttttctggcccccagggagatgccaggcccctctgctcccagtctcaaggggccatgatggtggctgagcctggggggcctactccttcctctggccaagcagaacccctgcatggctggagcggggggactctcactcttgccttctgggctgtggacatgtgtgtattttgcctgatgctccctgtcacctccctccctgggtgctgtactcgcctgtcttctgctgggtgtgttgctccagagccctcagacgctctccctcacacaggcaggtctgggcttctcctgccactcagggaaggacactgccacatcctgtgggtttatatcatgttacctcttcatccagcctcaagaccctctgtgtagggggctgggaataacgggaactgtgtttaacatgacccaattttcaggctggtgacgagttcacgggtgtctcagcaaagttggacacaagctagagagagctctctcctcccagccaaaacctgggaattccccactgcagctcctcaggggccctggacagtagctgtgaccaggctggtgaaaggcccgtccctcccatccagggctttcaaagaagtgggtagaatcacggccatcaagtaaacgccactgcggatgacagaggcctagctgaggaggctagggccatgtcctcccagctggcagagtctggacagagcctctggtggcctctgccctgtcatagcctaagctgctgcagccactgtgagaggccacagaggggaaggggaccctgacgccgggcgctgccgcctgggggagcatggcacgattgctcttagtgttgaactttctgttttgtctcttgcccgtccggttttagttcctgaaattaaagaagtggtgagccacaagtacaagacaccaatggtgagtgtgccgctcaaccctgatgggccacggtgcgcagggctccctgggggaccttcggacaggaggaggggagggccctctgagcgcacaggggtgagtggggacctcgttttgttgccaaaggttcaactcaggctgaaacaggtcttgagccctgagagacagacacacacacacggatcccctctcccatggggacagcttccttgcttggagctcacgtttagcccagaggcccatgcccagtgttagggcaggagttgcccattggcagatccttcacatatggagatggaggagtctcagtatcgtgatccgcctggttttctctcctctaggcccacgaaatctgctactccgtattatgtctcttctcgtacgtggctgcagttcatagcagtgaggaagatctcagaaccccgccccggcctgtctctagctgatggagaggggctacgcagctgccccagcccagggcacgcccctggccccttgctgttcccaagtgcacgatgctgctgtgactgaggagtggatgatgctcgtgtgtcctctgcaagccccctgctgtggcttggttggttaccggttatgtgtccctctgagtgtgtcttgagcgtgtccaccttctccctctccactcccagaagaccaaactgccttcccctcagggctcaagaatgtgtacagtctgtggggccggtgtgaacccactattttgtgtccttgagacatttgtgttgtggttccttgtccttgtccctggcgttataactgtccactgcaagagtctggctctcccttctctgtgacccggcatgactgggcgcctggagcagtttcactctgtgaggagtgagggaaccctggggctcaccctctcagaggaagggcacagagaggaagggaagaattggggggcagccggagtgagtggcagcctccctgcttccttctgcattcccaagccggcagctactgcccagggcccgcagtgttggctgctgcctgccacagcctctgtgactgcagtggagcggcgaattccctgtggcctgccatgccttcggcatcagaggatggagtggtcgaggctagtggagtcccagggaccgctggctgctctgcctgagcatcagggagggggcaggaaagaccaagctgggtttgcacatctgtctgcaggctgtctctccaggcacggggtgtcaggagggagagacagcctgggtatgggcaagaaatgactgtaaatatttcagccccacattatttatagaaaatgtacagttgtgtgaatgtgaaataaatgtcctcaactcccttcaggctccctggctgccttgtgttaaatgac

SEQ ID NO: 65276 - DNA, 1001 bp, Homo sapiens
agcaagttcagccctgtcttcagccctccaagctcccaccctgggcctctccaccgcggactcggagaaacagaaatgcagagagaagctctggaagctggcagaggaggccctgaggcagcggcatcttagcctctgtccctggatggttccccacctgcctggggcccccgggctgcattttgcgctcactctccctgtctgagaaaccagctcttgggaggaaaagccagcctgggaaaaagggcctagctctggaatagggaccctgtgataagatgagcagggccctttgaaaagacaaggaaactaataatgacagctcccaccatgggcccagcacatgagatctttacaatagggttatccattttacagatgagaaatggggctcagagtggacgcttacacctgctccaggaagaagggccaaaatcaggatttgcacccaggcttgaattcctctcaagcctgtgctcttagcccaaggctgcctgagtgtgtgccttgagcccttgggacaaacaagggagagtgggccctgaggggccagtgaatgaggagctgaattcagctttgaggctctggggcccaagaacagtgcagggatgcccaggggtcccggttaggggttggggggcagcccagggtgaaggagcaggaggcctgggcctggaaggagttaactgcgtgaggggcccgagtgaatcagaggctccgcaagctatgatggaaattccctgtgcatggcgtgtggtcacccagaaaagggaaacggtgcttttcggagcaggggacggcgggggctggagctagggagcagacaccagcctgggtggggctggtgagggtattgtgacaaaggaggcctggcgtccaggtctgctcaggccttgggcgggaagaaggagttgaggagccaccaggccaggccaggcctgattgtgccatggtgtgtccatgggccctgatggatgaataggagttcaccaggcccagac

SEQ ID NO: 65277 - DNA, 1014 bp, Homo sapiens
ggagggagggagggtcattgtcctggtctctgggccctggtcccagtgggagttctgggccccagctgcccaacccacccttgtcactgccctggtgccctggatgagatcccattccaaatggccccctcctatggccctggcttggcttggcctggcctggcctggcattgccgccccctgcaggtggtgaggggcagagcctgcagcagcagcaacagctggggctgtgggtcattgctggcatcctgaccttcctggcgttggagaagatgttcctggacagcaaggaggaggggaccagccaggtgggccccacactcaagggcctggatatatcagcctctgttctgtggtagtgcccggggcctggaggcccagggtctgagttgagccctgaaaagaggggtctcctggccctctcctgggagctgcgggaggttgggccaccttctttgggactgacaccattagcccctgatgtagcttgttctggtagcctgatggtgacagcagttggggagggtttgttgagtttgggggcacccaactgatatagcagcagaggattctagctagaaaaaacaggggttcctatctttttttttttttttttttttgagacggagtctcgctctgtcacccaggctgaagtgcagtggcacgatcgtggctcacggcaacctctgcctcccgggttcaagcgattctcctgcctcagcctcccgagtagctgggaccacaggtgcgcgccaccatgcccagctaacttttgtatttttagtggagacggggtttcaccatgttgtccaggatggtctcgatctcttgacttcttgatccacccacctcagcctcccaattattattattatttttttgagaagagtctcgctctgtcacccaggctggagtgcagtggcgcgatctcggctcactacagctttcacctcccaggttcaagcaattcttctgcctcagcctcccaagtagctgggaccacgcccagctaat

SEQ ID NO: 65278 - DNA, 1969 bp, Homo sapiens
ggacagcgtcctggagtttgtggtggtgaggggctaaaatggcatacggccaggctcatataggtgctcagtcattggaataaaaagttaagccaggaagacatggaacgttcagagatgcactggggtgacagttcagagacaagggcctggcagtggcagtaaggaaggccctgcctggccatggaaggccgtgcagaaccaaggcagccagtatgtggataatatttatttgtatcttatctatagaacaaatatttacagatacaaacggaatcacagcaaagttgctataaaaccatccagacctctcgatggccacttctgaaaacatccacggtgaagggcagggccaggcctggctgtggagtgggccagctgagtacctgggcgtcagccaagggaaatggttggggattatggcttcagcactctgccggagcacattcctgagcgctgacaacgtggagccctcaccgcccccacctaccccaacctcaatggggaaggaaaggggcctgagctgggcagggctgcccgggctcactatgtgcctgctccaggagtccctggcccctgtgctggcaggagcatccctgagctggaccgggaggcctctctggcctggggctgctccctgcccggcaggctgctgtttggcagctggaggtggcaagagctgctggtgctgccagggcgtgttggccaggaatgagctcccagggcagccctgaggaaagggtcttaggaagcgcctcccagctcactactaggagctggggactgtcagtgctgagtggggctggggtacaggagcacctgcctctcctttctttggcttagaagtggggaaggaagggccaggaaaagggaccaaagccgccccagccttggcccctaggccgcctggggactgtgtgtgtgctgagggggcagtgggaggtgggcagctctggagttccctgcaccctggatccttgggctgctctcactcccggggtcccagcagggcaaggcctctgcttgggaccagtgctgctcttcctcgctgcttactccgggaggtgaaggtgacagggcggcaaggagaggtaaccacagcatggctggggacaggcgctacactgggccccggacccagcacagggatcacagtgtcggtctcgcgcacacacctctggccacatgtgcacaccacatacatccacacgcacctccctcctgtctggcgggaggctcattctctctcgcagccactcgccctctctgcctctcacatatgcggtcacagagtgaatccgagcatcttattgctgcagggggcaggggcgtcggcatcagggaaagttaatccacgaagagcgagaacagcaccattaccacgatgcccgcacagagcagaagcagctgctgcagggagcgcctgtggggagggaacggctcacggtggaggcatgggcagggggagcaggcagcggccaggagcccttccctcctgagcccctaagggccctgtgagtggcagtcctcttcctccaacaggtcactcaccacgggtcctcttcttccaagaggtcagggagcacgttcaccaaggcgatgtagagaaagccgccagaggtgaagggcaggacccaggctgccgtctcctctgcagcgggagaacacccaactgggtacccaaggcactgtgtgtgctccccacctcccgggcctggggaccagcagtgcggtagccacaccctttggctggtgcccctctgctgatgccacccgccacaaccacccgccacgcccgtacctactcccttgggggactgggtacagatggcgaagccagcgcccagtaggccccccagcgctgttgagagttgcagcttggctgcgctccatcggtcaaagccggcccggagcaggatggcaaagtcgcccacctgaagggaggtccagaggttcaccctgcgcccca

SEQ ID NO: 65279 - DNA, 1029 bp, Homo sapiens
ctgagcctgtggtatctgtcctgtccccagtcctgacgtgaactacgaggagctggcccgctgcacagatgacttcaatggggcccagtgcaaggctgtgtgtgtggaggcggtgagtggtcagctggggtgggtgcgttgctttgtgccttcttgccccctccctggacaggatgggggcatttggctggtggagacggctgagggaagaggcctgagcctcagggagccagggaaggcattcaggcgttcagacctagactctgtttgtcccggctgtagggcatgatcgcactgcgcaggggtgccacggagctcacccacgaggactacatggaaggcatcctggaggtgcaggccaagaagaaagccaacctacaatactacgcctagggcacacaggccagccccagtctcacggctgaagtgcgcaataaaagatggtttagggtccctgccgctgcttgtctgccttccctgggctctggctggaggagtgggggcgtgtgtgggaggcaccttccccaggtgctgacgcctggaaacccggagacagccgtgggccccataccactggtcaggatgaggctttctggggctgtgtgtggtgctgcagctgctgcctgggccttcaggcccctcagagccctctctccccgagcaccactctgctctgagctttcagaggctcatggccctgcagttcctgcacagaggacctggatagaagccaccctttcactttcggcattttggtgtctggcactagtccttgcctcctggtaaagccaggcttgggtttaggctttcagcatcctcccttgtttcctggcccttgggtccccttttctccagatacccccttagctctttctctccctatctttggccaaaaactgagcctgaacaggatccactgggagcccctctaggactggtctgtcacgctgtgctcccctcccccaattctgctatctcttcactccagctggccccttgccttccctgggtggccctgcttggcttccc

SEQ ID NO: 65280 - DNA, 1042 bp, Homo sapiens
agtgagccatttccctgccctggacgggttaggttaggcttccagggggtagaggaggggagggctctgcctaagctgtgccctcaccagcatctcgggcttcctgtgccctagctttgacagtgagaaggctggggaccgggaggtgcagaggacaatgctggagcttctgaaccagctggatggcttccagcccaacacccaagttaaggtgagtattagcactcccaggcaaagatgatgaggctcagaggtcaggagctgtcaggcccccagctagccagtggtggagctggaatgagaattgggatctgtctttaacatcccatgtgtctcacctgcactctgggggctgcctctctgccttttttgaccgtgtctgcccatctgtgaacaccttgctcctttcaagttgtggcttctcttcctcaggtaattgcagccacaaacagggtggacatcctggaccccgccctcctccgctcgggccgccttgaccgcaagatagagttcccgatgcccaatgaggaggcccgggccagaatcatgcagatccactcccgaaagatgaatgtcaggtgagcaggagcacgggcagggcacagagacctgaacaggcgcaggaggatgtctctgccatgcttctctgtactgatcttccccagcctccacgaccaccacctcccaggccccaggcacacacagcaccgttccacacgccagcctccgtttctcctcagttgtgtgatgtagcgtcttgccagggcccatgtcgtaattctgggtgctctgctccttagactccacccctcatctgaaggcacagaggctggaggcacttagtttcctggcctcacacctcagcccattaacacacgccaggaatggccgggaccagatggacttgagttcagatatgtatgactctcagcaggtggcatgccctctctcagccttacttttttttttttttttaatttttggagacagtgtctcgctctgtcgcccaggctggagtacagtggcgcgatctcggctcact

SEQ ID NO: 65281 - DNA, 1128 bp, Homo sapiens
agttcttcccacgtggacaattccgtgaagcctgctctgacgttaggagcagcagcgatttctctttaaagctggttaatgattccctcccgtaactccgggtggccagcttgtacttaaataattgtaaaaatgcggactgaggtggcatgcctttttggccctttgcacacggctggcctatgtcgtttattaattgggaggcagtgtcattgtgtaaatccccttattcctagcggggtcacggtctgagtttgaacgcgcccctccgcaagcatctgtcacgggccagattaaagactacatttcccaaaggccctcgcggatcccacccttctccctccctttccggttttacacataggccccgcccccaacgcgcgtgtcggccaatagcggccccacctctcgcgcccggcaaaaataggacgcgggcgggaacgtttcggggtccgcgggggcggggcctgtggccaggggttggtctttggaatcggagaggcagattcgctgctccgcagcacggccggagctggtcgggtcaagagtcgggatttgtggggagaggttttccactggtcaagagaaggctttaagaaagacggtattaatctcccgttgcggctcccgcctggtcccatcttctgcccgctcctccaggaaatgaatctgctgccgaatattgagagtccagtgactcggcaggagaagatggcgaccgtgtgggatgaggccgaggtgggcaccgggcgagctggcggtccgggaaccggggcccgcagggagacgccattgacaagagggaaggaggtggctgggggtcaaggtctggcccgatcccggggacggggttgtttgggatgtgggcaggggtcctgactccatcctggttttatgggcgtggaaactgaggctgtgagtgggttcggagaacgagggatgcttgtcctgagtaaaagtaaatatataaataaacaaataattttttacagcaagatggaattggggaggaggtgctcaagatgtccacggaggagatcatccagcgcacacggctgctggacagtgagatcaaggtgggcgcacagctcctgtgcgggcgatggagcccccacaggacaggccccg

SEQ ID NO: 65282 - DNA, 1024 bp, Homo sapiens
atgttaacttggagctgcttgttaaatattaagtgaaagatcaaatagatttaccttgaaaaagaacagtgaaatggggctttagctgaagggaaatgacgtcacgagaaggtgggttagttttcttttttctttccttcttttcttttcttttcttttttttttttttttttttttttttttgtgagacagagtctgcctctgtcacccaggctggagtgcagtggtgcaatctcagctcaccatatcctcgacctcctgtgctcaagtgattctcccacctcagcctcttgagtagcttggaactacaggcgtgcaccactatgcacagctgattttatttttgtagagacagggtctcactaagttgcccaggccattctccaactcctatgctcaagcgttcctcctgtcttggcctcccaaagtgctgggattccaggcgtgaaccactgtgcctggcccagtttttattttttaaatgagatgagaaatgccagacatgtttgcacgtggatgggaaagattctgtagaaagagaggacctgacgatgcagagactgctcatcggaggctggcatttgatgggaacaggagccatcctccacagtgacaggaaaggaggcagggagcgtgggagcagaggtgcggagatgggagatctggtggagacaggaggggaaggagcttctccctgattttcttccttttcctcgtggagttgaggcgaggtcatcagctgaccatgagcaggtagaaaatgcatttggaagcttgaggaaaaagtacaagccaatggttgcatcgcctcgctgagtctgtctgatgttcttttgagcctgttgtgctgccagtctgccactgagcttcagtgaacacctgcttccgggtgccagcaggcaagctctagtggagggatctggtatctcccatccctgtgcatctctgaagctgaggagcccatttggcattgggagaaaagagaagccaactgtgttttcttgtcttttcattcattcactca

SEQ ID NO: 65283 - DNA, 1047 bp, Homo sapiens
ccccatttttattcattaaaaatgtttaaaaatcagaacttatatgcaaataattatcctagctaatgttgattgtttaccaccatcaggcgctgcaggatacacatgatacccactacatgttccaggcttcatagcatccctaggaggtagctagttttcccatcctcgttttacagatgagcaaacaggttaaaagaaattgggttgcctgctagaaagtggtgtgcactgggaatcaaaccacattgcccaactcctgagccctttctcctaaccactactgaatagaaagaattcaaaagccaataaatgtgctttaattaacctgtgtctcatcacagattgattgctctctgtcctctaggccccagtgagaggagcttagaggacctatggcttttgtggctcccctgggaggtgactcattgcagctgcgccctccttaaagcagccattttggtgtttgagaggttcacttgtaactggttggtcagcgggctcctgcagggcgctgctgcctgtgggggacgggcaacttctaaagagcactcctctccatactctcacgtcactagatctgagaccagctcaaccattgtttacccagtgtcgtttgtttttattgtgacaaaatcaaatttgccattttaaacacttttaagtataatttttaagaattttgttttactttggagtatagattcaagttgccctgaatatatactccctataattttataatttactaccattaaacacattcacaatgcttgtgcaatcatcatcacctgattttttgtttttgagacagggtctcactgtcaacgacgctggcatacagtggtgcagtcattgctcacaacagcctcagcctccccaggctcatgtgatcctcccacctcagccttcgaatagctgggacttacaggcacatgccatcatgcctagctaatttttgtattttttgtagagacaggtgtcgccatgttgcccaggctagtcttgaacttctggactcaagcagtctgcctgccttggcctccc

SEQ ID NO: 65284 - DNA, 4377 bp, Homo sapiens
acttacaatgtgttttctgctgtagttttgtttcttacttgggttacatcatgaaattgatttgccttgaatgcagccagaccactgtctcctgggttccccttgagtggccagggcctggatggaagctaagagcttggatttctgggaacaaagggccatccccataagattgagcagaaattctggtcctcttccctgaaaaattttccccaccccagccagcatcttctgcttccccttgggttgtgaccagggagtggggagagaggctgaggctctgctcccctggagaccttctcttaggagttgggtgcttcatggaaaatccaagccttaggttcccttctgtctctggcaattagatgtgttcttggtgtcctccatgtcctttttgacttttccctgtgtccattgttagcatgtgcaaaagttccctgtcattacccaacccctgcccgcccacctcatttcagggctgtacacacagtgagtgttcctgttctctctctctttgtttggatgtattgctctgtgtaactcagtgggtctccctctttctggtttgtttttttttctagattcctgccgtttgttcatcgttgtgcctaaagcatgtcgatgtggcgtcaagtacatcgtccaaatccctgtctcttcagcttctctgatgcttgaactctcacctttgaccttgtgttgacctttgatgctgatgtgtatttttattatgtttgtttctttcttcgtttttttttctttttttctttcctttttttttccttttgtgctgccaaattggttttgctagaacgactgctgaaggggaaatatttaaacttgcatttgaatataaaaaaaatctatttttctagaacttcataagataaccacttgattttgtgattccaattctttgtaattgtcttcagagcagccctactagcacataccgcgtggtgtttgtatttctgtgaacacacagccagtccgtttctaggctttgtttctctgtgtgcttagttttaaagacaactttgaagtaaacaatgaaataaaagatgtcactaaaacctctgaggctcctgagcacattttgctgatacagtctgtggggcttgaggagaccgcatgtattgttctttcttttgtttttcttctgagttctcaactgcggagagcacctgaaccccctttcctttttgaccgcaggctgcactttgggccccagccagccctttttctttttctttttcttttgtggttcttccctggagcgactctggggagtcctggatatcccgcctgccccttcccctcagccccatgcttgttccaacagtctccacagcaaaatgtgatgctttgatttttttgttgttgtttttgtttttgtattgtttttgtgtttttgttttgaattttttcctttcctactaagattatgcccagaaaaaagttttgcatgtttcctgctgtttcttcacaccttcgtatatatcaccttcacctctctgttttctatagtttgtgcaaaaactgatcgatttaaaagggtttcaaagaagctgttttaaattgttgtagggttgattatttttttcaagattgtattgtttaattttgaagtggcaactttctcctctattgcccttagagcgtttgcctgtgcacttagactgtcacttcgtgtggcctccaggtcttaccggggcttccgggaggctggctgctttgctcagagagggtgggaagggggcctggagagacacgagaagcagaggtagagcctagaaggtggcagcaggtgggtaagaggcttatttagcacattaggggcagtgagcacctggaggaaggagggcgctcccaatcacccgtaggaggccatctgcacaccaagcggcaattcacctgctggcgcttttcctaggtgacaagcacaatactacagtcttcacactgtttacagccctgggcaccagccacccggcactggctcttcatcacagctctgctcttgcttagctagtggggtgggggaaagggcagggatttgtttttttaattgggtggagagccaaacagctactgtccctgggtgccaagcaagccagttttttggttccctgagggaaactgaccctcctctcttgtggcaccatccagcctcagggtcttggagacttgagtaagaatgtgagtggagggggagaggtgaggagaggagcacagggtggatctgtggagggaagaggttacagggggaggagctgatgatagatcccacccagacttaagctgctggtgggtgggtgagctgggaagtaggactgtccagggaagggtggagagatgtagctaggggctggggagggggaggtggaagcgctattgagcatcctccacaccaaggttgatgaaggaagggatcccagcagggtttctgctctggggctggcaggttgcctggtattatgcccaaggccgctctgcctgggggaaagggcagccaggcagaggcccagtgtctggtaggctgctgaatttcctggaaggggtgattggatggaaagaggccagaaaccccagcctgagagactgctgtgcaccccacagtctgactgcacagagccgcctctgttggcaggaggcactgaggctccccttcctgtgtattgagaagcagtgtttgccaatatattttgctttcaattccaagaggagctctgggaaaacctgtggataaaaccaaatgccaaatgttggacgttgtttccttttccttttctctctctgattgttttaattgttctgtggtggttttaatggatttgagaccctggagcggcagctgcctttctgatttccagctgctttttgtgaataatttaaaaagaaaaaaaaaaagaaactttacattttggagacaaacctgtgtgagttttttattggtacaaacgttgtatttaacactaggggttttgtacagttttttgccttttctactagaaaacaatgtaaagtgatttcacaatgtgaagagaaaaaaaaattgccactatgaccaaacgcacagtctgttctgcagcaacaacgggattcaatcaactcagtcgtgattcagccgtagaaatgcttttcctttatcttgtttgagcttttcctttctttcctgttttgatttgcaaaagaaaatgtcttttttgtgtgaacttgtgttgtactctgtagaaaattatggattttactttaatggtttaaaaaaaggcaaggagagccctcgtcgcttttcttacctaatcacagagtttgtgtagtgaatttaaaaagaaaaaaaaattgttataagtttggagcaagggagtatgtgtttcaaaggaatctccttcctttttttgtgtgtttttccttttgtcccaatggggaacctaaatctgttttaattgcacagacacatggacaaaaagtcattttgtatctgccaagtgtggtaccttcctttgtttatttgctattaaactgtttgagaagaactgatgtcttcagagttactgattgttggggagggtgatgtgtccttggagcaggtggggttgccatgttcctgaagagggggtgtgggtgccctataaggcttcatttttatgtacctgaagatgtgcagctgaaccccccaaaagctccggaaggaaaacataatttctccccagaaaactgccttccccatctttttgtattctccaggatttctacttatgcggaaacaccttaaaacttttttgcccaccctaatttttgagcatctcctgttctccttggctgccacaaaacagagctggtccagacctgccagtgcacatctcttccctagtgcgcagagtccctgctccctaggactctgctggccagcaccaaatcccagagccccggcagtcttcctccctccagacctttaaagctctggcccaaagttcttaagcttctacttccctcactctgacctcagtacaaggcccctgaatggcatgcttctaaggctctgtggactactcaatagtgctggatggaccaggcctcagccttctcctacatgtccctctatgtggagtgggtcttgggtagcatttctcagtgagggttgcattgagtactagaccatgatatgttctatgaaataaggattcttaacacaaataagtttgtgaatgttgtccctgcaataaagaatgttctctctgaaattaggcagtaaagaagcctcagacttgatttagccaagcgtctcccagactggggatcccttttgctgtccacttgttctcaaaaacaagtggcagcttgggggttttagattttgtctaccaagttctgcat

SEQ ID NO: 65285 - DNA, 1212 bp, Homo sapiens
aggacatgctgttgggaatgtacacctgggcagaggtggccctgttaagatgtgactgtagccacagccagggatgggatccctgggtctctggaatctgaaacctcaacaaataccagtcttgacccctagcagcagagataagaataaaggggttggtttgctattaagtcagatgggggctctctccttgtcatgctgtccctgtgggtaacagacagggattgaccatcttactgttgtacaggtagctggtggtgttggattatcccattgaagctgggacagctgttcctttctcatagtgataacttgggtctgttgtcctctaaggaacgtgaaacatacacttcttaagctgaaccacgtaaacttgaaattctgcgcactgggagaaatgtgtcctgtgtttcaaaggataaaactgttctaaaggcttccagggtcatgatgggattttttaaataaatgcaaaaaataaaaataaaaaagaaaaaagaaaacaaaaaaaaaaaagaaaaaaatgctaggttggggaggcgctgttctgaatcccaaccggctggaaccaagaatgtcgtttctatttttatagaagttttatacagctccggggtggagaatatttattacctaaattatatctctggaaaaggccaggattttgtagaatccagaatgtgattgttatacacacagggtgctgtgtatgattgaaactactgactttctgtggcccgtttgcagcccagctaacctgcccaaggggaaggtgttaatgctgtgaattggcagaggagagagctgtgctccatagggtgctgccggtgctgtgctccctagccttctgttctgtcttcctccttagccagaacgccactcccttcccacatccccttcttctctccgccttcccccatctcaccattatttgtccatggatttgtcctgggctctgggaccttatgaaacccctttcctaatgacataagaggccaaggtgcaatccacccacctttgataccagaccctgagggcttcatacctgctgatgggttttcttttctaaaaggaatgctcgccccagcagggtcctgggctgcttgagcagccagctggtgagaccatgcacttctctgttctctcctccccctgcccagtgagttagcacagcagtagcactgcccttgagcacagttctttccccaggcc

SEQ ID NO: 65286 - DNA, 1572 bp, Homo sapiens
ttggggaggccaaggcaggaggatcgcttgagcctaggagttcgagaccagcctgagcaacagagtgagacctcatggctacaaaaaattagtcagacgtggtggcgtgtacctgtgttcccagctacttgaggctgaggtgagaggatcacctgagcccaggaggccaaggttgcagtgaaccatggtcacaccactgtactccaccctgggtgacagagcaagaccctgtctcaagaaaaagaaaaaaacctttaaattaccatgtagctgttaagtggtactattaagaacctaatttatttcgtatgacataatgtccagatttcttgtccctgctgaataaaattgggatttgagatgaagcacataaggtatcttgcataaggaggactgagaatctccttgcctcattatgtccctcacctaggtttctgcttggacacacaggttttgtaagttacgacaatcctgtttcggcccaagctgccatccagtccatgaacggctttcagattggcatgaagcggcttaaagtgcagctcaaacgttcgaagaatgacagcaagccctactgagcgtgctcccctctgagactggagtgagagggtcttctggtaagtgggggaggagcacccttaatgattcgaagccctgaggctgtgtgttgacagccctggaccctgatccctgccactctcgcaggcacagcttgccctgaagactcggctactgccttctgtgggagtttcgcttcgtacagaggacaagtttgtgctttggtttccagtgttttactttggagtttaggtgccatatcctgaggttttttttgtttttgtttttgtttctcctttatttaaagtttgctgtgtttgtaaccagtgtgtgttgagaaggaccaacaccaaaccaccctggggaagggggacagggaaacatttaacacagacgatgatcaggatttgccccaaaccaccccaagagagaggactgagtggaacaaaaaagtgacccccagaacctctcttagtgtgagggtgggtagaatgagaactgacacctgggagctgtggggagcagagcggctttggggaagagtggagtgactagacacctaatgccctggcagctggagactcaaactcctgtacagctaccttctgggaaatagtttttgacacctatttttcagattcttgtccggaatttctgctgctcttttcaaaaaagggcattaacaattctctggaaataaagcacctgttagcctgacatatgcaaaaagcagggcggcatcacccattacgagctcccccagccagcagtcagtattggattggccttgcctggctggtggcagtttgggagaaacagccaaagaggttagtttatttcaacaccaaattagaccatggcccatttccaacgggtctctttaaaggcctctatggaatacattgcctggtttccttctttgcagttcaccacagcaaggaatgtcacctccatcccaagccaccattttctcatgaaggcaaatccaagaagggcttgcagttcttgctgaag

SEQ ID NO: 65287 - DNA, 1314 bp, Homo sapiens
tctccaaaaaaaaaaaaaaaaattagaacataggtaaagtgctgctgagcacattgcatagtacagtagatgacacatagaatgtacttagtacctgttagttgctgttttaatggtagggttcacccacatcttgtcagaaatcacatgtacccctttgagtttgcagtcttgggcctcttcttttatgacattctagctcattatgagaaagtggcagaatagccagatagaaaatggaggctctcattccacagattggatgaaggtaatggggagcacaacacccgcgtatggcatttcttaatgtccccattagcaaggcctggtgaatgtcctgaaatctagccagtcagatagtttcttctcagggagaaactaagagggagataaaggggagaactttggagttttccctcttctagatgtcccaagtagacttgtctttggcatcagtttagtctttctagtatattaatccttctcttcctccaaccaaggaatggctgctttaaatggtggcctgggcagcagtggcctttccaatggcaccgggagcaccatggaggccctcactcaggcctactcgggtatccagcaatatgctgctgctgcgctccccactctgtacaaccagaatcttctgacacagcagagtattggtgctgctggaagccagaaggaaggtgagtgcaaagggagatcggggtcaggtatggggggcggttttcctcctataccagaacggaaaggcagagcaaaggctgagggaaccagttaggtcgtcagaccattgtttttctttgacagtgtcaagtgtagactgagaaaccctgtgaagtgtgatctgctttttaaatgttttctggatgtggctcaaatcagaacctctgtgtgccctcttgggatggggctgcagtttttagatgaagcaacagacactgaccttatcgggtctgacacatttgacaagaatgtttctgttaggaggtcttctctacagattacaaatctatcagaggatcttctgtctggatgtcttctgtttcagtgtcccttttagctatatcatttggcattttcctcactttctgattgatgtttgtcctgattgaagacaaactgaggggtgatgggacagagtttggcccatgagttgatggagtgggaagtatgtcgtttgacacaaatggtattcaatttaggagaaaaataggagagactctttagccagaaagaggcctgaaggtgacttacatgaatagaaggtcctgctgacacctctgtgctcagatttgactgggtttttataac

SEQ ID NO: 65288 - DNA, 1825 bp, Homo sapiens
atagttggctatatttttggaaagttgctagattgtaatctgtattgtattttaattctcgtttactctttccactccccccacccctcaccccatccatctttccattgtctagtaaatggtttgcagcagcgacagcacagtttagattccttcttcccctttcaactgtgttgtctgggctctacttggaagtctttcactcagtgatttttcctctctcctctttctggtgatgaatctgctattcaagtgacagtgtctttattctttgtgtcattgctgctctgctgtgttctcccttgtttgctcctgggccttctgcatctgccatgttttctgcgtgttcccctctattacagagagcgaatcccctgtaaagtgtgagtgaggggcctggatgcagtcccattctgtgctgtaggttttggcattgttctcctgtgctcctggccctatggtaggcagtttttcttggtttcctaattgcccacacctttattaatgtacacttggcatggtatgctattggattagccatctcttctctgaggaaatgatttcaagtttcttaatgagtgatacatgaatcatttttggagccctgtaatgttgtttgtaaggcttatctagaacagttcctctttgtcagggaccagccctctgccagtgtgtgcttgtcattgctggaatggatatgaagcacccttatctgctggctaatctcttgctttggatgttgtagggttgaatgcaatgcagttacagaatttggctgcactagctgctgcagctagtgcagctcagaacacaccaagtggtaccaatgctctcactacatccagcagtcccctcagcgtgctcactagttcaggtaagcatgaggatgacccagtgtgccattatgtgccttggacagatgctttgtgtttaaaggcagagtccagagagggaaaatagttaacacctgtttccagagaggtcagattatgagcaacaaattttcaaatgtcatcttttgtacttaagagaaatcttcctgattttcaatgtgctgtggccattatttgtctctgtcctgcaaggacagttgttagaattagtaactgaaaacctctttacaaatagcatacttggatagtgacactttttcttgtatttggcgagaatgccagtgatgggttgaattttaactccttgctttctaatagcagggtcctcacctagctctagcagcagtaattctgtcaaccccatagcctcacttggagccctgcagacattagctggagcaacggctggcctcaatgttggctctttggcaggtaaggggcagcacctggctgtcatcagactattctttgtgcaggtagcacatcttaaccctggtaggggcaccactggaatgattgcagtggcccagtgaagttaaaaataatcatgagggccaggtgtggtggctcacacctctaatcccagcactttgggaggtcaaggtgggcgaatcacgaggtcaggagatcgagaccattctggctaacacggtgaaaccccgtctcccctaaaaatacaaaaaaattagctgggcctggtggcgggcgcctgtagtcctagctacttgggaggctgaggcaggagaatggcatgaaccggggaggcagaagttgcagtgagccaagattgcgccactgcactccagcctgggtgacagagcgagagtccgtctcaaaaaagcatgggatttttaaatcagacctgagttaaatcccacctgtgtccgttagctagctataacttcggaccacctttctaaggacattttctc

SEQ ID NO: 65289 - DNA, 1286 bp, Homo sapiens
gggaaacaggttgaataaaaggatcctgtacaagaataccaattttccataaacaatactaattgggtttagttggagcaaaagttttcagcaagctggttagatgaaggttgtggtttgccaatatacaaagtaaactaatgccacaaactcagggacaggccctcttactttatttgtcatgggaccatcattgaaggagaacgtactctgaacctggtatagactaatccatcagtcatttggtcatctgcaacagggaagaccagtttggaggggaggaagtaaataaggttggatagatgtgtagctggagtgattattagtcatgtggtccattgtgaccaataaagggtaactccaagaaatactatgaaatgtttagatttgatatttaaaatagttgtgtgaagtagaaattgagtatccagatggaaacaatctgcagagtgagatgtgtggacctaactaaggagaacttgggagagggtagctggaaatggcattcattcattcgcagacaataatcacagttgactgcgtagctcctcaagtttagcttattatcctgctgtagttctgtcctttgctgtgctgaattctgctgcccagggacttgagcttggctcagtattcagtgaacatactatcttctgggccagtgctttagctgtgttttttttttgtcctgtgctgtcataagcctcatgtttctgttgtgttggcttgggttcttgtctttgactttcttctctctgggggcctctgcactctcgctttgctgtgctgtagagttatcccagatgcagaaccagccctcactctcactcttgttctgttttttggtgtaatgtctagctttatttgcagctccttcagcagactgcctcctctgggaacctcaacaccctgagcagcctccacccaatgggaggtaagtgtttcactgctgcagaggagcagcagcacccaggccagcagacccagctaacaacagtcttgggagtttggcatcgtttctgtgaaaacatttttttgcttattatgtaaacctgacctaggataaacatcccaggactcaattttcttgtctctatacagtggctctatggctagttgatgccacattgctctgacgttatctggtgcctcctaaccttttaggtcactgttgaagaagaatatggaaaagggctgtttagctcctatagactgaggctgttctctgataaggggaaaaaattgcaagaactctttatttccattataaagtgacttttccagtg

SEQ ID NO: 65290 - DNA, 2676 bp, Homo sapiens
cgggcgtggtgggtcacacctgtaatcccagcactttgggaggccgaggcgggtggatcacctgaggtcgagagttcaagaacagcctgaccaacatggagaaaccccatctctactaaaaatacaaaattagccaggcattttggcgcatgcctgtaatcccagctactcaggaggctgaggcaggagaatcacttgaatccgggaggcggagcttgcggtgagccgagatcgcgccattacactccagcctgggcaacaagagcgaaactccatctcaaaaacaagaaaaaaagagatgtgaaaaatacaaaaaacaaatgtgtgtctttgaatctgtaaaatatggtacagagccaggattcaaacccaggcggtctggctcccaaatctgtgccacattgcctctttaagtagtaatattcaagtcttttctgttttactctcttagcagtggaagacaggaagctgtttattggtatgatttccaagaagtgcactgaaaatgacatccgagtcatgttctcttcgtttggacagattgaagaatgccggatattgcggggacctgatggcctgagccgaggtaggtagttttagcttttaaataatcttttggttttttgttttggtttggtttggggtttttttttttttggagacaaggtcttgctctctctcacccaggctggagtgcagtggtgccttcacaactcactgcagcctgaacctcccaggatcagcctcctgagtagctgggaccacaggcatgcatcatgacacccagctaatttttaaattttttatagagaaaaggtctccctgtgttgcccaggctggtcttgaactcctggactcaaacgatcctgtcatcttggcctcccaaagtgccaggattgtaggtgtgagccactgcaccgggcttggaatctttttaatttgaccggtggaaactagcaacagtgattccctagccaatatggcccagtcaagataaagaggttgggcctgctgcttcctgctgtatatctatgtcctgtcttgactcctcctatcagttcattctttttgtctcccagcccctctaaggagtctacattctatatttcattgtcatgtattaaaattttctcttttggtgctttgcaagatccttgatgccaaaatggaaatactttcttcttccattttcttttattttcaagaggaactagaggatatgagtcctcctttctcctgtcaagcattttttttttctgtcagtggttctgttttttcattatagcacatatcaccctgttgcaacataccagcacatgattccctgaaaacagggactgtgtctgtattgctagcatgatagtcagcacatagtaggtgctcagttaatgtttgtcagagaaataaatgaatgcatgagttactgactcttctcttaccaggttgtgcatttgtgacttttacaacaagagccatggcacagacggctatcaaggcaatgcaccaagcacagaccatggaggtagggagcagataggtgatggggaaaattcctcagcttgggaatgctgggacagttggccattaaagtccagcagcatgtgcagcatctgattgcccagaaggttaaacagccaacatcttaaagttaaaaaccactgatttctttaaaattaacgtattggaaatgctctccctacccctttttttgagatggggtcttactttgtcacctgggctggagtgcagtgggaatatcatggctcactgcagccccaaccacccaggctcaagtgatcccccctacctctgccactcaagtagctgggactacaggtgcacaccagcacgcccagttaatttttgtatttttttttaatagcgaccgttttgccatgttgcccaggctggtctaaaattcctgggctcaagtgatccacccgcctcagcctcccaaagtgttgggattacagtctcttctctcttgtgtctatcatgaggagaatcatttggcagtgaatgaaattagaatgtaacctgcatgtcatccaaaaggaagattttttttcttcttttcagatggaggaatttgaccctttcgttatggtcttttcacagggttgctcatcacccatggtggtaaaatttgctgatacacagaaggacaaagaacagaagagaatggcccagcagctccagcagcagatgcagcaaatcagcgcagcatctgtgtggggaaaccttgctggtctaaatactcttggaccccagtatttagcagtgagtctttgtggtttgctttctgcagactgtgcaagctcccagctgttccttcttctgctgtccctagccaacaaacacagtggcatttacaacttttggcatatagaaattatatgtaaaaattcaggtagtactatttcttttagtcctgttagtctctttctctctctatatatatgtatctctggacatgcatctctggttatatcttgaggcttttgctgcaactaaagtgaattcctggtttcccgttttaaagatttagaaacatcttgtgtccttgcctccaagaaagaaattcctgagggaatcttaactaccagtgtctttctccatatctctttctaccagatgtagagggcatcattaaaatccttattgagtctttcctaa

SEQ ID NO: 65291 - DNA, 3357 bp, Homo sapiens
gttgccctcagtaagggaatcttaactggtcttagagtaatagcagtaaattggataactcagaaacagaaaatctaaaatgatggtaacattgtttatgttcatcgcacaatcatctggaaatataagaggtggagctctgttttggtctggagacctaactcgagcattatgattatacatgagtcagctacattcaaaggccagcattctagtccttagtttaatccttgaaaatcaagtgcttcttttctaacttctactgaaaggaaacttcacctgtcattgtatacattgaagtgttctgaatcttatttgtaatcaatagtcctttgttattttgtgggcctttttttaagtgtttgttttgttaactatgcttaaaagttattaaaacttgatcttgttttgggagttttaccctttaagttcctcctctagcatggtaattctcatgctagataagaaatgtacactgtcagttccctggtaacagctgggatgtcccaatcagaatggtgactttagtttggcatctgatggaatgggtggccatggtgagggagaaccagggaactctggtaaactgaatggaagtagtgaaagaagtagattttttttcccttacgttctcagaactagttaagatcattaaagaaaagaaaatttcctctggaaagcaacattattacataatagaagtttcattttatctcacacagctcaaagaaaatgaacggcaccctggaccacccagaccaaccagatcttgatgctatcaagatgtttgtgggccaggttccaaggacctggtctgaaaaggacttgcgggaactcttcgaacagtatggtgctgtgtatgaaatcaacgtcctaagggataggagccaaaacccgcctcagagcaaaggttagggctttgggttttggtttatcttattttttccactgactctcagagcaggtgagggctttgggtttttaacaggatacaaaaaattggatttttatatgtaatttctttcatgtgcattctctctgtcattgccagaatactcctgtctgtctgtctattggaaaaaatctgtccttttatagtagtaatatcttgtaatccaaacatatttaatggctttaaaaagttaaggtgttagcatgaggataatttgtaaattgggtcttgggcagtcctttgtgagggttctaaatttaagagacagactcacgtgagtgtcttatttgaccttgggaacagataacaaagataaaattgaagttaaaccacataaagttttctttagtgtttgggctagcataagctgaaggagaaagactgtccacatacccattggtttcttgttagtattacagaggccttgcgggatagtttatcaaatagaaaggatttgtttaggcagcttgtttgctgttgccacaaagtgaacaggagaggaaaggcggagctgcttccagaattgcctagcagagtggaagtttcacaagactgatggtagataggtattaactttgccccgtatatacacacagacatgttcttattttccattttaccagttttcaaataattttctgtgaaagctgtccaacagtgcaaatgtaagcaagcatgattatcatattgaaactagcttaatagcagaggatctagaagcagaggaattactttctctttttggcatggttaactaaaaatataaagtataatagtttctgaacatgactggcaatataaccttcagtaatttgtagttctaactgctgcagcatgatttaaaaaaaaatctatattgtatctcatgagaatatgggagtgtcagaacatttaagcccaagatttacaagatatacttcctctcctactacccaaaataaagatacaaagcacaaaatctacagatctgaggcagcaccatgtgcttttagaagcttaattatatttgatgagaaccaagagtccaaaaaaagatgttaagaggtgcttgctcttaagtcattttataatttaataagtgataattatgtttgaggcatatggtagaatctggctacgaagtagggagtggtttattctgagagagcagggaaagaaagagttcctggtagactacaggctgcaaaagtatagagccccatctgtcttcttgtctcatataccacctggtgttccaagtagggtaggttgagtcaaatggcacatgacctttctttatgagaagtcgtattttccagagaagttacatgagcagctaaataagacttatagtgtaactaactaggaggagactaaaacaataaagtgtatagaaaataatctcttattcctctgctagatattctattcgttcttttccactaccctccccctctcactaattttaataaacccagccctcttttaagatctgatctgtcagtggaggaaggattgctctaggaattctctgctttccaaagtttgattttatgaaatcttatttattgcagggtgctgttttgttacattttacacccgtaaagctgcattagaagctcagaatgctcttcacaacatgaaagtcctcccaggggtaagaaagctcccactagtaaatggaaatgtggtaactttgatatgtgggatatacttacacatatcagacacacactgaaaaccattttggggaaaaggtaactgctgcaggaattgatgtaaaggaagacataaagggagcagttcagagattacctgacattagttctctctcagtcaagagtcttgtgtattttgacttcttgactcacattctgttttctggggaaagatcatgaagcagacatgagttcagagagaactctttaaagctctagttctggtattttagagtccatatgtatttttgaataccatcaatatatacagtgataataatcatatttttccttttcagatgcatcaccctatacagatgaaacctgctgacagtgagaagaacaatggtaagcaaatgtatacaatcttccccttaagatttctgcctaggccaggcacggtggctcacacctgtaatcccagcactttgggaggccaagacagatggattgcttgaggccggagttcgagccagtctggccaacatggtgaaaccccgtctctactaaaaatacaaacattagctgggtatggttgtgcatgcctgtaatcccagctactcaggaggctgaggcatgagaatctcttgaacccgggaggcggaggttgcaatgagctaagatcatgccagtgtactcccgcccaggcaacagagtgagactctgtctcaaaaaaaaaaaagatttctgcctagtttgtttgctgtt

SEQ ID NO: 65292 - DNA, 1028 bp, Homo sapiens
ttaagtttgaagattgcccctggtccttaggccacaccttgtgtgtgtgcacgcccttttttttttttttttttttttctttttgagatggagtcttgctctgtcgcccaggctggagtacaatggcacgatctcggctcactgtagtctccgcctcccgggttcaagtgattctcctgcttcagcctcctgagtagctgggactacaggtgtgtgccactacacccagctaatttttttttttttttttttaagtagggacggggtttcaccgtgttgttcaggctggtctcaaactcctgacctcaggtgagtcactgtccccagcctcttgggccacagtttgaacagtgctactctatgggagtcttctggctattgaattggtatataaacagggaaggggaggttcatggtgtaggtagacctggaaaaatagagaaggatttggagagctaaagaagagcaaaggatgacatttctctagaatcttgagtccctgctaaacttttgggtaaactgtaatctacatatattgacttgtgtttatgctttagcactaaacaggatgcaaaagttcagaattggcacacaaacaacagagggaaggggcaatctgggagcagttgcctccgtaatacagattgataaaactgcttttcagaaatagctgtcagcttccttatcaaaatgtattctgggcaccattggggttctttgttaacccactctagaatagaaatagaatgaaagattagcaacattctagtaaaatgctattacaactggtaattaaagttgtcgggacaggttgtagggagccagtgtttcactagtgatagggctgccttttttttctggagacaagatctcactctgccacccaggctggagtgcagtggccccgtctcagctcactgcaacctccacctcccaggttcaagcgattcttgtgccttagcctcccgagtagctgggattacaggtgcacgccaccacacccagctaattgctttgtattttttggt

SEQ ID NO: 65293 - DNA, 1656 bp, Homo sapiens
aaactttgcaagggtgcctgggcgtaggccattgccccgattttaaacatgagaaacccagttgagagagagattgaggacaaatagtaatcagtgttgggcctgaagtacaagtttaaaggtaaaggtctttttatttttgcccactagaccaggctgcctctagtgtcagtgaacggttagccaatgttcttgattcttcattgatcactcttaagcttccactggtgctactttgcctgcatcctaagatatggatattttcatgagttgtgtcccagacttttttcttttcattctcccattgcttaaggggacactgatgtgcttctctgcttctcagatctctgttcccccaaatgtcttctgaggtctaagactttattctaaatactgctcattgattacttttcatctagagacttccccacaaaaagtaattcccatattgtcttcactagaacccaagagttgttagtttctttctcttcctctcctccttggagttcaagtgaactccagatcctagtgtatcctggcccaaaattcctcagtattggctgagactgggtgctaatcttaggtactagtttatgcaagagccttctgatctccatgttccctgccttatttcatcctccagattatttttaggtatcttttaaaaggacagatctgatcattcacttaatctaaaatcttggaataaactccaaacctgtctataacatggaaagcccttcactgggtctctctgacctacctctttattcttagtcagctttctagtatgatctcttctctgtttctgtactctgcccacaactttctcaagtcctttttctcccttctgatgttatcccacttttcccatctctcctcagtccttaccatttcttcatcacccttaggcctctttcctccatgccacgtagcactttttctagttgcctactctatgcagctgaaatctctgcacacacacctccccctcctccaaataaagtaaaatcatattagccacttctttcatagaacttttaaacattcctttataggatttgtagaggattatagttgtgcccttctactttttcagtgacattgcctcaagggcacatattgctcagtcttacagagccctatagtgtgtagtatctggcaccatagcaaaagcttgggaattacagttgaatgaatgatattaaagatgattgcagagataagatctccagatcttatctccatacctcagggaagaaggctgaaaacctttaaaagcatattgttagctattctgttgttggatggtgactttaaattattattgtctttattgtccttagagatagctttttctagtacctaacaccccacatgataggaagattgacctttatccaaatgaaaattaactttctcacagcataaatgtattattctgtcttgttctcactagggagcagctggtaagtaactcaggccagtgtttctgggccctttttattctcacgcacttctgttccagtttttccacagcactgtatgtgagccagagggaccttgtataagggtgggtggtagcagaagtttggaatgcaacaagtatttttgcctgctggggaggtggagggattggtaagtatctgaattttt

SEQ ID NO: 65294 - DNA, 2491 bp, Homo sapiens
atgctagtaagaagcagaatattactattccatttttattttctggcagatgaagcttcagagttagtaaagaaaatttccctgtgccatctaatgagtgttactgaacaaaggatttttgaagtctttcacccagatgaggaaccattagatagcacaccttgctctaaccattagatagcacatcaagaaagcaaggtcagttgagaaattgatgctcttttgaaaatatcaagaaaaaaaaaaaagcaaggctgatcaactgtaggcagttgtatgtgagtggtaagtttctggtggccagtttattcaaccagtttgcctctggcctgcttctgatggtcttatcattcctctttatgtgactgttctgaggttagtttggacctaagcactgtgctcattgctgtctttggcacatggaaacgtaagtttaaaagcaaggctaacaacccatttcttcggtgagccttttcttgcttcaggtagtttcaggctttgggggaccttaaaaactggtttgcagggaggagtttggaggatgtgaaacaagtttgtgtttcttctgctctgttagccactgctatcttcatggatctgacactatttatctgacagtgcacttagtactgcttcgccagggaaaattgcacaaaacaagcctggcgcatcagcactttcattgtgtgctgggctgagcctcccttcacatggtcacatccccattttaatccaatactccctttccctaccccttccccagtcctgcctctttctgtggcacttattgctggtttccctgagctcctgtttccactttgtgttttttgtggggcccaggaagctaaagctgtgtgtatttgtggatcagacaagtgcagcaagttaatatcattggcttctgaaggggagagtgaggtgatggctgcgtttaagttggatttccttccagaaatgatggtggatcattgctctttgaattccagtcccgtgtaagtatttttgttgtctaatttttatcataagcagaggaactgggctgttttctttatttgatgaaattggttcctttttttaagaaggggaagagaaaaatggggaaagaagccaaaacaacctgaattctctcatgctattattttcaattgtagtctgtctcattactgcttatttcctcaaggctttaagttatttacataaaggtgcacttgatatatgaccagcagcatcagctcaagtgtgctagctccaattcctttaagctgtagtgttttcctatatgatagattacaaggtattttttttttaaactgtagcattgtcgctttgggttggacatgcaatttcaaataatcttttgggaaggaagtattttattattttaaattactggattcttagtctcctatcacagagaagactggtagctacagtcagtgtgtttagtatcatctacaacattctgtattaacatacaaagtgcaatcctggaccttgattccccccacccccgccgagtctaattgaaaatacagctcagcacgtgattttaggaacatcaaattgtcctttaccctccaaaaaaagcaaaactggatcaatcttgattggcaatttgcccaaataaattgtgagagtgagaaaccttgttagcttgcagtactgtccaagaactgctgttgtacacagccaaaatgctaacctaaccctgagttgtagctgctaggaacctgaattctggactttgtagagaaggacacatttccaacccctgatttcagtcactgtaaccaggcttcagagtattttggaacctccagcaaatgagctttaggttattcaaagccaagaatattaaatggtagaatattctctagataacaagtgttaatgcaagtctttgaggttaggcctccatgtgcaaatcagtctaccctgggattagatgtaacaggtgtggataatagtagataccaaacagttctttgtggaatagttggggggcagggctcaaagttagctctttctctctctgtttttgaaacagggtcttgctttgttgcccaggctggagtgcagtggcacagtcacagttcactgtagcctcaacctcctgggctcaagcagtcctctcgcctccgcttcccaagtagctgggaccacaggcatgcaccaccacctggctaatttttaaactttttgtagatatgaggtctccctgtgttgcccaggctggtcttgaactcctgggctcaagctatcctgctgcctcggcacctggcctgtcttactcttttgaagtggatcttatgcctcctctgtagtctccaaaattacggtaatttaaatgtctttttatgagagttctttactactaaaattttattttagctgtaacaggtgaaattaaagtgaatatcatgataaagatttaatacataataaggatatttccatgtcccaggatttatgatccttagaaacaaggctg

SEQ ID NO: 65295 - DNA, 1303 bp, Homo sapiens
ttttttggtgggggagacggagtcttactgtcgcccaggctggagtgcagtggcgtgatctcagctcaccacagcctctgcctcctgggttcaagctattctcctgccttagcctcccgagtagctggggttacaggcgtgtgccacctcgcccagctaatttttttttttgatattttttagtagagatggggtttcactatcttagccaggctggccttcaacttctgacctcaggtgatccgcccgccttggcctcccaaaagtgttgggattgattacaggcgtgagccaccatgagctgttgttgctcagcctttttaaagcctggaatgtctttttagaggaattcttgcactaaaagatctaatttggttgtcgactcagttattctttggtctaggcagctttctataggaagaggcatgccatcagttccaatgtacgtaggagaaactaggacaaacatagccagtaatctaaccagccccagctagggttaccatcttctgcctgacaggcatgggcttggtaaactgtgtactgtgtgtcagttgcacagtctcctctcacttgcagtttgtttttgccgctttaatagggtggaagagagctcctgccacttctgcctctatagtagtaaatcagatgagcgagtctctggcaaaaatagaaaaagcagtaagctgctgttacagtacagttctagattttggatgatgacgtctggacatggacagaagagacagttttcaccttcctgggtcaggtgcagacagatgttagccattgttacacagattagaacttctaggcctatgccattgtgtgttgcctttcttttttttttttaacgttaactctgtgtgtttagtagttcattcgttttacttctttgcaggctgaacataacttctttttttcaaagttccctgtgttgtgaactgagcttgggtgaagtgaaatctttgaggtaaggcaactctaatgataaaaatggaaagaaagcctgtgaaatttgggagccttcagagataacattttagagtcactgcctaaatattgaaatgccgccatttgttgtttggggggatgtggagctaaattgagaacgggagcacacatctgccttgactgctaagtatatccatctctactgctcacccataatagaatttttatgtgtgcactcactagtcttggttttatcaacagtttaaaggaggaaaaagagaatgaagagacttcatttcttggtttttcccttacatgtttgagtgttgtccctggtaggccctagttc

SEQ ID NO: 65296 - DNA, 1010 bp, Homo sapiens
tatggtcacatttctctagagagacagacctaccaagaagccacgggcaggttatcttccttagcatctgaatccttagggtagtcctcaccttaaatggtcataatgataaaggattgaatgaagtttgtgaacttagtaaatggaagttcctttcttcttggtaacttttgatggtagaggcaggtgcaagtaaatgcttttaggaagttctgtttttttttttaattagtttaaactttgcccttaaaattactggaactatcactactttattagcaaaattggaaactaattaaatctgcatgaaaagttaatacttgagcacctattttatgccagttaagaaatctctctgtcttcagggaggataggcagtgtcttactagttagttctgggtctggctttgtctttcagaattcttgtactttccagtttagacattgtccttggtgaatttgaatagtttattgtctgtagtgaaagccagacagaaatacagctggcaggagttgtatttggaagtttgtaggaatttgggcagttttatagaatcagtctttacttgcaagattgttcgatatgcttaaaaataaaacaaattggttttgtggttcctctgtttgcttttaccatcaattaacttccccatcttctgatttttttttttgtttcagtggttcaccgccaccctagggccaccaagatgcatttacagtggcaggaacgtggttgcttttgtagagtttcatgcccggcacctatgtattcaggaaggttgctttggggaaatagtgtggtctctccacatgaataacacgatccttaattgctaaaagaattatacagccattagcttttcttagtctccaatccaaaagcagatgttaaaaatgattgttttggtgacctagatgtactgaaattcaacctcataaattttagtcattgttttgctatttgttacgacattttagggcaagactcttttaaaccttttagtatttta

SEQ ID NO: 65297 - DNA, 1177 bp, Homo sapiens
caagcaattcttcctgccgtagcctcccaagtagctgggattacaggcgcctgccaccatgcccagctaatttttgtatttttagtagagatagggtttcaccatgttgaacccgggaggcagaggttgcagggagccaagattgcaccactaccctctagcctgggtgacagagcaagactctatctaaaaaaaaataaataagtaaataataaagagaggcaaagtaatattttgagtttcccaataaaaggcattttacaagctgccttattttaccaaatacagcactgtgactcaagaaagtccaagtcccagtggttggttgtggaacccaggtctcttaatcccttatcttccctttagttccttcatctgaaaaatgggaatgaaaatgctgaagaatctcctttgagcactcagaaaaataattatagtcctttccaaaggttatgtgttataatgactccgcaagagacatcaagattataaggtgattttaaaagtcgctctgacagggcttgagaaaaaaattagtcacattctgcctacatggtactaacatatggtgcagccctgatgagctgcacaagtgggctgaaatcaaaatgcagttggaaagaggagcagtagtgactcactagataagacagatttggcctcatggcagggcagtgaaactaagaaggaactgtggtcttagaacatgccagatttgagcaagtgatcatgaatattatggaaaggttgaatgactgagcctttgggtttgaattaggtactttgtctggtgtcacagtccttggagcgagcaccctccctcggtgggttcagagctcccactccctccacctccctcacttctgtgtattacttctgtgtatcattccctgtgcctttgaaggtagaagccaccaggcaaatacttaacactggtgtgcctggaacattgggttcaaactgcaatgataggtagaagcgttagtaattctgcccagagaaagctgtgcattagcttagctaccatatgtaaattgctactgctgcatccagcaatttgttgtccattgttgacagtactgccatggtaaagaaacaggaactatagaaagaattagattcctcctcccacctcccagctctcaccacagtaggaagctgtttggggagcagagag

SEQ ID NO: 65298 - DNA, 3325 bp, Homo sapiens
aaagaacagcaagccaagtaacaagtttgtgaaacatctctaaaattactagtttatctccactagtaccagactatttactgaagatattgaaagcagaattaattttagccttttttgggtcgggggggagcgcaggaagagattggttctcactgacccaggctggagggcagtggcacaatcttggctcaccacaacctctgctcccagggtcaagtgatcctcccacctcagcctcctgagtggctgggaccacaggcacatgccgccatgcccagttaatttttttgtattttttgggtagaggtagggttttgccatgttgcccaggctggtcttgaactcctgagctcaagtgatctgcccacctcggcttcccaaagtgctgggattacaggcatgagccacagtgcctggcctgcttctttacctcgttcctgcaccacacatcttccggagatgcccttacaaggggagcatgggaaggtagaaccagcaagttttgccatatccataaacttataatctgtgtgagagtgacaggaaaacacagagaagtctgttcaaaagaaatgatgatgaaggaattattagtaggccatgtaattcagtggagggtagcaaaaaatgtattgtatcatggacagtgtgatgaaatagcacaaaaatttgatttagacagggaaataagaatcagctctcctgagattttttaagtctttcacatttatggtaacattttcccttagatagatgctctcccatgtttcttgtttctagtgcaagtcgtattttctgaacaagaccattaactccttaaggacagggattgtgcctttttttttggtatcctctttagttctgggtatatagtagatgttttctaaaaatgtagttgcttttttgattgatagatctcctggcttttttttttaagagcttgtttttgtaaaaatgaaatcaaagcactgacaagttaaattttgtggaacagttgagtttttttaggagtgatttgaaggatgtgacagatgatttaagtgggtatttaaatgtgagaagcactccttttttttttttttgagacggagtctggctccgtcgcccaggctggaatgcagtggcacgatctcagctcactaaaagctgcgcctcctgggttcatgccattctcctgcctcagcctcccgagtagcggggactacaggcgcccacgaccacgcccagctaatttttattttcagtaggggtttcaccgtgttagccaggatggtctcgatctcctgaccttgtgatccacccgccttggcctcccaaagtgcaagtgctgggattataggcgtgagccaccacgcccggcgagaagcacctttaggagcacaattgcagagtgatgaaagcatgataattgaagtaccttatttatttatttatttatttatttatttatttatttatttatttagagatggagtctcgctctgtcacacaggctggagtgcagtggtgtgatctcagctcactgcaacctgtgcctccctgttcaagtgattcttctgccccagcctcccaagtaactgggattacaggttcccgcctccacgccgggctaatttgtttgtatttgtagtagagatggggtttcaccccgttggccaggctggtctcgaactctgacctcaagtgatccacctgcctcggcctcccaaaatgctgggattacaggccagccaaagtaactttttttaaaaagtgataatagaatagaatagaatttgtcttagggctgtgcgtcctttagggtgaatcaagctttgctgaacatgttccctgattggctgaagcagaggtacaaaatttgcattttctggcctataacctaactgtctcaggaagtgtctctacagaagtagtttctggtttctctagttttatagaattaagaatttaagaacagaaagaaaataaagtttcctgcttttcaacagaacagggcaaagctcctgaaacaagaccatatggaagcatcccgcatgagtgcccgtgtgtttgatggtgaggttggggcagatggtaaaggcagggttcttggctgcttggtcaaggattttggagatgatagaagttaggtggctagtgctaaggaaagactgttgtatgttgtgtgtattgggcctgtctgcctaagaggtggagcagcctcacagagaggaaggaaattgatgtgtttggtagggtagaggtggtaagataagaaaagaggcaggggagatgcagagttggaatgataaagcttgcaattgcatctaaacctgcccctgagataagggagagagagacaagatattacagtgtgagaaataagattccagttccctggtgtcttctgttctctagagccttcaagtaagatactgcagggactgtagggtttttctgtttaaacttgaagctcttttgattcctttttgagatacaagccaaaagctgtatttatagaacttgttttgacatattatctcaccctgtcccttgccttctttactggaatccagctaatgttgcactttgccttggcaggaaaggttgattgaagaaaatgtatagctatacagctgagtgattgaaatagcttcagactttgtaaataggccatacatgatgaggtcccagctgcatgaacgttatttgagttgctggggtcatttaaaatggtgtgatgtaattatgatatactgctggatcacctggacaatggcagtttccacacagaagtttcaggcaaagcaggaaaaaaatacaaaaccaaaatgctgttttggaaaagagtatgagttgaggtttttctttactttgtgctttatagttccacgagttttcctttttttaagtggtaggaatggacttatgggttgcagggggaagtggacaaggggatacggtgtctgcaggctaggttgccatgctccaaaagctcaagttttctttaaaaaaattttcagtaggccgggcacagtggctcgtgcctgtaatcctagcacttcaggtcgatcacctaaggtcaggagttcgagaccagcttggccaacatggtgaaaccccatctctactaaaaatacaaaaaagtagctgggtttggtggcaggtgcctgtaatcccagctgctcgggaggctgaggcagtagaattgcttgaacccgggaggcggaggttgcagtgagccaatattgcgccattgtactctagcctgggcaacaagagcataacttcgtctcaaaaaaaaaaaaatttctgtagaataggtaacgtgttcacatgtaaa

SEQ ID NO: 65299 - DNA, 1018 bp, Homo sapiens
gaaaccccgtgtctactaaaaatacaaaaaaatcagccaggcttggtggcacatgccagtaatcccagctactcgggaggctgaggccggagaatctctcgaatccgggagatggaggttgtgatgagctgagatcatgccattgcactccagcctgggcaacaagagcaaaacccgtgtcaaaaaaaaaaaaaaatcagcatagctgttgcattttaaaaagtgaaactacacactatgtttctagctcagtaaacagatgaacctgttgtctttgagtaacataaccattgagcgttgtacagtacatcttaagatcaggtactttattttgaagagatagaatcatcatgtaacaggctgaaattttttgggactcattcttttccaccataaacaccaagcttggtgcccagaataataatagtagcaaatgtttattgagcactttctatgtgtcaggcactattctaaatgctttacatgtataaatttaattctaacaaatatcctgtaaggtagatactgtttgtgtaaccattttgtgcatgaagaaacagaggtatttatgaagaagttaaacaatttccccagttacctggctagtaagcagcaaaactgggattagaaagcagtggtatgactctagagtctaggtatagggtacattgtgggtttgtagtaaatatttgtctattttattagcacactttgttatttgagattattaaattatgaatcagtctaacccattttcattttagaatttccttatgaaaataactatatgattttggttttgcagatcaccatcaactgtactagttcatttattttttattttattttttatttttggagacggagtctctctcagtcgcccaggctggagtgcagtggcacgacgtcggctcactgcaaactccgcctcccaggttcacgccattctcctgcctcagcctccggagtagctgggactacaggcgcccgccactatgcccggctaatttttttgtat

SEQ ID NO: 65300 - DNA, 2666 bp, Homo sapiens
gccagcctctcttctcttaatgtgtatagcatttatagtttgtaccccacgctttagtgcagtagtcatgtactgtctgcctttattattaatatctcatgttaatctcatctaggaattagattggaggtcactgatactatggttttgatttgtgctgtagcccctatgataccgaataaatacataaccaggctgggcttggtggctcatgccagtaatcccagccctttggcaagccgaagtgagtggatcacttgtacctaggagtttgagacccgcctgggcagcatggtgaaaccccatctctataaggggggaataaaattacataggtggtatgcactaagtacttcagtaagggctgaagaatagaatcatttgagccaatcagccatgcatttcttattgttggaaaattcactctggtcagcaattaagcttttcacatacttcacattgaagtgaatctaaatgaattgttctaagtaaaataatttttggaacacaaatatttggcttctggttatataagccatcatcctcagacatagattttaaaaattatattagagtttattttaacttgtatcaaccataaaataaaaaagagctcaaaacatacacagttggaatgagaccttcattctgaaagcagcaaggaactagtgaaagttaacattgttcactcgaatggagaataacctttttttgcatgttaaattttaggatttaaatgataaattgagcctcaccactactgctgatctgggaagaatctgacctagtaaaggttttcaaatgtcttttccatttcccgtggctgagggattcttggtgtcagtgactgaaattatttggaagttccttgactgaaatagaatatctcaaaccttatttcaagtaccagcctgtgtgtttctgttttttgtctggagcatgtgaacagaatgcatgtgtgtgagataattgggctttcactaatggccccctttcagcaaccatgtatgggtaaagctgttcagttccctgctcctccctctctgagcacggagcagaatctgttctgctgaagctgctgttccactttttagcttgctatatttgtacagcaacagcaggagcagcccactagctaggccgtgtggccaccctttggcacccgcaccggctcagacctgctcaggactcagccagggcacacagtttgtgttcttacgtgcatccatctgtctgtctgtgtgcgtctctgtggaggactgaggttttcaagtgaaagaggtgactcgtttgtctttgttgttttgctgtgttcaggtttgtcaattgtaaattgtagagaatgcttcaggttgttagggatggggtgaggagacaagatttgtatttaacaaaataccgtcttggcgagagggtaccaaacagggaaatgtgatgtcagaaatggtctttgggttcccttagaaacataccttgttgaagtggtagtgttttttttttcctctttgttttgttacaggtcacaaagatcagctcttggggtggtattgaattcctttcctggcactcaaattttttgacataaaatttgagtataaaaagatgaggcacctccacccctttaagaaatgatttagtgcacatcttgaaagagtgcagtaggggttaagtgtgttgacttcgctgtctgccaggaaaggaactgtggggaatgccctgttgctttgggccccacagcaacctatgctgtttgcgctgtttgagtgctttgtaaagtttggccttacagaggccttgtaatgccttttggtgtcatgtctgtttaaggaatagcagaagacatgacatgtagacaaatttcaggttattttcagaagatactgggtttgttactgtattttaaaaggatactttcttggtttgttatgagatattctaattaaacagtgatgaattcttactcctggtcagtgtaagtctaaattcaagtttgttgctttgttttacagtttcctttcactcccctcccccatcccctcatgagtcataagcatgcagtgttgggaatagaacttgtcagctgagtggggatgagacagttctctgcccatactatttgtaactgtagtcaatgaggagaggaaaggacgttattaaatgctggagaaacaccttgattgaggcagcttcttctgtggctgtgtggtatggatgcagagttctgtgtgactatacactgatgtattctggctctgaatcacttagggatctcttctgcaccttgtgcattgtaggttttggatgcttatttgtttagggtctaggacctggtgcttagcctctcctggatcctgtatatttactgactttccaaattcttttgagtgtggcattatatctgcttcatcttctctttcttggctattcttagtgcccttctcattttactgtcctaatgttttcccatttatactatgaatcattgtgcaccctatgtagagcctgtcattggagattaaaatcagtggcagctctttgattttacagctcagcctcagtaagtgacactctgattagcacacctatattctagctttctttttgttcttggccttttttaaaatttataacttccctggtctcattttattagtttatatttttcc

SEQ ID NO: 65301 - DNA, 1065 bp, Homo sapiens
ctggagtgcagtggcacaatctcggctgactgcaacctctgcctcctgggttcaagtgattctcctgcctcagcctcctgagtagctgggattacaggcacgcgcccccacgcccagctaatttttgtatttttaatagagacagggtttcaccttgttggccaggctggtcttgaactcctgacctcaggtgatccatcgtgggattgcaggcacgagccaccactgcccggcctggaactccttttgatgactggttaacttagcagtgttttataatcaaggatctcatagttatatcagcataaacatttctagttccaccattctatttccctgtgacagggtttttgtttttgttttttcttaatagtggtttaaaatttattcaacaggctaggcagaaatgtctcagatggaagaacattttcctgaaagtgttacatgagaaatgttacagtggatgctgagttatggtctgaatttatttttatcttagtttagaatatgttttctctaaagtaggcaaaaactataattttgcttccataagcagtgtggtattaatctcatactatgaaacatttcaggttgaaaccacactcagagtttcagaaatggagggatcttagaaatcatcttgttcaaattctgtattcttcacatttaagatatcgcaggtgccttctttttttcttccttgagacagagttttgctcttgttacctaagctggagtgcaatggcacaatcttggctcacggcaacctccgcttcccaggttcaagcgattctcctgcctcagccacccccacacctggcatgcaccaccacacctggctaattttgtatttttagtaaagacggggtttctccctgttggtcaggctggtctcgaactccggacctgaggtgatctgcccaccttggcctcccaaagtgctgggattacagacgtgagctaccactcctggtgcgcaggtgcccttaatgagagttctggtaggtgggataagcaagaaagtctaggtctgtctgttctcagtctctcttctctcttttcttt

SEQ ID NO: 65302 - DNA, 2025 bp, Homo sapiens
gtgtgagccatctcgcccagcccaagacataatatgtttgtggagtatcttaataactattgcctacggtagttaatggtatatcttatctccatagaaccattttttttttcttttggtttgtgaatttgttgtatgaattggttctgagtttggttttcaacacatttaaatggaatttatatttaggtttcagtagttattagtgtgagggatactcttgaaatttgtgccaggtacttttctggctcaaactattatggatcaggcgtagggtagctgaagttctagattattactgtgaaatcaagtgctgtttttgttaatgttcatttgtctggtataagtttgctctggggctaagctagatctatggaaagacttaacccttttccagaaagcttccaacttagggaaaaaaatttttttttttctaattctgactgttccacttctgaaaaaaacagatccacagatcagacttgtaaatgatctgttttcttaagatatcttctaacagaatgggtctccagggaactgagtgacaacacacatttagctgggagtggcagttcatctccctaaacgtaatttaacatcacatttatctacacactacagttttggaggcatacttggagattgaacttatacttctcttggcttattttattttattttatttatttttgagatggagtctcgctctgtcgcctaggctggagtgcagtggtgcgatctctgcatactgcaagctccacctcctgggttcacaccattctcctgcctcagcctcccgagtagctgggactacagttgcccaccaccacgcccggctaattttttgtatgtttttagtagagacagggtttcaccatgttagccaggatggtctcggtctccttaccttgtgatctgtctgccttggcctcccagagtgctgggattacaggcatgagccatggcgcccggccagctttatttttataattttgtgtctgatatatttctaacataattgtgtagagaagctgagatttcttgaactttggaaaacattgaaatcttgatagaaaaaatactaaatatggccaggcgccgtggctcatgcctgtaatcccagcactttgggaggccaaggcgggtggatcacctgaggtcaggagttcgagaccagcctggccaatgtggtgaaaccccatctctactagaaatacaaaatattagccgggcatggtggcaggcgcctgtaatctcagctacttcggaggctgaggcaggagagtagtttgaactaaggaggcggaggttgcagtgagcagagattgtgtcactgtacttcagcctgggcaacaagagtgaaactctatgtccaaaaaaaaaaaaaaaaaaaaaaggaaagaaaaaatgctaaatataacttatgttgtggtctggaaagaaatagcagcatacataggtcatagaaacttcagttgagtttatattgatgtagctgcttttatgaagagggaggggaaaaactaagagttgaatatatttaactattgtgcaacagagtgtcactaaaatagttataaatattccttttttttttttttttttttttgggggagagtctcgctctattgcccaggctggagtgcacttgagcaatctcagctcactgtaacccctgcctcttaggttcaagtgatgcttctgccttagcctcccaagtagctgggattgcaagtgcccgccaccatgctcagctaatttatgtatgtatgtatgtatgtatttatttattttttgaaatggagtctcgctctgtagcccaggctggagtgcggtggtgcgatctcagctcactgccacttccgccttccggagtttaagcagttctcctgcctcagcctcctgagtagctgggactacaggcatacactgccatgcctggctaattttttgtattttagtagagagggggtttcaccatgttgcccaggctggtcgtgaactcctgagctcaggcaatctgcc

SEQ ID NO: 65303 - DNA, 1095 bp, Homo sapiens
gattacaggtgtgtgccaccattcatgcctggctgattttttgtatttttagtagaaacagggtttcaccatgttagccgtgactggtctcgaactcccgacctcaggtgttctgtccgcatcggcctcccaaagtgccgggattacaggcttgagccaccacacccagctgttgggaagagtgctttttcccccataccctccttagccccaggcaaaaggccgctggaggtcttgactccttcagtatatatatttgcatttggtgtttagaatgctttgccagatcaagattatgagtttatttttttaacaagttttttataattatttgtttttaatttttttaggaatatgagcctgttaaaaataatactgctatttcagataggaaacttaaagtgagccatcagttttagagaatttttgtttgtgaggcatatggattcagtcttttcttcatttctagttaagtggcgtttgttttagtttcctgattgtttcctcttaaaaaaatgttgatgggcttgagtggaacacaataatgtgggttgaatggctgttgagactttaaacaaagggtaatggtgaatggctgtgtgcccagttgatggagtctctctggtcccagctcagtaacttcatgaatgatctgtgagaggagcatcacagtggtgtttttctctttgagaaatgttaataagggagagggggaagctctgagaaagacagtttagcgcttctaacgtgattttgtttttttcctgtgatattttggtttgttaggttgaaagactttattccagagaaatgtaaacattccctgtaatactaatgagcaggaattaaaaagagacaagctagttttgaaatggagattttttttttttttttttttgagacggagtcttgctcttttgcccaggctggagtgcagtggcgcgatctcggctcactgcaagctctgtctcccgggttcacgccattctcctgcctcagcctcccgagtagctgggagtacaggtgcccaccaccatgcctggctaattttttgtatttttagtagagacggggtttcaccgtgttggccaggat

SEQ ID NO: 65304 - DNA, 1760 bp, Homo sapiens
ttctttcgttctttctttcgttctttctttcgttctttctttctttcgttctttctttcgttctttctttctttctttctttctttctttctttctttctttgacagtctcgccctgtcaccaggctctggagtacagtggtgagatcttggctcgctgcaacctctgcctcctgggttcaagcgattctcctgcctcagcctcccaagttgctgggattataggcatgcgccaccacacccagctaattttgtgttttaagtagagacggggtttcaccatgttggccaggctggtctcaaactcctgacctcaggagatccacccgccttggcctcccaaagtgctgggattacaagtgtgagcctccacacctggccaagtagtttccattttcatagtaacattgctactctttagcaaaataatcattaagttagaaactgtcaccactttctccttgttcttttacctttttgtttcctgtgagattgagtaagctcttgcagactgtgtgaatatgtatgatattggtgataatgtgaggtgactaatagtctactgtgagtagattgtcttttttaacccagtattatttggacatctgttaagtttttgttaatttctgttttgtacagataatttgctgtacgctttttccagttgctttgtacttctagcttttgtgtatgggaaacattctacttttcagctccagccgctttccctcacactgcagtcacatagctcagctagtgtttctttcctggatgaattctgtctgggtgttgctgctgctaacttaccatgctagatcgggtgggatattctcagtgagaaacacctgtgccatttactggctgcttgcctgttttttgttttgttgttgttgttgttgttgtttgagatggagtctctctctgtcgcccaggctggagtccagtggcgcgatctcggctcactgcagcctccacctcctggtttcaagccattctccctgcctcagcctcccaagtagctgtgattacaggtgcccaccaccatgcccgggtaatttttgtatttttagtagagacggggtttcaccatcttggccagggtggtcttgaactcctgacctcgtgatccacccacctcggcctccccaaagtgctgggattacaggcgtgagccaccgcgcccagcctgcttgcctgattttgagtgctctctgagcaagagtctcgtgggggccgaggagtgaaaggaagtcagggtggtgatgacagcttgaaaatgcataactgtttgacatttgtcagctagtgggtgattactgcatgatgaagcagcactgctttgtgttcaaagtcattttatagcaggctttcaacaaggatattttactggaagctgtttatgtggtaaaagattatttatcccttaggtctgtatttcctagatggctagagcaagaggagcagacatcacatttcgtgtttaggaatgctcttcagcccctccatgctcatgattcagtatttgtcatttagtgcacagctaatctttttcatgaggcttttcctgtccattcattcctgtacctgatttagtattttattatttcagcaagattttaagctttttgaggatggaaactgccttactgcttagtgtattgcatatactttaggggagtggttcaggcatatagtccctactctaattataccttgtgatttagcccctcttgtaatatcttattgcaccagaggtggaca

SEQ ID NO: 65305 - DNA, 1310 bp, Homo sapiens
gggtttcgccatgttggccaggcttggccaggctgatcttgaactcctgatctcaagttatccgcctgtctgggcctcccaaagtgttgtgattacaggcatgagccaccatgtctggcctattctttgattcttgatttttttatttttatttttttgagagtgagtgtcactgttgttacccaggctggagtgcagtggcaccatctcagctcactgcaacctccacctcctgggctcaagtgattttccttcctcagccttccgagtagctgggattataggcatgtgccaccatacctggctaattttgtatttttagtagagatggggtttctccatgttggtcaggctggtctcaaactcctgacctcaggtgaactgcccgcctcagcctcccaaagttgattgctattaatataatcctatagttaccagaacacgtatactagaattacagtacactgaaatggtcaaaaggcaaataaaatagaaataagaaaattttgatgaaaatctggagaattaagtctttctgtaattgagagttgattttttgattgtggaatccttgaaatggtttgaaagaatgatgtgacttgaatgggctttataaacacagcctggtaaggatagctgtgacagcttgggacagtggatttggggtaccaccagttaacatttctggccctgttttcctgtctttaaagtggagataccaactcagaatagtaatgtgaggattaattgaggtaacttatgctaggcactgaacagtgcctgatacagtattgataatgctgtttctttttccatgtgtaaaatgggcataccactagtctcttgggtcagtaatgcatttcagccaaatgaaataaataacacaggtgaactgcctaggagtgccatacatagatgagcagtagctactatgtcagtgttccttttgttcccttttatgagtgcattttgttttgcattttcttgtgtctgttgtggcttaagggataagatttgtgtgtctgaaatgctgtgctaaacaggacgttgttccttgtggaatacttgggtaatatggtttcctagatttcatattcactatttctactttgagagtctactgttaggaggcttctgtgttcaaagaaaactgaaaattataaatgaatattttggatttgtaataggggacacttgggtctcttcgtagtttcaagtgacaagttgaggcggggaggagggctctaatatttagagttgtaatgcagatttaagacttaatcagttttagctatttgctttgtaaacta

SEQ ID NO: 65306 - DNA, 1724 bp, Homo sapiens
ccgcgccctttaccttcactctctaggctcagaggcctcgtgccctgcccagggccagctccgttttcctcgtctttctggctgccgtgctggacccaggctacctgcccgggacaccccatctctgcccctgtcgtctcacgtgttcttagtgtccactcctgtgggtgccgaagggtccgcgcccctagaaggcagcgcttttcccgagcctcgagagcccctcgttcctcgccccagatccgctacggccttggctcgccctccccccacatcaggtgctcacccagtcgtggcctagtagctgggcaggaatctcgcacccgggagcgggaggagcacattaaagcgctttcttcgctagggaccaggctttgattttaaagccagtggtgtcgtggttgtggtcctccgggtaggatgttgttgtaattcttggagaccattacacatgcaccaaggagcttctcattggtttaggctcatacccatagttgaggggaatgtggtaagattttgactggaatctgtttccgcaaaatggaatctctttctcgccaggagagagctgtaggtttattaccttcgagtaaaaaggctgtataacagttttaaagagcatgaaatgctttataatgtgtgcagtgtaagaggttacaaataatgaatcttttacaagaacttcatcttttttttttttttttttaagacggagtttcgctcttgttgcttaggctggagtgcagtggcgctatctcggctcactgcaacctccccaggttcaagcaattctcctgcctcagcctcccaagtagctgggattacaggcatgtgccaccaggcctggctaattttcgtatttttagtatagacggggtttcaccatgttgatcaggctggatggtctcgaactcctgacctcgggtgatccacccgcctcgacctcccagagtgctggggattacaggcgtgagccaccgcccccgcccggaacttcaccttttaaagttcttttcactgtctttgattacccatgaattgggaaggctttaattggatgctttccccttgcccacaagtgtagcttctctccaagcgctttggaagtttcagcctctctattaatccttggtgagaatgaaggcgtctcaatatagaatcaccctttctgttttagcattaaagagtccacttagaaaatcatggaattacaatagcatgcacaaactgttgctacagtgattttcttctcatgttaatttttatattcttcaggctttacttacctagtatgtggtttctgatcatgagttagccaagattgaagcagcactgttggtaaagcaaagctggagctttcagttgttgctttaaccaggaaggttatggttcccctagtggttctttcctcatgacagtccaccacctgtttccattaagaatggcctttggcccagatcacaggcctcaacttctattcaaccattcattctgacccctttaaagaaaacccagggttttctttagagattgtgctatctagacttaagatctggtagcaagaggggctgttagagatggaatatcttttctagaaccccttcactttttggatgaggaaactgagggccctagaaattaagtgacttacttgcccaaggttatgttttttttttttttaaacaatatcacgagtaataatgcaatcttccctttgaggtgta

SEQ ID NO: 65307 - DNA, 1058 bp, Homo sapiens
taggatttggcagagcaagaattgggtagaaagactgactttccacctgacctgttgcatagtattgtgagactggctgactgcagtggttacagtactctcccatttataatacaagcagcatgatttttaatgcctgcaaaatagagtttccaaagaaatgaaatctcagagtcctttagcacctgctcatgggtcaagggcaccttgacacctgcttctttctttctctgctgatttcccaaccctgtacttcaggtgcacaaatggagtccagaggaggctgtaagagccatcgccaagatccggtcatacatccacatcaggcctggccagctggatgttcttaaagagttccacaagcagattactgcacgggcaacaaaggatgggacttttgtcatttcaaagacatgatgtatggggattagaaagaactcaagacactcctgcttgatacagaacaaaaagagcttaacaggaccaacagggcttaagcccagacttgacgtaacagaaatgtgccaataggtaataggtaatttttctttctctgacttgttttgttttcttgaaataacactgttgtgtggctagaaaggaaaagatttagtgtggcttgtattcatgggatacaggacagggatggggctatcatcttttcttgaatagggctaaagaagtattttaacaaaaatctattatgtacctaatattgtgcctaataatatttagcaccacaactcaaaaaacatttagcacttgaaaaaaggagactcacctctggctctttgccactgtcagaatctgaatctcactggccctgtggagtagggatcctatctggagaagtgggagcatgggctgcagtcaggactgctgcagactgagccatgtgatggtacgtaatgagttcccctgagggaatgaaacaccctcaccccttcaaagtcacccctttggaattcaacacagacacacatatcccttcaaaaacttttatttgtatcaacagttcctagctcttgacttagcttagagcttttaaaagagcagac

SEQ ID NO: 65308 - DNA, 1228 bp, Homo sapiens
agttccttgagaactactgtcatcaagttaacaatcttaatcaccctttgtctgaagcactagcttatgagagttttttaaaagctacaaggatgaatacaacagattctccgcccggcataaattgcctcaaagaaagtgactagaggagagttggatgccatacagtaattagagagtagtatgataaagctaggaacaagtgtgagggccaggatcttaaggatatgtgtcttagctgagccttagcctagaatttaacagctgtcatataattttaattttgccaataggaaattggggagaatgtgcacatttacctgattgggaaagagtcatctcgtacccactcgttggctgtgtccttgcactgtgcagaagatgactccatcagtgtaagtggccaaaacagtttgtgccaccagatcactgcggcctgcaagcatggtggagacttgtatgtggtgggagggtccatcccacggcgcatgtggaagtgcaacaatgccaccgttgactgggagtggtgtgctcctttgcctcgggaccggctccagcacaccctggtgtctgtgcccgggaaagatgccatatattcactgggtggcaagacactgcaagataccctctccaacgcagtcatttattatcgcgtaggtgataatgtgtggacagagacaactcagctagaggtggctgtgtcaggggctgctggtgccaacctcaacgggatcatctacttactagggggggaggagaatgatctggacttctttaccaaaccttcccgactcatccagtgctttgacacagagacagacaaatgccatgtgaagccctatgtgctgccctttgcaggccgcatgcacgcagctgtgcataaagatctggtgttcatcgtggctgaaggggactccctggtgtgctacaatcccttgctagacagcttcacccggctttgccttcctgaggcctggagctctgccccatccctctggaagattgccagctgtaacgggagcatctatgtcttccgggaccgatataaaaagggggatgccaacacctacaagcttgaccctgccacttcagccgtaactgtcacaagaggtattaaggtgctgcttaccaatttgcagtttgtgttggcctaaggctgtggggaggggaggagaactgctcactccttttccctccccatacaaactcaaagtcccctgggccccaa

SEQ ID NO: 65309 - DNA, 1033 bp, Homo sapiens
agggaaaaggagtgagcagttctcctcccctccccacagccttaggccaacacaaactgcaaattggtaagcagcaccttaatacctcttgtgacagttacggctgaagtggcagggtcaagcttgtaggtgttggcatccccctttttatatcggtcccggaagacatagatgctcccgttacagctggcaatcttccagagggatggggcagagctccaggcctcaggaaggcaaagccgggtgaagctgtctagcaagggattgtagcacaccagggagtccccttcagccacgatgaacaccagatctttatgcacagctgcgtgcatgcggcctgcaaagggcagcacatagggcttcacatggcatttgtctgtctctgtgtcaaagcactggatgagtcgggaaggtttggtaaagaagtccagatcattctcctccccccctagtaagtagatgatcccgttgaggttggcaccagcagcccctgacacagccacctctagctgagttgtctctgtccacacattatcacctacgcgataataaatgactgcgttggagagggtatcttgcagtgtcttgccacccagtgaatatatggcatctttcccgggcacagacaccagggtgtgctggagccggtcccgaggcaaaggagcacaccactcccagtcaacggtggcattgttgcacttccacatgcgccgtgggatggaccctcccaccacatacaagtctccaccatgcttgcaggccgcagtgatctggtggcacaaactgttttggccacttacactgatggagtcatcttctgcacagtgcaaggacacagccaacgagtgggtacgagatgactctttcccaatcaggtaaatgtgcacattctccccaatttcctattggcaaaattaaaattatatgacagctgttaaattctaggctaaggctcagctaagacacatatccttaagatcctggccctcacacttgttcctagctttatcatactactctctaattactgtat

SEQ ID NO: 65310 - DNA, 1062 bp, Homo sapiens
atcacgaggtcaggagatcgagagcatcctggctaacacgatgaaaccctgtctctactaaaaatacaaaaattagccgggcgtggtggtgggcacctgtagtcccagctactagggaggctgaggcaggagaatggtgtgaacccgggaggcggagcttgcagtgagccgagattgcgccactgcactccagcctggacgacagagcaagactccatctcaaaaaaaaaaaaaaagaggccaaattaactgatggcaagaatgcatggagagtatgcagtctcaacaattaagagatttgccttaccttcaagcttgtcctgagtgactctgcaaaagcctctctttcctctttattaaagttgatccaggcttctattgcctctgttgggttctgagaacacggaactccatctgtgagagccagaggaaaggcatggtcaatgacaatccgaaagagaaattcagagtaagggactttaaagatgtgaaccactttattagactactgctgggcatgtgtatatgtgtacatgcatacatacacatatacatgaaattaacctaaaattgctttttttttttttttgaggcagggtctcaccctgtcgctcaggcagaagtgcaatggcgcaatcaccatcaccatagcctcaacctcctgggctcaagcaatcctgtttcagcctcccaagtagctgggactacaggtgtgcaccaccacgcctggctaattttcttattttctgtatagacaaggtctcactgttgtccaggctggtctcaaactcctgccatcaagggatcctccctccttggcctcccaaagtgctgggattacaggcatgagccaccatgcctggcgggtcttgcttttttttttttttttttttttttttgagatggagtcttgcactgttgcccaggctggagtgcagtggcgtgatctcggctcactgcaagctccacctcccgggttcacgccattctcctgcctcagcctcccgagtagctgggtctacaggcgcctgccaccatgcccaggtaattttttgtactttc

SEQ ID NO: 65311 - DNA, 1002 bp, Homo sapiens
tagtacctagcgttaattgagtgcttaatgtgtgcctggaacctcgctaagcgttttagtgaatgatcttatttcgtcctcacaacagccttatggggtagatagcatcttactcttcttactatagatcaggaaacagtccaaagaattaaactgcccagggtcaaagacctagtgaatgacaaagtaggcctgcctgctgccagaggcagaaacacctaaccattattctgtagcttgtgatgtgtgattgctcagtggtttagggttgcatgaatgagtatgtacatattatgttacagtcaagatacacggactgggagttaggagacctggcatttctcctttcctgggttttctcattgacacacacacacacacacacacacacacacacacacacacacacacctgggcctcagttttctcattgacacacacacacacacacacttttaaggagagagagagtctgtgagggatcttcaagccctgaagttcttagcttgagaacctggtataaacttgcgtgctaaggagctacagagaggcaaaagttcagttcccatcctcaaacagctcttagtctgacaggagaactgagactactgctttagcagaaatgcaggcaatgtgagggaagaactgtggagtaattttgagaagaggtgaacaccccagctgctatagtaagagtctttctgaggaccgtgtagttaaggtggcactttccccaagttttcatcactgtattccctagaagggaaacctttcacatgcacctttctcaaggtgcttcagggagcctttcctggatttgacatcccttacaagcctaagagactgcatgcagggctggcttttgccttctccatttcttttttaaatatgccttttccttccagccactgtcagaccacggaatgatgtggcccacaagcagctctcagcttttggagagtatgtggctgaaatcttgcccaagtatgtccaacaagttca

SEQ ID NO: 65312 - DNA, 1029 bp, Homo sapiens
ctctctgggaaggcagtgacggggaagacaccagatgcttagccctcaaaaattacctctgaggtgggaccagtaacgtgaataaagaatttcagtggtgctgcaggttatttgcaggaagatagtgtgtaatattatcactcgtgaattttatagcaaagtaactgtttagaaatgcagagatgtggtgctccagccctgctcttttagttcccagtcactcctgctgtgttagtgctttgcatgctcctatttccctcttgggctacttctgggcagggctatctccctcgcttctccctttcaccccactcctgctatctgcctcacctggtttgcctcttcactctagcacctgatgatccttaccttatccatttgatccccaagtaacaagaaaagctgtgtcaaatgtactgctttagatctggactgtgaatatgccaagggcaccgggcctgaggttgtgtatctgccagtttaggtttactcttttcagccaccgactactccctaatcctgggcaaatgcttaccattaccttgtaagagtgtgtgggtgggtgagcagtcagttcggagctcctgatgtgggagtggtgagcaggggaatctgactggtgctggcagggcatgagaggtatcctacattttggaatcacacactctagctggttgggatgtgatctgacgggtaacacaggtatggatggagacttactgacagaggctgggacaggagtcagtaaccgagaggaatgggctggggaagtcaccaatagccttgtgaaaagtaggctcctgtgtagctataataaggacttccttagtgctcaagcctgccttttgctcctgcagttacgttatgatgatgaagtgaagcgggtggtggcagagccggtggagttggcccaagagttccgcaaatttgacctgaacagcccctgggaggctttcccagtctatcgccaacccccggagagtctcaagcttgaagccggagacaagaagcctgatgccaagtagctcc

SEQ ID NO: 65313 - DNA, 1057 bp, Homo sapiens
cactagctgtgagaccttgggaaagttggtcattttaagcctcaggctcctcatgtctagaatgcaaagtaatactcattacagttttcttttctttttgagacggagttttgccctttcgcccaggctggagtgaagtggctcgatctcggctcactgcaacctctgcctcctgggttcaagtgattctcatgcctcagcctcctgagtagctgggattacaggcacgtgccatcacacccggctaacttttgtatttttagtagagacggggttttgccatgttacccaggctggtctcaaactcctgacctcaggtgatccaccctcctcggcctcccaaagtgctaggattacagggatgagccaccatgcccaccctagagtattagatttagtaccatgtctggcatagagtaaatatttggtatgtgatagttattagaattttaagaattagaagggaggggctactttccaagtatagacaataatatgggcaaagttacggcgttagtaaaggctaaagcatttggaggcaagtggaattgcatctcttactgtcctaacctttcttcaaagctggatttctgccatataatgagcacctagaacagggactggcacatggtagagactccacagatgtgtgttgaacaaagtcagctgcctcctagctgtatccactgaatatccactgaatgtccttgaggatccccaaactgagttacatctcaagccctcttcccaagcctgtggtggtacttgcactctaaattctattataaacacagcattatgcccctattccccaagctagaaaccctggagatgagtttgtgtcctccctacccctccctctgcttctagaaaatcactgctggattctcagaaacgcctctgaatttgtcacctccctttctttcccgtcgcctttaggcatcatctctgctcagctgttgctgcagcctctatcttgtcttcctgctgccagctcaaggcagtaggcagtagataaagctggagttctaccatctttgaccagggtacagaggat

SEQ ID NO: 65314 - DNA, 1598 bp, Homo sapiens
atcgcttgaacctgggaggcagaggttgcagtgagccgagattgcaccactgcactacagcctgggcaacagagcgagactccatctcaaaaaagaaaaacaaagaaataaatgaaagctagcacttactgaatgttaggcactgttctacatgactcatttgctaagccagctggaaagtggcaaagccagaatccaacctgggcgttctgtctgcccagagtaagaacttaataaggagaaattgtagttagttcatagtagctcagcctttcagagaatactaatccttgttctgtagtgatagtcccagttttgtcctagatttagtcacgtctcccaattggacctctctgctgatttggattggctgatctcatctcgctagatattatttgtgttttgttttgttttgttttccaggggaatatgagccgaggaaatagcttatttttccggaaggtcccctttgggaagacttattgttgtgacctgaaaatgttaatttgaagatgtggggcagggacagtgacatttctgtagtcccagatgcacagaattatgggagagaatgttgatttctatacagtgtggcgcgcttttttaataatcatttaatcttgggaaaattcaggtgtttggtgtctgccttttttgttcttttttccagcacaacataacttaccactgatactccccctttagttattctgaattaggatatttttgctccaaattcttattttacttaaccagaagggaaaaaaagttgtattttcctgaagctacaggcactttgtcatgtgatttttgagtctcaatttaaggctttgtaaaatgaagagtagaattccaagaaaaatgagaaataattttgtaaaacttaacaaaatcactaaattaaactatatgggaggttatgaattactttttcttgggtagaccctaaaatgtcagtagcatgcaccagaatctgactcccattatgcttctaagcacatttcattgaccttgtctctcatacttcaagaaaaggacagtacattgctacattaccctagaaagtctgtgtgaggatctgccccttcagtctgttattgcaaagtaataaaatgtcacctacagggagcctctgagcctactctagttcaagaggctacctgaaaaaaaataaataagataaagggtcagcaacaacaaagaaaaagacaattacagaaaataagcaagatttggaaaggaagtataatggcacttttttcctcaaaggaagttcttgttttcacataaaatatgaaaagcagatcctgcaggagtaacccccttctttaagagccaagtatttgccagtgcttaaattacaccatacagttctaattatatataatcttttgttcttcagttttttgttttgtttcctttttgttattgttgccgaaggtgagtagttttgcatttctgatgacagccttggaaagtatatttgtaactccatgtctggtaatgccaacccaagtcgacatgggtcttaggacactgaccacctcacatgccataccctcagttaagcatgttaacatttataggaggaaaaaaat

SEQ ID NO: 65315 - DNA, 1033 bp, Homo sapiens
tcacttgaggccaagagttcaagaccagcctgggcaactgagcaagaccccatttctacaaaagtgaaaaaaaaaaaaaaaagctggggcaggcgcggtggctcactcctgtaatcccagcactttgggaggctgaggtcgggagttcgacaccaccttggccaatttggagaaatctcatctctactaaaactacaaaattagctgggcatggtggtgcatgcccgtaatcccagctacttgggaggctgaggcaggagaatcgcttgaaccccaggaggcggaggttgcaggagaatcgcttgaacccaggaggcggaggttgcagtgagccaatatcacaccattacactccagcgtgggcaacaagagggaaactccatctcaaaaaaaaaaaaagtagttgggtatggtggcgtgcgcctatagtcccagctactcaggatcagagaattcttctggccttttgttaaaatgttggatgcagtggtgtgctaagaggaagaagcatctccaggctcaaaactgtaactgttgtctttccagggtaccgatgaagcgagacaagtgttagagtgtctcaccgcagtggcactaggcctttaaggtaaaggaaaggagaataaagactaggaatgatctaataacagctgccttgtttccattttacagttttttgcgagtatgttgacctatccctttgtgcttgtctccaatcttatggctgtcaacaactgtgggtaagcactttgtatttcttattctagtaggtggttgactgtatgctgacaggcggagcagccttgtagaaatttaggaaagatgaatgatcagtatcaatctctgattggtatttttttaaaaagggggggaggaaaagtataattgataccattagaagattcctaatttttttctttgtatgccctatgcagcagcagcctcaatttgtatttatttattaattattattattattttttttttttttgagatggagtcttgctatgttgcccaggctggagtgcagtag

SEQ ID NO: 65316 - DNA, 1011 bp, Homo sapiens
caacatagcaagacaccgtctcttagctgggcatagtggcttatgcctataatctcagcactttgagaggtcaaggtgggaggatctcttgagcccaggagtttgagaccagcctgggcaaacatagggagacccttatctcaaaaaaaaaaagacaccatttcttaaaaaatattttgaaattagctgggcgtggtgatgtgtgcttcaggaggtcactgcacttcagcctgggtgacagagtgaggcactgtctgaaagaaaaaaagaaaagaaaagaaaaggaaaaaagaatatattgatgtgttgtagtgttgtaggtaattaatttaaggctcttttcctattttaggtttctaccatgaatgaaatgaagagttattctcaagctgtcacaggagtgagttttttaaaatccttttaaccttctaggaatagttgtgttttgttttgttttccttttaaatctggcttgtgtcatcactgctttaagataaccagatgtctcactgggacatctccctgaaatttgttatatttgtcaaaggtaagaataactcagttttcggccaggcgccatggctcatgcctgtaatcctagcactttgggaaggtgaggtgggcggatcacctgaggtcaggagttcgagaccagcctggccaacatgatgaatccccgtctctactaaaaatactaacattagccgagcgtggtggtgcatgcctgtaatcccagctactcgggaggctgaggcaggagaatcactggaacctgggagatggaggctgcagtgagctgagatcacgccactgcacttcggcctgggcgacagagtgagactccatctcaaaaaaaaagagagaataactcagttttcgaaggaaccacagactcacatgtgaaaataaagagagtaaggcagaacccctgcctcacatcctgcatggtttggtactgcttagctttcataaggggcgtgcctttcctccgaaataatattgttcaggcca

SEQ ID NO: 65317 - DNA, 1050 bp, Homo sapiens
ctctaagatactgcacagttactgggttgtagtcacaaaacaaaattgttctcttctcccaaaaatgtgagtagagactaaatggagcctgtcatttatctagaatgatgtcagactctccaaaatcacttaccaataagagagcaacttaataatctcaataaaggcctcatattttttatttcagcttaatgactttgttggtgacctttcctgtttctttatttttttctcttacctgtaaaattgagaaaacaacagaagcctgctttgcagagaaattttgagaagtaactataatagaacattgagatccatgagtgaaaagtatgataaaatgacaatgaatgagatctttcacatcccattcaaactcttcttgactccagccagggcaggagggctgtgtcattcactttcttatcctataccacgatatccacccacattccttctcacaggcatttgagtgtcatttgtttagatttcagaagtgtgtgttgattgtttctagacaactcgagagatgatcgctcgttctgctgctaccctcatcacacatcccttccatggtatgtttgcagttgacaactgacctttcttttataacctgatctctcctgaccacttagataggttgacgtgggagttgactaaaatgccttgcctgcatgtttttgtttgcttgcttgttttggcttttatccaatttatccagatagcaaaatgtctttaggtggaaaatctttttttttcccagggctatcaaaatctatcttaacatagtttttttttgtttgtttgttttttgtttttgagacggagtttcactcttgttgcccaggctggagtgcaatggcacaatcttggctcactgcaacctcagccttccgggttcaagcagtactcctgtctcagcctcctaaggagctgggattacaggtgcatgccaccacgcctggataatttttgtatttttagtagagatggggcttcatcatattggtcaggctagtcttgaactcctgacctcaggtgatccgcccacct

SEQ ID NO: 65318 - DNA, 1911 bp, Homo sapiens
cttgctctgtcacctgggctgcagtgcagtggcgtgatcttggctcactgcaacctctgcctcctgggttcaagtgattctcctgccccagcctccctaagagctgggattaaaagcgtgcgccccaatgctccgctaatttttgtatttttagtagagatggggtttcaccatgttggccaggctagacttgaactcctgacctcaggtgatctgcccacctcggcctcctaaagtgctgggattacaggcatgagcaaccacacctgtccccttttcttttttcaaagaagagttttcatgaccatttgcttttcttccaactgaccaatatgttaaacttagcaacaagtttatcttggagatccatatttccagttgattaatgagtagaagttaactgaagatttgcagcttaaaaaaaaaaacaaaaactttaaaaaaaacttcagctaatttactttctgtcagtagagttttcattttatgtcttctttcacatgacactgtaataaccctaatcatcctttttctttttttctatagcattaccaggagagtgacaagggtgaggtatgttggagctgatttctaagcatgagggcctttcccttgcaagttgttactgcttttggggcctcttttggagaaaagccaagtagtcagtctcctattcatctcagtgagtgttgtcctatggggtggccaccagtttggacagttctgtttgaaaccatcaggatggctgggcatggtggctcatgcctgtaatcctagcagtttcggaggccaaggtgggaggatcacttgcatctaagagtttgagaccagcctgggcaacatagaccccttctctacagaaaatcaaagattagcggggcctggtggcacatacctctgtatctcagctacatgggaggttgaggtgagaggatcacttgagtccaggacgtcaagactgcagtgatccatgatcacatcactgcactccgcgtgagtgacagagcgagaccctatctcaaaagaaataaaaaccgtcaagatcggccgcccatggtggctcatgcctgtaatcccagcactttgggaggccgaggcaggtggagatcacgaggtcaggaaatcgagaccatcctggctaacacggtgaaaccccgtctctactaaaaatacaaaaattagcagggcgtggtggcgagcacctgtaatcctagctacttgggaggctgaggcaggagaagcacttgtacccaggcggtggagcttgcagtgagccgagattgtgccactgcactccagcctgggcgacagagcgagactctgtctcaaaaaaaaaaaaaaaaaaaaatcaagatctctattttctttgattttgatttccaggagttaggacctggaaatgtacagaaagaagtctcatcttcctttgaccacgttatcaaggaggtaagagatgaattacatcctgtgctgtttgcccagatcaaactgtggtgttgcaactatggaatcagaatcatcaggcctgtgtgttcagtgtctgttcccaaatgaaattaaaccttcaaattaatttgggctttactacatgtataacattaaaaagagagaggatcagtgcttgctgttcagaatagatgcatttcaagaaaactcattttgcccacacattccgtctttagaatactgaaagtcttctaatagtgttgaaaacctcaggaataaaagtgttaaaataggccaggtgtggtggctcacgcctgtaatcccagcactttgggaggccaaggcaggaagatcacttgaccccaggagttagagaccagcctatgcaacatagtgagacttcctctctacaaaaaaaatagaaaaattagctaggtgtgtggtggcacatatctgtagtcccag

SEQ ID NO: 65319 - DNA, 1611 bp, Homo sapiens
ccggctaattttttagttctagtagagacagggtttcaccatgttggccagactggtctcgaactcctgacctcaggtgatccatccccctcggtctcccaaagtactgggattacaaggcatgagccactgcgcccgaccgacagcctgttcttctaacatgaagttagcttgtaattctttcctaagtgaattatccagctatatctgcatttgccttttgagtgttttgtctgggttgccaaatatgcagctgatgctggcgtaatggatgtcttctagttttgttcaaatacaaaatgtgccttagattttatttagaaggtatttttgagcccccttagtaaactgtagctttcctaacgcaaaagttcccttctttcagtttgatattagcctatttcagctacatggtttacgtcatagaatttgaaccaaaatgaaacttggagtttattgaactcagtattaccaacagaagaaaaacctacaagaatgatgcttcatcattgccttggaaaacctatgctgcatttttacttgtgtttaaaaataacccaaattgtgttctttattcaagaccttgcaagcaagacatttctggaaatattgctttaatattgatatattccattgtttttaaaggtgggatatgagcctcttcctccaacaataggacgaaatatttttgggcggcaagtgtgtcagcttcctggtctctttagttatggtaagtgcctttgatttatttgggtttgcatgacgttgaggactgtgataggcaggagttgttattgaaagaaaatatatagaaagcttgtttctttgaaattgtagtatatccatttctcttgaccagaacttgacaacatctctgacttgtgttcttagctcagcacattgccagtatcgatgggaggcgcgggttgttcacaggcttaactccaagactgtgttcgggagtccttggaactgtggtccatggtaaagttttacaggtaagaggaaaattaaatcaatcttcccatagatgttgcttacctgttatgcatagtttgttctaaatatcaagagcaatttaaaagatacatttataaccctgtcctttcttcctcttgaaaaacactttctttttttttttttttttttttgagatggagtctcactctgtcgcccaggctggagtgtagtggcgcgatctgggctcactgcaaactccgcctgccgggttcacgtcattctcctgcctcagcctgagtagctaggactacaggctcccgccactgcgcccggctaattttttgtatttttagtagagacagggtttcaccgtgttctcaatatcctgacctcgtgatccgcccgcctcggcctcccaaagtgctgggattacaagcatgagccaccgcgcccggcgggactcagtgaaattgttgctgttacttccatgaaatttacatatggaaaggcagttgtcatctagccaaagaggtttgtgtatagacttagagaaaaagagaaagtgctgcttgagactaagttactttatgtaactgtaaagtaagacaaacttgaggtaaccaggtaccctgaatatgttccaaatgtagt

SEQ ID NO: 65320 - DNA, 1072 bp, Homo sapiens
cagggtacctggttacctcaagtttgtcttactttacagttacataaagtaacttagtctcaagcagcactttctctttttctctaagtctatacacaaacctctttggctagatgacaactgcctttccatatgtaaatttcatggaagtaacagcaacaatttcactgagtcccgccgggcgcggtggctcatgcttgtaatcccagcactttgggaggccgaggcgggcggatcacgaggtcaggatattgagaacacggtgaaaccctgtctctactaaaaatacaaaaaattagccgggcgcagtggcgggagcctgtagtcctagctactcaggctgaggcaggagaatgacgtgaacccggcaggcggagtttgcagtgagcccagatcgcgccactacactccagcctgggcgacagagtgagactccatctcaaaaaaaaaaaaaaaaaaaaagaaagtgtttttcaagaggaagaaaggacagggttataaatgtatcttttaaattgctcttgatatttagaacaaactatgcataacaggtaagcaacatctatgggaagattgatttaattttcctcttacctgtaaaactttaccatggaccacagttccaaggactcccgaacacagtcttggagttaagcctgtgaacaacccgcgcctcccatcgatactggcaatgtgctgagctaagaacacaagtcagagatgttgtcaagttctggtcaagagaaatggatatactacaatttcaaagaaacaagctttctatatattttctttcaataacaactcctgcctatcacagtcctcaacgtcatgcaaacccaaataaatcaaaggcacttaccataactaaagagaccaggaagctgacacacttgccgcccaaaaatatttcgtcctattgttggaggaagaggctcatatcccacctttaaaaacaatggaatatatcaatattaaagcaatatttccagaaatgtcttgcttgcaaggtcttgaataaagaacacaatttgggttatttttaaacacaagtaaaaatgcagcataggtt

SEQ ID NO: 65321 - DNA, 1143 bp, Homo sapiens
ggactgggcggagaggcgcgtgctgctgcgtgcgtgcgcgcgcgccgcgggcgggccagtgaaaccggcggccctggcacgtgacctaggaccggctcaccgggtcgcttggtggctccgtctgtctgtccgtccgcccgcgggtgccatcatggcggacgcggccagtcaggtgctcctgggctccggtctcaccatcctgtcccagccgctcatgtacgtgaaagtgctcatccaggtatgaggcgtcgccgctccctaccccgcccggcgccccgttcggtcgctgctgctcagggcgcctgaggatcggctcagccttgcgggcctttcattctcccgagatgctgctgctcctccgctgccctttacctccccgcagggacagcttcctcagtcccgcggccccgcttgggggcctcgccgagccctcgcctcgccgcccagcgttgaggccctctcctcccttagccaaccgccacccggccctgccctgcccggcggatcctctgaactttggttcttcgtcactgaggtggatcctggccggtcgccaccaaaggcttccgaaccctccctctcgcccctccgaaattcacattcaccactactccccccaaaatctcagacgcaaaacacgaaatactcagttgaagacaaatgtgaagttaggtgggaaccaacattttattttttattccttttttttttctttttatgctactgttactactgcttttctgttccgaggttttcgcaccagatactgagagaaacacaaggagctcattcagaagtgttaatgaaggggttgctctgtcagatttcggaaggatgcattgagcgctttccagcagcggcccatgtggctcctgacaatgaaaatcacatttgtcagagctggaaattagtgaagctgagttttagcgagtttaaacatgggagttagtttctaatctactgtcaaataattattacatggtattttatattcacatgcaggtaggccaagtaagtgatagacttagtgtttccagttcctttgctatatccctgtaatgggcaggtcattcttttttttatgcttttactgagagttgacataattacctcatgcactgtgcctaggaatggaacagtttt

SEQ ID NO: 65322 - DNA, 2851 bp, Homo sapiens
ctggagcccaatttcatttttcagaactctgctgcgtacttgggatgttttttgagacggagtttcactcttgtcgcccaggctggagtgcaatggcatgatctcggctcaccacaacctccgcctcccgggttcagttgattctcctgcctcagcctctcgagtagctgggattacaggcgcctgccaccaagcccagctaatttttgtatttttagtacagacagggtctcaccttgttggccaggctggtcttgaactcctgacctcaggtgatccacccgcctcagcctcccaaagtgctgggattacaggcgtgagccaccatgcccggccttaagattattttatgagatgaagatggggtttattttcctctctggtctactgtcctgccagagcacagggatatagtcttggagcagaaggtttatatcccctttgcctgtgtctcctgacatgtaataataagtctttaacttatttgtctgtttattctagactcgaattgcagactggcgggaaggggctcttaatggaaactaccttaaacgaaaacttcaggatgcagcagaacaactaaaacagtatgaaataaacgccactcctaaaggctggtcctgccactgggacaggtacgcactcttctccccttttcacctttcacctttgacatctcagacatgatttgtgatcaccaccatctgacgacatgacagcctgtctggagactgagagcagctgcagttagcggtgctgggcaggcaaagcaccgcaagcacaaagtttggccagccacacattggagaaacaaaagcaatgtttaaagtgttccatgtaacggattttttcccaagatatggacaaagctggtttttactctccagagtgttgcacggagtagggcgggcttgggggttaagcgcatgcgagagctctgtgcgctttacaggacctctggaagcaactactcctgattaacctcggtgaagttaaggaaaacttcgtggctgaagatgtgaatgaagaacaagattactatcctctgccagcaggtcagatgaaaacatttctttatatatttggcttttcttgatttttttttcgttatttgaaatctttgctcttttatttttcagctcccagatcctctccctctctttagctttcactgtgtttgatatcaagaatatgaaatgtgaattccacggtccaagaggggaagagtcacctttcacaaacttcgttgttctcttctttggaagggaaattagtgttctaggcgattgagtcccttcattaatgaaacttgaaaccctgttatgcattggcaaatcacaaaaaaagagaaaagtgttttctaagtctcatctgttggagtgagagggttcagggctgtattcacagagttgctggcagtgcaaatagctttgaattatccttggttctccattctcaattgtcaaagctctttgttgcctttgtgaatagcagtccattaagaggttcgtccctgtgaaagcagactgctgtcctgggacaggaccaaatggaagtgtctttgtaggagaacgggttttaaaacatgtgttttctttcttgtaatttagggatcatagacggtatttctatgtaaacgaacagtcgggcgagtctcagtgggagtttccagatggtgaagaggaagaagaagaaagccaagcacaagaaaatagagatgagactcttgccaaacagaccttgaaagacaaaactggcactgattcaaattcaacagaatcctctgaaacttccacaggtgagacaatttaccttgtactaattcagccaaaatgactttagaggaaaaatcttattaatttacattattaaaagattttatgtcataataatataagcttctgattgagaatagtggtgtgaactaaaacaaggaatgcatgagttattatggttggaaatcagcatactattgttatcacgtgtaaaactgtgccccaaagtgaaaagataggctaacagattttgattttaaaaaattgttttataaccattctatcatgccactgactaagctgtgggtctccaaaaataggaatgcttgtgctgaggaactagatagttgaactgtcaatatatgtggcatgctgagatttgttatacatttctatacaacacttagtctgttcatattgcaacctcatttctcacctccactaatcttacaaaaagcgtggttggtacaaatcaaaatgatatgaagaaatgccattagtacttgtttcagagaagcaaaataattgatcatgaaaaatcaccagcaatcttctggtctaaaacaattggcaataggatgtctcattccatttttaaggtactcttggaagaatttagtttagttacatacattttttaaaagataggctttcatgctcctcagttcctttagtttttaaaaagtttccaatgtgtaaagaaacttccacctgttaatcttaagaattggtagctatttgttaaactgatggcatatgaaggcaagagtctatgagtcgtttctaaagtaatagatctttgaaaattttaaaaagtgaaatttgtcaataacagagttaagagctgaattcttttgtctaaaacttatcgaaattgatgcttgtactctactggctccctgatgatagtagaaaagcactagtaatgtaccaaatgaaactggttgtgtaccagatgattttgttaacttcttaaatagcctagaaatcgtcagcaggtcacatacaactgcagtgataatttcagaacatagcaaaaggctgattttattctacttcacattttagaagtgcat

SEQ ID NO: 65323 - DNA, 1543 bp, Homo sapiens
tcagatctatactcttaacaaatttcaggtattgttaactgtagtcaccatgctgtgctttagatttcctttttttttgggggggggggtgttggggtgatggagtcttgctctgtcaccaggctggattgcagtggcacaatcttggctcactgcaacctccacctcccaggttcaagcaattcttctgcctcagcctcccgagtagctgggactacaggtgtgcaccaccatcctcacctaatttttgtatttttagtagaggtggggtttcacgatgttggcgaggatggtctctatctattgaccttgtgatccacctgcctcagcctcccaaagtgctgggattacaggtgtgagccaccacacccagccccaaaatttattttataactgaaagtttgtattctttgaccaacatctccccatattcccctgtctccagcccctagcaaccaccattctaattctactctttgagtttagcttttcaatattgggatccatttgcaactattgaattccatgttgtattagaatgcattatgatgggctgggcacagtggctcacatctgtaatctcagcactttgggagactaaggcaggaggctgacttgagaccaggagttcaggagcatcctgggcaatagcaagacctttgtctgaaacaaaataattgttttgaataatttttaaaatgcattgtgattatgtagatatgcatttgattcctgtcattatttgtcactttgttatgtgtattatgttactataaattagaattttatattctggataactaaatacagctgtttggggaaggctgtttataggcagacccatatttctaatatctataagaataaatgaaggattgtacataatacagaaaatgttacggattctagttttactttttttcttttttgcattgtagtttcagattggagaactggcaaataccctgacaagtaaattcgagtttctaggcattaatagacaatccatctccaactttcatgtgctgctcttacagactgaggtaagtctttttttttttttttttggcataaacagttaagtgtttgaatgaaatgctgtatgtgttaacgattctgtcttgcttacattttaagcctaaatttaaatttttaaccttgaagaatatttgagccgacaatccaggaaataaaactgtgttaaccaaagcacagtaaatagacttttttctcacaaattaaaattatattatcatggtcagatgaggccatgtaatgttgaaggtactttgtaagtgttaaagcattataagtctgtttaaagagaaaagttgagtcctatttgtaacctgcatactttacaaaatggcagggcaggattaggtaaggagctcctgtaggaagctgactgattttcttaagaactgaacccttggccaggcacggtggctcacacctgtaatcccagcactttgggaggccggggcaggtagatcaccaaggtcaggagttcgagaccagcctgaccaacatggtgaaactc

SEQ ID NO: 65324 - DNA, 1062 bp, Homo sapiens
taaaggatttttattttatttatttattttttgagatggagtctcactctgtcacccaggctggagtacagtggcgcaatctcggctcactgcaacctccgcctctcgggttcaagcatatctcctgcctcagttgggactacaggcacatgccaccatgcgtggctaattttttgtatttttagtagagacggttctactgtgttagccaagatggtctcgatctcctgacctcgtgatcttttcacctccaaatgccaaagtggtgggattacaggcatgagccactgtgcccggccctgaattgtttttgggttatatagacagtaggctgacatgtttgaagagttttaacaagtaagtaaaacaggcaagagagaaagaactaataatcttttgcagatatctgctatgggggaaaaggtatatagtgttctataagtattggtactttggtttaattttacatgttttttttacagcaattggtgctgaaaattcagaaaaaatagatgagaattcagataaagagatggaagtagaagaatctccagagaaaataaaagtacagacaacaccaaaagtagaagaagaacaggatttgaaagtatgtatattacttaatgcaacttgacaaatttttattattattatcattattttgagacggagtcttgctctgtcacccaggctggagtgcagtggcacgatctcagctcactgcaacctctgcctgcctcctgggttcaagccattctcctgcttcagcctccccagtagctgggattacaggcacgcacctcaactcccagctaatttttgtatttttagtagaaacggggtttcaccatgttggccaggccggtctcgaactcctggcgttcatgattcccccaccttggcctcccaaagtgctgggattacaggcgtcagccactgcgcccggcccgccaaattttttttttttttctttttttttcccaagagagagtgttgctctgccatccaggctggagtgccgtggcccgatcttggctcactgcaacctctgcctcccacgtt

SEQ ID NO: 65325 - DNA, 1002 bp, Homo sapiens
agatcacttgagcccagaagttgagaccaatgtgagcaacatacccagatatcatctcttactagaaaaaaaaagtatgatgacatgtgcctgtagttccagctacttggaagggtgaggtgggaggattgcttgagctcagaaggttgtagctacagcgagccatgatcatgccactgcactccaacctgggcaacagagggagagcctgtctccaaaaaaaaaaaagtgctttctgttctcaaagaatttaaatttcaacaacatagtcttgtttattattctgattatacatattaataagcagttaatgacactaacttaattgtcatgttctttgtaggcagagttgcgagccttggaggaaggagatggtagtgtgtcagggtctagtccacgttctgatatcagccagccagcatctcaagatggaatgcgtaggcttatgtctaaaagaggaaaatggaagatgtttgttcgagctaccagtccagaatctaccagtaggagttctagtaaaactggacgagatactccagaaaatggagaaactggtaatttgtgcttcacattaaacttcagagttgaaagatatagaggggaaggaaactcttgtctttttttgtttcctcttcaacaaaacaggagattgtacttttactctttgggagaagtgctgggaaggaagcttccatccacctctctaccttttccagatctttttctagtagaggagtaagagcctgagaggctgacacccactggatggtggtgtattcagagtccagtcccatttcttctctctgtctacgttgcccagcctctgtgtgggtgggtagagagtttgattgtgtcatgaggacccaagttgtcttcattcaggtaataaggaccttatcattcattcatggtaaggtcgaagagctcctgctgcattttttaatctattttcagagatccctggatgaagctaatattttaatctccatttggccctaatta

SEQ ID NO: 65326 - DNA, 1050 bp, Homo sapiens
gctctcattcagtcagtgtctgtctaaagtaataatgtaatggtataaatatatactcacctgttgggagtaagtggttttggccgggcacggtggctcacacctgtaatcccagcactttgggaggctgaggtgggcaaatcacaaggtcagtagtttgagaccagcctggccaacgtggtgaaaggcctctactaaaaatacaaaaaattagctgggcatggtggcgggcgcctgtaatcccagctacttgggaggctgagacaggagaatagcttgaacctgggaggcagaggttgcagtgagccaagattgtgccactgcactccagcctgggtgacagtgcgagactccatctcaaaaaaaaaaaaagtcgtttttaccttgagtattcagctactgaaaacagttaatatgaatgtgtgtgcaattgaatgtatgtgcaggtgagatttgtttcagaattaaatgagactaaattattttgttctttataggaagtaaatgaaggaattcaggctctctcaaatagtgaggaggagaagaaaggggtggcagcatcgctgcttgctcctttattgcctgagggaataaaagaagaagaagagagatggagaagaaaagtaatttgtaaagaggagccagtttcagaagtaaaagaaacaagtacaacagtagaagaagcaacaacaatagtaaagccacaggaaattatgttggacaatatagaagacccttctcaggaggatctttgcagtgttgtccaatctggagaaagtgaggaggaagaggaacaagatacccttgaactggagctagttttggaaaggaaaaaagtaagcttttgaaagttacttgtagaatgttttttcctcagtactactctacagggatcattgtgcttgacttacaaccattattgggattttgtttttcttatcccatcatctaggtatgttgaagcttatgcagcaaaaactttaaactacagaggtgtaggttttttggtccttgatgatacttttggtagttatcgggggaactcacccc

SEQ ID NO: 65327 - DNA, 1333 bp, Homo sapiens
tgcatgttgatcaggctggtctcaaactcccgaccttaggtgatctgcccaccttggcctcccaaatgctgggattacaggcatgagccactgtagccggccaaactgtttttttttaaaaaatgtgttcaaaggtgactctaaatgttagatattgagaaaataattcttggtgttaggccagtggttctcaaccagtgttggggggtgcccctaggggatatttgacaatgtctgtcaaatattttttattgtcacaatgtaggaggcagggtggatgggagtgctactgtatctagtgggcagaggccaggggtgctgctaaaacctccacataggattgcccctccacaacaaagacctgtgtgcccaaaagttaacagtgctgttttgagaaactgttaggtgattttggcttttgagcttatatgtaagccagaattgtagagggatttgtgcttaaaatttgttttatcttctagtcggaattgagatgggcgattggcaggaagtctgggatgagaacacgggatgttattattattggaatacacaaacaaatgaagtgacttgggagttaccccaatatcttgccacacaggtacagggattacagcattaccagcccaggtaagaataaatttaaaagtgaaattgcctagaaggaaattgaagccttatcttttgctgatagtatttgtcttatatttctcttgctaagtatatatttttttagttctgtgccaggtgctgaaactagttttgtggtaaatacagacatatattctaaggagaaaacgatttctgtttccagtagtaaaagtggaccagtcatagccaagcgagaagttaaaaaggtcagtgtcgaaacttacctcatttgtttattttcagatctaataagcgttactctgagcacaggagtggaagccttctcttaatattttatgtcatacatgtgaaataggataagtttcataactttcactttgtttctgtgtattatgtagcctttatagcggttactcacttgactttttcttttttcttttttctttttttttttttttttttttttttttttgagacagagtctcgccccgtcacccaggctggagtacagtggtgcgatctcagctgactgcaagctccacctcccgggttcacaccattctcctgcctcagcctcctgagtcgctgggattacaagcacccgctaccacacctggcttattttttgtatttttagtggagacggtgtttcactgtgttagccaggatggtctcgatctcctgacctcatgatccgcctgccttggcctcccagagtgct

SEQ ID NO: 65328 - DNA, 1104 bp, Homo sapiens
acccaggttggaatgcagtagcgtgatctcggctcactgcaatccccgcctcccagattcaagcaattctagtgcctcagcctcccaagtagctgagattacaggtgcccaccaccacatccagctaatttttgtatttttagtagagacaagttttcaccatattggccaggctggttttgaacttctgacctcaggtgatccgcccgccttggccgcccagaatgctgggattacaggcgtgagccaccgtgcccagcctaattttttttatttttagtagagggagatttcaccatgttggccagcctggtctcgaattcctgacctcaagtgatccacctgtctcagcctcccaaagtgctggaactgtaggtgtgagccactgtgcccggctcatgtagaatttttaaaaagtgattgccatttccttaagtttcttgtttttgatataattactgcatttgttactcttttcatactgaaggagatcgatgccataacagctcctcagcctgcagctcctgtaggagcttctgctccacctccaactccacctcgaccagagccaaaggaagcagcaacatctaccctttcttcttctacttcaaatggaacagactccacccaaacatctggttggcaatatgatactcagtgttcactggcaggaggtaaacttgatcctttgatttttaaagaaaagtaaaatccttaaagggattctaggcattcacttttctggttttttgtttgtttgtttgtttgtttgttttgagatggaatctcgctctgtcgcccaggctggagtgcactggcgcgatcttggctcgctccaacctccacctcctgggttcagacagttctcctccctcagcctcctgagtaactgggactacaggcgcacactgccatgcctggctaatttctcttttgtattttagtagagacgtggtttcactgtgttgcccaaggctggtctcgaactcctgagcttaggaaatcagcctgccttggcctcccacagtgctaggattacaggtgtgagccatcgctcccggctggcattcagttttctaaagatgaaagcccagagactttaac

SEQ ID NO: 65329 - DNA, 1099 bp, Homo sapiens
tgagtagctgggattacaggtgcacgccatcacacctggctaatttttgcattttttttttttttagtaaagatgggatttcaccatgttggtcaagctagtctcaaactcctgacctcgtgatctgcccgcctcggcctcccaaagtgctgggattacaggcgtgagccactgcgcccggccatgaattactttctctgttgcaattcccctataatcccagcactttgggagactgaggtgggcagatcacgtgaggttgggagttcaagaccagtctgcccaacatggaaaaaccttgtctctactaaaaatacaaaattagccgggcgtggtggcgcatgcttgtaatcccagctcctcgggaggctgaggcagagaatcacttgaacccgggaggcggaaggtgcagtgagtggagatcacgccactgcactccagaatgggtaacaagagtgaaactccgtctgaaaaaaaaaaaaaagcagactcaaagctgtgagaaaagtgacgtggaagtatgggggcatgctctgttctggtcgggactcaaaatgaggagcgtagaatacaatggacagaagagctgggctgggttgagcatgggttctaggccttgaacctaaacaagcacaggaaaagttggtcagcatcttgtgaactgccaccatggaaaccactgcattgatcagcaacacaaatggggggagtgggggtttctggaatagggctagtctctcactacttcttgccctccagagatggctacaatagggtttggtctcattgtcgcccaggctggagtgcagtggcatgctcaaggctcactgcaacctctacctcccagattcaagccatctttccgcctcagcccctctagtagctgggactacaggtacgcaccactgcgaccagctaatttttttttttttttgaaagatgtggttttgccacgttggtcttgaactcctgatctcaagtgatccgcctgcctcagcttcccaaagtgctgagattataggagttagccaccacgcctggcccttgatgttttcatactatgggttatgatccattagtcactcatgaaaacatcagg

SEQ ID NO: 65330 - DNA, 2167 bp, Homo sapiens
ttccttgagtcattatagtgatggcttattttgtttaccagtgagatagagtgcctcctgagcctatctaaaatattagttctatatttcacttggcagctaataactagttatatcagatgcagcatttctggttctgagaaaagagttagtgatccttttattagaaatactggtacgatttccatacttagaaaattcattcagaaaatgagactgaaatgttgtatataacagagaggcctagttttatcagtagagtcacagaggagactcctataacaaatggtgattttatgaagcagagtggctaacatctttataaggtggaatctacttggtgaagtcaaagttattaataacttcaatatttttccattgttgagctgttatgtaatgttttccttcttttctcttatagctgtcccagaaaatacttgacaaattggaggactaccagcaaaaagttgataaggcaacacgggatttattatatcgtcggaccttgtgatttggattgtcacctagcctttgtaaccgcttggtgcctcttaggacttaagactaccctacaggaaccctgtactcaaggccgatttttgtaactgtaaatgatgtgtacaacattcaagtctgcattctgcacaagataggagggcggaagagtcagaggaccctgtgcttgctggtggtgctaacacaatttctggtgttcaaccttggtctcaaatagctgcttttgtatatgattcacgagcttttttagagtttatatttttttaaactaccgaagacattcattatctgcaaattaagactcaccttcactttccaaaatagctgagggttgttggcttgttgtagctgaccaccaaaagcagtcactgcaaatcttttaattcttccctatcaccttttgtattttaatgcaattattttggtccagaactgacctgtattttctgtattgtacacaaaagctaataattttgtgtactttttatttattttggaggttttatatgatcttcaattgagtattaaataatttgcctagattaagcctaaaatgatgaccagctaattaaagaagatattttgaatctggttctgagctaaagttgagtaaattcttagctaagaaaaaattggaaatccatcatctatattagcaacagattctcagagtaaattgttaacttctatgatttatgataatcaagctggacttgatcatacaagttagtctcataatgtattggaccaaaatgtaaacttcattggtcagatttagaagcattcatgctcacaagttttgggaaagtgaaaaataataaaatcatcttggattttattctgtatattaaaatttatcttttaaggaaacaatctgtatactacttgcttgtatagccttttgacccttcttgagtttttcagaagcctttaatttttatactttcaataccatatttacattatatactttaattaacaatgtgagtttctctgtggtactgttgttgatagatactgaggtgtgtgtttcttttttttttttttttttttttttcattttagctctactatgattaatacgaggcatttggtgcaattagggactgggagagcccctgtcctcccagctctctaaacctgtggctttcaacgacagtaagaaagacattttgacctacatacacatatataaccaaaagaaaagtttcacaaaatttgtatcctcacctacagtgtatcctgatgttttcatgagtgactaatggatcataacccatagtatgaaaacatcaagggccaggcgtggtggctaactcctataatctcagcactttgggaagctgaggcaggcggatcacttgagatcaggagttcaagaccaacgtggcaaaaccacatctttcaaaaaaaaaaaaaaattagctggtcgcagtggtgcgtacctgtagtcccagctactagaggggctgaggcggaaagatggcttgaatctgggaggtagaggttgcagtgagccttgagcatgccactgcactccagcctgggcgacaatgagaccaaaccctattgtagccatctctggagggcaagaagtagtgagagactagccctattccagaaacccccactccccccatttgtgttgctg

SEQ ID NO: 65331 - DNA, 1024 bp, Homo sapiens
ggactttgggagacctaggcgggcggatcatgaggtcaggagatcaagaccatcctggctaacacagtgaaaccccgtctctactaaatatacaaaaaattagccaggcatggtggcatgggcctgtagtcccagctactcaggaggctgagacaggagaatcacttgaacctgggaggcagaggttgcagtgagctgagattgcaccactgcactgcagcctgggtgacagagcaagactccatctcaaaaaaaaagaaaagaaaaaagaatttttcatcattaattttatcttggaagtaaattgtctcttaatgcttactcatgttcttgtaggtatccagttgtgtaacttgaggaagagatgagccaatattccagtagtgaattcagcaaaagactagagatgaagttgtcatctatctctctagttttagtatcaaattaaagtggtacgtttcagcgttcagttttcaagtgtggaaccattttcattccagatgcatcaaattgcaatttggaggagaggcagcacaagcagaagcctgggcctggctagcagccaatcagctctcatctgtcatcactactaaggagtctaggtacaaccctggtgttcaaccctgggtagttttgcctttctaaaagctgtaactgtctttctctgactaaattgtcctacatagatcatttcacttttttctttctttttggctaagtttttataggggctggaaagtttataattaaggtgacatcatgtcatttattgtccaaactaggatgtctttgcctatgaaatgtctccttctccatatccccctcctcaaagacttactgtttcatatcaggaaagggtactcttacaggcaaaaatctgtatttacttgtttcggagtgttatcctccttttttcccccatttcttccactgagcagtcactgcatggtttcatcacagtgtcctcttatatcttgtctccagctgctgttcagcagtctgtcacccatcagcccccatcatc

SEQ ID NO: 65332 - DNA, 1065 bp, Homo sapiens
ttttctccttccttcatgcatttggaaattagattgaatgttacttaatgttcagtggaaattgacaggttgcgttaatctgatggatacttctttgtattttgggagttcaaaatatttttctttgatgtatagcaaatcgacaaattgaaatcctggaactggaagatctggagaaagagtgttccttggctcgcatccgcctcactttggctcagcatgatccatcagcggttgcagttgctggtaggaattcaagagtttaaagcctctgacttgtcagcaccacgagcacattttaggtccaggcagtgtatgtagcatggtagatgggtataaagcctgggttattactcagagatactcatcaacaaaacaaaatctttggtttcatttgtgtataccttggctacacgaaataatctttttccattttcacaggaagttcatcagcagaggaaatggtcactctcttggttcaggcgggcctctttgacactgccatatcactctgtcagacttttaagcttcccttaacgccagtctttgaagggcttgccttcaagtatgtataaaattatttttttatagtcttttctaatgcaaatatattatcctcttgctcagtgtgaaacagtcgtcataagccaagtagcccatatatcatttatgatttgaagaagtgttttgtttaatccatccaagcattcttaaaaagaatttcaggctgagcgcagtggctcacgcctgtaatcccagcactttgggaggccgaggcgggcggatcacgaggccaggagatcaagaccatcctggctaacaaggtgaaaccccgtctctactaaaaataatacaaaaaaaattagtcgggcgtggtggcgggcgcctgtagtcccagctactcgggaggctgaggcaggagaatggcgtgaacctgggaggcagagcttgcaatgagccgagatcgcgccactgcactccagcctgggcgacagagcgagactctgtctcaaaaaaaagaagaagaatttcttggccaggcacagtggctcacatctgtaatcc

SEQ ID NO: 65333 - DNA, 1038 bp, Homo sapiens
ctacaactacaggcgcatgccaccacacgcagctaatttttaaaaaaatttttttgtagagatgggggtcttgccatattgcccaggctggccttgagcaatcctgctgcttcagcctcccagagtactgggattggaggtgtgagccaccatgccggcctacttaacctttctcaataattttaaaccataattgagtttgaagtacattacaatattaattttaatggaaatttcttctatttctcgttaggttttacgactactagatgtcattggtttgcctgaactggttattcagttggctacatcagccataactgaagcaggtgatgactggaaaagtcaggtaagaattggctgcaatttggttgttttctttaaggtttgttgtgggtgtggtatgttcatttctattgctctttttgatatttgatctacatttgatatttaggctactctaaggacatgtattttcaaacatcatttggatttgggtcacaatagccaagcatatgaagccttaacccaaattcctgattccagcaggtaatttcatggccttttttagagaagacaatttaccaactctgtttaacctactaagatagtttgccctcatattcctttctttccttctaggcaattagattgtttacggcagttggtggtagttctttgtgaacgctcacagctacaggatcttgtagagtttccctatgtgaatctgcataatgaggtaattttacttatccagtgatggctttcaacaagtatggtggttgccatgattgctactgacttagttatctgattgcttccccttccctaggttgtgggaataattgagtcacgtgctagagctgtggaccttatgactcacaattactatgaacttctgtatgcctttcacatctatcgccacaattaccgcaagggtgagcaatgtaaccagacagtatcttgcagacagccttattagtttaatcatgttttaccaaaatattgtgtgttggacttaggtaatttttaatatgt

SEQ ID NO: 65334 - DNA, 1022 bp, Homo sapiens
gctagactgcagtggcatgatcttagctcactgcaacctccgcccaccaggttcaggcgattctgctgcctcagcctcctgagtagctgggattacaggtgcacgccaccacgcccggctaatttttgtgtttttagtagatatggagtttcaccgtgttggtcaggctggtctcaaactcctcacctcgtgatccacccgcctcagcctcccgaagtgctgggattacaggcgtgagccaccccacccggccaatgtttactttttaattggtagcacttaagtgtgagatacatttttaaaaatatgaatgcatcacatagaattcatatgtgtcagaaactatacatagagtagaccatgttaagtaatcttgtttcttttttggctttcccttacatgtgaacccctgattcatagcacctagaatttgaatgatctgttacaagtcattttatattttatttctccaggctctggaatgtttttgtcaggcagcatctgaagtaggcaaagaggaattcttggatcgcttgattcgctcagaggatggggagatcgtgtctacccccaggctgcagtattatgacaaggtacatcatgtcttggtttggccttataccaccctgtgtaaaaacacatctgaaatacattgctttgctatttttggagaaaaatactataaaaattcagttgctccctgaacttccaaatttaaaaaaaatgaatttgcctagagaaattaaagaaacatggccgggcacggtggctcatgactgtaatcccagcactttgggaggccaaagcaggcagatcacctgaggtcaggagtttgagaccagcctggccaacatgccaaaaccctgcctctactaaaaatacaaaaattagcctggcgtggtggcgggtgcctgtaatcccacctacttgggaggctgaggcaggagaatcacttgaactttgaggtggaggttgtagtgagccaagatcgtgccactgcactctagcctgggtgacagagc

SEQ ID NO: 65335 - DNA, 1144 bp, Homo sapiens
gtactggaattaacagactctggtgctttaatggcaaataggtttggtaaggagtggactatgtacacatttcattttaaactggggatttattgcatattcattaaagtggtcttttgccacctttgccatagaaaggttggctaggctctttgctttcagaaggcatgagtaagctgtggcctgagatctccgtttgtggcatggggtctgtgaaactgtagtaccagatcaggcatatgttaaggatatggtatatatatgtgtgtgtgtgtgtgtgtgtgtgtgtgtgtgtgtgtgtgtgtgtgtgtgtgtgtgtgtgtgtatagctgctttcccattctgttttgatgctccagtgattaacaaaatcatttaaaaatttattcgttcatggtaacttttgtaatcttagtcaacagatatttaaaagtatccctcatgtttgaaaaccattattctggagaatttattttgtattgttctggtataaaagttgaaatcctggggctaattgtatttatcatgaagaatttctagggaaggcacttaagtcttgtgagatcagtgaaaagaaatgactataactttgatgtgaatggtgtttttattgcatttttatagtgcctcacaatttacagactacttttatttatattgccactggatatatacccgtgatacattttctgttttgaagtgctaaattgtttgttacaagcataaaatgaattgatagactattttaattgaaaattgataattaccactacacaaaactgtcataactttttctttttaagtatctagtcctcagactattgtggagttattcttccaagaagttgcaagaaaacacattatatctcacctcttctctcagccaaaggcacctctgagccaaactggattgaattggcctgaaatgattactgcaattaccagttatttattgcagcttttgtatccttttatttagaagccagtgaaaagctctcttctggccgggcatgttggctcacacctgtaatcccagcactttgggaggtggaggcaggtttatcacttatggccagaagttcgagaccagcctggccaacatggtgaaaccccacctctactaaaaatacaaaaattagtcagg

SEQ ID NO: 65336 - DNA, 1220 bp, Homo sapiens
aatcaatagattgtcattggcttaagacataaatgttaactttctcttatttgtagatgtggacatcgctcgggatgtcatatgtcttataaaatgcctccggctgattgaagagtcagtaactgtggatatgtcagttataatggaaatgagttgttataacctacagtctccggaaaaggctgcagagcagattctggaagatatgatcactattgatgtgtaaggagaattagggtaaagtgcatttcctaatggaaattcagcatttttagcgccaaagttggaattttaatgtatgttccagagcgtacagaatagtagcttaaagtcaaactgatgcgccatgattctaagtacatatttctacttttaacagaaaatttaacacgacttcaagtctagaaatagacttataaaatatgctttaacaattaaccgagctaaaaattctaaaaagcaaaagtgttcttctcatgtttgttttgtgtgttgtttatgaaaaactgagaggaaatttgctatgcatagggactgtatcttatatgccagagtgattatcttcattcctttatctggttctcttgtttcataatgtatttagcttataggacatatagaacttgccttacgtattctcggtagtaataagagttttgtaattgtccttatagagaaaatgtgatggaggatatttgtagtaaactgcaagagattaggaacccaatccatgcaattggactacttatacgggaaatggattatgaaacagaagtggaaatggaaaagggattcaatccaggtaaatgacagaacaacaaatgtgcctctttgattaaaacaatgatgcattcaactccatttttcttctttttacagctcagcctttgaatattcgaatgaatcttacccagctctatggtagtaacacagcagggtatattgtgtgcagaggggtgcataaaatcgccagtactcgtttcctgatctgcagagatcttttgatcttacagcagctgttaatgaggcttggagatgctgtaagtactgcttgagggaaaacttgtaaaatctaaaacctgttataggcctacaagcacttaggagcaaaatgtcagccctactagcacagatacttttgtcttggttcactgctttattctcccaagcttggccttatgagatgctctataaatatttttgaattaagaatgaataag

SEQ ID NO: 65337 - DNA, 2370 bp, Homo sapiens
gcctgtgaaccaagtggagatgaattctgagcggttggtcaggattgtatcacagtttgcataagaaaatggacaggtaccacgaatatgatcaaggaaaattctgcccatttttatggctgaagttctaaaaaccctgtgcagcagtgagatctgtggctgccagtggctccttgctcctcagctgggattaataaacaagctccttttggggagggtgggggaaaaaagaaaaaaataaataaacaagctccttttgaggagtaataatgaaagttagaatagcttagtatagaaactaaccctgatatgttcaatttgcgaaggtatttttatattaaaatatttatttttgtaatatttttgcacatacatgtaagcgcatgtataaaattgctattctgtgtgtgtgtgtgtatatgtgtgcgcatgcatgctattgcaggttaagaagtaatagaaacaggaaataaccgcaattattaaggtcagttttgtttgatgctgtagtatatatggaggccacattccactacaagcaatggccggggtatggtgttaatttttattatagtagagttaattgcataaaatattgtcctaaataaatggcctatcaagtttggaaatgtctctatgtaacagaatcacagtgaaatttggattttgttatgctgttttttataaatgtacataatgtgatttggcatgcaaaagtggtccaaatctgtttatccaaaattttcaaatttggtgagttcacttggacactgttctcatatatttcagtagaacagtcagtgagaaaagcataaacttttcaaacaaatgtctctttttcaacaggaagacctctggagatacattggagctgatggaggagtcactggacataaatctgttgaataatgccattcgcctaaaattccaaaattgcagtgttttacctggaggggtttatgtctctgagactcagaatcgtgtgataatcttgatgttaaccaatcaaacagtgcacaggttacttttaccacacccctcccggatgtataggagtgtaagttggctaagtgcaatatcttttatttcccaaattactctgggtgtcacaaatgtagtgctggagcgatgtcttttggaattgaaggaaatttggattctcgttatccctcaccaagcatactttgatagctaccgcttaaaatgatcaggcatacattttaagttgagaattagttttcattaagaagaatagctttcttaaacttgacagttttttactttaaaaacttttttagcaatagagaggaactgagcaaaattctggttattttgatttaatagatttttctttttaattactcaacaggagttggtagttgacagtcagatgcagtcaatattcactgacattggaaaagttgatttcacagatccttgcaactatcagttaattccagcagtacctggaatatctcctaattccaccgcctctacagcctggctcagcagtgatggggaggccctgtttgccttaccatgtgcttctgggggaatctttgttcttaagctacctccttatgacatacctggtaagaatgggaactgagcatggatttaactttaaacaaggaatgttaacattgaaacagttcaacctcgtcatccaatgcagggattgcatctctactgccccggaactggtcattcattattgcttgcctaatgagtccctaatgctttacttttatacagtggataaggaactataaagcatattggagcacggaaaaacaaatagacaagtataagacagcctattctaaatcttgtagtagagatgggttgcctaattgtctgccctgagatggaggcattataacattataattaaattaattgaaacaaagacattaaataccctgcaccaagttgccactgtgtcttgcctggattattgtattagctttctatatatctccccagatctgtcttaaccctcttcagacacttctcaggtggactgatatatttaaaacccaagggccaggcgctgtggctcacgtctataatcccagcactgtgggaggccaaggcaggtgggtcacctgaggttgggagttggagatcaacctgaccaacatggagaaaccccgtctctactaaaaatacaaaattagctgggcatggtggcccatgcctgtaatcccagctactcgggaggctgaggcaagagaatcgcttgaacccaagaggtggaggttgcgataagccaagatcgtgccattgcactccagcctgggcaacaagagcgaaactccatctcaaaaagaaaaacccaagttgggtcatgtcactgcactgtgtaaa

SEQ ID NO: 65338 - DNA, 1050 bp, Homo sapiens
gccaaactcccctggaaggtagggtttggtgtataaattttcgtcgctgtacccaaagtgctattctagaagcggtaattgacacttagggaaagagaaagattgttttttcagttcgtatcagaatcgggaaaactgagacacagagttctagaagagatacctctccccctccccccccccacccccacacacacatacaccaagcaacaccagaagcagaggaaatgtagcttaggggaataaagcccataagaccaattttaaacatgaacccgttatgtttttatagtgctttacagcttccttcattgtacaaatacgttcgagcttcaatatgtcaggcattgtgctaggtaccaggacgaaatgaacaaaactgcaattttcatcatgcaagacgttgtagcaatgtcagaatagatgtagacccacttttcatggggaaattttttggaggaaaacttgccctagaggaaaaatatacgggttatgagaggctaataagaggaccaaatataattagtggggcagggaaaggctttaaggaattcacagttaccctgagatctaaaggacacgaggttagccaggcatggggagtggacagagaggagtccagcaagtaggatcaccatatgcaaaggtcatgaagtggaaagaatgtggcgggtttggaactgaccaaagatctgtgtggcttaagtgcagtgggtaaaacagaaagtgatgtgagatactgaggctggagaggtaggcaggactcggaccatgagggacccttaggccatttttaaggatttttggattttatcctaagtacattgagtaataattgaaagatttttaaagagttactaacatcaaaattgcatttttggatgggaacagttaacactagggattccaaaaggagggagggaggggagcaaaggttggaaaacctatcggatactgtgttcacaacttgggcggcaggatcatcagaagcccaaacctcatgtatataggaatatacacacaatatactcatgtaacaaacctgcacat

SEQ ID NO: 65339 - DNA, 1744 bp, Homo sapiens
tgcacctgcccgagcgtacccccccggggggttccggggaagggggcgggggtccggatccccggatccccggaaggcgacttgcggggaccccggccggcctcgcacgccggcgatcgatcccttttccggctgcccaggatcgggggagagaggcgggatccgggtgccgcggtgcccgagcctcccggggaaagcctccgcgcgggctccaggccgtccctggcccggctcttcccggcgctgggcacatctggcgggcacgggcccggcttcctagccggaggcggccggagggggcgtgtttgcggaggtctggggacgcagagccgggcggcctggctgagcctttgccgacagacctccgacccggcctgcaggggcccgaggggcggcgggggcgacagggcagggccaggcgctgggcagtggggccctgggcgaggcgcgggactccgggccgagggccctgttcctggggaaagttcccaggccggggaaaaggtggccgcacgctggcttttctcaaggcagccggccctcttggcgtcgtgcttgatttcatgggtgtttaattcgtgctttgtgggcgctggctccccctccccaccccaccctcaccctcttttctggcttcacttttcagataatgctgtccctggcgttttggtgaccgacctttccccttcctggcatttccataggggctgaggcagagcagctgaaggggcattcccatttcacagatggggaactgagggagagaagtgaaatagcggagcacccagcccgtgccatgggagctgagccagcgggcacgtcctcttagcctctggagcctgttggggtttgaacccgcaggggaagcggtctagggctgccttgctgtgcgtttctgcaaatgaccatcttgcttgttttatacagacaccatctctgaggaaatgagttattggctggggatggaacctggtttcagggaaaacttctccagcgcgaatacaggagagagcagaagcatcaccctggggcagcaatgccgcctagcaggctgtaggagaagggggctggggcctgggggctgcgtgaccctcggcacccaagggtctctcctcgcagtttccccagcaggttctgcacaggctctcctgggggccagaaggcaatgtgacctcctgcagagaacctgggagtagatgtcaggagactggctccagggccgggccacagggctggacttgctcttcaggcttctctaccctcagttaaccgcatctgtagaatgagtatagcaccctctgcccaatggaattgtttgaggggcttccactggccaatgtctaaaagaactttgtaaatattaagggtttccacatgggattctcattattaaggtacagtgcctgtgggggctgtcttctccctgtccatgtaaggaaattcagggaagcagtgtctgaagttaaaaaagccttgtatttgaagatttcttgtatcaaaagtttatgctaaaacaaaaaccacaaaaaacagaaaacccccaaacttaaagcttcatttatttttaaatgtataatatatgtaattttttttttgcttcagcaaaaaaattttaaattatatatatataaaatttatttatttttgctccagccatagtggttgctagctgtgttctcaatcagcaaaaagtttcttgggtaaatttattgcttgctcaatccttccttgtatttcattagca

SEQ ID NO: 65340 - DNA, 1003 bp, Homo sapiens
atttagatatttccttcctctatggtttgttctgtagaacctcaaaaggactctcttatttcttttttttttggacacattatgaaataggaagtctaaaaggctcccagaagaagcatcttcaaaatccacattcagcagttcattttgataatggatatttcagggaatcagtgcatttttgagctggaccagactttcaagacagctgaaacccctcagagctcttagatgaggatattgatgtccagagaagacagggagcaggctgaggtcacccagcaaggtattagagaagacaagatgggaacctgggtcaccggcctgggcctcatattttcaaagtgctatttttttttttcccgtgttttcactttgatcttacttttaatgatagggacgtatcactgtgtcttctcaaaatggtgggtgtgaatggaatttttcaaagttgaatcaatttgagatatttctgaagtttgtttaggaaacaagtatgtgactaccttcctaagagctgactggttttttgaggcctggattgtgtgtgtatgtgcttatgtgtgtgttataaaatggaatcaactataccaggttaaacaaatggacaagtcatggaaaagacacagctctgtttggacattaataagggcgggtgtggaagctggaaagctgagatgccggaaggctcagtgcttagtaggcccggaaaagcaatttttgaactggcatctcattccccttttctaagacaggaaggacggtcagagatgattccaacatgaggactttgctagttgcagtgtctgactcctcccattctcatagcagttttgcacagtagttttggtttgtgtgtatgttttaggcaatgtgacaaagcagttttcctcctgcctccttgagaaatttaatcctgacaggttctttaagaaatcagcttgatgtgggctgattttaaaagaataaatgaaaaaaaaaagctggtgactgatagctgttt

SEQ ID NO: 65341 - DNA, 1010 bp, Homo sapiens
ttattgttttttttttgagacacggtctcagtttgtaccccagcgtggagtgcagtggcatgatcttggatctcggctcactgcagcctctgcctcctgacctcaggtgatccacccacctcggcctcccacagtgctgggattacaggtgtgagccaccatgcctgaccatgactagtgttttgatgtgtggatttactacaatttatttgaccattctcctatcaatggacactttagttgttttagtacacctccctgtcccgtcacaaatcatactttgtaatgtttctggtggatatttcttgtaaccttcacaagtttatctgtagagtaaatttctagtttcaggattactggattggaagatgcatgcatttaaaagtgtgattgctgttgtcaggttgtcctccaaaagtgtcccctcagtttgtacctgtatccataggtttggagagtgtctgtttctccataccgtctcatctgaaatgaaaatttttacatgtttgctagtctgaaaggtgaaaaattgtatcttgttttttttttttttttttttttttttgagacggagtcttgctctgttgcccaggctggagtgcagtggcgctgggctcactgcaagctccgcctcccaggttcatgccattctcctgcctcagcctcccgagtagctgggactacaggcgcccgccaccaagcccagctaattttttgtatttttagtagagacgaggtttcaccgtgttagccaggatggtctcgatctcctgaccttgtgatccgcccgcctcggcctcccaaagtgctgggattacaggtgtgagccaccgcgcctggccgtatcttgttatttttatttatatctttaattttgagttagttgagttttttggtcatttgcctctgcttcttcttctttttttgttttctttttttttttgagacagagttttgctcttgttgttcaggctggagtgcaatggcgtgatcttggctcactgcaacct

SEQ ID NO: 65342 - DNA, 1024 bp, Homo sapiens
gagtagctgggattacaggcgtgtgccaccacgcccagctaattttttgtatttttagtagagatgggacttgttccttaggaaccatgttggccaggctggtcttgaactcctgatctcaggtgacccacctgcctcggcctcccaaagtgctgagattacaggcgtgagccactgtgccaggccccattttttgttttttggttaactccctgttcattaaaaaaaaaaaatctatatctatagatagatagatatagatataatctttgttatcaatttgtataagctctttggaaattagtccttcgattgtcatttgtattgcaaacacattccccctcccccatgccaattattttagatgtagcacttgttccttaggaactcagagataaataagaccctagggtggtgaagagagcatagaatttggaacaagactcctttgttggagtcttggctctaccacctcattagctgtgtgatcttgggcaggtatcttgacctttctgatccttgctcttcatattccaaaaatgctaataataggagtacctctgacacagggtagttggagaagctaagtgtgatcatattatgctaaaattccttgtaaatggctatggaaacataaacacagcattttataaaataccacgaggtattccatttactgaagagttacatcagaagagtatttctgattgtgccactgcactccagcctgggcgacagactgagattccatctcaaaaaacaaacaaacaaaaaactagccagtcatttataagaatgagttacagctataggtgcaggcggtaaatactctccaagatatctaaataaattaaaaggctatgtagagaacaatgtatatataatgttacctttaaagtgacaaaaaaaggtgaatatagatacttgtgtatcagaagagagaggtattccatttactgaagagttagggcaaagaccataatattgtaattatcaataattatgaattgtcaaaattatgtca

SEQ ID NO: 65343 - DNA, 1135 bp, Homo sapiens
aacaaaacaaaacgtagggctttctttgtattggtttgaacatttctctttatcttgtgacctggccaactctggctatggctgcctcctgtctctcggtacattttctgtggcggtcaagaggagttattttaagccaccaatgggaaagtttaaagacataatccttggctgtaattgcgggagacgggaggctgagagtctgtgctgacttgccacctgtttccacggcagcaaggtgattgtgcatttcctgctgctggctgaggggccagcaaattttcatgtcgttgtgtcatggggaagttttcctgtctcaatgagagcacaccgtgcttgtggtcttgttcctgtgaccaggacatggagaactatggggagattgttctgggtgtgaagggaaattgctggccagtgcttagtgcacgggctttggagtcagagccaacttctccacctcctacctgtgtgaccttgggcctatccttctaatgcttggagtctcttctgtcctcatctgtatgatggggataacaagaatacctactttataggattgctgtggaggattaaatggatctgcatgacaaatgcttagcatgaaaaaatccctcaacagatattggctgctattttattatcttattgtgctgagacactggcataatttacaattcaaaaattaaatttttttaatcttatactgtagtttacaaggccctttcacatatatgagcttgttcaatcctcacagcgtccttgagtttgtcattgttattgccatttaaaaaggtatgactcagagtggctgtaattgacttgtccaattcaggtttcatctgtcttttgcagaataataatcatgtacgttcatagtataggccacctctttttttttttgttttttaagacatagtctcgccctgtcacccaggctggagtgcagtggtgcgatctcagctcactgtaacctccgccttctgggttcaagcgattcttgtgcctcagcctcctgagtagctggcattacaggagcccgcccaccatgcctagctaatttttgtatttttagtagagacagggtttcaccatgttggccaggctggtctggaactcctgaccttgtgatctgcct

SEQ ID NO: 65344 - DNA, 1036 bp, Homo sapiens
gttcacacataattattaggttgaaccatataaagttactgtttttggtcctgtgaatattagtatttatatatggttccaatctgatatgttccagaaaatacacacttaagtaaagtttggaaaaccaaatcatagacttacatactgtaaggcggtgtatttgaaactgggatgtaaaatcaatttagtgagttatgacctgcattaaaaaaatggtagaatatcagagtttgctggtaagtattgtaaaaataccagagtttgctggtgagtattgtccatttcagttatatatgtgcgcacgtgtgtgtggtgtgtatgtgtgtatactaaattgcatataaaatgaatttcttatcatgggttcacctgttgccagaaaacactggaagtcactgttccagggaatggaatggtggaagatgcctggtgggggatggaggtggattctgtttccagacacagtaaaaaaaaccagtataaagtccccaattatgcattgtcagtgtctctatgtgtagctggaaaccattcctgcagcaggtaagcaggaagaaccaaattgtcgagaggcacttcaggaagggaagtgggccgactgaaagctttggaggcctgcctttaagtagctgcttttctggaaacttcagggtgaccagcctagtgaacaagctatgggtcagcgttgtgtgttcctttggtaaatggatttggtagagagctaacactactgcatttgtagtttatttgtttgtttgttttctttttgagacgagtctcactctgtcacccaggctggagtgcagtgttgcgatctcggctccctgcagcctccacctcctgggtttaagtgatcctcctgcctcagcctcctgagaagctgggattacagatgtgcaccaccacacccagctagtttttgtatttttagtagagacggggtttcatcatgttggccaggctggtgttgaactcccgacctcaagtgatcctcccatcttggcctcccaaagtgctggggctatagggctga

SEQ ID NO: 65345 - DNA, 1336 bp, Homo sapiens
ggtgaaaccctgtctctactaaaatacaaaaaattagtggtggtgcacgcttgtggtcccagctgtttgggaggctgaggcatgagcatcacttgagccctggaggtggaggttgcttgagtcctggaggcggagtgagccaagattgcgccactgcacttcagcttgggctgcagggtgagattctgtctcaaaaaaataaataaataaataaataaaataaaaaaacaattgaggtggatgtctccctaggggtaccccaggaagccacaggataaaaagcaggcatcttgctggagggtctctgttgctcagtagaaattattttgtaatgttttttgaaaaccacaaacatggacatattatggactggataccacatttgcatcaggatttttttttcaaccagtacagtacataacaaagaaatctctaccctgcagaccctctgggggtgtgagagcgctccttgctattctcagggtcaatgtatggcaatctgtgaaggactgacaatatattgcaaacgtttccccctgccagtaaatattcttcttttgtataactgttagctgttgcatccattccattatgtggaggtaccttaatttatctaataagtcctgtgattagtcttatagtttgttttcaaaattttttttgtcacgataggccctattcagttgactttgtgatcagctctgaacatataatctggtgattgccttaagataaattgaataataaaagtaacaatagtagctaccatcggttgaatatttatcatcaactgttgtgagcacgttgtacatattaactcatttaatcctatgacgtaggtatagggaaggaaactgaggctcagaacctctgccagctagttgtgggcttcctttgaggcacaggggagctgaatgggagggtctacataggacagggcgtgtctgagtccaggaaggacagctggacttgggccagtctcacaggtgggaaggctgtctttctgtgaggatgggtgacttgttgacctttgatcctcagagccctgatgcagcaggagtgaaatgattcccagagccacagaaaacaagagtatctttgtcttggattttagatcctggagctatcaggtggtaagaaggctgtctgacccagattaagtgatgtcatggtatcatgttggggtgtgggccttcctgttgtaaattatttgggatttcatagagatcgaagtcatgtgtggatgacatgacttcaggatgtcccattagaagaggaacgtgggggtcaggcgtggtggctcacgccagtagtcccagcactttgggaggctgag

SEQ ID NO: 65346 - DNA, 1036 bp, Homo sapiens
acgacatctcctgactttggggctgcagagtgatgcagagcactggccagtgttgccatgcacccagggtgcagggagacctgtcttgcaggtgttcaaacaacttttgtcagcctcagtgtcagggacttttgttgcgtagagcagtcaccaaatcctatggtgagaagagaaatcgttggagatgggggtgcaggggtggaagctcttatttcagaagacctgttgtgaggtaagactcagaccctcagcttctatccggccacagagtttgggaccagcctttcgatgtcttttggaagatgcacatggaatgcttagcctttgctcttccctggaacctggcttaggctttgcacctatcccaccatgtggttggggtgagtgaggacaacttcttttcctccagaacatggtttctccatctcagccctattgacattttgggctggataactcgctgttttgggaggctgtcctgtgtgccccgtaggatgtcctgcagcctccctggcctctgcctgctaggagccagtagcgccccctcccccacagacaaaaatgtctccagatattggcagatgtcccctaaagggcaaactacccttgctgtaggtaatacttgctttgaagtactggtgtggatggcctatgccctggcagtcttactaggtgggactggctgtcctctcattctcatgggattggcctcatgctggtagctgacttcctccccgtgagaccgtaggtctaaactaacaaggtttacacatgtgacaaacatccaggttgccagggctcaaaagagggttcacatcgactcccttctcattcactgagtcctttttcgggagctttggccgagtttgtgctgcgtctgggcatctaggtgtcgagttcttccctagtgttttcagcctcggcttcctcctctgtaaaatgggagtaactgatacttttcctgtctgggtgggaaaggaaccccgtgctaatgtgattgatggtgtggtgctaagctctgctgcaagggatgtga

SEQ ID NO: 65347 - DNA, 1084 bp, Homo sapiens
catatcccaagtacattgatttgatctttacaaattgtgtgaatgtattaaattaccacatgtgctccaaaactgtgttcttgaaaaaattatcacgcccattttagagatgaggcacagagaggtggagggacttgcccagatccaggtatgtggctctcctgtaatctcgcttctattgctttgtgatcagcagcaacttagtagctttcaaagcttcaattttcttgtgtgccaaatggggctaataaataccttagaggattgtgatcaagattccgtgaaaaaatgtatgcagtgcccccggcaaggtgcctggcatacagaaagtgctctgtacgcaccagctgctgtcattattattgtttcaactaccagtgatcataaaggatgcctgctttgatgagcttttccaggaatatggactggtctgccctgatctacttgaataatctgtctcaggccctattcggtaaatacatgtaggaggtgcagctgccagggaagggagggatgttacctggagaggacagagtctgaagttcaggaaatacagcaagagccttcctcagggatgaaacatgtgatcttatggtctgactagcctcaagccagctgagctcattgccatgcaacttggtagttaatgattgctagtaagaagtttaaaaggatcatcccctcaaagaatgtcagagttggaaaagaccttagggacattaggctaggaaagacaatgtcctagtgagtgactgcttgggccctgtatagaagggattctcagatcacttgggatgtcctggctcagcaggaggctaaggtgggatcaattagtgatgtctgccatggccacaagagaggcaaggagtggcacatgtgctgtttatttgctgtctttggctgcagctgaggacactgaggcccaagacttgcttgcttactggacgatcacccaagtcattaaaccacaaaaatctcttttggaaggaatctgttaagaatgtctgattataagagttgcacctttgagcaagtattttttgcttgatagtcttcagtgaggaggaactgtcttcaaagagca

SEQ ID NO: 65348 - DNA, 2454 bp, Homo sapiens
acattaaaagaaatgtagaaactagagaaaggaaaaaaaaaagccctttatcccccccatcacaaaactattataatttcaaaatagttacaagtacaatgtattccaagtggcttcttatttaagataattatattcacagagcagggaccgtttcaggtcctttaatgctgaaaggctaaataaagagaactttttattttttccatgttaatacatggatgatattaaccatgatgtttaatagctacagaatactgcatgaaatggatgtactataattcatttagcctttttcgtatttagagatttaagcagtagccaatttttcaccattacaagtggtgcaaggaccaatatcttcatgaatacagcattttctgtaaagcagaaattctttcttcaggattaatttccagatatctttctggtattagacacataccacttgcctaataacgttccaaaaggaattcattgtttacattgctattagaacatatgagattgcctgtttcattatgtccgtcccagcactgggtattatcattaaaaaaaaaagattttaaatttatttattgagttatttacttgagacagagttttgcttgtctcccaggctggagtgctgtggcacgatcttggttcactgcaacgtccgcctcccaggttcaagcgattctcctgcctcagccttccaaatagctgggattataggcacccaccaccatgcccagctaatttttgtatttgtagtaaagatggggtttcatcatgatggccaggctggtctcgaactcctgaccacagatgatccacccaccttggctcctcaaagtgttgggattacaggcgtgagccaccgtgcccagccaatattttaaatttaatgtttacatttgcacacatgccaattgggcttcatggtggctgcctcacaccactttttgtccgtgtgtgagactcacatagaggctgttttctgtgatccttttttaaaaaataattacatttttttaatgctcagggaaaatgtcaaataattgtttatgttttgtactgaaatctgcactggtctgatggtacccagaaaaactcttaactgtagccagaaaccagctgagcctagttgtatgcaacctgactgcaaaggtcatcaggtgctctcattttatttttagagctatattttagctctaacgtgattgttgggtgaacacttgcagaatgaaatatgactgacacctaccagctgtctacacattcctggttatatcttaggaaggcagtgtgtgctagcaccttgggaagagaatgttgagttcaaatcctagttttgccccttgcaccaataccttgatcagattcctcccctgcgtcctccctaccctttcttcaacttcacaccttagtttctttacttgtaaattgggttgatagtgggctgctgtcagaattaaggacatcgttttgtcaaggattttgcatacaggaagtcatggtgacagctgttgttactgttgtcctgaggagtggggacaggagaggaggaaaacaggctggtccaggtgtctttccttaaaggaggctccagcttagttggggagatagatgggctggtcagagtttcaagtcataggcagtgcaggcctcaaaggaacagccaggacttgagacaagaatcaggccaagtgagtaactgttgctgctgtggcagtgaatgttagcagcccaggcctgcaggggggaagactcatttggggtacagtgagaggtcttgctgggcaaatgcagggtgtttgcggcaaggtaggctggggctggacttggaggatgcctgcgtgatttagattctatcttgtagagaatgaggtatcatggaaggattttcttttcatgttgtaaatattaatcattttattgttttgtatttttgatggcaatataaaaataccagctttgttgagatataatttacatacagtaaaattcatccatttagaaagtatacagttcaaagctgggcgcagtggctcatgcctgtaatctcagcactttgggaggctgaggtgggtggatcacttgaggtcaggagttcaagatcagcatggccaacatgatgaaaccccgtctctactaaaaatacaaaaattagccaggcatggtggtgggtgcctctaatcccacctgcttgcgaggctgaggctggagaatcacttgaacctgggaggtggaggttgcagtgagcagagatcatgccactgcactccagcctggacgacagagtgagactctatcttaaaaaaaaaaaaagcatacagttcagttgtttttagtatattcagaattgtgcaaccatcactgctgtctagttccagaatattttcgttactcacaaaagaaaccccatgcccacgagtgctcactcctgatttctccctcccccacctcctg

SEQ ID NO: 65349 - DNA, 1078 bp, Homo sapiens
gttcaagcgattctcctgcctcagtctcccaagtagctgagattacaggcatgcgccaccacgcccggctaatttttgtatttttcatagaggtggggtttcaccatgttggccaggctgatctagaactcctgatctcaggtgatccacccacctcagcttcccaaagtgctaggattacagtcgtgagccaccatgcctggccacaccccggtttattgcatttgcttctaatagagaaatcaacccagtaaacaaatgaattattgttagcaaaactggggggtgggttgggaaaggaaagtagttccttctataataaaacttgctgatatttcgttgaaagtcattgtcttactcatccttgtataagataagtcacacaatgagtggtatcagggttgcagggtttccccctgtgaggacacaatgggatgaaccgtgtgtgggatggtctgttaaagaaaaacaagaagccatgtgttggaaacaacctaagtattgagcggtggaggattgctgaaattgtggactactatgcagtcattaccaacgcactgaaaaaatgttccatgatatggcaggatgtttatgctataagaaatttaaagacgcgagcttcaaagtaaagtataaacctaatttggtcaaacaggctgggcgcagtggctcacgactgtaatcctagcactttgggaggccgaggcaggtgggtcgttggaggtcaggagttcgagaccatcctggccagtatggcgagaccccatctctactaaaaatacaaaaactagctgggtatggtggctcatgcctgtaatcccagctactcaggggtctgaggcagaaggatcacttgaacctgggaggcggagggtgtagcgagccgagattgtgccactgcactccagcctgggcaatagagcgagactctgtctcaaaaaaaaaatattggttaaagaaacaaacgttagacttgaagccgtgctttatatggatatgtggtgcactataatgtggtgcttaaaaagcaacttaggcagacctgggccaagtctgggctctgccacgtaactgctat

SEQ ID NO: 65350 - DNA, 1077 bp, Homo sapiens
tgattggtgttaataaggcagtagagagttgggggtactctggcagaccatgagaacctgccctgtttgaaggagaatgctgcctcctcttcctccttttaaaattcacacatatgatgctcactaagtgtctggcacccttttttctttttctttttggggcagagtcttgctctgttgcccaggctggagtgcagtagcacaaacacacctcacttactgcagcctcaaactccctggctttaagtgatcctcccacctcagccttccaagtatctgggaccacaggcacatgtcaccacacctggctaattaaaaacatttttttgtagaaatgaggtcttaccaggtcgcccaggctgatcgtgaactcctgggctcaggtgatcctcctgtcttggcctcccaaagtgctgacattataggtgtgagccactgtgccccgcctcagtttttaaaaatacttgcttaaggagagagcactgaaggaagatttagatctgctctgttgaagtgacagagtacggtggtttccatttatgcgtattttgtagttcggatggcttcttgtggggagtcctgtgagttcacacttgggggcatggtgtgggggacctgtgaagtgggtgttctggggtgagtgcgatgctagtcactgtcccagttttcttctcatttctttttttgtgagtgcttggctagtggcagccttgcagatcagctagttttgacccacatcctccctctaagtggtgctcattgaattgagccacagccccaaggtcatgttttcaaggttggcatttgggaggccttgtcagaaggtcttataccatattccagtcacccaaagtgctgcccgccatgcctgttcgttcagcaggatttccctgagcacctgctctgtgccaagccctatgctaagcaccaagggagtaaatatggagggcagtgtccccagagtccaggaactcgtgatctagtcggggaggagaggggtacctactctgtcttttacacagcaagtgtaacctctgaagaatgatgttccaggaggcaagagcaaccctggcggac

SEQ ID NO: 65351 - DNA, 1035 bp, Homo sapiens
ctggccccactgcgacagcctctccaggcctctgacttcactagaatctgcccctccaccccaccttcccccgaaccccacctcctttctctgagcctgagaggagttaattgtgttagagtgcactgagaaacctccaggaaggggccctagtccctgtgttgcctgttcagcaatcacatttgctcacgtctagaaagtacaatataatgactcaggttaaggggtgaaaaaatgtggtggacattttgccagggtactgtgttaactgttccaaggtatcaccctgtgtgagactcaggaacattcagtgttttggtttcccccctattgtactgaatgccggcagctttccccttctaattatttatcttaataatttgaggaaagttgatttgctttttaaaaactggcatccaagcgtaccctatcgcactgcacacagctgagagattaaggcagttctttagaattcctagtccgtgttgtgtacacagcgataggctggggtagtggttctgggtgcaactggggacaggcgaggaaccataaatttggcaggaaagatttgtgttggtaccctgttatatttgctttgcatcacatattgtttaaaaagagcgatattttcgttaaaggaaaaggaactgtgtatttgagataagaagtagaataaaatgaaatgaatagttgggtttcgtcctgtggccttcaaaatggcgttatttctgagatccctgtttctatgctgttccagtatttatacggaacttataaaatacaaagtataggcatgtcccgagatcctggcgaggctgtaatttatagtgttgttctttttcttttgttttacagagctgagtttggtgaaacttcaggaggttttagctagtggcgatccaaagacattaaatattgctttgtgggtacgtctccaccttgcgtcttacttggtgactgttcagtggtaggcaaatgtcagaacccagtatgcaaatgtggaagtggacagatttgagtcagttatctcagctg

SEQ ID NO: 65352 - DNA, 1066 bp, Homo sapiens
tcctgggatacaagtacctgttcatcttgttgacatctaatctgtatctgcgcatagtgaccaaggataagccactgagctgctccaaacgtgtgctatgggatggattaactgtgtgggtgtggaaatccctcagaatgatgagacagggagcagtggagaggaagacagtcgatcattgatcggtgagcctgtacttgagatctggcctggatagttgtgatggtaggtggtacccacaatgatggcccttcaggggatttgaagattgtgaaggaggaccaagaggagctgtttggaccacctgtgatccaaggcgggaactaggaagacacctaccggaagtctttgtggatcttttgggattggattggattagcagatacagagcgtttgacctatagtaaccagctgactgttcagcaaacgcttcacttcctaaaaggcttcttctttccaaggcaaactggggcatgtgaggaacaggaacttacaagagcttctagtctgaactccaggtgctgacactgttaacagttgctgagtggagtccttctcacttgggtggaaagtaacctgtaaacttggcccaagtctcccttttcctgtcctttggcccatgctgttctggtgctagatgttggctctggcctttgcactgaccatctcctcgagatggcacgtggggaggatgtgctgtgttgagaagaacttggctggataggcaaagacttgagctagaaaaagaacaagtggttattcatttggtgcttccctttaaccagggcctttttttttcttttattttaaaggaaacctttaagaaaggagggctctcaggcctttcttagaatttaggtctcagttttacatcatgggattctgtttttcttgggtttccattagaagattaaataacatagtggctatgaaagcatactatagatactaggaactgttgctttgattgtgttaaaggatacctctattccccaggtcctttattgattcatcttatttttatttgtataataaatcattagaatagtgcctggtgctctattgc

SEQ ID NO: 65353 - DNA, 1072 bp, Homo sapiens
tactttctttcttcttcttcttcttcttttttttttttttttgagacggagtctttccaggctggagtgcgatggtgcagtctcggcttactgcaacctccgcctcctgggttcaagcaattctgctgcctcagcctcctaagtagctgggattacaggcacctgtcaccatgcccggctaatttttgtaattttagtagagatggaatttcaccatattggccaggccggtctcaaactcttgacctcaagtgatctgcccgcctcggcctcccaaaatgttgagattacaggcgtgagccaccatgcccctcttacattcttttcttctgttcactacagccgtggagagctccgggttgtcctgcacatgtgcactgccctctcttttatggaccttttaggctggctgcaccctccgtctgtgtcaccctcctgctcctcctccacctggctagttcctgttggccacttttggaaattcatgccagtccagtccaccctgagtacatcctctttctgtgtcactgagctcactatgctgggttttatctatgtctccctcgcaactagatcattcacgtcttgaagttaggcatcatgcgttcttcatttctgtacctcccaactcaatgcttagcacccagcaggggctcaagactgtgtgtggaatgaaggattcgtgtgaaaatgcagggagatggaaggctgagcgtttctgttccttgaccattcccgggtttgactaataactctcatacacactgctactcattgaaggcctactgtgtgcatgcattccatgtgtgctatacagtttatttattgttaacccacgtagaattcccagacacatagcgttactacaaacttcatcacaaaaataaagaaaccagggccctgtttctctttgtttctcagatgagaagtctcaccagagttgactgtggcttctgagcattatgaggcacatgtaggatttaaagctgaaaggctttatccctgagactcagggaaatatgacaatcttttattttgttttaattaatattttttgagtcagcgtcttgct

SEQ ID NO: 65354 - DNA, 1044 bp, Homo sapiens
tctttattttatctcctcactgggagagtagatcccagacaggttttgggaaccacctggtgtccccaagcgagcagaggcagagttgggcttgaatctcctccttcattgcagtgctttctctgccctgatcccattgggtgaccctggactatgaatatggattatgagtgggccctgagagtgatcagagacatccttcaagattgaagctgctttggttcctgccacatggaactgagtgggagaatgtctcaattcaggatggtgggagtgtctctttgtccaagtaataaatggaaaccgtttgctcccgacttttgcagatatcaagggcttgtctttccagagtttggttttcttcccttctctccgcctcccttttctctgcccgcctgtggttttgagcccctcatggctatctgggcagtgatgggtggaagggagctggtgcagtattcgagtagagaagttctgctgcagtgagtgtggggcaagtttcccagacccttgttgggtcagggcaggtggttgtggcccagttgtttggccttctgcaggctgcacccctgccctgctgcctgccagtggggtgagggcctggccacctggtacttaacaagtttggttctacatgtgttcccgtgagtggaggacaaaatgaaaatacctcctgatcgtgttcaaccattagttgaacaaccatttgaaatggttattgcaaccatttcagagttttcttctgtttgtgatgtcatctgtgccttataaggggtgacttgctaccttatggagcacctaggttgaggcccgggttgagcacagttccatacgttagctcatttatttattttgagacaggatctcacttctgtggcccagggtggagtgcagtggtgcaatcacagatcactgtagccttgacttcccaggctcaggtgattctcccacctgagcctcccgagtagctgggactacagctgtgtaccactatgtctggctaattttttgtatttttagtagagatggggttttgccatgttg

SEQ ID NO: 65355 - DNA, 1093 bp, Homo sapiens
tccttttgttaacattttggtgaactcttgaacacattttttaaaaagttgagagttgctaacaagtaaagtgaagtcctgtgcctgttgtaatttggactgaggagtgtgagttgtcttggtctaaaggtcagagtgagggtctctgcctgctgcaggggtctcccggttagggttagggtgaaaagctttttaaaataaacctctcaaatttgttgtcaacattaacctatggtaattttttttttttttcttttttttgagacagggtcttactctgttgcccaggctggagtgcagtggtgggatctcagctcactgcaacctctgcctcccggttcaagcgatcttcctgcctcagccccccaagtagctgggacgacaggcgcgtgccaccatgcctggctaatttttgcacttttttggtagagacagggttttgccatgtcacccaggctaatctctggtaatttttaaactctgctcaaagttttagaaaacataagtctggaaattccaagttgagccactggtgacttgtgagcatgagtatggcatgggattgggggtggggtggggctgacgtggcctggggcagatgccgggtggttctgtttggaaacagaagttccactgcacatgcagccttcacgtcttgtgggggcttttgtgggggctgtgtacttcccagtttggttattagtaactttatttggttctggtcattaacggcttttgggggcgttttgggggcctgtttgaggcccctgaacatgcatttttcagttgtcgttgtccatgttattaaaaggatatgttggagggggttgcagtttagtctgctgctgtttcgaatccttttctttgatagtgtttgccttcctcccaccaaatgctgcactgagagtctctggtacctgggtccctccttcccttgcctttgcttgggaggtcagtgccttcatccaggacatctttgggcatacaggtaatcccaagcagctctgctcagttgttgataccccttctcacagaacctgatctgcctcagctctccttgcctcctaagtggcagtgccccgctgctgggaag

SEQ ID NO: 65356 - DNA, 1029 bp, Homo sapiens
cttgacttgtttttgaaacatgaaaacccttctcttaaattcaaaagtaatacatagctgggcacggtggtgtgcacctgtagtcccagctacttaggaggctggggaagaggatagtttgagtccagaaatttgagactgcagtgagctctatagtcatgccactgcactctagcctgggtggcagagtgagaccctgtcaaaacaaagcaataacaaaaaaaaccaaagtaatgcgtattgcagcaagtacttaaataatgtagatgcataaaagcaaaaagtgagaatccccactcctcctccagtgctctgagatagactgaagtaactcttcagggatgagtgtaaacacaagggatgtcctcgaagactttccacttggaaagcttgtgtattttatacattaagtatcataaatatgtagttaccctaatgggtccccgccattgctctgcaggcagtgggctgaggttcaggagttaagtcagccccagggcacagggtggtgcaacagaagagcctgagtcgaatccagatctcccctctccactgtgactgtttcctgggaaactagtcaggggctggttttataggaattatccagtcgtattattattattattattattattattattattattattattattattgagactgagtctcgctgtgtcgcccaggctggagtgcggtggtgccatcttggctcactgcaacctccgcctcccaggttcaagcaattctcctgcctcagcctcccaagtagctaggattacaggcttgagccactatgtccaactaatttttttatttgtagtagagatggtgtttcaccatgttggccaggctcatctggaactcctgacctcaggtgatccgcctgcctcggcctcccaaagtgctgggattacaggcgtgagccaccgcccccagccttccagtcgtattcttgacaaatggttttccatgaagttgtggacaccttccagggtcacaattaaatggttaaatgagtcacgatta

SEQ ID NO: 65357 - DNA, 1154 bp, Homo sapiens
caggcatgagccaccgtgcccggcctgatggattcagtttatgtgcaaaatttaagaggatgggtttcggcagttcaggttgttaggagacaagggtggaaaggtgtcctggagccctacagagatgggcttcaagtgccagccaaggtgtttgaccatttttagaagaggaatgagatgattaaagtggaacttttaggaagagtaggagtgagcgggatggatttaaaaggcggagtgagaggcatcaggaaggctgggtaggagagcattgctacagtctaggagggaggtggcaggggtgtagaccagggatcacaaagcaatggcttgccatctgcttctgtatacccagagagctaagaatggtttgtaccttattaaatggttgaaaaaatcaaaagaatatatgctgtgatatgtggaaattctgtgaaattcaaatgtcagtgtctgtaaatagttttttttttttttttttttttttgtggaacacagccatacttttcatttatgcattgtttgtggttgctttcacacaatcatgccagccctgagtagttgctgcagagaccatatggcctgcaaagactaaaatatgtacttatgtactatctggctctttccagaaaaaatcagcagaccccaggtgtagaccaaccagggtgaatgagtgtatgactggaaatgcaaagacgggcaggatcaagggacagtttagagcaggggtgtccaatcttttggtttccctgggccacactggaagaagaattgtcttgggccccacataaaatacaccaacactaacaatagctgatgagctaaaaaaaaaaaaatcacaaaaaatctcaaaatgttttaagaaagtttatgaatttgtgttggtctgcattcaaagccatggtgggctgcatgcgggccatgggttggccaagcttggtttagaggcggatgcagtacgggagagttttcccttctcttctgatgtaactccatgtcttggtggcggtgttctagatgtaggcatctttaggcaggggagtgtgcgtggaagggtgaaagggttgtgccttcatgacgctcgtgtgtgtgtgtgtgtttgtgtgtgtgagtgatgctgagctagtcttagagtaaatgcagacactggatgg

SEQ ID NO: 65358 - DNA, 1061 bp, Homo sapiens
ctaaatgaagctaaataaacatccttcaatgagaatatgtccttcctatagtttttggaggaaaatatttccttttgtgagacaaaagtgttagtaggtggtaagtactttttatttagcatagtacaaagttgtggccctctgtcaacccttcacattttggtgtgtgtaatgtttgaaactgcattggtctgtaaaatcccaaacccaggtagataaaaccaagaagtgacagggctggaagggatcttaggaattagttcataaagaacttcaggctcagagaagacatgtgagttgcctaaggtcacacagcaaatctgaagcaaatcagggctagaaacccatagacgatggtcatgagcactggttttgagtcatccatttgaacacacctgtgttcagattctacctctgttacttatgagctgatttcttacctgtgaaagtgggatacctacccaaggggttcacgggaggatttaataagatgatttggattaggaaaaactgacaaatttccccttccttcttctccctgccttcccctcacctgttaataaatagatccttgtgaaaggtcagtgagcagcatcagccagaagggctttgttttcagcaaggtccctgcatgtatgattacaatcctaagtaatatcagctgttgcttgcgttggtttctcagctctctcttggtgatctctctctttagctgttgaatgagttcaaagatctaggaagagctttgaaacccctctagcagcatttctgtctccagtcccagcacaggtctttggaggatgagataaaaagggttttgcccagggtcaaatgctgtgtacacgcttggtcactcttccctttcttgagatgacatgtccccttcttggagacccaagatgattgacaacaataacattcctttacaacgttttcttctcatctagagcactgggaggctgccttttaacagagatatcacagagtagcaagcatgcagacattctcatgacatcctggcagatatcaagaccaaagaacatcccatgttccctcttgaa

SEQ ID NO: 65359 - DNA, 1009 bp, Homo sapiens
aactacacgtctctatgagtcagacttttattgatcgtgtacaactaaatgaaacccggaaatgaaggaaatgtaacaagcgattttatgtattttttgtttgctcaaattgcctttataaaatagattgatactctataataagcaaatgttgtgaatttggaattttcaaattgaggcttactaataatgttaactattttatccgagtttatttgggtttcttataaaatgtaatttctcaagaagattttgctgccctaaaaaaaaaaaaaagaaaaagaaaaagacaaaaagggaagccactggttgctaatggctcctgcggctctgacgatcctcgatgaagtgttctttgattaagtgtcaagatgagtggtgcagacctttgacagacacatgattgtggttggagaaagcccagcattaactgctgaccttgccatctgtgagcaggtgttgaatgagctcagttccctcccagcccttctttttccctggtgggtcattggctcctgagtaagatagatgcatgcaatagaagagctgttaatagcatttactctttcttaatccttattaatcccattcatatttcagtgtctgaaacttggcaggatgtcaagaagccacagtgcaagtagggaaattgaacagcaaggaccaagtacaatgttcccctgatatttaatttgctaaaacatgtaagaagaagaaagttcttacattgttaggtcccaaagagagtgccactaagcaaccttgccaaaaccaccttgctggagcttcttattatctttttttagcgaatggcaataaagtcattttgtcaagctaaccaagtaccataatgagatctttgtggcataaattaaccgagtggggaaataactttgacaggggttgatgtccgaaatgaagtgttgtttgtctgatgtcaagcctgtggggaatttgaaccttgcactctttcctgataagacattaacctctgcatgggcttgctggc

SEQ ID NO: 65360 - DNA, 1055 bp, Homo sapiens
gccaagggagccgggccatggtcggagagaaggctgaggctccttgagaagcatttggagtttgagtcagttgtgtcttttaaaaaaattacccattttggacttgcctgtggaagcaattagagagatcacaggaccgtttctgattcccaattctgtccagtgtctattcagaaaaatagaaaacagtcaactggaacaggggattatttgagcacacacagagtcctgttgtctcagcagcgtgccctcagacaatttgccttttagtgaagtttaagcccatgaaaggaaataaaaagtgttttattagatggcaaagaaagatggactggacttatgagactttgagaatttttgctttttctttgttaatgcaaactttggaagagagcaactctttctgtaatgcaatttatttgtacaatgtggtagttattgttaatagctaataatgatcttcaactgggtaaaataccattgtgtgtttgagagggagagagagagagaagggtaggaggagagggagaatatcttttgttcaaagccaaatgttgctacttctgaagacgagtgcaccttatgggtatagccagctataatgtttatcaaacatatactttttttttttttttttgagatggagtttttgctctgtcacccaggctggagtgcagtggcatgatctcagctcactgcaacctccacctcccaggttcaagtgatttctcctgcctcagcctccctcgtagctgggattgcaggtgcacgccaccacacccagctaatttttgtatttttagtagagacagggttttgccatgttggccaggctggtcttgaactcctgacctcaggtgatccacccacctcggcctctgaaagtgctgggattataggcatgagccaccatgccctgcctcaagcatctattttgtgcaagagcttgcagaagttctttcctgccacagccgtggttggccacattgctcccccatgaatatgtggaaactgacacttcaggagaattggtggctcacccatggcattcagct

SEQ ID NO: 65361 - DNA, 1019 bp, Homo sapiens
tccacctgcctcagcctctaaaagtgctgggattacaagtgtgagccactgcacctggcttctatctccctaatttttaaatacttaagattttaagaaacatcacaggtcaagcaatgcatggcagtgggctagattcagacaggggagcctcaatttaggacccccagatttatcatacaaggtggaggaagggttcagatagggacttggggattgccaactctgaccctctcttcagatgaagagattagccctgtggaggagtccaggatttgtattttagtcttggtactgggtgttctgggttgagttgctagaccattctgggacaagttgctagaccattctgggacttactttcttcctccataaagtcaaagggtaggtagatcacacatttttaaagtgtgctccttgaggtgtgtcaggggttccataagcatttgctttcagttttattaaaagcagcctgtactctcaaatttgagtatatttgaaattgtaatgagagcagttgctcaggatggagtgtggtggctcatgcctgccccacactttggaaacctgaggtggaggaaaccttcaggccaggagtttgagaccagccagggaagtatagggagaccccatttctacaaaaaacaaaaatattagctgggtatagtgggacacatgtgtagtttgaactactcggaaggctgaggctgggggatcgcttgagcccaggagtttaaggctgcagtgagctatgattgtgccattgtactctggcctgggccacagagtgagatcctgtctcaaaaaaacaaaaaacaaaacaaaaacaaattaaaaaacaaaacaaaccaaaaaaaccaaccaacacatttgcccaaatagtgaatcacatcaaattttaaaattcgctggaaactatctgcttcttaatttgattatacatcaattatgttcaaagtaaaaaacaaggtaatttgaaacagctgcttttatccaggtgtatacacggtgtatacata

SEQ ID NO: 65362 - DNA, 1092 bp, Homo sapiens
accgcatgtttcagaaagaaaaattcgcagttctatttatttttttactgtggattgaagggagaggcaaccaggtatatggatgaaggagtagggcctggctgtcaccactggtgttcacaaaaggctcccgtttaagtcctcttatattccaaatgaggggttataggtcgagtcagggcgttgctctaacagaagcaaaaccaaaaatacacggccgtagatacaaccctgttctggtacttcctaattttgtgtgtacatgtgtgcacctggagcttcaagaaatgaaaatggaaatggcctgagtgtttctcagccctaggatgaggctgtttctgtgatttagggctggaggttatgaagacttggtttacaatatgcacagtacagaagcggggaagtcaaggtgtgctgggcaaggaaacatctttatgtgacccacaaagagtgaagcagagggaagaaccagaagttattctggtttgcagactgggagacaggtttaatgacacagtcatgtcagagagaggggaagaggagaatacgtagggggtctgttttgatgtgtatgtacatgtaggattttcatgtagaggagttggggaaaattttagaagttttaggtgtaaatgcagctggtaagatccttatgacttagtttcttttttttcttcttttcttttctttctttctttctttttttttttttttttttttttaagacagagtctcactctgttgcccaggctggagtgcagtggcgcgatctcagctcactgcaacctccgtctccccagttcaagcaattctcctgcctcagcctcccagagtgctgggattacaggtgcatgcaaccacacctggctaatttttgtatttttagtagagttggggtttcaccatgttggccaggctggtctggaactcctgacctcaggtgatccacctgccttggcctcacaaagtgctgggattacaagtgtgagccactgctcccggccttagtttttgagtgggaagaatctagtgttcagagtggaccactgatgtcatagctgcaggtttggctgaattgggatggtgcagaaa

SEQ ID NO: 65363 - DNA, 1116 bp, Homo sapiens
gctgaaatgatccttctgccttagcctctcaagtagctgtggctattggtgtgcaccactacatccagctaacttttaaaatttttttgtagagatggggtctcactgtgttgcccaggctgctcttgaactcccagcctcaagtgacccccaccaccttggcctcccgaagtgctgagattacaggtgtgagccacccagtcctctgccaaacctttaaagaagatctaatgacagttcttctcaattgcttccaaaaattgaggaggagagaatacttccaaactcatttaacaagagcagtattaccttgatacgaaaaccagacaaggatacaacccaaaacactataggccaagatgcaaaaatctttaaccaaatactagcaaacctaatttaacagcatattaaagagatcattcaccatgatcaactgggattcttcctagaaatacaaaaagggttcaacctgtgcaaaacaataaatgtgctacaccatattaacagaatggaggacagaaaccatacaatcatttcagtagatgcagaaaaaacatttgaccaaaaaatattgttaactgtgctttcttttctgaacttaagaacttgcttttccaaaaccttcccagaatccctgtatgaatcaacaaaatttagttcttaacacatttctccttctttaaaatggtgacattagctgggcatgatggtgtgtgcctttaatcccagctacttgggaggctgaggcaggagaatcgcctgaacccgggaggcagaggttgcagtgagccaagatcacgccactacactccagtctgggtgacgagcaagacttcgtctcaaaaaaaaaaaaaaaaaaaaaagaaataatggtgccatacctttctcatgaagttgttgtgaggcataaatgagaacatacttgtacagcatctgggacatggacggcctctcaaaaggagtgctgctgttcttgctacctgcaccactgtaactgatgttgtttcatcatcctcgtcaccatcattgttattgattgtaaatggaagcacagtggtcatcttccaaatatgccactctgactctgtgaacttgtcactttataaagaggaaatt

SEQ ID NO: 65364 - DNA, 1137 bp, Homo sapiens
cccgggttcaagtgattctactgcctcagcctcccgagtagctaggattacaggtgactgccaccacacccagctaatttttttttgttttttttgtttttttagtagaggtggggtttcaccatgttggccagggtggtcttgaactcctgacctcaggtgatccacccgccttgacctcctaaagtttggtctctttttgtatcagcttctatacagacttaaccccatttttaagtcacagccagcatggtcaacttctgtcagttttgcttctgttccaaaggcttctgttttactaacatacacacatacatgtatgcatatggatttaaataaattctggtgcagggaagtctaggaggcaaagagagataaaactctgtgattggaaagtcacttctggaaactagacatatagagcagacctcactcttacatttctttttgaagtgcaataattttttttttttttttaacaatatagggcccagtcctgtgtttgacattaaagctgtttccatcagtccaaccaatgtgatcttaacttggaaaagtaatgacacagctgcttctgagtacaagtatgtagtaaagcataagatggaaaatgagaagacaattactgttgtgcatcaaccatggtgtaacatcacaggcttacgtccagcgacttcatatgtattctccatcactccaggaataggcaatgagacttggggagatcccagagtcataaaagtcatcacaggtaagatgactggctcccagggatgatgacaaaccatttcttattatggtgtattctagggccttgtccgttcaagttgcctgttggaaagagaatggttttcataaactagaagaggagaaaaggtgctatgttgtttcaagcctgggatttctggtggccacatcattcagtattaaggccctatgtgttttgggaagttctaactacttctgtttggtttttaaaatcttttgttattgttggttaacacctacctttctgttaagactcaggagtagagacttccttaaaaacgcgtgtcttcatggtaattaccagccttttaagctcccaggaaattgatgctgtgtttatattcccaggagtttctgttgggcaggaaa

SEQ ID NO: 65365 - DNA, 1057 bp, Homo sapiens
gaatggattttgggggtcaagactggtctctctctgctgtccctccctgaacagaggctctgggaggctagtaatgcattcgagataaagcagccagtgtggccaaggttctcctccagagcctgagcccttgaccacaggagctcacgcctcctctcatttcctgtgaatgattgtgtgcaatgtaagcacagagcttctgcactctcatgatcaagtgctctctccatggccagaaacagcagtttctgaggggctcatgttgtaggtgatgatacaaagaagacagagagagggatcaggtgtcctaagtgtacatttcatctcagtattttctgaggtggggcatccctgtctcctggagaagtatatttttaatctagttgtttactttctttgcatagcccctgttccagtttctgacttccgagtgacagtggtcagcacgacggagatcggcttagcatggagcagccatgatgcagaatcatttcagatgcatatcacacaggagggagctggcaattctcgggtagaaataaccaccaaccaaagtattatcattggtggcttgttccctggaaccaagtattgctttgaaatagttccaaaaggaccaaatgggactgaaggggcatctcggacagtttgcaatagaactggtaagcaaataggcttttctgttaaaccatcatgtttcttaaaggaaatcagtataattaataaacataatgtttccaaatattgtttttcttttaattatctaagaaaaaactttaaaaattttcataacactaatgcttatttattatatgaaatacagacaagtaagtagaaaaaacttacatggaaaccatcaagcagagataatcacttttgatgtatgacattttacaatttttaaacatatacatatagatacacaaatatatgtgtgagtatacatatatttaatacatatatatttaatatttaatacacacacacacacacacacatatatatatatatatatatttttttttttttttttttttttttttgagacagtcttacc

SEQ ID NO: 65366 - DNA, 1075 bp, Homo sapiens
agtagctgggattacaggcgtgtaccaccacacccaactaatttttgtatttttagtagagatgggttttcaccatgttggccaggctagtctcgaacctctgacctcaagtgatccatctcggcttcccaaaatgttgggattacaggcatgagccattgcacccagcctaagggctcatttttaagacaacaacaaaaaactggagaactggtaagataaactgggaagttcatgtgcgtcacagaagagctgaaattcttgagagcactgagtgtgtgcatttctcagctcgattttggagtgtgccttttgtgaactcattagaaagcgtaatggcaaaagagcaggtcctctcgacagcacttggagaggaagctgggcgtcatgatagtaacagttttcccttctccttcctttcttctgagcagttcccagtgcagtgtttgacatccacgtggtctacgtcaccaccacggagatgtggctggactggaagagccctgacggtgcttccgagtatgtctaccatttagtcatagagtccaagcatggctctaaccacacaagcacgtatgacaaagcgattactctccagggcctgattccgggcaccttatataacatcaccatctctccagaagtggaccacgtctggggggaccccaactccactgcacagtacacacgtaagtctcttaggatgcccttctaaggaacagcctctctaactgtctcttggaggaggcactggttaaatgatggccagtgtgcttctgggatccaggttgactctgaaactgctgaagttgaaaacattggtctcagcaatggttctgctgtcaccatggggcactgttcttcaagctatgtgaacttagaattgtcattagaaggaagaaatgattccttgggaatggtgactgaaatggttctagtcattccttgagaatacagagtagagaagggtcaccttgtcatgttggtattggaagatactgcccagatgaggagcttcgcctgcaacagttagggaggtgttttgcgaatatttgaattaaatacatggtaaaga

SEQ ID NO: 65367 - DNA, 1035 bp, Homo sapiens
ctgtctctataaaataaaataaaaaaattcgaagggtcaaacaaaacccaactagaaggtctgattccatctctgatgccagttttcaatagccagtctcccttgtgaggttttagtgatggcagatggcatgatctgagtcttcttataaaaatgcaattttgttctagaccaaatgtgaggagtattggccctccaagcaggctcaggactatggagacataactgtggcaatgacatcagaaattgttcttccggaatggaccatcagagatttcacagtgaaaaatgtaagtaagaagtcaggatcagttgagctcatgtaattaccatatgttaatttgggggtgatatgttttaggttgatattaactaatatgttttcctatgcagtgagaaatgttttgctgctttcctttcagaacagaacaatccatatgcatgtatactccaaggcaaccccttgacttttctgggaaatttactttcttgggaataacctaagttatttctgaataaaatgaatcttaagagcatggctctacatcaggaactctttcctttctttccacttccaggtgacttgctcatagattttacagaacaaactgtagccttttggattatttggttagaaatatggcatcaggagcggccacttgctgttaggagtaattgataacagttacattaataggattccagggcatatgcacatggccttccttcccctcaaaatttacaaaagcaaatccaattaaattgtgcaggcattctaggaagtcaagtttatgtgctttttttctttttcaaggatgctttgaaaatagaggcagtgccatgaagcagcattggtatctgttgatgggtgtgtgcattggcataactctctgctgtttatatcacaggcctaaacattaggcatgtgctggcttgaagtctgagactatcctaaggaaataatctgaaatgcaaccaaaggcttattcagaaagacgagtctcagcattatttataatagaggaaaactttgga

SEQ ID NO: 65368 - DNA, 1003 bp, Homo sapiens
tgaatctcataattggaatatacggaatatttaaacagtagcttagcatcagaggtttgcttcctcagtaacatttctgttctcatttgatcaggggaggcctctttgccccgactccgcttcccctgccccctgtacatttgtgctccattttttcttcccttttccctcccagttttctccaaagactcttctgttggcaacattttcaacccattggttgggtgagaatggcgactcaaatatcaccttgagaatttctgtgggtgggaatgggagaagcagaggaatcctacagtggcagaaatccttttcttgtccctgtattatcctttttctcatgtctgtatttggtatgaaggattatttaaaggtgcaatatgtgaattagtgattcatgatgttctaggtttttagtaacgttttactcaggttggcattttatgtgtctgtgtctgtatgtgtgtgtgtatgttcagaagcgtggcaatctgtgaacacttcagcgtgaattcagtgtcagattaatccctccttccccaaagtccactggctttcgtctctctctgccgtgacacatatcggaatctactgtgtatatatatatatatatatatatatatatatatatatatatatatatacactaagctctcaaaaacagtcattcctatgaattgaggtgtacaaagtttgaatttgtatcaaagatgtaattattatttttaaaaccttttcactatactgctgctgtaattactttgatttttaaaatgtagattaatttttttttttttgcttcaggtgtgtatccaccaagaatttcaaatttatgtggatttattttattggtacataatctgtaaacttcttaaggcattaacatgaaaagattttttctttttattttatattgtggctcaggttatattttgaagatgttttgagtttatcctccaataggcaatgaagttgacaaggttttatgaaggaataaccaagt

SEQ ID NO: 65369 - DNA, 1049 bp, Homo sapiens
agcaatcatgggaggaactcttgcgggggagcggtctgggattccaaatgggcaggtcacacgaaggtcacgatgcttctctgcatcctgaaaagggctggggacagggccagtgggggtggtaagggtatttatagcacagtgcttgaaaagggaagattaatgtgtaaatataaaggacacacaggctgggggttggtcagaggcaagaggagggtgcctctgagcttcaacccctcccaggaacaatgagctcaaattggaagagtccagtggaatcggggggatggtgtgagcacccctgttcagtctttgacaattgcatacagaaaagcagctggtatgggtttgggtgtcaatgaaagggccaaagactggtggccagctggtttgggggatttgggccattgatagcatctcccaggaacaacgactttttgcctccaaagttggatctagtgatgatcagcaccagcaggaaatgacatttggtgtctgcccactgcagccatactgtgacctccagccagacttccgcctaattgactccactggatttgtgctctgttgagtcagaggctcccgggggttggggatcgaggggcgggggtcagctatgcagcccatcacgtgtgtttttcatctgggatgaaaaagcctggttctcttttgaaatgcttgattgtacttattgagctaaacaagtcttggtgactgttgttgatttgcctcaaaagttttaagtcctgggttttcagactactgtgtagcagctgtgtgtttaacatactgtagctttttctcccttgggggcacatacaaataggatgtgttgatgtggactctaaactgtaattttcctgtaactattttggaatgatgcatatttctaatgtttgttatacttgtacagagtattgctgttggttgctttttttttttttaaggaaaaaatggcctgaaaacatttttttaaagacttacaaataccaaatataaaaaaatgtcaatgcattatgcctttgcttctttctttcttcttttttcct

SEQ ID NO: 65370 - DNA, 1048 bp, Homo sapiens
ttatgtatatatgaacctttcttttcttttcttttttttttttttttttttttttttgagattaagttatgctcttcttgcccaggatggagtgtaatggcaggatctcggctcactgcaacctccgcctcctgggttcaagtgattctcctgcctcagcctcctgagtagctgggattacaggcacccaccactacgcccgactaattttttgtatttttagtagagacagggtttcaccatgttggtcaggctagtctcaaactcctgacctcaggtgatccacacgcctcagcctcccaaagtgctgggattatgggtgtgagccaccatgccctgcctatgaactctttttgacaaccatgatagctattcaagatatgtttgcttggtattctttgtatttatgataatctgattaaaggatgttccaaatataggaacattaggtatagatttccttacagctttataagtgatgtcttttatgctgcttttgctctgtgtgtgtgtgtatgcacacacacgtgtgcatctgtgtatgtgtttttagtcctgtcaatatatcatctgcagagattcttttctccagaattattgtcatatgtcctttatggttgtataaaaagagaaaaacttattgctgtgaaaaggatgtattatattatagttgtgtgcactaagaattctgatttttgtttgcttttaacaagtttgggagaaattcactaaactttaatttatactattacctttcaaggaatatcataacacatatagctgtttgatttaacagttctttacttgatatgtacagttcttgtttgctgttgggttttggcttgatttttcattttaggaaaaggctaagtgggaaaaaaattgaaaagatagagcattacacattactcatttaatgagtaccccataaattggcaggtagactgaaaaccaagggttatttatcatcagaaagtttactagtcacttgattgaaagaaatgttaattttataaattaaaaagagtaatagcacaaatatcagcca

SEQ ID NO: 65371 - DNA, 1094 bp, Homo sapiens
caatagttcagtagccatgggaaggggggtgaaaggcagggaaggaatgccaagctgttctttcggcaaattccccagctgctgaggttagaaaaagggttgatgtcctctggtttctggatatcctccttctggcaggtcagagccctaaatctaaggccagagcttgcacattgctaccttgcatcaaaatacagggaccgtgctctttagaaccaaatgttgtgacggggtctgacagatgttgtcaaatattgtgctgtttccagatgaacaacagctcatttgagagacgtattagtttggtggcagtatgttggaattttcattctttagaaaaacaagcagaatatttgaaattgggattacattggaaaatcccagaacatatttttggcagctgtctgagtagcccatcatctgggtgacctggccttgtctctgaggaatcactcagagacctagctctctgcacctgtcccccttggcccctcaggaacattcaggcaagtggggaaagtggcatcaactttcctggaggctcaggtggctcggaagactgtggtttgtggaaaagcacagggtctttggaatgatacatccctggggctggagctggggggcacagttgtgtcctggccttaccacttactatgtgggtgacatcggtattttcttctctgatccccagtttctcattctgttaagtgggaatgaggatccctatttcacgttaccattgtgagtatgaaatgagagaatcggaaaaacacacttaatatgttgtctggcattgaaaaaagcattcagtagatttaaattgttgtttgttctcactccaggatcctgaaatcaaccaaggctgagtcagatggatttcgatcaatggaacccttcctctccagctctggccactcctgggtgccccttggggttcactgtcatggcaacgggtctgtggagtggtgtggaagccgatcggggaagctaggcagccagaacgctgcctggcctgccggcgccacagccaaggagggcggccacctgattaatgcctgcctgatccattggcctcatctcaggccaccctggta

SEQ ID NO: 65372 - DNA, 1067 bp, Homo sapiens
gacattttgccacttgaaacaataaataaagttttttgggaattggtgctgtccaggtggtggtacgtggtcatggctgcccatttcctcttccaaggctgtggttggaaaatgctgattcccactctgccccaccaggggctcactctgacactggatgtgtcacttcccttttactgacatcactgagaagggtatattgtttacaataggctgatcaagaattcagacaccctctaaatcttagtagtttaacacaaaaaggtttatatttcatccatgacacagtccagggtgggctggtgataggggcactctgcaccttgatgtcattgagagcccaggctctttccctgttgtggctcggccatcttcagggcttggagtcttctgccccatctaatggagaaagggggaatcttttgtgggagatactctgagtccattcaggctgctgtaacaaaatactgtagacttggatggcttataaacaacagacgcctatttctcacagttctggaggccaggaagctgaagaacaaagcactgacagattcagtgtctggtgaggacctgttttgtggtttatagagagtgccttcttgctgcatcctcgcatacatggtagaagggacaagggagctctctggggcctctcttataagggcactaatcctatttgtgagacctgcaacctcatgaactaaacatttccctttttttttttttttttgagatggagtcttgctctgtcaccaaggctggagtgtggtggtgcaatctcagctcagtgcaacctccgcctcccaggttcaagtgattttcctgcctcagtctccccagtagctgggattacaggcactcaccaccacacctggctaatttttgtatttttaatagagatgtggtttcaccatcttggccaggttgatcttgaactcctgacctcaagtgatctgcccaccttggcctcccaaagtgctggcattaaggcctgagccaccttgctctggaaagtcctctcttcctagtagcaccttagaggttaggaatttaacaacatttaa

SEQ ID NO: 65373 - DNA, 1019 bp, Homo sapiens
cccctctcccattcctcctctcactctcctctccatcgagggctccagaagatccctttgtgccccgccgggccctatgctgtgtgccaaatgggatggaaagaagaacaagatgtgttcttattctggaacctcaggggcagtgggagacatgatgcccataattagcctggatgagagaagaagtttaggtgtccctgaggagaggcacagataagggctgggcctgttcagagagagaggagttatttcctaacagcagagtggagggggatgggaagggagggtggattggagaaggcctcttgtatgtatttgatcttagccggcggcaggcacaggagttggctcctggagctgggatggtggggtggcattgcaggcagagggaacaggggtgggaagtcaccactggctttgtcccacccagtttgtctgaattcaatcctgccatatgtttttgaggacagaaaggtgtgcaaggcatagctcagttctgcgggaagtgcatctctaagtgacttcccatcctttggggtgaaaggactgcagaggggtctctgcttgattctggggactgcacactcttgagataaggtcttaccccctgagagtcctactgcctgtccctctactatctatctgcttctggacttgcttctcaggccaagctgcgcccccggaatcgctcagctgaggagggagagctggctgagagcaagtcgagccagaaggagtccgcggtccagcgttcgaaatcctgcaaggtcccaggactgggaaagcccctcacgttacctcccaagccagagaaatcctcagggtaggtgacctaagctctgggcatccgctgacctcactgtattaccctgatgaaaagggaaactctcacttcacagaagaggcaaactgaggctcaaagaggaacctcagtcggacatgccccagatgaacggtatgaagatggtgtcagaatttgggtccctgcagccaggccccagactgcctcttctggttag

SEQ ID NO: 65374 - DNA, 1034 bp, Homo sapiens
tggctcttaagaagtggaaagtgatcatcttgttcccttagtttaggatggagggaggtggggcggggattgtgatgggactaggttaggggaagaggaggatagtgtcatcattgtgtctttaaaacacccaggcttttgtggttgtgttaccgtaatctggccagtgttgactttaacccgagttcaggggttagccgtgatgccatacaggtgagcctcattgtatgcaacagaaagcgtggctcctaacagaaagcacggctcctcaaaaagccgaacgaaaacagttgctttagagaggagttcgaggggcttgtttgaattttatgctttcgggcagccttttctaaaatgtgtcctaaagaataccagtctgtgaatatgtttggaaaatgctgggtactctgtggccgtacagaagacttagtctgtatattagcatatattagtaccttaaagacaagtaatgcagtattttccaagctaatttggctaatgtccaagaacctagtgttctgagcagggaaattctgatgtagggaaattctacactatgggcactttctctttttttttttgaaacggagtcttggtctatcgcccaggctcccagcctgaagtgcagtggtgcgatcttggctcactgcaacctctgccttctgggttcaagcgattctcctgcctcagcctcctgagtagctgggaatacaggcgcacatcaccacgcccggctaatttttgtatttttagcagagatggggtttcaccatgttggccaggctggtcttgaactccagacagacctcaggtgatccacccacctcggcctcccaaagtgctgggattacaggcatgagccaccatgcctggcccactatgggcactttctctttaaagaaaattttggaggttccctttgtaacgagaagtccttgagaatagctcagaggggtctggctctgggtccatctgccaggcttgcgttctgattctgtcaccacctctgtgaccttgggcaagtttgttctctt

SEQ ID NO: 65375 - DNA, 2405 bp, Homo sapiens
gttcagccccgaggaagcccagcaacaggatgaggaatttgagaagaagattccaagtgtggaagacagccttggagagggcagcagggatgctggccggccaggagagagaggatccgggggcttgttcagtcctagcactgcccacgtgccggatggggcactcgggcagagagaccagagcagctggcaaaacagtgatgctagccaggaggtgggagggcatcaggagagacagcaggcaggggctcagggccctggcagtgctgacctggaagatggggagatgggaaagcgaggctgggtcggtgagtttagcctcagtgttggcccccagcgagaggcagcatttagcccagggcagcaggactggagccgggacttctgcatcgaggccagtgagaggagctatcagtttggcatcattggcaacgacagagtgagtggtgctggctttagcccttctagcaagatggaaggtggtcactttgtgcctcctgggaagaccacagctggctcggtggactggactgaccagctgggtctcaggaacttggaagtgtccagctgtgtgggttctgggggctcgagcgaggccagggagagtgccgtgggacagatgggctggtcaggtggcctgagcttgagagacatgaacctgaccggctgtttggaaagtggagggtctgaagagccggggggaatcggagttggggagaaggactggacttctgatgttaatgtgaagagcaaagatttggctgaggtcggggagggaggaggccacagccaggccagagagagtggcgtggggcagactgactggtcaggtgtggaggccggagagttccttaaatcaagggagcgtggagttggacaggcagactggacacctgaccttgggctgagaaacatggccccaggggcagtctgcagtcctggagagtccaaagagcttggggtgggccagatggactggggtaacaatctgggcctgagggatttggaggtgacctgtgacccagactctggaggttctcaggggctacggggatgtggagtggggcagatggactggacccaggacttggcgccccagaatgtggagctctttggggctccaagtgaagccagggagcatggggtgggcggggtgagccagtgcccagagcccggcctgaggcacaatggcagcttgtctcctggcctggaggccagagaccccttggaggccagggagctgggggttggtgagacaagtgggccagagacccagggtgaagattactcctcgtcttccttggagccacaccctgcagaccctggaatggagacaggagaagccctcagcttcggagcaaggtaatgaacggagccccatcccaagtgtgggagggaacatgtgaaggctgtccaagaaatcggaacctttctgaggagggaagaaacagtttttcctgaggacttttagtgtttgggtaattgagacattttggactaagaatttttagttctacttaaaaataattgaaatatgatacacatacaggtgagttccttttttgaaggatgactaatgtgttacttttgcaacccatgtttgagcttggtgatttggaattgtgactgtgacgggggaaatggtgcatgtcatagcttggatggtttctgatgggttctactcttgtacacagtagccgttccccaggcctctcagccctgaagccacaggtggtttcataggtatagggcagagaattccgtgtcttcttggctggggccaccacagccaggagtggagtggacagtggaacccacgggttctcaaagaggttaggtacttggtgcttcttgcctgtcctgtcttgaagcctggaatagcaagttcaagaacctgaagggtatggggacctggccccatgaccttggcctctgtgcaaatttgctgaaagaactttccaaaggctttgcaaggcaagcacagtctgtttcatggatgttttaaaaccagctgagatggttttgcagctgagaaacgtgctaaaaaggcattgcatccgttttgttaacatttccatccattgagattcgcttttattccctttagtgagcagaaaatgttaccttttccagccccacagtgggagcttctcactgggtatgtggggaaggcaagggaagtgtggggcaggggcttttataagtggaaggggttggtggtgggaggagaggagcaggaaggggctagagcatatcatggtggtcttggggactctggagaggcatttgggatggaggaggagaagggagagaggaagatgggcccagtgagatgcccagggggatttgaggaagtggagcttcctgacgactcaggctgttgacggggtggtgacggagcacag

SEQ ID NO: 65376 - DNA, 1072 bp, Homo sapiens
aggatgggtcgcacagtcactgaggaagaggaggtcaacgaaccagaggctggaagggtcgcatctggctatggagatgactgtaagctatcacaacaatgatggagagggttgcagtgatgcagcggttatggttttcaaggaatgatgggtgcgtaagggtcaataacaagaaagaattgtgggtgctgtagtttaagggcacgagctttgacattagaacgttgcagaggggagtgagcatggagggaacagaagggaccttgagaagcaagcaggaccctttattttgcccaggcctagtaggtgatgatgtgggagaattaacgacatgggagagggcggccagggaagtgtgacctctgcagagggcaaaggtcagatggagccagagtcacttcattgtctggggacaggtggagtgccaggtgcttggtgccttgtttgtccccctcttctctccacgtcctccccactctctgccgccatcatcccatgagtcctatgccgaggggccagtgcacacatttcccttcaccctcacctaactgggagatgagcattgttgccaccagccctaatgtacagatggggaagctgaggctcagagagaccaagtgtctgccatatgtgagggagggcacatgctggtaagaggcagtgctgggacggctcaagccaggcgctgtcacaccccccagtgccttttgcctgggtcccatagccttcctgcttccttggcaccttctgtgccatgaggggcaccccctgcacgctgtagccactcccccgagctgctctgtagctgcactgcacctcgaatcctgcttggacgcgaaaccctctctcccctcacgactcccacatgctgaggtgcttcaagagccagattcacaatgttccttttccctttataaagcaggtgttatggaccccgaactgtggcctctgaggagatcctcacatgagctttgggttgagtgggtgaggggttccaaccacctgagacgaaaggaattatgctttgtgaataaggataggcgcattctggggaagaaggtctaaagggggc

SEQ ID NO: 65377 - DNA, 1402 bp, Homo sapiens
ccagctcctcttccctcttgccaatacagggacaagtcaaagaagaagaagaaagtaaaggtaaagatggaaaagaaatccacgccctctaggggctcatcatccaagtcgtcctcaaggcagctaagcgagagcttcaagagcaaagagtttgtgtctagtgatgagagctcttcgggagagaacaagagcaaaaagaagaggaggaggagcgaggtgcggcaggaatgtggggcctgtgggctgggcagggtgaggggcatgtgtgtctgtgtggggttggtctgtaagagtaatgagttggagtggatggtggaattctgaggttctgaaggggggtgctgtagttgggggcggtagggaattgcgggcccttcactgaagagtgggtggggcacccaggactccagcttttcccttaagacacctttggttttcaggactctgaagaagaagaactagccagtactccccccagctcagaggactcagcgtcaggatccgatgagtagaaacggaggaaggttctctttgcgcttgccttctcacaccccccgactccccacccatattttggtaccagtttctcctcatgaaatgcagtccctggattctgtgccatctgaacatgctctcctgttggtgtgtatgtcactagggcagtggggagacgtcttaactctgctgcttcccaaggatggctgtttataatttggggagagatagggtgggaggcagggcaatgcaggatccaaatcctcatcttactttcccgaccttaaggatgtagctgctgcttgtcctgttcaagttgctggagcaggggtcatgtgaggccaggcctgtagctcctacctggggcctatttctactttcattttgtatttctggtctgtgaaaatgatttaataaagggaactgactttggaaaccatgtcctcatgctttctttgtagccttggtgtgttgctcccacttttattggtggtgtttactgctctggtcagactgggcagggccttcctggccagccgggaagcaagtctcgaggtacatcctgttctgttcccggctggacgagcattggttttcacccgcctctgcccggatgggccacctgagagtctagaaatgagagctgatctgattaggaagtttctcccagttacactccattagccaaccaagctagggggaggcagctcttggctgcatccttacctatgagtcaagggtcttccaaggctttcgataatgaaatcaggattgactgtccttcccgcagccgggggagtggaaacctgagcctggagagtcggggaggatgagcgtgtgcgtagagtggtggtggttgcagcctggtggtggtgcaacaaagtacggagttatatgtgaagctttt

SEQ ID NO: 65378 - DNA, 2804 bp, Homo sapiens
gcactcaggggcccagtgcattacctgttcctacaaggcaagctcaggactgctctacccgctggagcggggcttcatctacgtccacaagccacctgtgcacatccgcttcgatgagatctcctttgtcaactttgctcgtggtaccactactactcgttcctttgactttgaaattgagaccaagcagggcactcagtataccttcagcagcattgagaggtgagaacctccacctgtcacttcctgggcatcctggtcccgagccagctttgtctaggaaggctggcgtggcctggggcactctccaaccctagagcagaatttttcttttgctacatcaggatttggtccttttccctggagtgctcagactttagaaacctctccattgctttctttctggtcattaaaaaaacaaaacaaaacaaaacaaaaaaaactttttccgtattctgaaagctatatgtcttcgctactggtcttttttctcctccactccccaccatgatggaaatgctatctctttctttcctggaatgagctttgtgcctgagaacatagcggctaatgcttattgagtgctcactgtggactaaacgttttataagcatcttcacgtgtaatcctcatatcaaccttgtgaagtatgaaaaaagatgaccacgtcccctgccccacacttactcccctctgagcttattttgtaaacagatgcgcacccctccctgcctttcctttcccagagttcttcaaagccatgcagttctttcaggactaatgtctggctctggctctgccttactgctgtcctctgggggtttctaagctgttgggttgggtagcatagtcaagagctccaggctccacagtctaccccagctcatggaatcagaacattgtttagtgtgcccctgtgttggcactacctctctggtaacatggtgcatgtcccctcacagggaggagtacgggaaactgtttgattttgtcaacgcgaaaaagctcaacatcaaaaaccgaggattgaaagaggtacttctgtgtggggaggatgagaccctctcctggtctttctataggggagaaaggggtggagattttttccggcttctttttcactctttcttctcttcttacccttatagaaaaaagaggtgcgtgtgaccctttccccctcctggtgcaggtttcctctgcatgaccttagaccagtctatgcagcccctcaggagcccccagtggggctgggagagggaggggcttggggcttggactaacccagttggcaggaagtacttgggcataggccctgcacgttggctgtgtgtggacaatccagccccaggtcttctgggagctgctgctctgacttgacaggcatgggggtgtgcttttgagtgtgcagggattctggctcgagggtgagttggccccaccgtgaactcttccctggctagggcatgaacccaagctacgatgaatatgctgactctgatgaggaccagcatgatgcctacttggagaggatgaaggaggaaggcaagatccgggaggagaatgccaatgacagcagcgatgactcaggagaagaaaccggtgggttagcctccgtgctgagcacgaggatggtcagacgctcctcgctgtggcccgggctggactcacccttgggccagagctgggtgcctgggtgaggtggggggatttccattggggcagaagctgatgcatcctgtgccctttttcagatgagtcattcaacccaggtgaagaggaggaagatgtggcagaggagtgagttttggtggtaccttgtggggataagatggtgacccataagcttaagggaccagaagatttctggacatttctcaggtcccagcattagctactgacccagaatgggagagtgacctccaatgaggtgatatacgaaaatgttttggaaattgtcaagggctttgtaagtgcaagacatattttgaagtcggaaaagtatagtgggatctatggccataccgccctgaatgtgccagttggggctggttcgtagttggatgaggagagaatgggaatgagctggtgcttgccacttacttgctgggggttgtcgagtaagtcattgaatctcaatttcctcatcagtagaaatgcagtagtacccctgctaaattggttaagactttttgttagcagtgtcagaaatgtgattcactctcactttaaaagggaacatataaaagggaatttcataagttcatattactgcggagtctggggatttaattggcttcagacactactggattcaggcgctcaaatctatttcttccgatttccttaattaaaaataggtttaccccatggggtgcccagtgactctcagaagctcagggcaggcttaatcctactggtttaaaacaacaccagaagtgcctcttttggtgaacagcatagtgaacacagtggttacctgcccctttctagcctgagttattagaatgggctggggtctgatgggccagaaataggccaagtgcccacccttagagcctgtggttggggtaagcccttcctgagtgggggcaaggtggttcccaacagaaaattgggactctgctctcttaatccagaaggattgtaaaagaatgtcgggcagcaaaaaaaacacccaacaggagtcctctagttcagcctgccacatgcttatgaaggtttatgaaggtttaatgagcaaatacttgtgaaagtgccttgaagactgtccagcagcatacaggtgtaaggtagttgcattgttt

SEQ ID NO: 65379 - DNA, 2825 bp, Homo sapiens
ggtaacgttattttggaaaaagaagactcagtataatgtgtacctagtgtctccaccaactcaaggcaatactgagagatagtctcagagttatagggaccgtatatgctgttcagttcccaattcctgttttacaaatgaggaaactgagaatctgttaagggttctagataccagagtctggtttagaatctagactccttggcaccctcagctgttgctcctgcattgataatctggccagtccacttgcagcaggaatgtgtgttaggtagagctgtagaacccaggacatgctgtgtactgtctccatgcatctgggcctgcttttcttacagaatgatggtcgactgaggttgagccgtcagggcatcatcttcaagaatagcaagacaggcaaagtggacaacatccaggctggggagttaacagaaggtatctggcgccgtgttgctctgggccatggacttaaactgcttacaaagaatggccatgtctacaagtatgatggcttccgagaatcggtgagatgtcccatggctataagcctcctttttactgcatcttcttattttaatcttctagagactcgaggttccttcctcatgtaaccctgtgattgctagtttgggctccttagagcagggctgtgaggccatcaggcaatcagtgtttggctttgagcgttgaagtcttgtgaatttctgtgtgccttgactccagaagattttcttctgtcttgatttagatagtagtttctgcctgtggcttttatcaaggttcagaatcttagcttgatttctttgtgtgtatgtgtgtttttggttttttttggggacagggccttgctctgtcacccaggctggagtgcagtggcgcaatctcggattactgcagcctccgcctcctgggctcaagtaatccttccatctcagcctcctgagtatctggtaccacaggcacatgccaccatgcccagctgatttttaataatttttggtagaaacggcgttttgccacattacccagtctggtcttgagctctcagactcaagggatcgcccaccttggcctcccaaagggttgagattacaggcgtgagccattgcgcctggctagcttgatatcttaaagtgtgggttttgttttcctttttgaactgcttgagttaaaggctttatttgattttaatttccactttcattaaagtaatacctatacaaagtttataaagtcagatggcccgtaaccaggaatgtcagatccagtggctagaagcaatctctttcaacaatcttaccatgagctgggttgctaagtcagcatggatttcttataaagcctatttggggcagtttctcagaaatagataatcccaggacattcaagtcggtgttaaggccaccaaggtttactgggattgtgctttcttccctccacccacaggagtttgagaaactctctgatttcttcaaaactcactatcgccttgagctaatggagaaggacctttgtgtgaagggctggaactgggggacagtgaaatttggtggtgagtcctggggaagactgaggtttggggaggaagatagggtgaagggtttcagccttttacttgttttgctcttttccctctgccactgtctctggtttcctatctatttgcatgttcatcatgtgtttattgagtacctacagtatactgcctggggttggggttatagtctaaacagactaaccgcagtatcctgtctctgtggaactcagtttggtgggaatattgcttatgcagacttaaggggaggagcttgtggctggataagccctttcctcacagggcagctgctttcctttgacattggtgaccagccagtctttgagatacccctcagcaatgtgtcccagtgcaccacaggcaagaatgaggtgacactggaattccaccaaaacgatgacgcagaggtgtctctcatggaggtgcgcttctacgtcccacccacccaggaggatggtgtggaccctgttgaggtgaggcttcccctggttgccttggcagcagatggtgctgagcaggcattggctggcctgggagcagggcctgctgcttggctaccaatatgtgcttttgcaggcctttgcccagaatgtgttgtcaaaggcggatgtaatccaggccacgggagatgccatctgcatcttccgggagctgcagtgtctgactcctcgtggtcgttatgacattcggatctaccccacctttctgcacctgcatggcaagacctttgactacaagatcccctacaccacagtactgcgtctgtttttgttaccccacaaggaccagcgccagatgttctttgtggtaagcagaaacccctatggccggataatcctggtttttgcctaagtgttaagtagatggatctcactggtgtgcagaattctacgttggttaattgcaagttgttgtagagtgtcaattagtactcttccttactagatcagcctggatcccccaatcaagcaaggccaaactcgctaccacttcctgatcctcctcttctccaaggacgaggacatttcgttgactctgaacatgaacgagtgagtgtctccctggactcgtttcctaccactgtccaggcaggagacaggtgtgccattagaaggcagtagtgttgtgacctcaccttgctttctttgtagggaagaagtggagaagcgctttgagggtcggctcaccaagaacatgtcaggatccctctatgagatggtcagccgggtcatgaaagcactggtaaaccgcaagatcacagtgccaggca

SEQ ID NO: 65380 - DNA, 1111 bp, Homo sapiens
ataggtacctccaagaggctggcaaacggccttatccagttcaagtcctggtgtcagattcaccttggagccagaactgatttgaaaccacatcatcctgtggttgcggaagccaggtctcccccgtataatcccagagtgcattttgcaacatcagagaccagacctggaaaagatgttttagtttttctaccccaacctccttttactgatgggaaaactgagacccaaaggggagtgagttgcccagggtctcagtgcgttggcaacaaggctaggtaggacccagacctccttaacaccaccagtccagttatcttctgtcataatcacagtgactgtatgttcagaatgactattgatatgtgtcctacatgaagacattagtacagaatatgtaagctcaagatttccctgacaatcaatacaccagcttgctaaatcaatcctggggtaagagacaacaggaatgcacccttctcccctgaactcatagctttaacctctgagtagtggctattccagcattatctagcaaaataaattcaactgggtttaataaatagatattgagggcctattactactttagcacacttctcagatttgaggaaacttgaacaaggtgaaaacatccccggccaggcacggtggctcacacctgtaatcctagcacttggggaggccaaggcagggagatcacttgaggtcaggagtttgagaccagactggccaacgtggtgaagccccgtctctattaaaaatacaaaaattagccaggcgtggtggcgggtgcctataatcccagctactcaggaggctgaggcatgagaattgcttgaacccaggaggcagaggttgcagtgagctgagattgtgccactgcactccagcccgggtgacagagcgagactctgtcaaaaaaaaaaaaaaaaagaaagaaagaaaaagaaaaaaaaaaggaagggaaggaaagaaagaaaaaaaaaaaaaacagaaaaaaaaacccagccccaacctttcaggaaaacataatctaacaaatgactttaataaataaagtgacagttaaaaaaaaaagaagttggcacatatacaccgtggaatacta

SEQ ID NO: 65381 - DNA, 1063 bp, Homo sapiens
aaacgtgaaatgtcaactgtggcttagaggtgcacagttatagagagccgcttctgtgaaggtgtttggcccagtcagggagtaagggaaggttttctggagatgtgacattttagccaagacccgaaggatgagtaagagcagcccaggtgaaagagggaaggaagagagttcagggcagagaaacccacctctgcaaagggaaggaggctggcaaacaggggaaagaaaagaaggtcattgtggctggagccgagggagcagagatgagtgagggtggtgtacggtggatgggaacacacacagaggccggacctcagacacccttagagagcttttgtttttacaggagatgaataaacagaagccatggaagcattttaacccgtgtgtctgtgtgcacttttgtgtgtgtgtgcacgtgagtttgagagagagagagacagacacgatgagatctgagttgggaagagcacctgggctgattccctggaagtggaaggagtaggagtgggtgcaggaaaacctgctaagaggcagtttatgcagagaggtgacagtggcttggacccaatcgaatttgaagggatttttaaggctatagtgttaatatttcactgatacttcaatctcttccccatcatcccaaccaggtcaacaacctagactctgcctaacatgagtccatcatttctctgagaacttctcagcaacacaccacctggtcatctcacatacgctctcacccccgcccctggcctcagctgcttgtctgtggttgacaccatttcatcactattttcctttacccactccagggcacacagagaggcctggacttacctgatgtttctcacatcttttctgggtccacgtggtaatccccactcacctctgtggagtgggacttcccgagagcccatccccgttctggatcctttggggacctgagaagttgaaggaaatccctaggatctgagtccctggaagcaatagcctgtgcttggcctgaggttgatttccagggccttcctggaggaagctgcctccttgcaaactagga

SEQ ID NO: 65382 - DNA, 1040 bp, Homo sapiens
ccagagaatgacctcatacccgctaatcactatccataatctggtgctaactgtactttagctgaaggtgctggcaggtcctgcccaggtgctgctaagaacacttctattctgtgagaatcagagatgatttctagggaaaatgggcgagagggagtaagcaggagaaacaacccacaggcacagctctcatctttctgccctgagagccttcctcctgccacgtggttttgtttgtttgtttgtttgtttgtttcagatagggtctcactctgtcacccaggctggagtgtagtggcaagatcatggctcactgaagcctcgacctcccaggctcaagcagtcctccccaaattcaaagcttggagtgatggtcccagtggttatgtctaggagccctttttcctgccagcccctcaggggattgatgactctcaaatgcttcaggtgtgacatgggcacagcagtgagtcattcctctgacattctttgggaagaacattttccatccaggcttccaggcataagatccagtcctctggtgataaggagttcacagacaggacaatgtctgagtgtatcttaaacccaggaccatggcttgtgttcacaccagaccctccagggattttgaggtgttttgtttgtttgtttgtttgtttgtttgttttttgagacagagtctctctctgtcgccaggctggagtgcagtggcacgatctcagctcactgcaaccttcgcctcccggttcaagcgattctcctgtctcagcctcctgagtagctgggactacaggtgtgcaccaccacacccggctaatttttgtatttttaatagagactgtgtttcaccatgttggacaggatggtcttgatctcttgacctcgtgatcctcccgcctcggcctcccaaaatactgggattacaggcatgagccaccgtggcccgcccaattttgagtttttatgttctaatcccaaacatctgctcacaggcccctcagcatattctttcctgggtccagtgtcacctcccaggc

SEQ ID NO: 65383 - DNA, 1080 bp, Homo sapiens
ttttttttttatttggaggcaaggtcatgtttcattgtccaggctggggtgcagtggcccagtcatgactcactgcagcctcaaacttctgggctcaagaaatcctcccactcagcctcctgagtagctggcactacaggtgtatgccaccacacccagctaattaaataaaaattttctagagaaggggtgagggtctcactatgttgtcaaggctggtcttgaactgggctcaggtgatcctcgtgcgtcccaaagtgctgggattgtaggtgtgagccagcatggttgcctctttccttttttaaggctgaataatattccattgtgtgtatagatcacattatgtttagctgttcatctgctgatggacccttagtttgcttccatcctttggctattgtgaatagtgctgctatgaacgtgggtgtgacactgactttttccttctccttctgcagcttctttatgaaaaaggcatcagcctcagggcctccttcatcttcatctctgtctgcagtacctggcatgtagcacgcactttcctcctgatgccccgggggcacatcccatacccactgccccccaactacagctatgggtaaggactatctggtgattgtgggccagagcccctcattggccctagggtgggatggacagggtaaagcaaacctatcacaggagaggaggaggactggagcagtgcatctgttagctattgctgcataacaaactatctcaaaactcagcagcctaaaatgttaagcatttattatttttcacaagtctgtgggtagctggctagttccgctgatcagggccagatgtagatgattttgacagggctcattcatacatctgatcatttggaggattacatgggggctggctatgctaggatggcctcactcacataggtttggagtgacagggatgcctgggtcacgtggctgtcatcctccagcaagccagcgtgggctcattcacaccgtgatttcagggttctgaaagagtgcagaaatgcacaagcgttcttgagatttaagcttggaattggcacagccacttctgctgcat

SEQ ID NO: 65384 - DNA, 1044 bp, Homo sapiens
catggccacagagaaagcaagtgggaggtgggcctgatgtgcaggcctcctgatccctcactcttctttctgtcattgccttggttatggtggccacgagatgcctcccaatattccttcctagtgttagacccgtggctcaatttttggtttaggaaagaaagtacattactcttgtgtgtgtaagctatgctaaagctgacagcatcatgagattgtctgcactcatgctgggcaaacacagaggctgagtgtctttgttcacacagatctcatgagatggcccagcacctcaaaccaattatttcaaaccactctccttatcaaaccagcatcatctactctaaaagcctgtaaatgatttttaagcaactgaatgtggaggtggtggctgggtaatgtttgactcgtgcctgcaaatcgtctgagcaacaatcctcctcttcctccataatatagggcttttcagttttgaaaaaagcattgagcccataaggactctattgtgaaaggagtctccaacctttagtagtaggagagatgtacattttataaagacagaaattgaatggtaaactgtgtgaatactctaaaattagctcttggcagtgcttcttaaggtatagcacggtagttaagaggatgttaggggcacacgcatactacgtgaactacactaacaaacatcaaatcacctggtagaacagctattccctttttatttctctttcagtccttctgatttcatgaaagaatgtcttcatgtggggccagtgtgattttaacactgatgggaagagcaggtcttaggctttgaacattctaaggtcaaatgcatccagctacaattgaataacattgttttcctttcattgtatttattttgacagttactttctattcatgacaagtaatgccagtgttttcatctacagtagtgatataaagtgtcctttaaaaatagatactttttggataaaagtgagtcaacttaaaacattttagcaaataataggacaggcataggttgtggccagaataatg

SEQ ID NO: 65385 - DNA, 1711 bp, Homo sapiens
tttatgccaggctggatcctggacaggtcaacctggtgtacctcgaagccaggggaccaaagttttagctcagtgcaagatgggggcctcaatttcctctgtcaaatatcaaaggaccctttgactgagccatgccatgctcctcaacctccacggtgggcagtaccaaactgcataccgttttgcactttacaaagagtactaaagaaggtacttttgctcagtgtctccaaaggagtttgagagagcgcatgggtgggggggccatcagttgttctggtgggcaggcatggagggtgggcagttctcccttcttttcaactgaagtagtgtttgaagagccagatcttacctccacacatttgggggtgtggccctttgaagctctgtcctgcccctagggaggaaaaggcaccaaggtccaagactgcagagaaaaaggtttgagcaggagcctgaggggagagcagacattaattatcctggtcagatggtatggggaggacaagaggacagatggtgcatcagcttcttccataagaagggctgacacatttgcacagaatctcattcaattgagaacttacctgccctggggttgagagcccttgggcagagcacttgcacctccctctccccaacccccccagttgttgcacgtgggaggacctgggaaaggtgagaaaaggctgagcatgagcagtctgggtttgccttttcccctggggaatgtgccaggaaggggcaggataaacacgattaggcccggtaaacctagagcactaagtttcctttgtacgtactatgaaatggacatttttgtgcgaacatgaacatgaatgtttgtggagtcataggcaaaaatgtatgtatttttttaagataatggaaatttcagagatattttgagccagtggccagcaacttcaggctttgtggagactatttcatagctctctagggggcctcaagtgaaaaagaaaaaggaatgatgggtcttctgagtctgactctaaacttctggtcttggtttcctcatctgcaaattgggcacaaggacaaggggagaagagaacttctttaaggcctctgaggcctgggatctaccttggtggggtctggggccaggcagtctcccccacgggcctgccccctcctctcacagctgatctacgatgccggtgtggccttcgtggtcatcatgttcacctggtctggcctggcctgccttatctttctgaactgcaccctcaactggcccatcgaagcctttcctgcccctgaggaagtcaattacacgtgagtggctggagtgggcagagactctccctggggcagagagggctgtggtgatatgatagacggaattaactttggattcagagagacctcggcttggacctctgcttggcaaatcgcttgagccctccaagctctgctttctcatctgtactatgagcctgttcctacctacccacaggtcgcttttgtttgtttgtttgtttagaggcagtgtcttgctctgtcactcaggctggagtgtagtgtcttggtcctggctcactgcaacctaaaactgctgggctcaagcgaacctctccctctgcctcccgaggagctggggttacaggcacacaccaccatgcccagttaatttttttattttttgtagagacagggcttactgtgttacctaggctggttttgaact

SEQ ID NO: 65386 - DNA, 1020 bp, Homo sapiens
aagcccagcttcgcagacctctggcgcccggcgggttcccagttcccccgcttcttccgaggagacagcggaggcgaggccaccgggctgtcaggctgaagctccgtggccgccgggtcctgcacgcagagaagaccccagcgccggcgcggctcagggctgggcccacgggactccggacgcgccgcgaaagcgttgcgctcccggaggcgtccgcagctgctggctgctcatttgccggtgaccggaggtgagcagcgtgggcggggagggggcgcgcgtagggtctccggctatgcgtcggctgagagacaccgaggccggctcccgccgacactgccaggcttcccaaggaaagaccgttacttgcgcccgcggtcccgcggcacagtgtcccatctcgccaagcgcgtccttcccttttcttttctctgacccctccgactcttctcttcctcccgggtccccgctcgctgcacttcctctgcttagagctgcgcgtttgccagagttccagcggacctcctggagcgcttgaacccaaagccccgtttcacagatgagaataccgagtccccctggaagaagtgactggtacttcctcccctctctctgggtctttcttgcccttctcctctccgctttcctcggtctcatcccagttgtcgctccccgcccccgcgccgcccgcgttccctctcctcccgccgaggctgcagcggccgcggcggggggagctggggctctttccctccctttggtaaacacacccgcccgccagcccatccgccaccgctgcccttataaagtcagcagccgccagacttcctgccgaagtccgagccccctcccggggctggaggggggcaagcgggttccgaggtgcaaagcctggtgccccgagccctgcggagtgagtgaggggcgcgcgggggaggagggaaccgaggagagcccgtcctgggtctccctccacgtggcagctgttggcttggcccgagagactgtagggtcgtgggt

SEQ ID NO: 65387 - DNA, 1433 bp, Homo sapiens
tttttattggcttaagctctcttgattggttggtttatcctgaaggctataaattagaaggatttttaagtgtagactgtgaggtcagatgacctggcttcataacccagctctgtgtgatccttagaaaattactgagcctctgtttgccttaatttcctcatctgtaaaatggggatacatgtctcttagggttattgtaagcattgcataacagaatgcaggtaaagcacttagcaggatgcctggcatgtagccagtcctcaacaaatggtttctacttagttagtcatatacatggacttagacaagtttcctacttgcaaggaccttccagtggttgaggtgtaaactgaggatttacactgctttcttgggggaggtgaaatcaatatagcagggctggaatggtcaaggttcctgggatgtcacaggatgctgctgacatgaccttgcccctccctccctccagaatgaccagtgcctgccaccggaagtgtgtgcctcctcactacaaggaagcagagctctccaagggcgagtctgtgtgcctggaccgatgtgtctctaagtacctggacatccatgagcggatgggcaaaaagttgacagagttgtctatgcaggatgaagagctgatgaagagggtgcagcagagctctgggcctgcatgaggtccctgtcagtatacaccctggggtgtaccccaccccttcccactttaataaacgtgctccctgttgggtgtcatctgtgaagactgccaggcctaggctctctgtagagagtcttcaagatcccggagtggtagcgctgtctcctggtgaaggagtatttgtcacactggaatgtgactgtgtgtgtatgtatgtgtatatatatatatatatatatatatatatatataaacaagtttgttgacacctactatgtgcaaagcagtgtgcttggcatttgagagtaaagaaaacagacacagcccctaccagcagagggagattaatgagtgtttaagagtaagacaggccgggcaaggtggctcatgcctgtaatctcagcactttgggaggctgaggtgggtggatcacttgaggtcaggagttcaagaccagcctggccaacatggcaaaaccccgtctctactaaaaatacaaaaattagctgggtgtagtggcgggtgcctgtaatcccagctactcaggaggctgaggcaggagaatcgcttgaacccaggaggcggaggttgcatgagctgagattgtgccactgtcctccagcctgggcaacagagtgagactccatctcaaaaaaaagtaagacagcttaggtttgcctgctgtctgctgctttttgtgtggccctgcacctgtcacttttgtgtgctttagcttccgcatctgtaaaatagggttagccccctgactaatcctgtt

SEQ ID NO: 65388 - DNA, 1037 bp, Homo sapiens
aggcagtggtaagtgacacatgacctctgaattcaatgtggccctgatgatggcgtcgccatttcagaggtgtagcctttgggctgggtcccggtcgcctctgttcagcgtatgatcccattcccagggccctggaggttcaggttcgtgggttagagagttctcctccggtcctcgatctcctgaatagaggtgacctccaggaactggggcatcagagatccggggctcgatttccaggctcgccatagacgtcctgtgcgaccttgggctaggcctcagtttccacatccgtgaaatggggtggttaagctcactgaggttagtggcccgtggtggtctggcgccctgtgagtcctctgtatcctctagccccaggggtaggagagtgaacggcggcggtgggtgctgatggtgatgtctgctcccaggattaggaggccagaaggagatcccttccacggtgctaggctgagatggatcctctcagggcccaacagctggctgcggagctggaggtggagatgatggccgatatgtacaacaggtaaagagaactatgtgctaccctgtcttggaaaataagtcttggtcacccttatcgaaggtgaatgacttatgacaaattccttcctgaatgtaggggagcctgaggcccatgcttaccctccccacacccaccttcaaggttgatcctaatgtagatgcagtaaagggtcactagaatgagttgggcatttagatggggatggaactggcaatgcaggagccaagcaggaagagaaactccaatccaggctctggttaggttccaagaaaagctgagtatttgcctcttgacaaatagcacatagccagcccatttagtagttaacattttaaaaccctttattctgtgtcaggcacttgttaatcttcaaaataatccagtgggttaattttattagtcccgtcttaaaatgaggaaattgatgattctagaggttaagtaacttccttagggtcggcagctggtcagtaacaatgccagaactagc

SEQ ID NO: 65389 - DNA, 1085 bp, Homo sapiens
aacatggtgcaatcccatctctactaataatacaaaaattagctgggtgtggtggcgggcacctgtaatcccagctactcaggaggctgaggcaggagaatcgcttgaacccgggaggtggaggttgcaatgagccaagatcacaccactgcactccagcctgggcaacaagagcaaagctctgtctcaaaaaaaaaaaaaagagaagcaaagccaggttccaaactcaggtcagacctcagaggtgtcctagctctacccacatgtcctcaccagaccacattctcccccaagttagactgagactcacgattccttctcaatgtcctcccagtgctgggcacagctgcacacacccccttagactgcagtgccacccaccctccagccccacagccccctccctgtgtcctgcagtgctggtcccagcctctctcacacgtctttggacttctccatatagtgagtcttcacccagcgacgtgccccagagtccccctgagtccccttcctcaggggagaagaaggagaaggcaccagagcgcagggtatcagcccctgctcggccccgggggccccgggcacagaaccgcaaagccatcgtggacaagtttggcgggtaggacacaggccaggggctgggctgggctttcccataggaaccctgggttggtgggagggtggcctcaggggcagtgggaacagcccaggccaaggcaggaggactgacacctgggggctggggatcctcccagtggggcccttcatggcctcctgcctctctggcttggccttgcacccctctcccctcacagggcagcttccggccccacggccttgttccgcaacactaaggcagccggggcagccattggtggtgtcaagaacatgctcttggagtggtgccgagccatgacaaaaaaatacgaggtgggcatggggcagagctgcgtgggtggggcaggggtccagggagggtccaagtggtgcaaaccccaaagggtgggagggtgggaagggggccaagtccaggccatctggctgagcctcactgaggcctcctctgtgccctgcctgccatagca

SEQ ID NO: 65390 - DNA, 1014 bp, Homo sapiens
tgagaaccactggtttgtaccaattcattgttccagagaaatgtgacctgcccttgagtgtctttatcttccccaacaagaaaaggcctgtagtcccacaagatggactctaaaagaggggcagcattcctttgtcaaatacatttgagaagtactgcatgctgtgggcccacagcttggtcaatcaccatacacaatagcatattaaaggctgtgggaagttctccagtgaagaaacctctttagccgagatttaccaaatgtacttgaccttggaacccttttcctgtactacctattaaccttctgcaggacatactgtacttatgtttcccatctgggccctctgccctggtgcttctccccttctctgctttatggattcctgttcattctgcatggcccagctcacagagtgcaccctctgtgaaaccttccttctcccctctcatctccttccttaccgtatatccatacacattcacataatcacatccatgtttcgtccattactctattgaaattcttgaggactgggtcctgtctcagttaaatgtcagtagaagatgctcagtaatggctgttgggagaattcagaagggatattcaggtgtttgggccacagttttgggaagatgagtcactccttgcccccttgtttccccacttggtgtgtagagttcttctctgctatggtcttccggagtcatttcccttctccagccctgatctggcagagtttgaagcggtggggtcatgtctttgctgcagatgctcagtcgatgcttacggaaggaagaaaggaagagaggaagggaattagaacctagtgactttctaggaagaaggctagagagcagaggttaagtaccctgctttcaggagaaaagcctcctaagagcacttactcccaagttttaatatctgggagaagtgatctatttttccctgcacctagtacctaggtgtaccagagttgtggtgaggccacagtcagaaaattcacttaaagca

SEQ ID NO: 65391 - DNA, 1021 bp, Homo sapiens
gtgagccactgcgcctaatttcatctttcttatcacctctccttgccatgaaacatggttagtggctgcgaccttattttatatgttcttgtatagtcacagagttttacaagcaatcgtgcctattacatcactgtgaaatgatggaatgttcaagaatgaaaagatacatccctctaccccacccccaatatataatagcccatttttacagcttcttcccagaggcatggctttgtaagtgtctggattggtgactcttatgggagtgtccaacaaatgacctggagagaattcaagcagggtcttaccgagcaggacctgggtaaggaggctggcgatgctgaatggggaaaaggccatgttggtctccaccttcttcattgctgagaaggcgtggtagagcttcagggagaaatctaccaaagcatcccccaacacggcctctgttgaatgactctccaagtcagagcagagagtaacaggtcctgggcagaaggacccagtagtgggctgggtaggagaatctgttgggagctgggtagttggttgggtgggttggatggtgggttgggtggtgggctctgtggtgggttgtgtggtgggttcatcagtggtattagctgttattttggtggctgaattggttgttgagttggttgtcggcaagctggaaacctccaggatgggttcaacgaatagcatcttggagataactgttgttgcgaccttcccttcgcctctgtcttgcaaactctctggatcctgggagctggagctggtagcatttggatttgaggaggctctatcctgtggttcaagaaactgagtttcatttttttcttactacgaggcacagtcctctaaaatactcaaagcaggaagagaaggtgtggatgtggaaaatgtcctgtacaagagagtaatttctgacagtgcggcagatgagcaatctgtcttagaaccaccaccactaattcctcagagaaggggcaatacagggtgagggtgggggtgcaca

SEQ ID NO: 65392 - DNA, 4702 bp, Homo sapiens
tgagtggatcccctgttgcagaagtacttctggtcaaggaggggttggagacgggcaggaaattgcaccccttgtatcttccaaggtctccaaatccagcacgaggggcatctgggaacagggtttctgccagccccaccttggggccgcatttggcgggaactggatctgccttcacctgcagccctgtgcggggcgtgacggaaagagcggggagaggggcgtcctggtgcgggggttgttgaggtgagaagccaggggagggggctccgggagcgccctgacctcgcggactgttgggaggcggaggggatgggggttgggggagaagaggggagcctggcagccaatgggagggaggatctcgtttcaaaagggttaacccacagccaatgggagcctgggggagcggatcctgctcactccattcaagaatcccaagtattcaagatggacggcagggagtgtggaaggagaaagggggcgaggggggaagagcgagatcggcagaggagagggtctccgcggcccaccggcctcgcaacctcggtcccggccggcgggtggcggggcggccgctggggatccaagcccggcccgggagaggggctggcggggtgcgagagggcgtgagcgagggggagcgaggccagggaggggagccaagagggagggaagggcagagaaagagcccgggaagaaggaggtggcaggcagaggatcctaacgaagagcaatgtgtaggtatcgagagcttcccgaagggtaacgacaccgattttcggttttattctctcttggggaagggagggggacggtctgggctctttctctcgtcttcctttttccctcctcattctccactcgtgggcatcttttctattttttcctttggaaacactgtaactgggaagcaccaggcgtgtctttctgaggtggcctcactgtcattttccagtggggggcgtggtggggtagggatggggggctccgctgggcacggccgagctgggccatctgtctccacctgggttgtgtgcgagggcgtggagtgttccgagggggaccgggggccgaagggctggagcagggcagggagttctgcacctccagaagttgtagggtgagccaggggcggtgtgggggtgtgaggctggttttcgagctgatagttgtggggtgttgaggggtgcggggatgtgtgtgtgtggggggcgtgcgctcacactccagttcttgttgtttgggtgtgtaatgagggctgagttgtgcagcaagtatggctgagagtttgtgtgtgtgtgtgtgtgtgtgtgtggtgtgtacgtgcgcctgtgtggtccagcctcgaggtgtgtgtgttcggggggagcacagttgggtgttgaaggagagcgcccctcaccccccacttcccagctgcctctctcatcccattcacagaacatggctttcaggaccctcctggtctcctcctcccgtcgccatggctgcgaggagggggtgggaggagacagttggggccagccccctgcccctgctgctccagctaaccccccacctgccctttctctccctttcacaggctgggccccatcccctgctgctctgggggcaggggccggaagatggtggccaatgaggagggggagaggagagaacttgagccggggcctcccctcccccatttcctcctcggtctctacactcgcttctggaaggagctgggggctggctcctgggcccaaggtgggggaggggtcctgctggctggtgagtcgctgggcctgctcctcaggaatgagttgggtgtgtgagagctgaggggctcttggccctttctccctgcactccctaaggagagacctggaaacttcttggggaagaatcttcccctggcctccctgaagcttgctgtgcagccttatctttgcccctctgccccctgttggtgtgatccagttcccagctgggcctggtttgcccaaccccagagcagagaggtcactgaccctcgaggggtcttggtttccgcccattaaaactgtagggcagggccccatgtttgcagattacgggaacaaactctgccggggagagcgggagggaacgtctcctgcttcctgagggggtgggacgaggctagagggaagcccagaggaagagctcccaactggaattctgtcctctattccttacggtggctgtggattagggaagaaggcatctccccttcgttgatcggggcactggaggaatcaccctccagcctctgtttctctgggctgcccaaagttcactgggtcagaactggagctgggctccggggctgtggccctagctggaatgtgccacaatagagcctgcctgggtctgagcctccagatatccaggtgtccttccagggcagctttctggctttgggtgttaatcttccggggactgtttgtcctgtatttaagcccccttagggttggataggatggggaagtgctaggatgagcttgaagactccccaaccaagggtccctggataagacaggaaataactcagatgtgaatcccactgccagtgaaagcctatccctaactctcagtaactgtgagcgaatcaccctcaccattttaatgctgaatctgcaaagtgctttcaggacctccaaaaggagatgcaggggtggggcttcaccagcagctttcacctccccgcctggaagcttctctctactgcgtggggagctgtgactacaggctcccacctctctggtcctggaaggtcatctgagagtgttgccttgaggcctagagctctgctttatctaaatttaaaaggagatggaaacttagagaagagtagagggttctgtagtcttgggcagcaagctcctctctagaaggtaagctagcggaaatgcaaatccagatgaacacagcctcatacgagtgacctccagactttggggattgctaatagccgttttctttgaggactgagcatcaagcccgaagtatccctgcagctgctttagtgggtcctgtcctcccatgccaaaacctccaagaaaaaggtggtctctgtgctgggggtcagggggttggtgaagaaggcggcaaaaggaagagtggtgaaaaaatagaatgaacactaagaatggaataaaagggaaaaaagctgtattgaagcaaagaaggggcagagggagcccgtgagctgagtgggccagggactgggagaaggagtgaggaggcagggccggcatgcctctgctgctggccagagctcttttcacattgtgctactgtctgcacctgtcactagcagtgcaatgttaaaagggcattggccgtgtagtgctacccagcgctggctgcctcctcagcattgcaattcctctcccatctgggcaccagtcagctaccctggtgggaatctgggtagcctcacttgttagttatactaatagctctcatttatggaactacttctgtatgcagtgcttgtgatagacactgcctccgttactgtgaaacctaataacttctgggaggtaacagccccattttatggatgaaaaactgagggtcagaaaggtttaaacagtttggctaagattgtgtagctcttaggttgcaaagcctagatacaaccctgtgttaagtcttgacagctcactcatctttttgtagacccatctggagagatctgaataggttcttcaaactgggagatttcctgagctgaggggtggaaggttttgatgccatctgctggttgtatgaggatatcttccaaagcctcaaacctttaaggaccagaagtggtggcaactccttaggctaagaaggataagcattcccagactcagcccggaatggagagtgagtggaaaaagattaggagaatcactattaggtacagagtaggcctccttgagaaaaaaaggaatgcaccagaaaggaaagggggttaactcgagaggattgctccccaaagaaaaggacctgtgtgctgctggcatcccatacctacagctccttccctggctcatgaggcatggaaagacctcactccttccctgaatccacttacctttctcagcaccactccctcttggtcacggggtgtttgatggtaatgctgcttgagggcacacctgtctgggcatccaagatttggacagcgttgcccatgacttaatcttaaagattaataggatcccttgaatcaacccacagaatgattctcccaggaccaattacaaggaaattgaggccgggtgcggtggctcacgcctgtaatcccaacactttgggaggccgaggcgggcggatcacctgaggtcaggggttcaagaccagcctggccaacatggtgaaacctcgtctctactaaaaatacaaaaattagccaggcgtggtaatgcacgcctgtagtctcagctacttgggtggctgaggcaggagactcttgaatgaatcttggaggcagaagttgaagtgagccgagattgcgccactgcactccagcctgggcaacagagcgagactccatctcaaaaaaaaaaaaaaagaaagaaaaatttgagagcaatgactcagccatttacttctctgtctcccacagtgcctagtaggcttaattaaaacttgttaaaataaattgaatgagaggaatatttggggagcttctttaagaaggcag

SEQ ID NO: 65393 - DNA, 4843 bp, Homo sapiens
aaatgtcccttgggtcatatggtggcattgatgttgcgattttgagctttttttttttttttttttttttttttttgagacggagtcttgccctgtcgccaggctggagtgcagcagcacgatcttggctcactgcaacctctgcctcctgggttcaagtgattctcctgcctcagcctcccaagtagctgggattacaggcacgtgccatcatgcctggctaatttttgaatttttagtagagacggggttttgccatgttggtcaggctggtctcaaactcctgacatcaggtgatccaccagcctcggcctctcaaagtgctggaactgcaggcgtgagccatcgcgcccggcctaatttttgagctattttgtttcacttcccatcaactgccagagcagcactttggctgactgattttccttttagccttaagtgtgcccatgaactgaccagagcattacagaaccaggctgaaaagccacgggactcaagaaaatccttattctgagatgagcctctttcagagcccgatcctggatctaggcaaaatggacttactgtcaggggtgccagcagacacaagcggttttggatgctctcgccgagtagctaacaaaacccacccctcttactaaggcaaaacttcacctgaacgcttattccccggtaaaagctcaagcagtagtcttgccatagacagggcaactgctgccccctagtggtataaagggacaggcccgggtgggtgggggtgtgtgtgtgtgacggggacagtttatgggtacatgcacagggaaagaaagtcagaggacaggttgcctcaagttgctttttccctttttattaaaaatagactcaagcactttatgtatcatacaaaagtttcattcgctggtggcagccacgggaaagactggccccgtagcactgattttccacctcccctccaggggactgggtcccaggagcagtgactgggcctcagagaaagcccataaagactgcttactctggaagcagccgactaggggctgttccgcgagcagctgtccccaccccacccaatggcaaaagttagatactcgaaagtgcctcttcagtgccaagataaactaacaagtggagtgaaatggaaaaccctttgattattttactatttcccagggcctgggatttgagttttccctgcactcaagtccttttccctacaaataggggtaggaaacttcatcctcagagactctggtctcctggtgtctgagaccagaatttcactccaacccaagtcttttctcatctgctgttctgtggtccatgatctacttgccctgtgacccaaggtttgtcctctgttcactcaaaaagaggtggagcaaaaacggattcctcccacaatcctctctgcctgagtctatgccctgccatcgcttccatgttcaggatcttgggaacagaaagacccacaaccatccctttcccccagttctgtctctccctgactgctgcccactcctgagccttaacacccctggggtacccccagacccctgttctaaagggtgcctggtagtggatatggtggaggcaggggaggggttggttggagccaggtttcccccaggggtggggcagtactcatgctggtatagactgcttggcagggccgtggggagggaggggcatgcggaggaagggcacaccctgcctgagcccctcagtcccagccgttgtccttcaccatgtgtgacatttcaatgatgtatttcccttccttgtacttctggctcgtctcaaaagcttgctcctggtgaaggagaaagcagtgattgtaggacaaagcagtttccttccaggccccactgtcacctgtatggcccccaccccaagggtcatccacctagcccaacccagtgactagttctttctttcctctttggaccatgcaaggaaggacctgacatggtcactggtgcttgaagggccatggggactgccactttagagggtgaccctcttcctcaggtacttacatatttccagcccagtgtggttttgcagctctcacagaaaatgtcagctaccgagtggagccccgtgagcaagaggcgctgttcagctggcccgcaacccacgttgaccctgtctcaggaaacaggaaggacccagcacccagtggggttgcactgtcagtccagtccccagacagcccaagggaacttccatctggagagaactggacagcccctgcctttgataatccacccctttaagactagagcctgggccttctttttccaccgttatgatttcaattctcccccggctccccatgtgagaacttcagattgagaccctctttgcaaaaggggaggcaaagactgaaggcacaagatcacctgatggattcccccctttctccacagaggaaaattactcactcacacacaagcacaagcacacgcacaaggaaagaggtagactcacacggagttaaacaggtaggctcggccatggctcccttggaaggactgtggagacataggacagacaatgactaccaagcagccttcagccccactgcctgaatccccgcaggggtgtgtaggagagaggaagagctttgctgcctcacccctgggtgatgttcaggctagcctggtgcgcgagaggaggggaatggcaggtccccgcttcgcgtaccttggaaataagctcatcgtgtttggccaggtgtgcacggcagtggacacagctgtaagtgcggtgacagcggggcagatagctgcggaaagtcttggtggggaggcaggcagggcccggaccggggtcacagctgggcatgacgggctggaggacaatgccctggtgggctggaggggctggcgccgtgcagcccccgcagagacggtcgcaggtgaagcagcggagcaggttggctagagccgtgtttcagggcaggagaagtgttggggggctgcccggccagggcccccccagacgagaaccagatagaaatagaagtcacctgggaagaggggaaaggacatcaggggagctgcgacctcaggaggacccctcctgagggaatggaggaaaagggaatcagctcacccatacctctactttccccatcaccatcgacccccccacagcatccagttgcattgtcgccctgtcccctggatccccattctgctctggcaaacctggcagccgatccaggcttctggcgccaaagccagggagtcggtgtttctccctcctggggcagaagcagcctccaccattttccacagagagaagcccacgggcacagacgctgccatgggagcaacgtcatctgcaagtgccctctccttggttttcagttcttcgtgaggctctgcatcgcacaggcactgtgtctcaggggatcagagccttttaagagttggggatgcctgaaggtctttcttttacatggtctttgtttgcaatacaattggtcctttatacattttggggaggggggcaggaggtgtaaggtgaggggagggagagcatgcaggcaggtatacaaaccctgattcggttctctcctgaggtcagggtcctgtgctctgggactcttcactagaactttatagatgtttccaacagtaccaaagccctcacgtgtggccgcccattctcgcaccttggttcactcattctggcccagaataagcacctgcctgtcttcccagcctgtgggccccttggtctttctctctcctagtctttactaactgttgccttagcccttggttaaagacttaggcagaaaatacattttcttcaggcaatctgacagctggagccaatgggaaatgggtagcatgtcagaggagcctgattcctgggctgggcagggctgtgtggtagggtgagagcaacggccacaacgaacagcagaagggggactcttatttttaacagctgtgctttggggcacaaggcagaaaatgtttctttctaccttctcccaggggcagggacaaacagcagtgactctgtgggtgactgaagatgaagtaattgctgggttctgattaggaatagaggaagattgccttctgcccacgcgccagcctccgagtggctgaaggtgctggaggcagaggataagaagggaggtggcccctgttggctccgataagcaggtgagctgctgctttctccttcatagggcttcccagcccactgtgggtggttagcctaagtctggttcagagatgccagctgggcactctggcaatgctagagcactaagcagagaagaggcagtgttggctctggttagccagggcatacaggctctcctcgtcctgtcctccgcagtggccacaggcacccagctgttccactctctctgaaggccgccaggcagtctctccgcaaaacctccatagagactatcttcagtttcaggtcctctcctccgggctgggtcccaggaagacaccttgggctgagttcagggtgacattgggctccggctgcaggaaacgggccctccttgccaagagaccacctttcagtctctgcttcacaggtttgccttcaactttgccagcgagttcccctctgacatgcaccaccttgaaacaccttcttcaaggggcatggagaatggggcagcttgggtccccaatcctgagctccttctccagcctccggccgtcacgcctccctccctctcccctaattcccagtcaagccaaggaaaggctgcacagaaggccagagaatcacaaaggggagtaggggtcattttttcacccatctcggatcacagggagaagcaagttgggcaaat

SEQ ID NO: 65394 - DNA, 1036 bp, Homo sapiens
agcggccgcactgaggtggcttatgtctccaaggacactcctatgttgctttacctcaacactcacacagccttggaacagatgcggaggcaagcggaaaaggaagaagagcgaggtccccgagtgatggtagtgggccccactgatgtgggcaagtctacagtgtgtcgccttctgctcaactacgcagtgcgtttgggccgccgtcccacttatgtggagctggatgtgggccagggttctgtgtccatccctggtaccatgggggccctctacatcgagcggcctgcagatgtcgaagagggtttctctatccaggcccctctggtgtatcattttggttccaccactcctggcactaacatcaagctttataataaggtcagagccagagaaaggtggggtggagggaagggctgctatcagggtaggaaactggagaagtttactagttaacactgcattttctcagctggtatttctgctgcattactttagaaaggcaattccaaatatgtcagtctcagattgttaaacatttctgtggatctattcttagtaatttgttagattttcacttagggcataaaacaggaggcagaagcagcaacataaaaattaaatccatgttatggtatcaaaactacagccattaaaaatgtcattttttcaggctgggtacagtggctcatgcctgtaatcccacaacttgggaggctgagacgggtggatcacctgaggtcaggagttggagagcagcctggccaacatggtgaaaccttgtctctactaaaaatacaaaaagtagctgggcgtggtggctggtgcctgtaatcccagctgttcagagactgaggcaggagaatcacttgaacgcgggaggtggaggttgcagtgagctgagatcgtgccactgcactccatcctgggcaacagagtgagactccatttcaaaaaaaaaatcatttttcttatatctaatagcacttattctaaagaggaacaaagtagccatgggtttgtctgggtgtttttg

SEQ ID NO: 65395 - DNA, 1700 bp, Homo sapiens
caagtcagttttcctctgaattcagagtcccttcttacccacatacatgtaagtgaaatggaaaacagtctttctttcagaaagtactttttaacagcagcctgtggaattttagccttggtgtctaagaaataccctgaaagaattctctgataaagatacttgtttttctccaggtgagacacagtaacctggttgaactctgcatctggaaagctgaagactgaagaaagataagagacattgactagtctggaaacagggacatctttggaacttcgttttcatccacagtaaacttttgaagtgtcatcaattggaattgatttcttcatcttattctgcctattgggaagaacatggcttcaaggattttaagtttccctttagttttacatgaactttgtaggaaacagagcccttaaagggcttgggaataacaagaagagattgaagacagagaagcttgccctgttttccttgccccttcaaagaaaaggatttacagctcaaacttagaacagctgttgtccagctttagccatcaagagagaaataaattaaaccaccattgccagactacaagccctggtgaagtcagggtgtgggagtggtggcattgagaagactacctaaaagagacaaagactgcagtaaacaaagctcctctttaaagttggaaggggcctcaggttccttcttggattgaaatagaaatagaaacacagggcacacctcttttaggtgcagctcacattttatggaactgtagtcgtggaggtactatagtatctcagaagaatttttctttgcccaaagtttttttgccataccctgatattctctccttcttttgaagacctgcctccatccatgagctgtatcttgatctgtctgactgtccatgttttccacctgcaaccatttgcatgtgtacagcctactgtttgtctccagtttttaaactgtacaagttgtgtttcttaatcttcccttctgccttgttctggggaggtggttattcatcatttggaatcacctttccccctcccatgtgctttccttcatttgagatcttttgacctttggctttatttgggagggggaagggtgataaagttttctgtttccctggttttcttttgtactcctctctgttgcttccctcctcccattttcttgtctgttctgccgctgtgtgggcctgggctatgcggcagggcagatttcccatcagagctccaacatgcccgcagagtctggaaagagattcaaacccagcaagtatgtcccggtctctgcagccgccatcttcctagtgggagctacgacactcttctttgcctttacgtgagttttctcccagcaggggtgtttgggtgggtggatactccatgggaagtgaggagataacgctttctcttgagttttgcaaagccaagtgactgagagggctcagcgtctggtacaggtaaatccaaatcccagagacatgtaagaaaaatgagaaaaagcctgtcctttcagtcgtgttatcagttttacttcgctgaatcttctacctaccctttcctcctttattttggaatcatagatgtcttcatatttttctacccagctccatcattagatgatcctaagctaggaaggaagtgggaggaaaccaccagagaggcttaaagcagtttaagcagtcaatt

SEQ ID NO: 65396 - DNA, 2241 bp, Homo sapiens
aagttcaagcgattctcctgcctcaggctccttagtagctaggattaaaagtgccaaccaccacacctggctaattttttttattttcagtagagatggggtttcaccatattggccaggctggtctcaaactcctgaactcaagtgatccatccaccttggcctcccaaagtgctgggattacaggtgtgagccaccatgctgggccgactaaagcctttttaaatgctaatggcttttttccaggatgtctgaaacttaggtttgagattgtggaaactgagagtattggaaaatttcagaattgatttataagatacaccaatgagagagttttggcttttagtgctacccagatggttttctttgtactcttaagaacagaagcctggagaagtgaaggccactgagaaaggaaagggtaagttgtatttgggaagagagtcctaaaagagtccctttatgttagtttctgccgagggaatgacagtaattttcccattacttggttctgttgggaaaagcagttggtatgaaaaaatttcccatttaggatctaggatctgcatcattctcactttgatcttcagactttcttcatttacttgttattggaagagactgagtgatttaaaccttccctttttcctcagttttttttttttttttattaagctcttgaccatctggaaggcatccttgctgttacctgtttataaattaacatgtaccaggcttctgagccttatactgttgagtcattgatttagtgctctagttgcagctcttggaatcatcagagcatgctggatcttctgggaagttactttgtcatggttcaggctcaaacctagttgtgaagtgttattcagagcaacatgaggttgctggaaagaggaagaagtgaattgaagtggtagggaataaaaacacttgggctcattgaagtagagattattggggtggaggcaattatacacaagttaaatctgaggtaggagggaaggaaaactccccatatttagctttagaagccaaaagatattctgaaaaatgtgggtcacattgtctaaagagtcagcaaagtaatactgatgtatttctctagtttttaaagaaggagagaaagaatcactatctaaggcatgaacaccatcctacttctcacctcctctgaagcagagaagttgtagattttttggcccccagctctgagcttgagcatacctgctggagtctctcaaggatctagagacagtgctgcttttctctgacttaatattttcttcataaccttttcctcttgcttaaactcaacatgttcagtgctctgtccttcttcatacatttactaccagaaagaggggtgagtctttggtgtcagaacttgttttggtttttgctaatatggccaggaagtagaatcaaaattttaactaagggacatttatattatatcttagtatcctgtagcaattttggttctgggtcaagaggggtatgtacaagaccagtttgacacccttaactctgctcaattggggagggtctattttcctttaagaggcaaagcctttggagaaggaaattgaggggactaaatgatttctgtctttcaagctccctcttcttgagatagagcaagctgaatccttgtttttaatttgctaatctggaaccattgaagtgtttgactggttataccagtttgcctacaaagagttgtcctgacataggcattttctcaactgatagttgaagctgtttaacctactttctcattccctggtgccagtaaagtaggagccctccttattccatggtctcttagctctaggaaaaaggattttggaggacaatattgaccttatttggaattattgcctctcatccaaagttagaagaaccctaagtcatagctggagttccttccccctggcgctagtttccacaggaccaatttctgggctccatcttttcctaagcatctcccctagtcaccttgtgggggcacaaacacactgtttatcttactctagcacctagctcgggtaattctgaaattctcatctcctcttctccatctgactagagtatttcctctgtaagcatatatctgggctgaggcaccactgttcttaaaaactatcctctcatgtattttacctctttcgaggttcagttccctggagaatcccctgtttaaaaccatacaacctaaaaaagagttcagggtttcaa

SEQ ID NO: 65397 - DNA, 1045 bp, Homo sapiens
gataagatctctgcttcacgtgatttttttttttttttttttttgagatggagtcttactctgttgcccaggctggagtgtggtggtgtgatctcggctcactgcaacctctgcctcctgggttcaagcgattctcctgcctcaacctcctgagtagctggaattacaggcgcctgccactaagcccagctaatttttgtatttttagtagagttggggtttcaccataatggccaggctggcctcaaactcctgacttcaggtgatccacccacctcggcctctcaaagtcctgggattacagtcgtgagccaccgcacctggccacttcacgtgatctaagggaaggataaagtcagagttgtatggaaatccatgatggtcttttcaggctcccatccattatatagtttgcggcttttcagtttctgcctcagtcctcttccaacccttttacccacaggaagttggccgacctccatggagttctctctggtcccccctcccccgtaactgcagaggtattagcacctgatttgagtgggagcagccttgtgatttagcacattaatggagcagtggttgtgccttttccttctcacattgttttcttatccaggaataagtgcccaggtcctacgtctcacattcagctggttgaaagtctgggtaccacaaatcaggtgttttcagagaaactgggttgcccacctgtaaagggagaaattgttttctcatggaatcttgaggaaaggatttctaaatgaggatccccatgggcaggaagtggaacattcatttcagccttctctcatcaacaaggaacactagtcatatgctcaagcaatatgctaggcatgggcagaatgcatagacctattctttaggagcttagtgtctctgttttaagtgtccttgaattcctagtatttcagataggggaaggtagaggtggaataattgatgatgatgataatgatggtgatagttaataatgttttcttttgtcttctgtccactgaatgctcagtatcaagccagctag

SEQ ID NO: 65398 - DNA, 1221 bp, Homo sapiens
ggatgcattagggagtgctctgaaacagggtttcaggagtgtggatattggaatccattctcccaattttatttatttttattttttattttattttgtatatatattttgagacggagtttggcttttacgcccaggctgtcgtgaagtggcgcgatcttggctcactgcaacctctgccccccgggttcaagtgattctcttgcctcagcctcccgagtagctgggattactggtgcccaccaccacgcccggataatttttgtatttttagtagagacagagtttcaccatgttggccaggctggtctcgaactcctgacctcaggtgatccacttaccttggtgtcccagagtgctagggttacaggcgtgagccaccatacctggccccactctgccaattttatttggtcttgaaaacaggagtgctgaatggatgggcagaagaacccgttctacctgagatggtataggtctggtagtcctgtcaatgagtcagccagccttctgggctgtgaccactccctaggcttttagagctttatgattattgccatagtctaaggacgagccccaacatctcctgttctgagctctggcctcatcttccatcaaaggcaacagattcagacaggccacttggggtggtcacctaggaatctggcaaagtaccatagcaacggaaagcctctccttaaatcaagcagaatttgggatatggcaagaacgggctctgctcacacatgcctctccttggtggggtgttcccttatagtgctgattggaagcaatggttctgtgaatctaggagcaaatattgtccatgaagttgttatttgcatcatttctagattctggcactgtgggggcagactttattttggcaacagatactggaattccattccaggattacacactttatctggaccaagttgatatccagaaggttgtagggtaaagttcatcatccagggataggttggcaggatccccaagaaactgagttgctttgcctaaaaatgaaactggctgggcatggtggctcatgtctgtaatcccagcactttgggaggctgaggcgggcaaatcgctttgagctcaagagttgagtccagcctgggcaacatggtgaaaccctgtctctacaaaaaattagccgggcgtggtggtgtgcatctgtagtcccagctacccaggaggctggggtgggaggat

SEQ ID NO: 65399 - DNA, 1052 bp, Homo sapiens
ccttctaattatcttcccaggctgtaggagtcaagtgagtcaccctttctcttcttccccaggcggaaattgaagtgacaacttagtactagggaggggctctgacctggatgactggttttcagtttctctccctccttcttaaggaacctaggaggtcaggctttggggtgaggcggtgcaggaactcttctttttgcttatattccactccaaaccctgccaatgtatggagacatcttttctgaaccaaagaactcacagaggaagaagcttccatggggggctttctttgaggatagtatagaactatgactgaaggtctgtttagtccctaaaattgatgcccttgctccagcttcgttattttgtctgctaattgtgtactgacatatcaagagaaccaaacagctaatggatatttactatctaaaaagcctggcatataataaatactaaaaacttttcaaaatgaatggctgaatggaatttgaataaatagatggtggtggtaaagatttgtgagatgctttgtgacagttttgtctcttatcttgatttgcttgtatctcgttaaggaactgagttcctccaaactgctctgagtcagtctcagggctgtgctttttgttttggtgggtgcagataccttttcttcacagaatcccagactgctgtggtttaattctctggaatcatatgctgtcttgttctcctgtcctcttcttcctttccttcagtgagttcttcctttgctttgactggttcagataaaggggacaaggacagatgctgtcctcattctggagattaagttctcagccacaaagtagattagagtatttatccactgtcttggtagtgggaacttctccctgagctgagacgagagtgtttgatactactgacaaaaaagtagcacatcaggttcttccaaaacttccagctcccaggaaatcagcagagaaaggaagagctcttgaagcattcctacgtagattcaaatcctgaaagaaactgagtttaattctggactagagaattgttttttt

SEQ ID NO: 65400 - DNA, 1088 bp, Homo sapiens
cttcatctaatgctatacccaaactgattcttgtgccttgtcttccagtatagttgagaaatatatgataggcagtggctcatgtctataatcccaacatttagggtggccaaggtggggtgatattgcttgaggccaggggttcaagaccagcttgggcaacatggcgagacccccatctctacaaaataaagtaaaataaattaactgggtgtggtggcatgtgcctgtaatcccagctacttgggaggctgaggtgggaagagcacttgagcctaggagttgcaggctgcagtgaacatgatcatgcgtaccactgtactccagcctggtcaacagagtgagaccttgtctcaaaaaaaaaaaaaaaatacatgagaattgactcccaaatacctccctcttatatcaatttaatactttgagttgccataatgctcaatttctaaatctgattttccctcccttcatcaatccagtctaagggaagcctggagataacagagagccagtctgcagatgctgaacctccacctcctcctaagccagacctgagccgttacacagggttgcgaacacacctcggcttggctactaatgagggtaagggctgccttgatttgcaagatactagaactaggggcaggattgagaaggttgcttatgagctgtggaagacaggcaagggctgggagatattactcgtgttgtgactttaaacacccaacagttggtacttgtgctactttgcaactgaaagagaagagaggccatttagctattggcagtgaatgggacttttgccgggaaaatggtcagcctctaggcagaccagagaacatcacagaacctttttggtgcatttacccaccctgaattctgggctggtgtgagtctttaaaagtcttgatttcagcgaagggtatatctattcctaccttgtcctctccctgtacttaaggaaccctaggcagataaagtgaacaactcatagactagacgcagtggctcacacctgtgatcccagcactttgggaggccaacgcaggaggattgcttgagcccaggagttcaagaccaccctgggc

SEQ ID NO: 65401 - DNA, 1091 bp, Homo sapiens
ctttattgccctgcttaaaataagcctgattcccaatctctcctatgtactactactctctagtaacagctatcacatgtacttactcccaagcaaatacttttaggaagatagcattatggaaaaagtattaatcttcagtctcttaacaggaattgcccatgaaggcaggtagagtcaaagtgaaaataaagagctaccaggatacccctgggtccacctacattaggatgtacaacagaagccctgatagcttttgcagagcagtatgctaatttgaaattggctaagggtcaggatagtactaatacttacttgggtgtcagtaatggctgcaaggccacttcttctgtctcagagacaccaggttgggctttttggctgctgtaagacatcgatcggcccaggtatggggctgttgggcctggttcaggggaccctactccccggccccttagcccatctggcttgccaaaacgggggacagctgggcgtcccagtggagtcttgcccaaaggtgatctctttgaatcatctgaggaggaactagtacgaggggcatggcccgagcctggtgttgactgaatgcctgagtcccccaagcctggttcttcctcacggcccgggagtgggggtgactggcgcagcaacttctctcgttcctggagagaggccacaatgtggcgcgacagattgtcgtaacggactggtgagggctctcggtgtgttgggccagttggcaccaaacgtgggtgcctctcagcttcccgttgctgggccagcctggctgacaggaagggagaggtatagcctaaaggtgggtctggctcaggccctgcctgcactgactcaaaatcagggctgtctgaaggtgtgagcaagctgtcataagataggcttccattgcgtgtctggttggccaggctcttataggaggtggaggtggtgccctctgaacgaatggattgcaactggcccagctcaaagcctgtgccctgggctgacttgaggctggaggagcgtgagccactggatagtggatcgaagtgaaaacttttgccaaaggtaggagaacggaagctctctggttc

SEQ ID NO: 65402 - DNA, 1773 bp, Homo sapiens
aacacaccgagagccctcaccagtccgttacgacaatctgtcgcgccacattgtggcctctctccaggaacgagagaagttgctgcgccagtcacccccactcccgggccgtgaggaagaaccaggcttgggggactcaggcattcagtcaacaccaggctcgggccatgcccctcgtactagttcctcctcagatgattcaaagagatcacctttgggcaagactccactgggacgcccagctgtcccccgttttggcaagccagatgggctaaggggccggggagtagggtcccctgaaccaggcccaacagccccatacctgggccgatcgatgtcttacagcagccaaaaagcccaacctggtgtctctgagacagaagaagtggccttgcagccattactgacacccaagtaagtattagtactatcctgacccttagccaatttcaaattagcatactgctctgcaaaagctatcagggcttctgttgtacatcctaatgtaggtggacccaggggtatcctggtagctctttattttcactttgactctacctgccttcatgggcaattcctgttaagagactgaagattaatactttttccataatgctatcttcctaaaagtatttgcttgggagtaagtacatgtgatagctgttactagagagtagtagtacataggagagattgggaatcaggcttattttaagcagggcaataaaggggaatgtttgggtaagaaagtatggatatagaaaagaacatcatttttttctctgaacctttgaaactgtctccctttccaatgttttctgtcccatttcctgacacctacgtcttgtctcttctttccagagatgaagtacagctgaagaccacctacagcaaatccaacgggcagcccaagagcttaggctcagcctcccctggcccaggccagccacctctcagtagccccacgaggggaggagtcaagaaggtgtcaggggttggtggtaccacctatgagatttcggtgtgagccttcggcacctcccctccccaacgcctctgcgcctacaccaaagggccccaggtggccaccttccttccctcaaggggctcccctcccgtgcatggacattttttaaaccaccgattccaagaggatgaggagtgttttctaaaatgcagtaggcttggggagtcggagagttggggccctgagactggggtagcaacccccccttttatcttttaagaccttcccttccttgatccctggaccagactcagtggacatttgtgcaattgctcgccctggagggaaccagatcatttttaaaccagaaataattttttttattattgttacggattctatttttttcctcttctgcgttaccaggtgtgtgtgtacatataatatatatatatatatattataaatatcaaagaaattatatatctatcctgggatgggaaaatgagggagggatacatatacggagggggatcttactcttcccattcctcagaccagcaggaaaagaggggagacgtcagtctttttcctgtggttccctctcatttgtcccagttactaactacggaaatagcatcctctgctggtgctaagtgtgattaggaagaagcctggggagaggtgagtctggaattttggtcacaagagggaaggacttggagaggagaattagttttctaggctcattggcatttagtttccctaggaaaggggtcaaaacttcaagacactggtggtggtgg

SEQ ID NO: 65403 - DNA, 1048 bp, Homo sapiens
ctgatcaaagccaaggctagttcctagttgttcttaccctgcttctttctcccccagaatcgacatagtccagaccacccaggtatgggcagctcccaggccagcagcagcagcagcctacgctaataggaccactggactctttgccaggatggcttttcctgctgtactgaacctgctgataaaagctgccttccaggctcttggacactgccttgggagcatcctgcagctgggacagaggccagctcctgttgggctcagttgagactaagtaaattaggagagagagggacatgcttttgtaggctcatcccagttggttttctcatggacatctcttcctctcccaggaagcttacaattttcttctctctcttttgtgcaatttgtctgatttaggacttgttctgtgttttctttaaaaaaaaaaaaattacatttatcaaactggctgaagtgtgactgcctgttaagaggtatgtgcctttctgtgaatcaggatttaagacaaggcattcctaagacttgaggggatttgggtcttgtcattacatgatctcactagcaggcagggaaccaaccaaaatgaaaagtgacccaagcttactaatactccacagcagacacgtaacactctgcccattatgttgagaaccaagcgcctcggtgatctcaggctccatctgaagagctgatccaggtagggctcaacagtgtattctaggtcaattttgtgtcgaaagagaatagccaactgaaaacacatggacagtcacccatgtgtttcaacaagattggttctttaggtcagaagcctgtgatcttttgagatgaacttctggcaagcaaaggtaaagcttcccttctctttacaagaacttttgacctgcttcggtccttagttaagacaataaagttatttagctgatgtgaaaacatttctaaaacagcaacaaaatgtagcctaaaccatcaaaatgtgaaaaacaaaaacaaaaaacacttttagtttttccagctggttaggtaactgaaaacatccatg

SEQ ID NO: 65404 - DNA, 1007 bp, Homo sapiens
ggtgggtcagcctgagccccaaacagtgccgtgaaattctccatcgtaccctccgccccggcgctgtctccgtgtctgccgttggtaattttcattggacaatgctttcaaggagtacccccccgccctttctcaaggagccgcttgtcattggatgcctcaggcaccgcctaccttttttcaacaactacttccgtcgccttatgagaacgttcaggaagtgctatttaaccttattagagtcttctgctagctctgcttgctacagtccaataaaatgacttaggcggataaagcgacaactagactaaccaataaaatattaagttcttttttgggttctgacctaccacagcgttcagagaactacatccgggtttagaggccgtacgtttgcgatatagcccaatagcagtcgttatggtgggggaggcggggcgagacctacgacgccggcgagcagtggccgttacggccgaaaagatggcggtcttggcacctctaattgctctcgtgtattcggtgccgcgactttcacgatggctcgcccaaccttactaccttctgtcggccctgctctctgctgccttcctactcgtgaggaaactgccgccgctctgccacggtctgcccacccaacgcgaagacggtaacccgtgtgactttgactgggtgagcctcccgcgtgttagtaccccgcgaccttgactgtccctgcccttgcaggtgtatctgggaaccctggggtttacctctctgaggacacctgaggttccgagcctgtagcggacttagagactattaagtgcagggtccgaaccatcatcgagtctaaactttgtgtttaagatgggaaaacggaacatgttagtcgtagcccatgcacaacggcccaacagcttttgactgttgagtccaggtttctttctgtttcaccattgagactaattaacagccctatcaaaactgtacatacacgtgtataacgttttacagtgccgctcatt

SEQ ID NO: 65405 - DNA, 1063 bp, Homo sapiens
ggaggaacaacagtgcttcaaaatggatgtcacgggcactgtggttcattatgagagccgggggagagggaacaccaggatgaggaattagatgctaaagtctgaaccttcccaggaggctatgtggatccagctgacttttcttccctgtatttggcaggaggaactagaacgggacaagagggtcacttggattgtggagttctttgccaattggtctaatgactgccaatcatttgcccctatctatgctgacctctcccttaagtgagtagtgcaaagggagggatggtggaaatggagatgctgtgccttccctctcactgtttttggcttttctttttcttttggccttgattttcacacatggtaaccaaaggcatctccctctcccctcttaaatatctatacttccactttccttgatccattattttttttcagcatattaaataatatattcttttcagatacaactgtacagggctaaattttgggaaggtggatgttggacgctatactgatgttagtacgcggtatgtaaagacctgggcagagggtctgagcagggaaatcactttgagtgatacatacagggacatttagagaactttctgggccctgcaggtacaaagtgagcacatcacccctcaccaagcaactccctaccctgatcctgttccaaggtggcaaggaggcaatgcggcggccacagattgacaagaaaggacgggctgtctcatggaccttctctgaggtacctgaaaggaagggcaggtgcatgaagggtgcagaacagtaggtgggctttcaagccctacccgggtttgattcacagctctgccacttgcccattagctttgagggtgtggactagttactagacctcatgttttaattcatttagcaaatatatattatgtgcagacctgctagtactgggtaacaatcattagttaagatttggtctcaggccaggcacggtggctcacgcctgtaatcccagcactttgggaggccgaggctggcagatcacctgaggtcaggagtttgagaccagcct

SEQ ID NO: 65406 - DNA, 1420 bp, Homo sapiens
gaggctagcagtcggacctagtctccgccccttcctgctgtgttcaccatcccagcgtcccctgtcccctccacccgaagcgatgggtggttccgtcaggcgcttcccgcaccttcccgctccctgcttgcaaagtggttgtgccccaaggtccgcctccaggccacgtgggtgctgcgggccaagctttcccttcctttgagagaggtttccgctgtaggagcagagcttccgggctgcgctcttcgttgcccagtttccgctcagtggtcgcgtctccgccccccacccaccagtcccgctgcattctcggccgggctctaggcgccatggctccccgcgggaggaagcgtaaggctgaggccgcggtggtcgccgtagccgagaagcgagagaagctggcgaacggcggggagggaatggaggaggcgaccgttgttatcgagcattggtgaggggcctggagagtaacgggagagagggaacagtggcgccggggggggccaggggccccggtttctaacctctccgtctctccctagcactagctgacgcgtctatgggcgcaacgccgcggccctgagccaggcgctgcgcctggaggccccagagcttccagtaaaggtgaacccgacgaagccccggaggggcagcttcgaggtgacgctgctgcgcccggacggcagcagtaagtggggacctggatgtgggggagagggacgtgggtgaaagggacgtgggttccgaagacaggaagcgctattcttagaaaccacggcagtctcatgacttcagagacgtgctcgtgggttccgaagtattgtaacttcgcttcattctggcctttcaggtgcggagctctggactgggattaagaaggggcccccacgcaaactcaaattccctgagcctcaagaggtggtggaagagttgaagaagtacctgtcgtagggagatttgggtagaagccctcatgctgaggtttgaaatgggaagtggggggcgcgaccgctgttgaggaagagaaggcattgatcttggtgtggctacaagtacccacctggcgtgggtagctcacgcctgcaatcccagcactctgggaggtcgaggcaggagtggatggccaacacagggagaccctatttgaaaacaaaaaacaaaaaaaagacacaatattgttttctgtctagtgtgccctaagtggaatttatgtcctttgggagactgtagttgacttgccctgggggtatggacaagttttccatttggaagtttatttcatgttacttcatttatgcttatccctaccctcttctgtttggttcttgggtgttctgttactgtcctgtgttaacactgcattacaataccattaaatttggttacaaggattttgaccttgtctttgtccctagtgctt

SEQ ID NO: 65407 - DNA, 1656 bp, Homo sapiens
aagccaaaaccaggcagagctagtcctctgcagagcaccccaaacccatctggtctgggaaagacaggtgggagcaggaagcggagccctgaagtcagggcacctaactcagactctgcagaggaggggcaggttgggagagttaaacttaggaagattgtcaatgggacttgctgggaagtggtacaagagactcctctcaaaaacactcaagatagcccccagatcccagatcccggaggagacttccaagagccttcaggaactcagccattctccagtaatgagcaggaaatgtcacctactagaacagaactgtgtcaggactcccccatgtgcactaagctacaagacattctggtctctgctagccactccccagaccacccagtggtgaagtcagagtttgagtccagtccagaactggtagagaaggaacctatgttggctattgactgcagagaaccctatgcatttgacacagctctgctggagcagccctgtgaggctgaggagtaccgaatcacaagtgctgctgccaccagtgagctggaggagatcctggacttcatgctctgtggctcagacattgaaccacctatagggtctctggagagtccaggggctgagggctgcagaacgcctacctaccatctgacagaaacaggaaagaactggattgaaggggaagaatggtgtctaccagacatggaactctggcccagggagctcacagaattggaaaaggaacctgctggtgagaacagagggccaactgagctccttagcccccttgtcatgccctctgaggtgagtgaagtgctttcagtaggaggccgttggacaccagaccttgaaattaccagctcccagccactggatggtcaggaagacaaacttctccatgtcagctcccttgatactccccagaggtcttatggggacctctcacctccctgctcaaactgggtggagactgggctggaagtctccttgactacagatgagttattatacccttctcccaaggcaggcaaggaggtatctggtcactctgaactactaggctcacttcctgccagctctgaagaggaagagattgatgtggtggactggacagcagaggggaggctggtacccactactgttccctccgtgtggcctgacccttcctcagagtcagaaacagaggtagatatactaacatagtggagaggggagggcaggttaggggccttgggagggtgggaaatgttagctagcaaaaggcttactggcagagaagctggcacgtgccctcagcacaagaggcaggtgtaccctggctctttgtaggtcccttcctcccttccctaagcctcagaagccaggcagaagccaagggtaccatagatagaaaattatgaacttgtaccatcttatttgtaatctattttccggttagtgacaactgaaacaaactgtgtgctccccaattctggtgggtcataggtaacagccaaggccagatctctcaggtcataaggcatccagtcactggtaatttaggaaaagctgagaaagaacaccctcctctgtggtggggtattgtttaagaaaatgttccagaggaaggtgtgaagcagtgttgggtggaatactaagtgggtgggagtg

SEQ ID NO: 65408 - DNA, 2488 bp, Homo sapiens
cattctaaaaagcccttgttccttgtctcccttgcctcttccgcccccctcagctctgcagtaattcctcagagattgtacagtctctccactttaaatataaatatataaatataaatatatatatgtataaacttccccctgtctttctctcctctcttttttttaattttctataataaagtttcctattggataaggtcagctccctgatttatgcctggttcctattggaagctcacaggggctgacatcacttaggaaagcgaagggggtagggctgccagatcagtttgtcaccacccaggctcccttgcctttggctgggtgcaacttccattttaggtgttggatctgagggggaaaaaaaagagagagggagagagagagaaagaagagcaggaaagatcccgaaaggaggaagaggtggcgaaaaatcaactgccctgctggatttgtctttctcagcaccttggcgaagccttgggtttctttcttaaaggactgatttttagaactccacatttgaggtgtgtggcttttgaagaaaatgtatgtactgacgggaaaaggaggataagcaagtcgaatttttgtcttacggtaaccggagggaattaaaaaacgggagagtctgttatgctgatgagtaacttttaagcaattatttttcttttctactttcagtactttggcgggggagattttggtattttattatatttaaaaaggtaaaatatacaagacctagaaacaaacttctaggtctctttaatacaggaagctgaatagatccagaggggtaagagcaggtttgaaaatttacattttggtgtgttctttgattttatttatttatttttctggattaagctaacatatttctgttttcagagcccaaatcaaaagttggttttttggcatgttgcatgtgggttgggaaagaaatttgtccgtgtcggaacccagttataccgatggttcttcatatgtttaaaactttttttttcttttatcattggatttgtggaagtggaaagttgcagggagctttgcagtgtaaatggtattgtttttcccccagagagtttgaacggcccgtatcggtttcagccctgctgttcctgggtggatccctcttacttttccaggtgcggtgggtgggagcctcattctcctgctagatgtagtctcccttctttggcttataaaagaaaacaaatggaaccatgttaactgaattgccatctccttcttccttctaaactacctttgatagcaaagatttgtggaggtgtttgttaaatctgcaaatacgataacgtttggtttatgtgtttaaagggataaggaaattctaatcatgctttttatttcacctgagtaaagtggcaacatacctgaaaatattttcagctttttgcactctgaaagggccaagggtggaataaaattaggtttagaaaaaccatttatacaaagtttagtgtttaaaatacatttcagaaaacaagggagatttttatttttaaaccaacctgaaagttgttttttggagttgaatttattgtttagttaatttaccatgaaatctgaaatctcttagagctgaaggcccatgactgtgctttcatatcttatatttaatcttaagatttgttttgtttttgcaaatacattcttgcaaaagtacggattctagataattatatagccaactcatcagtagctgaaaaactagggtattctcttctctttttgaaaatgtgaatccgcctgaaaattatagatgctgtcctaattgtaacaagatgggctttagtgtgtaagctgctcattagctttaaactggtatggatctttaataatctgatttcgttctcccctcacccccctgccacaaatttttttaagactagacttccttgaatttcttttctagaatgagggtatttcttgaaagacgatttcatccttgtgaagttgtggcttcaggaggaaacagaactttgttcctccttcaaatacaacctaggcaaaggctgcaggaaatttttgatgtctgaatctcataattataacaagtacagttaaaaagaaagaaaaaatacaatgtgtataggctgttgaactgtagttcttgtttaatattttccaaattttctttcaaatgttctctctgccttgactccagcctggggaggtttcttggatctttagagtgttggtcatgttgcttccagagtgtctgtttcccactcaacctttagggggagggatgagggaatctgaaggaggagtacaaaggcagtttgaaaataggttctggatgactgagtggtggtgatttgggtctagctttaaatagtgggctttgtgtagctgaagtgagcatcctagttaacctagtgtccaggactatttccacgaactaagggttgttttgactggtgtgtagtacagagcctttggggtgataagatggaag

SEQ ID NO: 65409 - DNA, 1050 bp, Homo sapiens
aaattgagactattggtgatattaacaaaaagaaaagcactaagtaattacaatccagccttaggtttatgaagtagctgctctccagggatgaatgagataggatggatgcaaataaattaagcatagatcactatcaattggaataacaaaatgattagctttgtataatttatctccttctattttggtaccctgttagtaactgccaaggccctcattcccccctacctccccacaccttgtttttagtgtattctaagcattttgcataaactattaatttcccaccactggtttttttgtttgttttgttttttaaggaatttgaccctcagagaagctgaggtttggtgaaaatctcactgcctgtaaatggttgaggccaggattaaccctggtctgactaactacaaagtccatggacttaaccactaatatactgccattctccagagagaatggaaacaacagctcgaactaaaacgagcccttgctagaggcaggagtgtttcatcttggcacaggggcagtactcacttaaatttccaactccctccaactccccactacccttgttgggataatgtatgcaaaagatctattttccatagagcccatggggagctggatgtgctagaatggatattattttaatctttagaacgagaatctttccatatccatatgcccaccattgctgtcctaatttcttaaacttcctggaattgtgtcacacgttgtttatcagtaaaatttcttcttccagagaatttgttaggtatgtggtttggaatgataggatatcatcaacttgcagggacaggcttgtaggaggtagttcagatattcttgtctttccctctagactatgagcagcttgggtgtaggtactgtcttatctctgtatctttttagcacctgtcttagtgtttggtacatactgaggtgctcagtaagccttggttaaataaggcatttgatgagaatcagtgagggactgatttgtggggaaggcttgaaaggaagcaaaacaacatagattaatca

SEQ ID NO: 65410 - DNA, 1553 bp, Homo sapiens
agtccaggctggtctcaaacacctgggctcaagccatcctcctacctcggcctcctaaagtgctgggattataggtgtgccccaccacacctggccctcccttatatttttaagcaaagtttctagagataatggaggatttaaaattttagcttttctttaatcctgttcctttcttggcaagtggtacaaagaatagtataaaaagtaaggatctggcctggtgcggtggctcacgcctgtgatcccggcagtttgggaggtccaggtgggtggatcgctgggcaacatggtgaagactcctctttacaaaaaatacaaaaattagctgggcgtggtggcatgtacccgtagtcctagctactggttgcagcaagccgagatcatgccactgccctccagactgggcttgcagagccagatcctatctcaaaaaataataataataaataaataaataataagtatcctagtccgttcatttcataatgaacttcaacactgaaaaccttaaatgttgccattttctaggggagagtatattaagacatcagcagaaaagtactgctttcagccctggttggaggtgaatggtttctgtgcttgttaataaaaacgttaagagcttgggatgatagttttgaacatcagtgtttcaaagaaagtatgtttggatatcagtgtattttttaaatcactgttttagccacaaaactttagattttgttcatgtattgggaagcttatgagtttaagaaccgaaattagttttcttgggtaatttaaaaggtattaacaaggaacttgcctacaggagtgaactgtaggtaataaggatgtgaataagtacaaatattctttcatgttctcttccctcaaagaagggttaaatgacacacaaagctgaagtagggattgctctgcctaaattatgcagctgcctccaaggtttccaatagagcattgatgtagcctggcagggagattgtaagaaggcaagaacaactgttctggttagaactaatgagggggaaattagggtatggattgatttgtatttaattgtttaatgtatttttcggaagtaatttttttccctaattctacttggaattgcatgttattattaaatattaagcattgagaatggggcctgaatttaccactttattcagggatcgtgttccctgtttttagggccacttcttctccagtgagcccttcagtttgattggtgtggtgtggacaatttagatcaggcatatagtgggggaattataaagaggcaaagaattttcttatctttttttttttttttgagatggagtcttgctctgttgtccaggctggagtgcagtggcacgatctcagctcactgcaacctccgcctcccggtttcaagcgattctcctgcctcagcctcccaagtagctgggactacaggtgcgcgccaccacgccctgctaattttttgtatatttagtagggatgggttttaccatttttgccaggttggtctcaaactcctgacttcatgatccgcctgccttggc

SEQ ID NO: 65411 - DNA, 1073 bp, Homo sapiens
tttatttcctgctttgttggaatgggggaagttctgtaacctcattgctgttctgctctctattgactactttgttaactggggcacagttggcctcttggatgtctaccgtgctgaaggtcagccaaataggcaggtaagactacctaggcctcttcataggcctaactaagatcacagttggaaaaaaaaaagtatagaaaaagaaaagaaagttgttttttttttctaaaatttaactttttgtattcattgaagaaggaagtaaaacatctccattcaaaagaaatttgagagtctgtttatgccatacactgaagtacaacaataaacaaaatagacctactgtttgttctcaaagagcttacattctagttgtgagagacaaataataagcgagtaaatatgtagtatgtcagagtgtggtaatattattgagaaaaaagtaaagtagaatgagtagtatggaggaaagaacgtctcagggtgggggtgaggttattttatatagagtggtcagggagggtctcatgtgtaaggtatgtttgagagagaccaagagaaatggaggatggagtcatgtagatatgaggagtaggaagtgcaaaggccctgaggctggttattgccaatgaacaaaagagattgaggggagggaaggagaagtaagagacctgtccagagaggaccaatgggaatgtattttgggggaaggggaataatgtagggtcttgttgtatactatattgtacaaagaaaaattatctccacttcaaaccccagagacaacggctgttaccgaatttttgtgtctttcttgtaacttgaggtagcacctgacccaacctccatatttctcccattgtggaatctccatgaaagtatagttagcagataatttgcatagtagcagattttgcataggttgattacctttgtcttagagaatgataataaggcagctacttagaataagctgatatgtttttgggaagtgggatcaaaatttttctttttcttttttttttttcttttttgatacaaggtctgtctcggcagtgttaacaatctca

SEQ ID NO: 65412 - DNA, 1027 bp, Homo sapiens
ttgccccacttgtctgctgcttctccttttgctcatttgaccaaaaagctcctgtttccccatgccctgattgttgagaattcatggctttgaggacccctttataggtcaccatatccgtatttctgtcttgcacattgggagagatgattatccctgaaactaactttccttatgtttgtttaggcattagaggttattaaagcacatcctgagccactttacctagttgactttggagttgaggaagaagcaccaactatttagtgatttgatgttccatgcatatacgaaagtaaaaggatatttgattgaatacctatgtcttgaatcacacactgttactttccctcttaagatttctggtttagctggtctgtccctcagtgagagtctctgtctcgttctctctctctctctctgtctcgctctgtctcctctctctctctccctctccctctttctctctctttctctcacccgtctcctcctctctctttggagtttttagccctggctcttaacctggttaccctctgttctttcctttaattatgcttatctggttgtcatctggttacttaatattagggatgccctcaaccaagaaactttttttcttcccatctcctcctttgttcaggtaactgtatcgtcttgcatgggaaataatccaggcaatcagagattacccaaaattttgaaattgttttaaacaactggtttatatgtattacttcatcatatatagatggtgtgagatgtttgtggttgtcttgagagttttttgagatagagctttgctctgtcatccaggctggagtgcagtgacatgatcataatttattgcagccttgacttcccaggctcaaatgatcctcccatctcagcctccatcacatctggctactttttgtgttttttgtagagacatggtctctatatgttgcccaggctggtctcgaactcctgggctcaagtgatcctcctcctttggcctcccaaagtgcagtaattacaggcatga

SEQ ID NO: 65413 - DNA, 1093 bp, Homo sapiens
aaaaatataaaaattagccgggcgtggtggtgggtacttgtagttccatatactcaggaggccgaggcaggagaatggcttgaaccctggaggcggaggttgcattgagattgcactattgcattccagcctgggcaacagagtgagactccgtctcaaaaaacaaaacaattttatttttggttttgttttaaatgtacctttattgtttgactttgggatctgggagagagtatgtcttttaatgccattcttctttcttgagtcttcggtgacacatgtttacttgtgggaatatttcactttttagttcttttaaagaccttttgctattcgcttgctcttactcaaaccagaagttaaagtggcttgcataagtgtcagaggtaaccacttggatccagagtttctggttctctctctgttgtcaagtggtttagaattatctagggtctttaatggtagatttaagactttggagttcttttgggatagaatatgcaaccaggttttgaaaatttggcatagctctttgttccttgaaggccatctaagatgttttaaacataattgtgttctccaatctgcagtgtacagagggatatcctacaatgtagcaactcgggattccagagaagatggtgctggcaagtgagacagttcttccttctaggttctaagtctgcagtacaggagttaggactgtgccattccagccatccttatatttagattcatgctttcaaagagcctctaatctagactgaataatgatctgagctgtctggtgagcagtaaaactggcccaaataatgtattttataaccagtgcccttttagcaagaaagtcagtgggttgttagggataggccactacagtggttcacaacaggccataagagtctatgagggtttatttatttatttatttatttatttatttatttattttgagatggagtcttactctgttgcctaggctggagtgcagtggcgtgatcttggctcgctgcaacctccgcctcccaggttcaagtgattctcgtgccttagcctcctgagtagctgggattaaggcatgcgccaccatacc

SEQ ID NO: 65414 - DNA, 1865 bp, Homo sapiens
caccatgcccagcctatgagggtttttttttttttttaagacatgaattcccagacttccctgtagaaactgatgtagaggggggatttaattttttcaaaaagctccctaggtgattctgatcattcacgtttgaggatcacaaaacctgaatatttgaattaagcttacatgtatatgttatttctcaggtggatggttatttagttaaggtgagaagtagagccaggcacggtggcctgtgcctttggtctcagctacttaggaagctaaggagagacttgagcccaggagtttgacaccagctttggcaatatagggagaccccgtctcgaaaaaaaaaaaaaacaacacacacacacacacacacaaaacaagagaagtacagaagatggtttattgtagtagacatgacgagaaggtcgttaatttgaagtgaagtgatttacctctgtgtcctgtattgttttggaattaaagatgttacctcttgatttgggggttatgccaacacttagcatggtatggaggactcgcctattgggaggaagggaaaactttagactgtatctgtggttttaaattgtggaacaaattcaggagaggatgttagcattgaaatttagctggacaatttgtttaaaactggacaggaagggccaatgttacttcctgtctgaaaaggaagcgctggcttccttcccttcctccttggttaactctggccaacttggaatatgggtgggggaggggctggttatgttagtaatcgtgttaccactaatgttcgtgtatagccgcttaaggtttactcttttccttacttgaaacatgtagatgggtgctgtgtgtgctcctgtttccttgttcttatatgggagccctgtactaggtttgagtttagtctgggaagcctaatctctcagacgttacttttacattcaaccttatatacacctcccttgtattttctgacatttgaaaatacaccaaagagttggagggaagaaactgaaactcatttgacacggagcggggtaagttgtggaaaggagaacataattgggcagaggggagtggatgacagaggtttcttatttttgaattgagccaagaaagcattccttctaagtggggccagttggcactgttactgctattttagttcaggcttctccttcctactgaccagtcaattgtattaagtgtttgatgtgagtttgaactgaggtctcaggaggggagggagcgagggagggtggtggtggaaacagctggtgccttcatcaagctatctcaattactcttcagagtgtttgggggtgggggttggtggcacaggaattagatgtgtgttagcagagtctcagcaactcttatgtagtgggtttgaattctcaggcactcttaatgctatgtgggatgttggctagttggaatgtagctaaacctttcccagtcacattcttctgcctcgcctccctgtaattctttcagcattgggcctgctttggagaaagaggggtgtgggaagttagacagcaaaacagattcatccttcctacccattgagtattcagcttaggtcttgggccctccagaggctttcttcatatccattcattattcctttagttgggctttctaaatatgtctgcaaagagtctgagatacaattagaactgggacctctggtgaagttaagttgaattgtaatcagttggctatacttgtcgtcttccctccctcacaccccaggattactgtatttctgagtcagcactccttttctatctcacctgctcaatttgatgcagagaacttgccaagcatccttttggattagcagcattgatgtgggtgtg

SEQ ID NO: 65415 - DNA, 1865 bp, Homo sapiens; identical to SEQ ID NO: 65414

SEQ ID NO: 65416 - DNA, 1865 bp, Homo sapiens; identical to SEQ ID NO: 65414

SEQ ID NO: 65417 - DNA, 1745 bp, Homo sapiens
catcagtagctttaaaatccctaatgcagtgcctccaaagtgaagaaacttgccaagtaggaatcttaaaaattccctcacccccttcaaacttttagatccacacacagtctttctgctgattcttaaaggcctgagctttgtcctacgtagtgttggcttggggcagagaggagggttgttttccctgaacatgataaggagctgagcagggcaaagtgggggctctggcccgtgattggtagacaggatgccctggaatgcagttggcctgcagcccagaatccagcactttgtatttgtttgtttctgggagactgtggtctggtgctactgtgacaggaagtgagaaagctgggagtgggggaacagagagggtcgatgtctttgtggttctcctgtgaaatctctttgtccctggagagcagctctgctacagagctctgctgagaagagagcagcctttgtgtgtctaatgggtctcggagcatctagctactccgagggattagagagtgtgaattctgactgtggccttttgcgttttagcacttaagttatataaatggtcctgatctcttagcactgggaagcttactgagttttgtgtgtgctgctattctttgtggatctctaggatttaattaagaaaggaattctagaaggaaataaatgttaagtaatgttcatttgctgtatatgttgcaggtaccttgttgggtttaaaagggacagaaggaaacaggtaatgctgaggtcctttacattttatatctcatccttccaattggcaccctactgcatacagatcaggagaaacctacccgcttagtattaagagttactagcaattctctaatgtttgatcataactagagaatggttggtagtttcctgggatttttcttccctatgtctagactgaaatagcacctgtaataccctctctcttttctgccctcttttctctcttgttttgtgttttccctgccttccattccagctgtgaaacaggcatcttttctcactttgtggattggatggctgagtccttaactttgagccaagctggctggttcctgagcacacacacaaacccgcctttgattgtccaggaggacagctgccctagaggcagattgctaacataccactagaacaatccttcttctctgttcttatgctggctagcacaatctttactgcctctagttccttctgtttcccaccccatctctgatctttgcttttggcttagtgagatgtcacattaaaaatgagagtagggattggattttttttcttgtggtagggttgagggggtgatcagagaatgtgacatgtagccagctttctagagcaggcttgccagtggtaaggtaggtaatttttacagagtagtgcctcttttgttcttagcacctttcctcctgagtactaggttcttataaaagggaaggtaaatctgaagtaggctgcaagctactcttcccaaattgagtaaggttttgttctttaaagtgaagataagacccaaaagtctagctggctccattccaccttctcttgcctccttcccctctccgtaaaaaaaatgtcaactttgggttaacttcttaattggaactagaatgactttttttttttttttgagacagggtcttactctgtcactgaggctggagtacagtggcacaatcttggctgactgcagcctggaaccaccaggctcaagtgatcctccc

SEQ ID NO: 65418 - DNA, 1745 bp, Homo sapiens; identical to SEQ ID NO: 65417

SEQ ID NO: 65419 - DNA, 1745 bp, Homo sapiens; identical to SEQ ID NO: 65417

SEQ ID NO: 65420 - DNA, 1506 bp, Homo sapiens
agtgagccgagatgacggcattgcatctgggcgacagagcaagactccatctcaaaaacaaacaaacaaacaaaaaaaaacgtggaacatcaagtggaggtagggcggggtacttagactttggactctggtataagcactgataagaagccatagaaaggccgggctcacgcctgtaatcccagcactttggaaggccgcggcgggtggatcacgaggtcaggagatcgagaccatcctggctaacacggtgaaaccccgtctctactaaaaatacaaaaaattagccgggcgtgttggcgggcgcctgtggtcccagctactggggaggctgaggcaggagaatgctgtgaacccgggaggcggagcttgcagtgagccgagatcgcgccactgcactccatcctgggtgacagagcgagactccatctcaaaataaaaaaaaagccatagaaaatcttgacaaaatatatttctttgatttagaaacaaaatggcaagtttgtttgtggttgaaccggaatatttcttcaaatttggggtcaggtgccagttaaggcaaataaatgccttttaggtatctgaagggcccctttctggcttgaatgttatgtaatacagttctgtagtgttacaggtgctatattttgttgattagtattctgcagtaggaggcttggtatgctatttatttatttatttacgtatttatttttgagacagggtcttactctgtcgcccaggtggcaatgtagtgattgtggctcactgtggtctggacctcctagactcaagcaattctcccacctcagcctcctgagtagctgggactacagtgtgcaccaccatgcccagttaatttttgtaatttttttgtagaggtggggttttgccatgttgcccaggctgatctttaaactcctgggctcaagtgatctgcccaccttggcctcccaaagtgctgggattacaggtgtgagccactttgcccagcccagtgtgcttttgaaaaaagccctttgcattccctagaatggctgggcacagtggctcatgccagtaatccctgcactttgggaggccaaggcaagaggattgcttgagcccacgaggtccatgctgtagtgagctgtgatcacaccactgcactctagccagggcgacaagagctagatcctgtctcaaaaaaaaaaaaaaaaaattccctagaacgacatggaaatggagttttgcctgtcattgtttttagatggagagcataaatttgtgacactcgttttgttgttgttgtttttgagacagagtcttactctgtcatccaggctggagtgcagtggcacaatctcggcacactgaaacttttgtctcttgagttcaagtgattctcctgcctcagcctcctgaatagctgggattacaggtgtgtgccaacatgcccggctaatttttttgtattttaagtagagatggggtttcaccatgttgaccaggctggtttcgaactcc

SEQ ID NO: 65421 - DNA, 1506 bp, Homo sapiens; identical to SEQ ID NO: 65420

SEQ ID NO: 65422 - DNA, 1506 bp, Homo sapiens; identical to SEQ ID NO: 65420

SEQ ID NO: 65423 - DNA, 1130 bp, Homo sapiens
cttatacttaaacccaggcagataacaaagcctatacacttaacctcttaagaatcataattccaaattgtatttctttagtcagtttacagtagaagaaatcattccagggactgtgctattggtaggtgatttttttgtgtgtgtgtgtgtgtggggtactgagtctagctctgtcacccatgctggagtgcagcggcatgatctcggctcactgcaacctccgcctcccgggttcaagtgattctcctgcctcagcctcctgagtagctgggattacaggtgtgcaccaccaagcctggctaattttttatttttagtagagacggggtttcaccatgttggtcaggccggtctcaaacccctgaccttgtgatccgctcacctcggcctcccaaagtgctgggattacaggcttgagccaccacgcccggccggtaagtgatttttttgttttttggacctcctatctggttagcactgtctagttgtttggtccttctgggtatttgatttaatttaacttcttttggttgggagttcttacagacgagactgagtttttatcattatcattgcttggatgaaggatctttactatggactatggactctgggtaatagcaggaatatctttctagtgtgggtgggatccagtaatgtaggacttaatggcttattgagagtaaaactaggtattctcagaaaatctagtcttaagggggaataacaagtttcactttatgtttcctcaaccccctgacttcaggaattctttgattttttttttttttttttggtgagaggaaatgtagtctatttaaaaatctaagtaagtggaggccggctgccgtggctcacgcctgtaatcccagcactatgggaggctgaggcaggcggatcatgaggtcaggagatcgagaccatcctggctgacacggtgaaaccccgtctccactaaaaatacaaaaaattagcccggtgtggtgtcatgcacctgtaatcccagctattcgggaggctgaggcaggagaatcgcctgaacccaggaggtggaggttgcagtgagctgagattgcaccacagcactccagcctgggccactaagcgagactccatctcaaaaaaat

SEQ ID NO: 65424 - DNA, 1130 bp, Homo sapiens; identical to SEQ ID NO: 65423

SEQ ID NO: 65425 - DNA, 1130 bp, Homo sapiens; identical to SEQ ID NO: 65423

SEQ ID NO: 65426 - DNA, 2747 bp, Homo sapiens
gaagaatcttttttccttaagtctccaagcgatgagaccatttactgtagcctgcctaacagcttcattctttccccactcatacattccttttcctcccattttttttctgttttctcacttctatgtagatattatgggtaactcttgagcctaaaaaaacaaagtagaacccttttctttccctgttttcctgtgatagttgagaagaaagctctcaaaggttgtagaggagaggctctggaccatccatctggtactgactgcacttctatttggacttgacaccatggcatagaaagagaacacaggctttggaatggcatagacctgggtttaaattcaaaatttgctattaactgtgagaccttgggtagtttcttcacccatgagtcttatttgcaataaaacttccttagggttgttgtaaggattgccaagatagtaaatgtaaaacattcagtaatcattagtttcacattccctttctccaaggtaataaattgttaaggcctcaaatacagaatcaagaacttattatgacagatgtgtaatgatgtgatgacttccaggcactagagaagtgtcctttgtcccagaaacactggtataggtgggacgttctagtaaatagattaggagtagggaaaccagcccattcactccttagaacctagttatgtttttgatccagttgatttcatctactagttcacaaaatagtttgaggctgagacattacggtgaagtaatgtaattggaagtgttaaaccaacttttgaaacaacttaatacctgacatttgtatataacatacattgtctcacctaatcctcacaacaactctgagttagaccgggctaatttcctaactcctgggaagcagcaattttttttctttttccccaatttggttcctggaaacggggcaaatggatttggcatcttacaagtgagaatatgacagggtttactgccattgttgggtagtagtagagccagaactgggaccagtcttcttgagttgtgttctatcccatatggcctctgcttctgtcctttttcaggcagaatatctccccatgcttttagacctaggaatctgatctttttgtgtaattgtgctgtcttcttttccaaattagagccaggtggtcagctttaaagctgtgaagatggtggaagctaatgtttctccagatactgctttctgacctagagccctgagtatttttcctatctcccttcctaaccttcttcactgaatttaagttgcagggccatttatggccatctatacactttctctttgcagcagggaatgtcactgtatcccccgtggtagcagtaatttgggcttttattagcaaagaagattatagggtggatgctgctggagtggtaattgcacttcagaccctgttgaaattcagtaactggaagaatctctttttgagctcagagtcctcttggtgtggaaggttcataggtcattgtacatagtggataagggcaagtacttaagaaatggagatgaaaggggagcacctttttttttaaaataagggtgcttattcaagaaagacctttgagtggcctgttggaatgtagggtgggaatatgagaaagtggcaatgggttttggactgaaaggaagaagagttgataggcgattatgggaacttcgagctggggtaggaggaatttagggaagggcaaccacgttctttaaacttagggactggattgattcaggagtttattggacacttacttatcagttcctttgggtactcttgcttgctgacttctgcatacactctaagccaaacaggcccgggcatttgtgcttggtggggctctggggagcgtgggaaagggaactgaagcaaaaggctcagcctaggctagtccccacatgtcttccccacacaacttttgcattggtttctcaatgtctttgtgggcatgctgggactgggctttgaggtttctgccttaggggtgggaagggagggggaagggcattccaacagcagtttttttctttttccccaatttggttgctggaaacagggtaaatggatttttatacatattataacctgttcctggttatatatggaaatacaaatagaggagctctcacttgacagtagaatccaggttttaatgaaaatgacatccaaggcctaggtatctgaacacaacaaggtctaaagggcacttgtcacattaagcaattccaagtcatattttaaattacttcctttcattcctaatattgccccttgctcttcttgtttttatgtattgggtatattttattttcctctcattcccatttttccttcaaatatttctgcagctctctccttcctgcttcctccttgctgtggtggctgggatgcttcttccatgattttttgaatctagactgggctgttctctgtgttaaaccaatcagttgcgaccttctcttaacaggtgtgtatggaaatatgtttattaagaaggaaaaatcttactttttaagaaatatgtatttttattcctttcatgtcatagcagaaaaaaatctttttaaataccttttttctttatgggttggtgagagggtgggaattggggagaatatttatttcaaaacctgtctttcaacattgtatattttggactggcataaagtctttcatagctataagagagaaaaaaacccattgagtccaacagagtatcactaatgc

SEQ ID NO: 65427 - DNA, 1354 bp, Homo sapiens
cggcctcccaaagtgctgggattacaggtgtaagccacagtgcccggccttttcatttcttaattggcatttagtttagcatagtaattttttttttttaatttgctgccacttcagcagttttagtgtttagatgtgggagaggttaagtaagatctgtattgccctattatctctaaaagtggcttgtccctgcaggatagtgaatgcttgtctgtaccattggagttacacatttcattgagttgataccagcagatttttttcagggaaaaataatccaatctcataactacagcacctcaccacattctccctctcctaacagtgtagagacttagatttaattgcacctttcctttcaatagttatttctggtgggatgttgaagaaagctagtgggcaaaggattccgcttgaacagacactggtgatgggctcccaggcttggcggtggcttgctttctgcactgcagtaaaaccacgagagggcatctttggctctgggattaataattcatctgtcttctctgacctgtgaccttttctctcctttctcttaccctttcccggtagtgtgaagtgagggggtctctctccctccttctccttcctctgtgattcaccttcctttttaccctgccctgcggcggctccgccccttaccttcatggacgactcagaggtggagtcgaccgccagcatcttggcctctgtgaaggaacaagaggcccagtttgagaagctgacccgggcgctggaggaggaacggcgccacgtctcggcgcagctggaacgcgtccgggtctcaccacaagatgccaacccactcatggccaacggcacactcacccgccggcatcaggtaacccctctctccatcagacgtgcaggtaggactttggcatggtcacagagaggctatgatcctttttgggaagctactctccttttggtgatgggctgtccagtgcccgttcttccagggatttttttccaggggtgttaaatgctgataagagacaaggaatattgctgctggactgagctgggtgcagttactatctctagaagcatccatctgacttcctgttttgctggagtaggttttttggggtgggctacaattctagtaatggtagatagtttagtttgcagctgtactcaagttacttttcttttctgatttttttttcttggtatcaaaaaatcaggaaagtaaatgcccacttaatggttgggcatcttgtgctctcagccctagttcagtctccctgagggaacagtctgtacccaggtgtggcagtatccataaattgtgtactcctgctccatattgtccttgtgtgctctt

SEQ ID NO: 65428 - DNA, 1021 bp, Homo sapiens
gctgcctggaatgggagtttccagtggtagtactgcatgaagattcatgagactataaagctctttggaaaccccccaacttagcccttccaactttccttacatttttatggctttccaaaaaggttgcatgtaagggaaattatctaggtctgtgctgtttattcagcaaatagtttttgagcacctgttatgtgccaggcactgttcaaggcactagactaaactaaacttatcccaaaaaaccctctgccctcgtggagtttacgttcttatgttccagagaccctgtctgccagagttccaggcctgattttcaattttgaggaaagtgctaagactaaagagtgaatggttcttttatgagtactgacacaaggactccaggccacacatatcttcttgaaagcccttttcctgtttgaaaaaaagatcgtttgtatttgatagagcaaaagaaggccacaaaatgaattgtcttcttgtgggctgtgtttcagaacggccggtttgtgggcgatgctgaccttgaaagacagaaattttcagatttgaaactcaacggaccccaggtaattctttggctcaagacctgggttgcttcattcatattttcttatttccccagcctataagagcatatttgtgtcttgtaaggtgcctggcacattgtacatactcgtcaattagtttcttttatttacgaaaacaaagaagtggagctccaaagtatatatgcagttttgttttggaatgaattttaatgaccattgatctttatgactattcctcctccccactgccaccccatttgatccctaagtactgcgtttcttttctagagacagtaggcttctactttgcagcaaaaaaccctacctaaaatctggctggtcttgagccttttagacggtatctgaagagtaacataaagccagtcaaaagatggctcttactgggattttcaggtttgtcttaaaagttctttatttttggccaggcatggtggctcatgcctgta

SEQ ID NO: 65429 - DNA, 1048 bp, Homo sapiens
gactccatctcaaaaaaaaaaaaagaatttaattgctcacttccttaattagtttttctttttcttgtttcctacttgcaggtcaagaaagtagtgaagactgtgacaacacggacagtacagccagtcgctatgggaccagacgggttgcctgtggatgcttcatcagtttctaacaactatatccagactttgggtcgtgatttccgcaagaatggcaatgggggacctggtccctatgtggggcaagctggcactgctacccttcctaggaacttccactaccctcctgatggttatagtcgccactatgaagatggttatccaggtggcagtgataactatggcagtctgtcccgggtgacccgcattgaggagcggtataggcccagcatggaaggctaccgggcacctagtagacaggatgtgtatgggccccaaccccaggttcgggtaggtgggagcagcgtggatctgcatcgctttcatccagagccttatgggctagaggatgaccagcgtagtatgggctatgatgacctggattatggtatgatgtctgattatggcactgcccgtcggactgggacaccctctgaccctcgtcggcgcctcaggtaggcaagaataggggaagagaaaagggtctttccaagaccagggacaaggggtagcttttccttcaacttctaggggctttttgggatcagagatactcgtggcctcctcccctctgcttttttttggggtgaaaagctaccctgtttttcccttttctgacttggcttagtattgacttgctatatatatataatataaatatatatataattttttaaatgaaaataatataattttattttttatttttttgagacagagtcttgctctttcacccatgctggagtacaggggtgccatcttggctcactgccacctccgcctcctgggttcaagtgattctcatgcctcagcctccctagtagttgggactacaggcaagcaccatcacgcctggctaatttttatatttttagtagagatgggg

SEQ ID NO: 65430 - DNA, 1171 bp, Homo sapiens
tagttttaattaaattgcaggtgtttttaaaattattaccttttatttttactaacccattgaggaaaattgatcagtatattattcatgcaaaggagagataagatgagcacactgaaactccagttaatcctcctttgcagatgagggtaatgggaatgtccaggaagctagccataatgacttgatgtattctcttggttcttccaaaacttctcaggagctatgaagacatgattggtgaggaggtgccatcggatcaatactactgggctcctttggcccagcatgagcgaggaagtttagcaagcttggatagcctgcgcaaaggagggcctccacctcctaattggagacagccagagctgccagaggtgatcgccatgcttggattccgcttggatgctgtcaagtccaatgcagctgcatacctgcaacacttatgctaccgcaatgacaaggtgaagactgacgtgcggaagctcaagggcatcccagtactggtgggattgttagaccatcccaaaaaggaagtgcaccttggagcctgtggagctctcaagaatatctcttttggacgtgaccaggataacaagattgccataaaaaactgtgatggtgtgcctgcccttgtgcgattgcttcgaaaggctcgtgatatggaccttactgaagttattaccggtgagttctaggcctaaggaaaattgctaagtcagtgttactctctagtgatgttgagaactagagggatttccagaccttttacttttgatgaaaggttgtgaactggtggctgtgggtcaaatccatctcacagatttgtttggatcacacagcattattgaaattttaaagaactggttgctgatgtttaaaattcagaagatttcacttaaaattccagattcttggcttctattaaaaacgtggaagagttgttaacaatggatctcttttcttccttagcagtatttggtctgaactgattggagcatgtgctctctaatttacactaatctccaacacattctattatctgaccaactacagctgtttaggaagttgtttcccaaacatggagctgtcaactgctattttttcacatgcttgtaatttcttttaattatcttcctctcttgactcaccggcttgacccatatagacattt

SEQ ID NO: 65431 - DNA, 2004 bp, Homo sapiens
caagtagctgggactacaggtgcccgccaccacgcccggctaattttttgtatttttagtgttagccaggatggtcttgatctcccaaccttgtgatccgcccgccttggcctcccaaattgctgggattacaggcgtgagccaccacacccagcctgagcgttgcttatagttaaacattgtttgtttcatgatctgtatgtttattttgagctataatgtagaatatgtttcttggtgagggtcgcaaacaaagcttgaatattactataaggtatttggtcactggggaagactgagaagtgatacgatagggggattctctttgacgttcttcagacatattgtcttgaatgctcaagagccatctgatgaattgtctcttccaggaaccctgtggaatctttcatcccatgactcaatcaaaatggagattgtggaccatgcactgcatgccttgacagatgaagtgatcattcctcattctggttgggagcgggaacctaatgaagactgtaagccacgccacattgagtgggaatcggtgctcaccaacacagctggctgccttaggtaacagtagggactttgagaatatgaagatgaatttttgaggactgacttaaatttcctaaaaaaaaaaaaaaattaaaattctttagcctattctttagcctccattcctatctgtattgcatactgtaactccaacctttctatctttgttgctattctctcatgtataccacatgtacctatatcagttttcttgctgttccccacacatcctcttcacttttatgcctctttgactttgttcatctactttggtaagcttttgttcagcatctaccacatgtaaggtggtctagtcctggacttgtgtgtgtctatgtccttgccctagttatttgtatttcaagtcaggctgtgataaattcagcaaaaggggtacagagtactaggaggttagggcatgggtgaggaaggtctgttctttctgtgatgcctttctcttcttatttatctttttgtggttaaactcaagtgcctttattttattaaagttttcctgaattctttttatatcctataaatgctgctatataatctttctctctttggaatacacctctgtgtgctgtgttccattctacatatgtattatatacttccatacgagaagtatatattccatcttgaattactgcatctggtacatatcattaatccctaccccacagtgatataaacattcagaaggcagggactgttaatcaactttctctcaactgcagtaccttgcttataataggtatttactattacagtgagtagaaaaacatattcaggaatcttgtaggtgttgagggatatttaagggaggatttctggatttgagtcatcttgaagcttctggtttcccctcaggaatgtaagctcagagaggagtgaagctcgccggaaacttcgggaatgtgatggtttagttgatgccctcattttcattgttcaggctgagattgggcagaaggattcagacagcaaggtaagtgctgtcttacctttaatggctgagtgaatttcattcaccacaactatgaagtatctgtaggtcagagacctatcatctcaggctttcaagtaacattaaatatttatactgtcccctaccccttatttttgagacagagtcttgctctgttgcccagcctggggtgcagtgatgtgatctcagctcactgcaacttctgcttcctgggttcaagcgattctcatgcctcagcctcccaagtagatgggattacaggcgtgtgccaccacacccagctaatttttgtatttttagtagagacggggtttcaccatgttggcctggctggtctcaaactcttgacctcacgtgatccccctgcctcagcctcccaaagcattgggattacaggcgtgagccactgtgcccagccaagcccttactccttaaagtgggtattcaacttaaaa

SEQ ID NO: 65432 - DNA, 1061 bp, Homo sapiens
gagcacttaagaggcatcctgagaagttatggattgggttatgcatttgaagatcaacattttaatacctgagtcatggaaacctgtacttgtggagaaatcacaatagacattcttttttctcattggcccttttatgtccctaagcttgtagagaactgtgtttgccttcttcggaacttatcatatcaagttcaccgggagatcccacaggcagagcgttaccaagaggcagctcccaatgttgccaacaatactgggccacatgctgccagttgctttggggccaagaagggcaaaggtgagtcttggttcctgtttcttagtctttaatgtgggatagggaaaggaaggaacactttagcttaaggtacaaaatacttggcaacagtatgggagtctgcctggttatggatgtctttttggtttgctgctttccctgtgttgtgtgcttcattcaaggtgtggtgatgggatggtggttgtgatgtgttggtggtggtggtggtggtggtggtggtggtatcaatgagtggggcagtggaaaatgagaactcaactaatctgggaccttcttccccatacgtcctttgcattttctgtgtttttcttttcttctctgtgcttccctgcttatttgcccatgattctgctgacatctttctcctgcatttttcttatttcatttctcttctctgctttctaccttgggtgatgcactggaagatgagtggttctccagaggtgagtggagtcttttaaggtgcttatctacttctaatttgcatgttttgattttagcttccctagtatgtccttgcctaacctttccctgtctatgcatgtaggaaagttcagttgaggaagacactgaaacaagtttagctctttggagctaatagctcacggcatgctgtttctgggcagcagtccccattatcagaactcaggacaatagcatcaacagtggtcatcctcatcttacctatctgctgcctgttttctatccttgtttctgaatagtcccctgctggaacaagttgccctcacctgcccctttt

SEQ ID NO: 65433 - DNA, 2720 bp, Homo sapiens
tttagggaacctgatggtatagaagcataaatccatcaactgagagtactaaggctggactccagccagctagagcctggtttattggtactgattagcaccctctgcttctatttctcttttgtgcaggctatgagctcttatttcagccagaggtggttcggatatacatctcacttcttaaggagagcaagactcctgccatcctagaagcctcagctggagctatccagaacttgtgtgctgggcgctggacggtaccttttagaaaagggatttggagatgggaaaacttagataactagtttgctgccatttgtaatttgttccacccctttctatttgctattctagtatggtcgatacatccgctctgctctgcgtcaagagaaggctctttctgccatagctgacctcctgactaatgaacatgaacgggtggtgaaagctgcatctggagcactgagaaacctggctgtggatgctcgcaacaaagaattaattggtgaggagttgaatgctaactgttacctcaaaatttagtacagtgtttgtagtccagcaggtgcctaataatttattgaatttattgaaatgactgaagggaaggaccctcccccgcttcatagtttatgaatgcgagagttggtaagggttttagtttaatggttcttggaaagaaaacaagtgacaactcttcaaaaataaaataataattgctattatttattgagcacttactttgttactaagcgttgttaaacacttctgtgtttccatttaatcctcaccactttacaaaggtccatttttttaaataggataaggaaataactcatggaagttaagtaaattgcccagagttaatgtagctagttagtagcagaacccagttatttatttatattttaaattcataataactcttctattaaattattataatattcaagatattttcattagagtatctgaaaggactgtgtagcttatttaatatacagtatttacactttcaatgtggttgaagtagaaaagaaataaaggaataggtaggacagtaaatccatggctatttcaggtccttagcccttttgatatgataatcctataggataatgaagttgattcatgtggacagcacctacacttgatatgattaatgcagttaagtataatgtaaggctcttcatgacctgacttgatcttttctccctgcatacattctttcttactaggtaaacatgctattcctaacttggtaaagaatctgccaggaggacagcagaactcctcttggaatttctctgaggacactgtcatctctattttgaacactatcaacgaggttatcgctgagaacttggaggctgccaaaaagcttcgagagacacagggtattgagaagctggtgttgatcaacaaatcagggtgagcttaccacctaaaattacagtcaaaagaatttgagtgagtggagagttgttttcctcttttggttactaagaaaggaaatttccccttatttacgtgtaatgtgtgaagagctattgctctattatctgtcttaatgttgatccataaattgataatagattcatgtcaaacttttcttgtgtcgctatttgggatagaatacaggatttggtaaaaatttgatttaacccattttggcatttatattcttttttgtttgtttgaggcagagtctcgctctgtcacccaggctggagtgcagtggcgcagtctctgcaacctccacctcccgggttcaagtgattctcctggctcagcctcctgagtagctgggactacaggtgcgtgccaccatgcccagctaattttttgtacttttagtggagatggggtttcaccgtgttagccaagatggtctccatctcctgacctcaggtgatccacctgcctcagcctcccaaagtgctgggattacaggcaggagccactgtgccctgcccctggcatttatattcttatgttattagaggatatagggtctaagcttttttcctgattttatatccaaattccgtatggtgttactttcctccaaaggaaccgctcagaaaaagaagttcgagcagcagcacttgtattacagacaatctggggatataaggaactgcggaagccactggaaaaagaaggatggaagaaatcagactttcaggtatagtaacttttgagaccaagacttttactttttttttcttggtcccaggataatgcttctgttttctttcgtttcttccatttcaccatcatgctaaacctattttttttttctttttcggagacagagtctcactctgttgcccaggctagagtgaagtggcgcaatctcggctcactgcaacctctgcctcccgggttcaagtgattcttgtgcctcagcctccccagtagctgggactacaggcacatgccaccatgcccagctaattttttatatttttagcagagatgaggtttcaccatgttggccaggttaatcttgaactctgagcttaggcaacctgcctcggcctcccaaagtgctaggattacaggcatgagccatcacacctggcctcatgttaaatctatttttgacccatatttcttaattaggaattatttggccaggtgtggtggctcacacctgtaattccaacactttgggaggctgaggcaggtggattgcctgagcctaggagtgtgag

SEQ ID NO: 65434 - DNA, 3711 bp, Homo sapiens
cttttcagacaaacctcttgtttagctttattatgtcatattctgggtattttatacatattgtcttccatcttagattcaagttctttttttgagacagagtctcactcgttcacctgggctggagtgcagtggcgtgattctcatacctcagcctcccgagtagctgggactacaagtgtacaccatcacacctggcttattcttatatttttagtagagatggggtttcaccatgttggctaggctgatcttgaactcctggccttaagtgatctgcccgtctcagcttcccaaagtgctgggattacaggcatgagccaccacggtcagccagattcaagttctttaagtcggggaccatcagactttaatgcctttgtggagcatttgacaagctcagttcccaacagtgatgcctaattacacctatctgtttgatatacgttttacactagaggggaatgtcatatttctgtgtacttttttttttttaaccagataacaactattccacaccaaatgagagaggagaccacaatagaacactggatcgatcgggggatctaggcgacatggagccattgaagggaacaacacccttgatggtaaattctctttatatactgctatctgtctaaggctagttctattttgaagcctatgtgttttgtgaaacacaaaaaaaagtacagagaaagatcgcatccttttctggtaggggttttcaggaaaaagtaagagttctgactcatgttgggatttcttgggccgttattctgcagtggtcaaaatgggggaagcatgtctgtaaaagtgttactgatatgactaacactaactgatctactttcaaacattacctttttcctctccctccctgtttatgaatgttttgcccttctcttactattatatcttgttttgtttgagtttacaaattttcagagtttccctagctctggcacacactcatgaggttcctgtctctactcatactaacaaattgcatgtgttcacagcaggacgaggggcaggaatctctggaggaagagttggatgtgttggttttggatgatgaggggggccaagtgtcttacccctccatggtatgtccttcagtcacccccaagattgttcttgaggaaggaggctcctgagtgccagcaacttgtcaatcacgctaatctgatcaggccagagactaagtagtctcagccacatggggctcgaggggttctgcttttgtgattattacctcttacgagtctgggacatgcagctggtgatctgattctccgttatgtgctgctttcctttctccagatttgctcaacttttttggggggggtctccttaatcccaaccccattaacattctctctttctcttttttctccacagcagaagatttagcaccactatctccgttccatctgggcttatatgtacttttattttttggtggtgaaattgactgatgattttcctttttcttcgctggactattgtgccaactgccaggctgcctcctgcccttacagccctaagtggctgccttctttccatcaactcccaacttcttcctgtgaagtttaattgtctcaacgcctccccctcccccattccctccatttttctcccaagaaacctgactcaattatttgcatattttgagaaactgctgcagattagttctttttgccagttttccctggaactcctggccttttgtggaggggagggatggagagaataggaatcttcactagaagccgtgggaagaattggaagttacatgctgtatatgcaatgtccagcagtctgataaactgacgattcttaatcaagatttttttcctgatggggaagggacttttattttcttttagagaggggaaagtgtgagctcttcccttattcctaatggctatttttgaagcaaagaaggccagcaacattggcacatgccacctggcaaaggacccttgagtaagtgaaggtctcctaaaactgggattaagaaaccttgctctcctcatctccaaggcagggaccatcaagaacctacagactccatctcttctgcaagcctcatgccaaccctgggctattgctgctgccccttaaacacaggctgtccttaacccacctctcctgccctgtgatatgtctgctgagttggcctggccatttccaagaggctgtagaaaggggagaatgtcaaggaagacttttggtagagaaggagcagaaagatgtgtttttgggaagaagaagacctctaggaggagctagtaggaatgtacatgaagcaattagtctgaaactggcttccccactcccccgtttctccttttcctatccttataggcctgtcccttgcctctgccctggattggttggcaaactaaaggacttgatgtacataactcctgtcccttttcccttacaaggtggggattgcccctggctttgcctcttctttgtgcctttggcctggggtgcatctcctcccgcccttccatgtgcctttctttgcctctgcagtctcatttctcataattttgcaaattatattttgttgctttcttacctactattggccctaaatagcagaaagaagagaagtgaccgagagaacctcagattcttcattgaggattggtatagccatgatttcagtcatagcaagcttttgctcaacagcatatgggtgggattttgcaaaaatcctattctgatgaatctcaaagtaaggctggtaagagaagtgagtggtgtgactcttactccttaggtgcccagaatttaccatcatctctgaaggagttacagggaagtggtctccccaattctcccctccctccagtattgccccctctcactttagcatatattaattagcaggttgggctagagaaatcagctgctatgcgggttgattattattattatttctaatccttttccttatttgccttctactccccttaatctaatctaaaagctctgttccatgcaactggagttccttatccctctcttccccttcccttatatattgaggctatggggtaggagaaaagtgcacaacccaccaccccctttactcgtgcattaaaatttcttatttacccttttcccccttcccatttcttcccactttcatctaccttttctggcaaaaaggagccttttgctctctgtgaccctaagagcacactgcacagggaaaattgccccatccagacctggctccactcttgatctctcttgtcctcttctgctcttttcctggtgctcttttttctcggtggggtgtgggtaatagaacagccgtgggcttttggggacctttaacttttttttctctcttttgtttataaaaaacactaaacattcaattccagagaaccaaaaatcccaccttcccaccgaacactactaaggggcttgtgttctgctccataccttttctcttttctttctgtcttgttaatgcttttaaaaacaaatgagttttttatataaataaagtttttaaagtgtgtatgtggggggtctgtgtcatttcttcacttcaagctgttatttcttccctgctttgcatctttgttacttccttatgtatcagtgtcctttccagagcaaccagaaggaggttataccaggatttattttgagctcagccccaactctttatcaagc

SEQ ID NO: 65435 - DNA, 1053 bp, Homo sapiens
tttgacaaaactaaccttgaataaggcccactgtaatacgtagctctcttaaatataacacttaggactagaagattagaaactaccaatcccaactacgtaataggaaaatgtaggatcaaaaggcccatgtatataagtactgaccactgggccataatgttgcttctcaggctatatgcagtcctttagtcagaagtcaataggcctatttattaatattttacagaccatattacctggattaccagggactatctttgctgcagagatcaagggttaagatctatgggaagatacttatttttctgaggtccttatgtcctgtcatataattaaagactcaagagaatttatgtgaaatgctttctgtatgcccaaatctttagattaaaattatatagctgctcctgatgatggtcctgtcttgttttattgaactaggacttgggtatgaaaactttcatgggctagtgagaccaggaaatcaactagcttttaaagcttgatttgtgtctaacaattgtagtgttagattagaggttgaagtacaaagccaaaaagctattaagagtttactttccaaagagttttgatagccctgcttgagatgatttttatctaaatagaaaagcctggctgcttgtcagcaacactttatttccctgttatgttcttatcctttggcattgagctagatacaaaccctactcttctctcttccttctggattggtccatttgtttatctcattcaataaatatttgccaagcacctcctatatgctaagcgttgtgtcaaggttaggtttagattagagagtgaaacagatggatcttttctcatagattgcaatccatgagaatcctctatagctaagatctatgatcagacgagatcgtgtgcgttcagggtgatatggccatagacaagatctatgatcttaaaaacacttctctctgtgccatatctaaatacaatgagatgttacacagaatgatgtgtaaaggccctatctcacaagtttcttgacactgatgtactttgtgacag

SEQ ID NO: 65436 - DNA, 1095 bp, Homo sapiens
ttgactagacctagccctgtatatctgagcaagttacataagaattccctgtatgcttgttgaaaatgcagagtcccatgttccatttccaaaaatcgattcagtaggtgggactgaggaatctaaaatcatggtaagtcatccaggttatcctctttttttttgtttttgtttttgtttttttttttgagacggaatttcactcttgtcacccgggctggagtgcaatgccacgatctcagctcagtgcaacctctgcctcccggattaaagcgattctcctgcctcagcctcttgatgagctgggactacaggcacccgccaccacatccagctaatacttgtatttttagtagagacggggtttcaccatgttggccaggctggtcttgaactcctgacctcaggtgatccatccacctaggcctcccaaagtgctgggattacaggcataagccaccatgcctggcccatccaggttattctgatgtatgtggtcagttaactgtgacttaagggactgatctagtgacttgcttaaggttatagcctcaaagtggaacccaggattactggcttcaactccactggcagtaatactagcatggtgaatgtagacaatatgatgtggtgatcaccattttaagagagcattcatagaggaaactttatctcaaaggaatgcattgctttcaatagagtttgagataatggtaagtgataggttggtgtgtggtatctgggtaggagaagcttctcatcctgaaaatcatatgtaggtaatgctcaggttgctgaggcaggaagctagcccttaatttggggtcctgtaggtcacagagaatcccctggaattgccgactttgacttaagtgtcacttctagctacaaagggtatctcaactggcgagcaagtggccccattggctaaagccaaggagaccacatctggaaacttaaatcactctggtagcttccagaaagagctacctcaggaaagctcaaaaaagaaacaagataattgttaggaacaattttttttcacacagctttaagactgttctgttgcctgtgtcacttaaagcattagttctt

SEQ ID NO: 65437 - DNA, 1095 bp, Homo sapiens; identical to SEQ ID NO: 65436

SEQ ID NO: 65438 - DNA, 1095 bp, Homo sapiens; identical to SEQ ID NO: 65436

SEQ ID NO: 65439 - DNA, 1083 bp, Homo sapiens
ttttttgaggtgaagtttcgctcttgttgcccaggctggagtgcaatggcataatcttggctcactgcaacctccgcctcttaggttcaagcaattctcctgcctcagcctctggagtagctgggattacaggcatgcgccaccacgcctggctaattttgtatttgtagtagagacggggtttcttcaggttggtcaggttggtcttgaactcccaacctcaggtgatctgcctgcctcggcctcccaaagtgtagtgattacaggcgtgagccaccatgcctggctcacctcaattcttcttttccttccaccttaaaggcaggcttagctttggtcttacagttcacgcgttggcagaatcggggcagggggagtgcgttggtgtgcgtatttgaaactaattcagggctctgtttttggcagtatgctggattagataattctgaaaagtcctttcagcagaagcaaccaagatactgggtaaatatatttataaaaaatacttttaaacatattgctgagcaggcacgaaagtaaggaacctacggctcttcaaaatgaagcaaaagctggaatcctaggaagtaactgccaaagccagcttttcctcagaatttttgccaaattcagcagaccataaccttctattttagtgattacacaaagtatgggcaacaggaaatgagaaatctagtaggttccctcataaagctggacaccctcagtgtaaaggtgaacaagaaataaacactccatagaagggcgcagcaaggaactcatttgtctcaaccttagtggcacatggaaactatagaatattttccctgatgatttataaccacaaatggccttctatgggctttcagtccaaacttaggctacctgtgtggtccaaaaagcttaactggggaatttaaagtggtactcatttgtttatgcttccaggtgattttcagaagcaaatgcaattcctctaaggcctcagaacaattcccatagatatactttcaaggcaaatgagtgctcttgcccaaaaattataaactgaacaaagaaataaggcacaatgagtgaaaagac

SEQ ID NO: 65440 - DNA, 1083 bp, Homo sapiens; identical to SEQ ID NO: 65439

SEQ ID NO: 65441 - DNA, 1083 bp, Homo sapiens; identical to SEQ ID NO: 65439

SEQ ID NO: 65442 - DNA, 1032 bp, Homo sapiens
ttttttagggttggatgaaaggcaccaaacctcagacttagggagcccagtgaatctcaagcaagataaaccaacttacctagtacatcagggtgagatgcagaaaaccaaagaaaagattgtgggcatctggagagaaaatacagactacctgtagaaaaccagccagatggtgacttctgtgtcaacaatgaaagccaggaaacagtgaaatttatcttcatcatgttaagagaaaaaggaacttattatgaaagcttacctgaggtgacactttttaaaaagctactaaaaacattttccgacaaaagcagagtttccacttacaaaaggatgtccttgaggtggaaggaaaatgatctcagatggagaatcagatgcaagaaggaacactgaacgaaattgctaaagccttcactgtaagaggagtgtgtaatttatgggagagaaatacagactagaattaaaatgctggacaacaatagcatgtaaagttgagggagcaattacaacactaattttcgggttcttcaggaggaaagtaaagatactgataagacttgaaaaactaaatagattggtacagaagtaattgcattgaaatggcaaaaactgcaatgacttttgcaccaacctaatacatattagctggaataaccactaaagaatgaatataggacatataacttccaaacaagtagagagggaagaaagcaaaaggagtatgggcaaggttagtactggtgctgcatctgatggaacaagctgagcctgcagggcagtggtggtaggtagtggtgaagcccccacctttatatcacagcactgggtatagcgtgtggcaagttaagtagatgtgtgcagcaaagagcagagtgaagaacaagaatagggacaaagggaatagctccaagacaatttctataaaagcaaagttaaaaattggctggtaagtgagttggtcagcctggcttaaagacacagtcagtacaaatgctttcatattttgctgatgaaattgcaaagtcttct

SEQ ID NO: 65443 - DNA, 1032 bp, Homo sapiens; identical to SEQ ID NO: 65442

SEQ ID NO: 65444 - DNA, 1032 bp, Homo sapiens; identical to SEQ ID NO: 65442

SEQ ID NO: 65445 - DNA, 1053 bp, Homo sapiens
tctctgtcccttatggtgcacttaaagcatatctatactagtgaaacaagcttagatttatatatgggatcaagatgtactatctactgtcttattcaaatgccttttgctttaatcttttatttattatttatcatttttattttttgagacggagtcttgctctgtcacccaggctggagtgcagtggtgcaatctctgctcactgccacctctacctcctgggttcaagcgattctcctgccttagcctcccgagtagctgggattacagttgcccgccaccatgcctctctaatttttgtattttagtggagatgaggtttcaccatgttggccaggctggtctcgaactcctgacctcaggtgatctgcccgccttggcctcccaaagtgctaggattacaggtgtgagccactgtgcccggctttttatttctttttatcgaggttagtgactctgaaatctagctcagatttttgagatgatttagaatgatcatttatattaaactactcagcacaaaattcaggctctggaaccaaattgtctgagttcaagtccttgctgtgctactttagctgtgtgaccttgagcaaatttctaaagcatttggtacccttcatcatgggaagaataatatctacatattatgaagatgtaatgagataatgaatgtaattggacttaaaacagtacctggcacatagtgtattattactattgtatttgtcaccaggtgcttttacatatatatgcatataattagctatgcgattgctcagttattatgtccaactacttcagggatgatttcaaggggaactcaaagtgacaagcaagtggtatacatgtccacaccctagattaggaaaagatagccttagtcttttggtgggtacttagacctcttttgtccaggctctgttgtaggtgcttaagtgttaggacctttaggaatgattcttgcaaaagtgaatgttaaaggcttagagattactatggcacgcccacatggaagcatctgtttattctggtagtgcttgtgacaac

SEQ ID NO: 65446 - DNA, 1053 bp, Homo sapiens; identical to SEQ ID NO: 65445

SEQ ID NO: 65447 - DNA, 1053 bp, Homo sapiens; identical to SEQ ID NO: 65445

SEQ ID NO: 65448 - DNA, 1150 bp, Homo sapiens
tttgtattttttttggagagacggggtctcaccatgttgcccaggctcaggctggtcttgaactcctgggctcaagcaatcctcctgccttggcctcccaaaatgctggcatttcaagcgtgagccaccctgcctggcatagttaactttttttaataagtaggaggaatatactcaaaataataaaatatagtaaatacataaaccaataacataatcattcattattatcaagtattatgtactgtacataattgtatgtgctatacttttatatggctgacagtgccgtaggtttgtttacaccagtatcaccacaaatacatgagtaatgcattgtgttatgatactacaaccgttatgatgccactagtgatgggaaactacttcatacagatgctagggcctaaggctattcctgtctttgaggagctctgatcccagggatgaaggcagtaaattcattaatgaggtaagcattactataatgatttctttttaacatttagaagatggttgacttctgccaggaaggagggcaaggcttcactgaggtgacattttggttcgtttgaaaggataattaggattccatcagttggagaaggtgtgaagtcattcaagtcagatagaataatgtgcaaaagtacagaggtataaaaagaatgctgttcattaggtgtccacataggcaagaggaagtttctctttatagaaacatttcatctcataattgaaggtgtgattgaaatataatattatcattttgcaatccctaataaagggatcttaggcattgagcatcaacagctgctaacatcacaaaaagagatctgtatcacctatgaagtagtttaaaaaaatatcaagcctgagtctgatcaaacttgtagatccaaatactattttataggaaacacagaagatgggggcaatgtttaactataccataaggatgtaactagcaacatgggaggaattacaaatgacccaatttctttaataaattaattgcaagaagaaaaaaagtggagacagacctatagattaaaaaatatcagtctcaatgcatgcgtcttatttggattctaacataaagaggacattttatgagacaattggaaattcgaatactggatatttgatgtta

SEQ ID NO: 65449 - DNA, 1150 bp, Homo sapiens; identical to SEQ ID NO: 65448

SEQ ID NO: 65450 - DNA, 1150 bp, Homo sapiens; identical to SEQ ID NO: 65448

SEQ ID NO: 65451 - DNA, 1062 bp, Homo sapiens
ctcatagacatcttaaaaatctgttcttaatagctgaaaacatgcaaaaattcaaggcccttctctagggacacccacacttttctgcctaatttatcagggcccttaattgggtgcttcactggccactaaaagaaactgcaagatctgtgatgcacattcgtactgatgtgttggtgtcactcagtaactaaaaaaccaaaggaacagttttcaaaaggttgaagcaaagctttaggtgttttctcttcatctcacaatctttttttttttcttatgggctgatgttttcatctcccaccatcacccatgtctttgcattatttgtggggagggagaataggggaagatcgaaaaagtcacttttgttctcctctagaaactccgtgcccttaatcaagtcacagacctcctactgtattacatagtgtatctagtgatacttacttccagtggtggatcaggtgacatcttactctgttgccatgtttatagtactgagaggccctttcaattcaagggaccttctgaatctgcagtcttgagtcacagttgtttcttttggtttaataatctttcatattcaaggcaggtaatgatatagcccttattgagactagccaaggtgaaaatcattctccaactgtctcgtatgcttttctgctcttatgtgacaatgaatttgaaggttcttttaaaattataaaagatactaacaattttaattaggcaatctgagccattactttttatagctcattgcatctcttcttggttactgcagtataagcagccaatattgagtttccaaactttaatgtttctaaagtaaataacctaatatttgatatccccaaatagatgttgaaagtgttacaactcctgaaattcagaaagggaggtaagatctttgcactgctatgtgtatagcacattctaattaaaagcaaattaggaagtatggtctcccttttgagtataaccgtcaccccaaccatttatacaagtcatcagagggtaatgagtgtggaaatctgggtgctgtagagcagcttagtagag

SEQ ID NO: 65452 - DNA, 1048 bp, Homo sapiens
gtgagctgtgtggtcatgtggcttagcttcaatcctagtcctgtcaccttttgcaatgtgaccttggccaaattatttaatctctccaaacttcagtatgtcacctatataaaggagataataagataattatcctatgtatctcataggagaatcataaagatgaaatgatatatatacaaagcaggtcatgatatctggaacatatcaagagatcaatgcatttaagtaccactatttcatcataaattaaaaattactatctcatgtggaacaaaaattgtggtgctcaaacattacacctgctcctcatatttccctgtccctttgcaactaggtagaaccatgaactagctctataaaatggactggagaagaagcagtatgagttattttggggttgaagtatagaaaagcccaagcaaaaccatccatttgcctctccctctgctatggtaactggggagtctgcatcttccagagaatgtggctacagagggcaaaacttccattggcctgggtatttgagtaaacatgtggagagagactgcccctttcctagacaaactgtgatgcacatatattagcagaagtaataaataaatattagtagttttaaattattggacttttgagtttatttgttatggtggtgtaacttagtctccccagtctattacatataataaactaagtacattttgttgtctatgtattttatttttttgaacaaatgacatgctcttgggaaccactctccttatcattcatttcttgtttctttatataataggcttattgtgatataattaactgaccataaaatttatccatttaaaatataaacttcaatgatttttttgtatactttgggttatgcatctatcaccacaatcaattttagaacatttttaaaacctgaaaaaaaaatcttgtactgattagcagtcactcccattttcttccatgcccccacccaccacaagctttagaaaaccacttatctaatttctgtctctatatatttgtttaacatgaacattgcagc

SEQ ID NO: 65453 - DNA, 1031 bp, Homo sapiens
cttctaacgccattaagaaatattcattcctccaaaatctaaaataaatgaaaaatctgttttttttttaatgacctgtgaagtttattttccttatctgagaactttagatgtaggcaggtccttagaaataatgtaattatgtgtttaaagtttgaaagctaaaatctgtggtaagaagtccgctagagatccactaatgcattattgagccataatttgaaaaatactgttctaatcaaattgccttgttatgtagatgaggaaactgcatcagagaaggatgtgacatgctcaaggtaacccagagaatatatataagacaggagactggaacttctaacttttagttaatgcaggggctagggatcagatagcccagattcaagtcctggttctgcattcatgcgcttaagcaaattatttttgtctctttcttgtgatctacaaaataaggacaataatatcatctgcctcaaagtgttaggatgattaaatgaaatgtgtaaactcctgagcacagtgcctggcatgtgttaatttttattaattattatttatttcattgtaacagatagatactagtatataatacttttccaaaaaaaaaaaaagaaaaaaaactgaaagagtaacaaatcccaactatttaaattgcaacatcttacttgattttgcaatatctcagttttatccccaaccattttttctctccacaccctaaaagacaggatacttataccttgctttgaaaattttgttacgtgctcaggataattgttaagatttaagaaaaaatatcattaggattaagaataagtgttatttccctcgtatgttttgaaaaatggtaatataattgcttctatttttctgatagaaaaaagcatttaggatttatttatttatttatttatttatttatttatttattttttgagacagggtatcactcctttggcccaggctgctggagtgtggtggcgtgatctcgactcatcgcaggctcacctaggctcaggtgatcctcc

SEQ ID NO: 65454 - DNA, 1036 bp, Homo sapiens
ttttcctactttttcttactttttatctgggcgttggcgtacctttctcggggtgtctgcgtaactgcccagacttgccttggtttggtcagatgacacctcctctgggactggctagccagcgttcatgtctacattattgatctcgtcttccggtgtgtgagtcactcacctgtgagctcctagaggtcagcgactaaatctggttccatggggtccttgggccctcggagccctagcacaaggcccactactcagttggctcttaatcaaatctgtgaaacgaattataaagttgcttttctactagaccttgttgggacaccaaggagccggcgtcggttgcttaacttggatgcggtgcctgacctagagggaggcgaaagggttgtgagcgtgacatgactggtgacctacaccgagaagctgaagggtctcttaagctctgcggccggaagccatctgcttctgcggtttatacaatagcaactttatcagaggttacttttctgcacgctagcgtatgacattaatttgtcttcctgattcatcaaagggaatttccgttgcagttggtgatgcagtgggcctctcccatttcttttttcttttcatccattacaatcaaggaacgatttgcaagaacatcctttacccctggaaaataaggcatccagggctaaaagtcccaaaagaaagaagctggaaacaagatctggggatccaattttaaatttcacattaatcattcagttaaactgtagacaagtgctgaagtacatttttccttccagtactttgactcagataccacttcatattagacaaatgttttatattctctactgagtattttccattttcatagggctaatgtcattttcagttgtaataatcgattggcatagtgtcaatggaaattttttaagattgagtttgtagtgagcagacttttggaaggaacagtgctgacatccaatggatgctcaaagtaatacagaggaggaatctcctttcaaaaaaaaatgtacagaca

SEQ ID NO: 65455 - DNA, 1555 bp, Homo sapiens
cccgtagcgcctactccacgtgacatcctgcctggtctgccccctgccggctccgcacgccagatgtcacaccgtttccccgggagccttcgtgcctcctctctgcgccaccctcatctcgctcctgtaccttcgcttgtcgggccgtttccccactccccgaaatcatcttttgatacacccctgcactcgctagtgatccacctcctccctgacacccgcaggctcatccctctttctggcatccgcaccccctttgtcaccctatccctttcctttaggcggctctccagtattacatcacatgccctttagggaatacacagcccgatcatagccttcaaaaatgattcccccccgccttcgcgttagctcaagagccagatgtactagtgtgtttatgtagctttttttttttttcacttttctaaatttttcgcaacccttctcattcttttgagaaatttgccacttattatggtcaggttaaaagcccactgctacgattttaagtatggagtctttcatataaaattatatgagcattctttaatgtttgtttttactaagtagcatatgttttatctttgtgtttcgtgtttttaaatgtaggaacttcatccttgaaattagaatcatctgagaggaattcctttattacctagacgtaatagaggaaacatgaacaggtggccaggagcattgtcttaaattgttcgttaaaataatactcatgttaagaatactgaagcacacaagtttgtaaattctagaaattaatcacattgactattcaattcatgactgaaaacatcattagtgacctttgatttttgagtgaaaacagattagtaaaaacagagaaaattgaagtgagggggagtcagttttaagtgttccctttcttccagtagagatagtggcaaggtttgacttacaccagacctaatagatttaaaacttgaaacagacttggtccaaaattaagagttaagcctgtgtcttggcatgcttgccttagaagcctctcagaaagagaaataaaattcagaggtaatcatattgtggtattagatatgctttcaaatttttgaatgtcagctaagttaacataatttagagaatttgttgtaagaactgcagttctgtcgacagcaaaaatctgtacttacagattcagctgcaattagacttctaattgctgtagatgcatttcatcttacaaaaattttatagttctatattgtttaatctcatgaatttgaaaagatacatgtatatcattgacctcatttggatatgaattccgtgagcaaattccttaacctacccatgccttagtttccttacctatagaggataatctctgcaacgtgagtttgtgagaattaaatacagtgtgtaaagtgctagacacaatgcctgttgtaaatactaagtacaagttgcgtttttcagtaatggtgggatggtagatccttgagtggtttgtagtgaggtttttcatataaattatgcaaaatatgattttttcactctttaatattactattcg

SEQ ID NO: 65456 - DNA, 1555 bp, Homo sapiens; identical to SEQ ID NO: 65455

SEQ ID NO: 65457 - DNA, 1555 bp, Homo sapiens; identical to SEQ ID NO: 65455

SEQ ID NO: 65458 - DNA, 1250 bp, Homo sapiens
tccacccgcctcagcctcccaaagtgctgggattacaggcgtgagccactgcgcccagcctgctgtttaatttttgaaggaaaataaataatttttatctaaaacagtaattttacctgctgtcatgatttatttttgccctaactcttggcaacaaagtactagtgacgctttaattccatataactgttactgttgtatatggatgaagatgacttaattaaattccttccttttttctgcacaatgttccttgtggggaggaagaaataaggctgaattcttagcgccacccgcctcccatccaatatcattagaaaacagtagtgacaatggcattcttctttcagccccaaaattatctcttgactgtgtttttgatcaggttgttaaacaaattttcgtcataatagagtttttgttacacatttttaccttattccataatctggaaatcagaggaatgctaaagcattttagcttggcaaacttgtttcatcagtatctgggcctggtactatgctgaactaggtggtagaaagaaaaatgagacatggccctcatcttcaaggaccttggggtgtaaggcaaagatgcattaattagtggagatatgtcaaatgtgtgtatggtatacagattttcagtcataaaatacattttaagacttaattttttctacataatttaatcctttaagatatttcaagaggttttgagtccaaaccctggtctggtatctttgactttgagtcatttctgttttccaaatgacattttgaaaattttaaaaaggaaggtttattctgtattacttacttgttcgcgctagtcctttttccatatcccagcatttccctgtatacaatcttagtaatcagctgtttaacctacatttgattttcttaattaaagtgatagtaaagtataccatagtttaaaaggtcaagaaatagatagatttggattggttgaaacctctgttcccattggaaggcaaaataatagagtggataaagcattggactttagtcagaaagttttatgttccagctttgtactgtgcagtaagtggccttgagcaagtcacttaacctcttcatttataattgcttcatttataattgatattttatgaatttgcgagatgacatatttagcttacagtttttataatctgatgtttataacaacttcttttcacaatgaactatttaggggttattgggaagaggaaatatttgtggatg

SEQ ID NO: 65459 - DNA, 1250 bp, Homo sapiens; identical to SEQ ID NO: 65458

SEQ ID NO: 65460 - DNA, 1250 bp, Homo sapiens; identical to SEQ ID NO: 65458

SEQ ID NO: 65461 - DNA, 2044 bp, Homo sapiens
cattagtatactagtttttgcctatgatttttttctgattcatccatgcgttctgctagtagggaatgaaattgtcaaattaagactaggttaaaatgtataaggctttttttcattcttacatgtaatagcccttcatttatcctgtgcatttcaaaacttaaaactttagggacaaatactttttaaaaattctaacttcgctgttgagtaaccatattagctaatactgagtatttttagatgtcttccttcaggttcagattaaggaaagtagttttattttctagtatgtgaaattccatttttggtatattttcttgctaaaattaaaacagtaataaacctttaggtgacctttcttgctgtttcccttttgaaggtcatggatagtgaggatgaagaggtggtaatattctgaattgaaaaaacttacagttctttggagaagccttcagttgtacaagactgaaatcctgtgatcaggatcttaatcagtatgatgatagaaacattgaaccaactttcaaggtttttggaaaagtttgttatataatttttcaaaaatttagcaattatttctgcagtttttatttaaagatgggatgattagcagttatggtgtgttaattgggacattggtaatgtgatttaaaataaaattataataccagtcttttttaaaaaagtatggaacaaacagtgataactattgtttctaagtagaatagatttttgtattacactgtggcttctgtatttgtctgggtatttatttataacatattgtaacataatagagtctttactatattaggtttacttttgggaggagcaacaacaaaaaaactttgtactgttcagagatactctgtggtatctatatgataaatgttcagggcctgttgacttttgaattttagtagtaagtataggaagttcattatactgtcctcaccagttacgtatgagagaaatttttctgaatgaaaaacctggggatatgtctgatttttgttgttttgggggtttttaaaaaaatcttcaggctataacaatttttaagctctttactgttgctttttaatttgtaaagggcaagttacatttacttgtgaggtccacctattgtctttttacaagtagattttgatttggtcttaacaaacaattttagggtctttttaacacttcattgagtttttattatgaaaattgttaaatatacacaaaatagggaaaatagtataatgaaaccccagtattgatcacctagctgagattttgccatgcttgctatgtccatcctccctgttttggcagaagtattttggagcacatcccaaacatcatttcatctctagttagtacatttatataaaataagaacattttcttatataatcacttaatgtaacaaaattagtaatattttctttgtatcaatatcttagttaaaaataggtgttttgaatgatattctagctctgtgctgtcagttatgtagccacatgtggctatttaaatttacattaatcaaaattaaaaattcagtttcacaattacatgaactgtttcaagtgctcagtagccacatgtgactgccatattggacagtgcagatatgtttccatcactgctgaaaattctgtaggacaacactagtctagatgctttctttatcactctggaggtgaacctgaaagagatatttatattttcagaaaatgtgctagattgttcattaatgtttgattcttatttctttcagatgcatagaaaaagtaacaactgataaaggtaagacttggtcatccttacctctagcgtacattacactgattatcttttaatctgttagaaagcctcatcattcaaattggttcccatttaaaaggaatttttatttggtaaaaaattactggagttagaaaatatttagacgacagcacgtttggataatagagtatattggcattatttagaaacctaataaaggcaaatcagattgtttgatggtaatttatagtaacttttttaagcc

SEQ ID NO: 65462 - DNA, 1063 bp, Homo sapiens
aaaactgaacaaatatacttttaggcacatttcttttattacgtgtgaccttgacccaggcttgacacagccagtttccaaactcctagaatccacctagtatccatagcttttaaggtctgcttatagcctgctactatttctataaaagaatatatgtatatgcattttatatatcagtgtatgtattacatgtacatgagaatcttaaggtttttctgttcttgataaataattcttcgagaacgtataaggcaagtttaaagcctggattttgtgccatatggaagaatgatagtgtaatttaagaaccaataacttgcattggtggtggctgctttgtaaataattaggtttcaatgctaaggtttcttatttctctgaattttggaatgtgagtctaatatttcatagtatagcaggcagaggtttttcatacctggcatttttttttttttatttagaaaccttggcatgattattttgtctagcaagttttttgttcctgttgttgttacttagaaaataggttatgtctgccaaaaatggaaggtctcacatttcttattcagagatcaatttggagattttatgatgtggagaaaatatagagacaggtaacaagtctagagcattctgattaaaacaaaaagcaacctgcttttgtcagagctgaaattaccttacgtgtccaaagaaatcactatgggttgccttgaggcgaacttgaagaaaggtggaaatttggagccccttttggagagaaaagtagatgacctttgggtagacgtcttttttttgtttgttgagtaaagacagggtttagccaggctggattcgagctcctggcctcaagtgatccgcctgcctcgtgtgtaaatgttttaaactagaagttgacttattggcatgttttgtggttgtgcagctgtggagagattaaaactacattctggataatttgatccgaagatcaatcccactttactgtttaaaggccctggatctagatattctcaaatgccaatcttcatctctgttagtttacccattaaggtagctg

SEQ ID NO: 65463 - DNA, 1063 bp, Homo sapiens; identical to SEQ ID NO: 65462

SEQ ID NO: 65464 - DNA, 1063 bp, Homo sapiens; identical to SEQ ID NO: 65462

SEQ ID NO: 65465 - DNA, 1070 bp, Homo sapiens
attttaatatctgcagaaattctgtgaaagcctaatattttttatcctttctgtcagtgcaccagtggctgatgtctgctttgaaatcagtaagccaggaaaaaacatatgtagatggagtaaacagagatgactagaataagaaagaaaaatctaggcattaatacacagtgttgatttaaaaatgagtaaactgttttggaatgtaaacattctaaatttcttaaatacaattttaaaatctcatttattttccggtttttaatcacaataaaatttctctagttctgttttgaaacataaggaaatacagcatgtggctttaggttaaaaattcactcatggaataattcttacaggtgtttcaggttagtatattatataaatggggccctcttggcacttgaatccaaggctgggtggaaatgagccaaatctggattgagcccttgccgtggtgctttccatttctcgtttatatggttaggtgtggtatagtagaaagaatatagactggacttagatatacccgtgttcagttccctcagcagcttttaatatgtgcacttgggaaagtcagttacttggtttcttcatctatgaagataagaataataaatacttgatagggttataactgatttttgagaaatgaaaaaaatatatattacctagcagttaatacttaagatttgttaattgcccagaagaaatttaaatacttaaagagagatttgaagacctttacctttagtatcttcccagcttatcaactaaccacaccctgtttcaccctacaataaaataatagcattgattatgttagaatggcccttctaacttaaagtattttatcatgaccaagtggctctcatcttttggaatttgatggtttgacttgttataataattatctctggctgtaggattgagataaatcatatttcattgtctgctatctagaagaattagaagaaaacattcctgccagtagtatcaatctttttttttttttttttggttttgagacggggtcgtactttgttgcccaggctggaatgcagtggtgc

SEQ ID NO: 65466 - DNA, 1070 bp, Homo sapiens; identical to SEQ ID NO: 65465

SEQ ID NO: 65467 - DNA, 1070 bp, Homo sapiens; identical to SEQ ID NO: 65465

SEQ ID NO: 65468 - DNA, 2342 bp, Homo sapiens
ttttaacttagatctaaaaggtagaatttcatgaatccagttacttaagtgtattttgcatagttagcattgcattttttagaagataaggcagtataaaattactactttgcaacatgaagtaatttctttagcatgatgacattaaggataagttttatctcattttcctttttttattatttcaattaaagtcttcagttttttttcctttgaaaatatttaatttatcttcaactgtatttacaattagtagatatacagggatggttattggttaactgtaaacttaaagagaatggtatgtctttttatttagatcccaaggaagaaaaagaggaagaagacgattctgccctccctcaggaagtttccattgctgcatctagacctagccggggctggcgtagtagtaggacatctgtttctcgccatcgtgatacagagaacacccgaagctctcggtccaagaccggttcattgcagctcatttgcaagtcagaaccaaatacagaccaacttgattatggtacagtgcaactagaatatggctgtttactaactagttgctgttacattttaaatgtaatgttgaacatttgtgttaacagcttaactgtcaggggcaggtttgatggtgtaggtggtatttctttgaacagtttgcagatattctgcttttgtataattaccccatgcagtaatttgatttgcatttcttgactgcagagagaaaatatcttatatctacactaataaaattttgtttttggctttgtttttctagatgttggagaagagcatcagtctccaggtggcattaggtaaaaaaaacattaatatttcatttttaaacctttggggacatagcatagtcacagtaaatgattcagaagttgcttccatttgaaattattttgagctgtaagagaaattaacttcagttttgatactgcatttagattccatgttgagcttgattagaacttaaaccatgtaatctacttacatagcttagaaatcatgtcttgagtatcttctgtgtttggacttattccatggtaggcactaatgtgaaatatgggtgttttggccaaggttttgagattttattggaatcttttgtgttgtgatttatctgttagtaggtcttttaatatagcagatcaccagacagtattacaaagtcagttgtttcttaacttttaatgccattgagttgtcatcaccctgtctttatctaggatttatgtctttttagtttcaattattattctttgtgataaaacagctagatttcagtccaattaggtcattaggatgaaaatgctagatgactttatcagtgtttggctacctcttaaaaaattaccaaataaaatcccctcagacatgttcgctacaaccagaatgtctcatttctatttacttatttttagtagtgaagaggaagaggaggaggaagaagagatgttaatcagtgaagaggagataccattcaaagatgatccaagagatgagacctacaaaccccacttagaaaggcatgtctcagattttactgcagacatgttaatgaaatataagtaggaaagcactgttgcatgcttttattttatctgttgccaagctaatgggtatagaattaattttaaatgagtaattaattatgcacttcttttgtaagtctaacaccttaatataccctgataataatcctctttcccatttgtagaactttattttgattatatacaagtttttatgagtctgcatgttttatttcaacaaggtatcatgaattgcctgaatacttagaattttttaactaattgtctcgtttctctttacaattatagtgaaatttgatttacaggcatctttagtctggggagggttcattccatgagcaacatatacatatatttggatcattactatgcatgtgaggatgattggtaggaaatcacatttcatgaactgaggaaggtagttttataacaaatcagtgataactctaagctttaatttgttgtcatagtcttccttgaaaagatcttttgtctagtattgaaatgcatttgtgttttcagggaaaccccaaagccacggagaaaatcagggaaggtaaaagaagagaaggagaagaaggaaattaaagtggaagtagaggtggaggtgaaagaagaggagaatgaaattagagaggatgaggaacctccaaggaagtgagtaggcaattattaaaaatgaaaatctaacagattttgaacgactagtggaaaaaagagtgggagtgtgaggaaggatgttgacgtatacatgcttcaaaatatgtattt

SEQ ID NO: 65469 - DNA, 1091 bp, Homo sapiens
gtatttccacctatgttcttagccactttattatactccctcactatccatgtgtgaaatctaagtatttggttttccttcagtacttttgacttagcaaagacaagtactttcaggaagccttaattttttttttttcgcccctttcactttctctgttttagcaccacattaaataccagcatttgctgaagaagaaatatgtatgtccccatccctcctgtggacgactcttcaggcttcagaagcaacttctgcgacatgccaaacatcatacaggtacttttaaaatgtgtttatcaagtaggtaattgcactgtgctttagttttgcatgttggtaatgataacgtttttctaacataagtcttaaaagattctatagtcaagtgcggggaaaaggtgtgaaaataaaatgtagtaagacaaattttacaagggatgggcagactaggacttttgaatttttatcctttgacttcttgaacttctatgaccgggataatgatcttctattgagcatttattctgtatcaactgtggactaaatacgttatgtatattattgctaattagtctattcaacaccactaaatttgtttatattgatcttattttacagctaagaaactagaagcttggcaggattaagtaacctgcccatggtcacatagctagtttttaggagaagcataatactctgctgctattgaaactgtgaagtctagctgttgaatttgcatgtaaactcccataggaactgtcaaaaagagttgctgagtgtctgcaatatgtattatagaatagactcaaattcaatttatttgtaaccactgaccatctcagtgcagtgtacctaataggaacaaattgggtgcataccactgagtatgtcccagacacttgataattacacattaccttctcaacagtcttagagagtaagtctaggaattctagttgtagaaatatgtctcctgcccaaggtcatactgataaatgaaataactccttcatttactgtaggaaagttacttaacttctcttttcacttttccttctctgtgtattaaggataccaatatcagttat

SEQ ID NO: 65470 - DNA, 3254 bp, Homo sapiens
atctgggtgagaaggatatatgccctacttgaaggtttgccgctttacaaacatattagttgccactgctgtttactttcatcaaataaatgagtggatattgattgggggcattagttagtagcctttttcttagtttccctctgtttttcaggcaaacagaagaagatcagattagttttccatctagtaacatttcccaatccttcaaaagaagtatgttactgattattgtgtgtgtgtgtgtgtgtgtgtgtgtgtatgtatatatatgctctaaactctaaccctgatcctgaataagagcactctttatttctctgttggatcagccatttccttttctcctctccttagatgtgagatctgtggatttacttgtcgacaaaaggcatctcttaattggcacatgaagaaacatgatgcagactccttctaccagttttcttgcaatatctgtggcaaaaaatttgagaagaaggacagcgtagtggcacacaaggcaaaaagccaccctgaggtgctgattgcagaagctctggctgccaatgcaggcgccctcatcaccagcacagatatcttgggcactaacccagagtccctgacgcagccttcagatggtcagggtcttcctcttcttcctgagcccttgggaaactcaacctctggagagtgcctactgttagaagctgaagggatgtcaaagtcatactgcagtgggacggaacgggtgagcctgatggctgatgggaagatctttgtgggaagcggcagcagtggaggcactgaagggctggttatgaactcagatatactcggtgctaccacagaggttctgattgaagattcagactctgccggaccttagtggacaggaagacttggggcatgggacagctcagactttgtatttaaaagttaaaaaggacaaaaaaaaaatctaaagcatttaaaatctagtgaaataactgaagggcctgctctttccattgtggatcacagcacacacatacatacaccctccacctccccatcccctgttctccctctgttgctccccttataaaattgatgttgtctttaccagaaaggtagacaaaaaagaagcagcagcagctcttaaagtgagggttattctcatactcggttccagccatcagcagacttcctgctcatcggcagatccccctttccaacctgtaactctgatgtgctctggatcagcttttaacttttaatcatatattactgtcttctaaatcccttctcctcctctactgctgccctatggttctggctcctaccccctgcggcacacttatcttcaaataccatagaattctaatctctggaggctggcagcttgacttggcactttagggccccttagcagggtgagctgttaaaacagcacacatctctcatcccctcttcctttattcccccctgggtttcagaaaggaaggatatatggggaccacctcccccttctttgatcccagcatctcagtccccctcccaaccctccatatggctctcaatggtgctcacttgcttggaagcaggctcccaatagggagggggctgccctctacagtctctttgactgtaagacagggctctgtatcagtgagacgatgagaaaagtcccaggctaatggcagaaatttgcactttgaacatgtgtgtttttgtgttgtggaacctgagattccttatttattaacaggaagtctgattttttttttttggagtctttgttgctatattttgtggggctgggagagagagattagattattttgacatgggatcccttccataacaggtactttgaaggcaagacatagggttgaagaagcacagccagcctctgaaatcatagctctccagtggcttttaaagaaagctggtcctcagcactaacaaaatcactacaatagcctagtgcttttttggaagcctttttagggaagaatgttaggttcatggtaactagtatgctctttgagatttttacagtgttgaaacttaagaattttgagagggtgaggagggttgttcagaatctaaattacagatagatgattgtttcttgtgaatttgtttcttttcctttttttttgtccctaccatttccttacatttcccttggggcccatctctggctccttgctttttgtttcttgctttgctttatcagttcattccagctccctgttagtgaaggacactgctgttagtgaaggaacaaagtctatgagtcctaaaattttaagtcaaagaaaactgctctgtttcccctttagtaacacttctgaagaggaaaaacttcaatagccaaagttaataatcctatataataattgctttggctttcacctaaaattctgggcatcacaatttccttgggatagaggttgtgttggggaatagattgcttattgctgttcactggagagaaaaggtagtgtttttgtacaaggtcataccgccagaagccccaaatcctattttggctcatcttcaggtaaagagtaattcctatcctgtgtgcctcagaagctagaatcgaaggcttaccctattcattgtttattgtcagaaatgcatgatggctcttggaaagaatgacgttttgctggaaaaaaaaaaaagaacagtttgtgtttcacaaacatggcttatcaattttttcaaagaattcttttttcccaaaaagaggagtaacaaaatgtcatttctgaaagaggcttactttataccaactagtgtcagcatttgggatgccagggaacagagagtgagacacctacaatcaccagtctcaaatgcgctattgtttcttttcagagtgttgcagatttgccatttctccataatatggggatagaaaatggaataaagatagaagggatgtagaatatgctttcctgccaacatggtttggagtcgactttggtatattgactagatttgaaaatacaagattgattagatgaatctacaaaaaagttgtcctcctctcaggtcccttttacactttttgactaactagcatctatattccacacttagcttttttgtcacacttatcctttgtctccgtaaatttcatttgcagtggttagtcatcagatattttagccacctacacaaaagcaaactgcatttttaaaaatctttctgagatgggagaaaatgtattctcctttcctataccgctctcccaacaaaaaaacaactagttagtt

SEQ ID NO: 65471 - DNA, 1530 bp, Homo sapiens
ttccaatgtactcaagaaaattgaacaaatgtaatggatcaatttaaaatattttatttcttaaaagccttttttgcctgttgtaatgtgcaggacccttctcctttcatgggagagacaggtagttacctgaatataggttgaaaaggttatgtaaaaagaaattataataaaagggatactttgcttttcaaatctttgttttctcttattctaggtaaggcatattaaaaataaatatgtaaagaagaaaaataaaagttgtcttcatggaagcaacttgtcttccttggttgtactgagttacagttatcctaggggtgaaacatgtgatgctgctaagcaaaccaaatgccctcagaacaggtgttatgtggggcatactattgtttgcttttgttgagaatcaggtggttaatttttgactgttcttgatttctaatgctgaaatgacatgattctgttattcagcaaacttggaaatcttgatgttttgacaactgcctcctaggaaaactggccatatgttaattaacctagtagatggaaaattaaggattatgtgaggttaattttaccctgataatgacaaaaccttgatagcatttaatattaatacttcttctcaaaattgaatgtttatatcaagtactgatttttattttaaaaaagaaaaaactataatccttctgccttccaaaagccatgctgtgatagctgcccaggctgctctgttacatctcccatttattgtttacttttataaatttgcttctaagatggtatgtgtttcagcttattggcaatatctatgatataaataatgaaagctaattatttcatttagcccttacccaataagcatcattttctaagttaaatgcaatagaatgacaaccctccaagtaccttttaacttttatactgtcatttcaaagcccagctcattctcttattttaagaagcatgtggtatgactgggtaggggagaaaaaaggaaagcatgttgtcacttgagtgagactgctttagaaatgttaccaagttagcgttgggtgtttcctgttctttggaagagaacaggcctaaacagtaccttcctcctcctatgtagctaccaggaaggcaccgtgattgaaattagagatgcttccttgcttgatttttaagtataaattaaattacctttaaaaagtacgtaaggttaggagtgaaaaaaatcctgtttttaaaggacttcacacaccctttgtttcttgaacaagatgtgaactacctaaacagaaaatgaaattggaaagtcagtgggagagacaactatagaatcagacttctatttaaattcaagcctcgttacttgattttgtgcatgttatttcttgaagtttcagtttcttatatggagaaataacatttacctcagaaatattctgaagatcaaatggaattgctttaaagtatttagcttactgactgacccatggtagatacttaataaatggcagctgtgtcaataacaattttattgaa

SEQ ID NO: 65472 - DNA, 1057 bp, Homo sapiens
ttaaaatcagactctttagttgatttaaactcttagagaataagaataataatggctaacttttattatcttctatattaaggcagtatgccaagggtctttatgtatattatgtacagcgtttacaaccttgtgagcaaggtggtgttactcccattaggtagatgagaaaacaggctcacagagatttggttaagctcacacagctaacaagtagcacactgagtttgaacacagatcattctccttgtaaaagcctatgtgcctttcactttagaggcttgatcatgaatcactgcacctctttgtcacagggtgttggaagatgcatccatgtaatctattcccatcgctggaaaacagctgctgttagatgtcctcagaagtcagttgcaaattttagcgttaaagtcaggatttattgttcatacttggcggtgaggagggcagctggagatcttaagattccattttggaaaatgattaggcccgccaaacttctgaactttggaagctggggatgtttagtaatacagcctggtttttaagtactcactaaaagttctcaaatattgggttgggcacggcttataccaggttacctcacttttaattagtgatgcaggcagtgtaacccaagcatttgtggacaatgagtggaatactaaagttaaaaagtcaaactttcacctcagattttctggacttagtcatgaggagagggtgaggcccactctgttcctactggagataccagagactctgaaactatagaataaagcctctgtgctgcacaacaaaggggcaggctctgcttttatttcttgtaagaaccaacatagtatgaaaggttggtcaatgcggacattaatggaaaaggccatgtactggtggtgtgatgtgaatccagaaattttcaagtgtgtcatttattttatacttatcaattaaaactcaagatcatggattgggagaccaagttaatttaattaactggggcttctgtattcgtaaatgaaccatgagtcagggctaactcccataggtttcatgaggt

SEQ ID NO: 65473 - DNA, 1006 bp, Homo sapiens
tcctgaaactgaaggaaaatggacaacaagtacctatggaactatataatggaattactcctgtgccacttagtgggttgatacatattattggccatccatatggagaaaaaaagcagattgatgcttgtgctgtgatccctcagggtcagcgagcaaagaaatgtcaggaacgtgttcagtctaaaaaagcagaaagtccagagtatgtccatatgtatactcaaagaagtttccagaaaatagttcacaaccctgatgtgattacctatgacactgaatttttctttggggcttccggctcccctgtgtttgattcaaaaggttcattggtggccatgcatgctgctggctttgcttatacttaccaaaatgagactcgtagtatcattgagtttggctctaccatggaatccatcctccttgatattaagcaaagacataaaccatggtatgaagaagtatttgtaaatcagcaggatgtagaaatgatgagtgatgaggacttgtgagaattcagtctactggatttaagggaatggcttatggagttgttatttcataggcattgaaaatggttttctaaactccaaaatggtcatcttatcaataataataatattgaccatttcctatctgccaggcatttttctaagcacatgaagaaattagtcctaacaacactatgagatggactataacttgcccaaattttttttttttttttgagactgagtctcactctgtcgcctgggctggagtacagtggtgcgatctcagctcactgcaacttccacctcccaggttcaagcgattcttatgcctcagtctcctgagcagctgggattacaggcaaacgccaccacacccagctaaatttttttttttttttttgtatttttagtagagacagggtttcaccatgttggtcaggcgggtctcgaactcctgacctcgtgatccacctgcctcggccttccaaagtgctgggattacaagtttgagc

SEQ ID NO: 65474 - DNA, 1089 bp, Homo sapiens
agggttccatccctcagggggtcagggatcctcagaaattatagacaaacctttgtatggggaggaggggatttggtcattgttaccgggagaaaatttgccgcttttcatgagcttctcaaagaggcctgtggactcattctgggcactgattaggaaacctgttctcactcaattgtgcttcagtttttttctcaccaagtggcctgagactgcctacttaatagggtattgggtggcaatagttgaaatgctgttagaagatttttagtcctgactatcccaattcctattgttaaagaagaaaacaaacaaaaacccatgaggacaaaggagaaaatccacaagaatcattcagaaaattctgttggcatggctcatagcttggaggcactttctttattctgagtagttaaaaatccagagtgtgcctcaggaaacctgggcttcaattttagcagagccactaatattacagaagccacatatcttctctgcactgcagatttcttcttttgtaagacaatagatgatgaagatgatggacaatgatgttaaacatttactgagctcttactactcatcaggcaccactcacttaacatttataacagccccataagggaaggactctgcgtcattcctgttagagagatggggaacaaaagccccaagagagggttccagctaatgcagtgggaggtagcagctctgcatccaaacccaggtctaaggacacagaaacacgtgctaaatgaccactcacagtgctttttgggtctgttctctgttgaagctttatgggaattattattgtcattattattgaaattagtcacagcctaaccccgctcttatcagaaatattttgaaaaatgccatttgcttgcttgctttctgctttcagggaccggaacacccgaatcctgggaagagtttcagcgcccgaggcttcccacgacactgttaccttccggacagcgagaaagggagaaaagtaagaccggaagtttccacatagaactaggttttagaatagatcgggcagtttacttctatgtcaaggcctaaagttttgcttcttacaat

SEQ ID NO: 65475 - DNA, 1036 bp, Homo sapiens
ccttgacctcccaaagtgctgggattacaggcatgagccaccgcgcctggctggcaattttttaaaaaactgttacacatacacttaccttataactgtgttgcttttgaattcctttctttctttctttctttttttttttggtaaatctttgtaatgggccttattttctttcttcctagtttatctcctttttctttccataattagaaacaaatgaagggcaaaagtcccttttttcccgttctttgggtgtgttctccaatttaaatgaagatatttcttctcacttagctcgctttgtcttcaagttttctttcctctctaggcaattttgtccaaaatctatttaatgggtaaatccgaaaacaagctgccaagaagtattctaccttcgaggtagatgcctactagactctggcaccacgcagcctgttcaaatcccagctgagtacttactggttgtgctaacatgagcaaattgcttcatcccttgacctcattctctatatcagtaatttggagacaatagcatctccttcattagacttttgtgagggttaaataagttaatctatgtagagcatcagtacttagagcgttgcctaatctgtaataagtgtaattatatgtgtgctaccttaaagacaactccaggttaataattcccacacacagcttcttcaataaatatatctccaatatatttatggacattcttttagaggagctgcatgtttcccacacgtgtgtcctcaaccacttcatcagaacatttgctgttttgaaggaattaggagatatttgccttccagtgacccagagagtcgtgacagtgtatgacagtaaaaagagcacttgcttggtttggcttcttctctgacatcttattagcagaccagagaaattgttcagtgcaagggctctgggatcaagactcatctgggttcaagtcctggctttgccactgtgtgatttgggcaagtgcataacctcattgagcctctattttttcatctgtaggatggggataata

SEQ ID NO: 65476 - DNA, 1644 bp, Homo sapiens
gatccaatttgtctcctttagttagggcaatgtgacatggtcctagatccttttcacagatcctgtttttgtagaacagccttggtgatgtggccttggcagtgtacttagttgttgctctttaaatagggtctgggctctgggattaccatttctttttcttgtcttctacttttaggaagaatgcagaaaacatgtactacttctcagagcttgctctgactctcaatgcttgggaaagtggcactgcccccacagacagccggttacgacctgaccagagactgatggaaaatggacgctgggatgaagcaaatgcggagaagcagcgcctggaggaaaaacaaagactttccagaaagaagagagaagcggaagctatgaaagccacagaggatggtaatgaacttcccttctactcttctttcttgatgcatggagaatgccagcactaatttttttctttcctctcttttccttttaggcacaccatatgatccctataaggcactgtggtttgagcggaagaaggaccctgttaccaaggagttaacccatatttataggggagaatactgggagtgtaaagaaaaacaggactggagctcatgcccggacattttctgaaacggcagtaacaaaaaagaggagcatataatggagaagaggacagaggatgtgtgggaaagctggaagttgtgactctcttaccaagtgctttcctcaagtttgtctctcttgaccaatcattttttccaaatcaatcaccagaaggagacaccagtggtggtgattggctggttgccttagctgattgaaactgaaatcgacataggagatactatgtctgtaagggagaggtttagtggccgaaggttagtgttattccacatccacgaagtcaagtattcttggctcttctttctccctctgcccccatttaagacaatgtcactcaccctccccttgtagtatcctgctcagccaagatctgcctaagattatgattcaggggcattttggtgctgttaaaagcaagagccgaatttagaagttcccttaaaaagaaacacataagacttaccaatggaggcattgtgaatggttgcagtggagcttaggtataacatcatcaagtgtgttcacacgcggggtcggtttaatggagtgtccacgcggagataactgcgatattggaacacctgtgagagagattgttctatagggctggaatattcagagttacattcttggaagtttctgtttttacttgcatcaaacacccctctgttgttctccatcatctttaatagcaactggagaccactttggtcattggtaagggggtgcattctcctcacaaaggggttttatggacttcctcaggcggagagcttctgagaacacaggcaggatggaaaaagactactagccacttttgctttcccaaccccccttaatgccatccttcattgtctttctggcttctcttcttctggcacagtaccattttgggtctgtgccccagtgtggagcaaaacattgcctgtcccattctgatatacttcagaatttgagagcagaagttaatgtggaacaaaagttttcaccatctctcaagccccaaggactggagccacctct

SEQ ID NO: 65477 - DNA, 1007 bp, Homo sapiens
tggaggccacagtgagctacgattgcatcagtgtactccagcctgggcaacagagcaagatcccatctctaataataatttggatgactctctggtgtttgttataacaggacctaaccattatttatcctaggacttccagtatagtcaggtaagctaattcacagtgaattctatatagccaagccctgttctccacccttgcaggtgacgggggaagtgacagatccatcaggaaaagtccactttgctcttctggggacgtgggatgagaaaatggaatgtttcaaagtacagccagtcattggggaaaatgggggtgatgctcgacagagaggccatgaagcagaggaaagcagggtcatgctgtggaaaaggaatcctttaccgtgagtatcagcatgcatgctgcccagataccactttgaccttgactgtggagcaatattgaaggcatttctgcctgccctctcacttaattatgtggggaattgagcaagggaaattgagacttttggagagattaacagaaggttgtcattgtatgatttgacttgtagcatgcttatttcaaggaagttcaaaccaaactacatctgacaaaaaatactttgtgctttctaaaggtcctttggattgtgattcagaagggtatttttctactatttagagcaaaactgttcaaaagtggctagaggaggaaggtgcctaccacctgttaacaatttagcctaaaggcccatcagcagccaggtgcggtggctcacgcctgcaatcccagcactttgggaggccagggcaggtggatcacttgtgattaggagttcaagaccagcctggccaacatggcgaaaccgtctctactaaaaatacaaaaattagccacatatggtggtgtgcacccataatcccagctacttgggaggctgaggcatgaggatgacttgagcccagaagtttgaggttgcagtgagctgaggtcatgccactgcactccagcctaggcg

SEQ ID NO: 65478 - DNA, 1736 bp, Homo sapiens
tttattcttcattatacaacagagggtcatacatctaatgaggactagagtcaggatttaatccagttctgtctgaattcaaagccccagctctatccactattccatttttacaattaagggccttagataagtggtttgtttaaggtcacacagctagtaacttaacaatagagcctggtcccggtacagactaccaatgtgtgctccttccataatgcagttacttccatgatgcatgttggggtgcatttgacttgtttctgtaaattttgcaattgtattatagaacacagcgtcctagctaaggtatatcagttgccagggtttgtcatcatttagttatgttttattcatagatttttgaaagtcaagtgagaaaaattcagtcaatacttccaacatttaagaaagtgtaagtcctttttgatttattgttttatttctaaaagtaataaatatcaatagaaggaaattaatccattactgttttgaggctgcatggtgctatttttctgacatttggcttaatttggatacctctttctgcttccaggtaccattcattgtattttccatgcaactgggcaccactacacttggaagaaagttaccacaactgtacacaacattattgtgggcaagttgtggatagatcaggtgaggaaaggtacccaaagtgtgtgtgaagtttaaaagaatacttctttaggtatatttctgcagtatttaggacatgtgaactggtctcagaatgttgctactgattcatcagtttctcctaaggaatttctctcaggcagtagccctacctctaactctctaagttttctgtaccacaaattattgtttataaatgaccaaattataacattcatcaatgactattctgctaggactgtgttgggtgctacgacaggtagaaaaaacaaacgtggccccaactcttaatcctttcattattcatcaaatatttattgccaggcagtatgctaggtcctggggatacaaagtctgatgagatgtccctcaataatttattatatcattggagatacatgaccaatgtgtaggttggaaaatgtgcagcaacatacactaatataaaagatgccctatgatagtatctaattaattgtcagttttctcttaagacaatggttgcagcaaatttagaaaagagggtatactgtcttctgagcagtcaggaaaggcctcacagtagatgtgggagttaagctgaatcttaaagtgtggtttgggatttagaagatagaaaggaagggaaaatgggctgggcatgttggctcatgcctataatcccaacaccttgggaggccaaggcgggaggatcacttgagcacaggagtttgagactagcctgggcaatatagtgagaccttgtctctacaaaaaatttaaaaaaaaaagaaaggagggaaaatgaaatgaatcaagtatagaaaggccgaccatatgtaatttgcaattgtgagtagagtattttgatttaagcagaagagttcatgaagggtactagtgagggattggtttggaaaggtaaattatcatgtgtacttcagtatatgtgctgaaggtcaaatcatgccatctaacatgtgagatacaattcaaaacaagtggacacttggtcttgatctcaacctggaaaaccaaggttacatagggattctatagcattcccaaggctagctaagatctgaatcttaaacaag

SEQ ID NO: 65479 - DNA, 1062 bp, Homo sapiens
gaaagttggattggggaacatcaaagggaaaagcagagacaacataggaaactgatgaggctgggtgtggtgcctcacacctgtagtcccaggtgtggatcacttgagcctgggagttgaaagattagcctgagcaacatggcagaatcccacctctatattaactacaaaaattagctgggcattgtggctcatgcctgtagtcccagctacttgggaggctcaggtaggaggatcacttgaacttgtgaggttgaggctgcagtgagccatgattgtgccactgcactccaacctgggtgacagagcaagaacatgtctcaaaaaaaaaaaaaaaaaaaaaaaaactgaaggtgatgagttcactttgggatgcattaattttgaagttactttgagccgttgaatagggagttggatattctattctgaatctcagtaagtgctgggctagaattagtgatttagtagccattagcctataggcagtggttgaaaccatgggagtaaatatcctgtttaccttttagcttctctgtaacagggaatagatttttaagcttacgttgcttgcctccttcctttatttatttattaagcaaactttatcagatccctattatgtacagagcaactaaattaggagctggagatctatatatgaataaactcaaaaatgtgtttttaaattgcatgtgatccatctggagagatagaaaatcagtcacgatactgctgtgcatgtgtaaaatagaagtttgtgcaaaatgcagtggaaatgtagagaagagactggctgcttatgagactggtggggagatgtcacaaagtagcatttgccatagatcttaaagaaagatttgccctttcttagaaacaggggatagggatggacattctaggtagagtgaatagcatatgctgaggtatgtaggcctgaaagaaatctgtgtccacgactgggcacagtggctcatgcctgtaatcccaacactttgggaggctgagatgggtagatcacttgagtccgtgagttcgatactagtctgggtaacaaggcaa

SEQ ID NO: 65480 - DNA, 1321 bp, Homo sapiens
ctgagggcagatatggtccgtgtcctcaggaagatcactatttagtgagggatggagaattaaagggatcattatggactatgttgagtgacttgatagaaatgagcacaggctgctatggtatagcactttggaagtatttggctcagactaggaaatttctctaatttcctcaactaaattctgaaggagcagtgagagtcttcctatgaagaaaggcaagctagagcttggggcctggagtccaactgccttcatgacctatctctgtaacttgaggcaacctgcatcccgtccaactgcctctatgacctatgtgtataacttggggcaacctgcatcctctgtgacatcaattccttatctgtaaatggtaatgatactagcagatacttcaaaggcttgttgaaaggcttttgtcagataattgatgtgaagtgctcggcaaagtgcctgacatatgattgtctctggcaaattttaattacagtcagtattactaaaagggaatgaggccaggcatggtgcctcacacctgtaatcccagcactttgtgaggccgagtcgagtggatcacctgaggtcaggagttcgagaccagcctggccaacatggtgaaacccccatctctactaaaagaaataaaaaaattagccagacatggtgactgaggcatgagaatcacttgaacccaggaggcggaggttgcagtgagctgagatcgtagcactgcactctgtagcctgggtgacagagcgagactctgtctcaaaaataaataaataaataaatgaaataaaagggaatgagggagaagctttgatccaggtagtggtatgggatattcagatctatccctttccccaaagtctgggaactgctggtaattgactgttagtcgagcaaggaagcagctagcatgaggcttgggaggagttaattgtgggggagagaaagggctgcagatcataccaactaagcttggtagtagtggattagaagatgagaccaatttggatgcagtcataatttttttctttttttttgagacagagtctcgctttgtcacccaggctggagtgcaatagtgtgatctcagctcactgtaacctccgcctcccgggttcaagcagttcttctgcctcagcctcccaagtagctgggactacaggcgcacactaccacacccgactaattttttgtgtttttagtggagatggggtttcaccatcttggccaggctggtcttgaactcctgaccttgtgatccacctgcctaggcctcccaaagtgctgggattacagacatgagccactgtgc

SEQ ID NO: 65481 - DNA, 1339 bp, Homo sapiens
gaaggacctggggtgtttgtggtgcaggtgatctgtggaccacactatagagaaaccatctggtaatggcaagttttcagtgagtcagaatgcacacagcatgaggaatgttggtttgtttctggacagagtaggtagggttccaactgtcactcctggttctggaatcatataacctttcttttcattcctacagatgaatcaggagatgaagagtctgtctcacaaactgacaagactgagctgcagaatacccttcggaccctctctagcaaagtagaggacttgagcacgtgcaatgacttgatagctaagcatggcacagctctgcagcgttctctcagtgagctggagtccctgaagttgcctgctgagagcaatgaaaagatcaaacaggtcaacgaacgagccacactctttaggataacatccaatgccatgatcaacgtgagtgcagatggtgtctgtgttgctttttgattcattccctctttgaaacataattctccccaaatgcctaaaaattgtaattgataaagcacagaacattagggcctgcttcactggtcaagggctttaagttacattgtttactgcatgaaatagaacaggctgtacagattgaatgactttcatgctctgcttaagtgatcaggaggtctttgctgcagctgggaatcaggagtccagggttccttcactgactgctctgcaaccactaggacatctgatcagtattagctgagtcccttaatttctctaggtcgtgattttatgtatgtatgtatgtatgtatgtatgtatttatttatttttgtctcatttcatctgttggaactaaaagatctccctgagtcccttccattgtcatgttctttgagctttgagttggagtcatctccttactttactaacgcattcaggcataaagggtggtaagtggaggctagatcaggtactagtgagaaccttatagtactagttattcccatctttagtccttgaattcgaggataatttcgatgataagacaaaatattcaactttgggcacttttctttaaaaagagtggtaaaacttcagcctccttatgactcctaacttgggtggctgttgttggtttgcagaacattttagctgcttgggtgcaagactctgagtaaacagagcacccatggcattaccgatgtattgatacgtatgaagtgaatacatggtttaaacagtgctgcttttcctctactgattcttgcctggcaggttgttttagttaccttctgcataaaaacattcaaaggcatttcataagtgagaagagtactctgtgagaaattatgta

SEQ ID NO: 65482 - DNA, 1829 bp, Homo sapiens
acaagagctagtggtacctgtctgactacatataaaactccttccaaaacataccaaaccacatattgggaaatatgccataggcctgccctagtcaacttaggtggtcccacccataaacaaaccagcgggatccagagttatcaatctgtgcactaccctcaaaattgcactgaaatacctcctatcaagtatactggcagtttattttttcctgcaggattcttctggtcctcatcttcctccaagaattatttagacaagttgtcattcctcctgcttttcatacctccaaaacctgcagtttcttatatatgctgtttccaaaatactgttttccttttaagtgggattgtgtacttcctagacccatcctcggatgagctgtcctaataggccttggcaaaccacttcctttacctatcctgggcttccttacgtacccagttacttagatgtcccattacttaaaaccttatatggaatcccaactctcccagaaacattgtgacaggccatagtattagttctcctggctagcttctagagattgaattactatttcagctagccttttcagggaagaactttctggccagaaaataccacctaatattgtagtgcctgaagaacctatcttgtaccctgagattcatgtctttccagcttctgcactaatcatttataatcataagtgtatctgcccagactcaagagctccgagatcaagtctgccttactcccagagttccttggtattttttaaactgctacagactttttgtaatttgagaaacttctttagtttacaatgatgacccaggcagaagagattcctacaatgatgacccaggcagaagagattcctaagaagtggtttccaaaaagctccaataaggaggaatgtggaggaaggtccaagtagtatacttggagtagaaaacatgagcgagctggcctgtcagctgtgcatctgtaattcagcctgcattattcataatgtaactgaagcttgggggtggggaggtaagaatagaaaaaacggattcatgttacagtgtggcaggtgcaggagatggaaaatggcccagttcattgagacccttctggccttcccatactatttgaggaaggaagagcagttcatgtgaaaaattgaacaacaaacctgtcttccagactttctcaaacataccaaatcttatggggtgtgtgccatttctggcatgcaggaattctggatatgccaggtgtgtttggctgcttgactccactgaaagggaaatggctctgctttgtactgtggcagttggcaaaggactttgacctctgtgttccaatttggacagggaaaagtgcagtctcaacatgcaggttcctgggcataaccagcgggtggtagggaaatgacacagtttgtgttagacactcgattgtgctagaagcttgatattttatgtgaagcttggtattctatgtgaagtgtcttatagcttgttgtcaccaagtaatgctgtaaagttcaaaagttagtctattaatagaactgtcagtcactagagatcgggaaaatttttacacccagttctctgagagcagatctgctgaatctttcctagctattaatagacggcttaggagttcccaccagtagagtatggtggaccttaggaatgaacatattccagaaagattaaaacacttggtgattcctttttacttccccagaaagctagttattcttatttcatatcatttgaaccatagccaatatttaatactctaaacatttaagggtgctttttttacacttctgcgatataactcta

SEQ ID NO: 65483 - DNA, 1029 bp, Homo sapiens
cgctctgtcgcccaggctggactgcggactgcagtggcgcaatctcggctcactgcaagctctgcttcccgggttcaacgccattctcctgcctcagcctccccagtagctgggactacaggcgcccgccaccgcgcccggctaattttttgtatttttagtagagacggggtttcaccttgttagccaggatggtctcgatctcctgacctcatgatccacccgcctcggcctcccaaagtgctgggactacaggcgcccgccaccgcgcccggctaattttttgcatttttaatagagacagggtttcaccatgttggacaggctggcttcgaactcctgacctcaagtgatctgcctgccttggcctcccaaaatgctgggattacaggcatgagccactgcgcctggccagctttctgaatttgacagccatctacttttggggggctgtgaagttcattgtgtgagaagcagaactgggaagactgaaggggtcttatatttttcctcccctcccagctgtgcttaaatacatttaatattgtggtccctgagaacttagtatttgggtttttaggaaataagtcttagtctgggaaatcagtatcctaaaatcacctaatagcatttttaccttcttccttcttgcatcagaagcacagttgtgaatagattgcaggtctcatgacagcctctgctttgcttcttattttgcaaatgttgcatgtaaggctgttctgaggagcttgtttattattcagcatgactctccaagctcccagttcagccaagttcgttccccaaagcaatattaaccaaaatcagacttgagatctgtgaaatatctagcagggagctaggtaatcagtgacacgagtactttgccagttgtgaatataaaatttcttaaattgcttagattgcactaatctagcaaatgagaaacaaatctgcatataactaacaaaaggaagttttctcagatttgaacccccagaaaaaacactgctaacagtttagtgtatt

SEQ ID NO: 65484 - DNA, 1005 bp, Homo sapiens
ggagacaaaagaaaaacaagttcgagacaagaggagaaaaacccttgttataattgagaaagtaagtttagaatttgttgctgtagttagtttcaaatacggaactgtcaaatgtatgtatatactagaactgaaacagtgagcaatcagtcaatgttctttggttttaattcatgaatatattgctggtaagtgactattgtgtaccacataactttggaaaggattatggtatgtttcacctattggcatcatggaaagaacactgcagttaaagttggaagtgtattgggtttttgtccaagcttattcagttaacagctgagtgtctgggcaagtcacctttctaagcctgataaaatgggaatgaaaattacattgtcctacctgtggattaatttagttcacagatatttactgggcactattctgggtgctgaggaaaataatggatattaatagttgatttgtaaaatgtaaataccacattgtaaggccatacaccatagtggttgaaagtatggactctagaaccaagctgcaaatcatgtctttttccatttctgagtctgtaacttaaggcaagttatttaacctttctatgctgtcctcagtttctttatctgtaaaaatggagatgatagtagtagttttctctttggattgcttttttttttttttttttttccttttgagatggagtttcactcttgttccccaggctggagtgcaatggcgagatcttggctcactgcaacctccgcctaccgggttcaagtaattctcctgcctcagccacctgcgtagctgggattataggcatgtgccactatgcctggctaattttgtatttttagtagagatgggatttctccatgttgttcaggctggtcttggactcccaacctcacgtgatccgcccatctcagcctcccaaagtgctgggattacaggcgtgagccaccgcgtctagactattttactgtctttgcctgctagaataga

SEQ ID NO: 65485 - DNA, 1049 bp, Homo sapiens
gcatggcggccatatcacaggggcttcagaataggacttagttaatcctccagctttcttatcattccttctccctcagtgctaccaaaatatatcctcttggagagaatttgcaagtcagaatatctgctggtatctccctcagacagcatggaagggtggggataactggagaattagctaaatcttcctcagttaatgctgacactttacttgatttgtgagagaaagtggcccaaggttctgtatttgaacctgtagccatagcaatttgcttagaagtagggctttgcattgagttcgtgtctctaccagtacttgaggggagggagtgtaggtggaagaaaaactgatttcattgagtgtagttgtatatatgtttgtcctgatagattctgtgtccgaagcctgtccatgttcggcccccaatgccacctcgttatcctgctccctatggtgagaggatgtctccaaaccagctctgcagtgtcccggtatgtcactttaagcctaacaaaaatgtgcagtatgtattttctgatcactatttgtaagatcactgccagtatttagatttgctgacatctcctaaattatacctattttttataatctccttacttaaattgctggatctaattgtccccaggtcagaggacagttgtttcttacatcagctcttttcttacctttaaaaatctaaactcattgtgatcatctggttcctaccatttcagtcccatgttctactgcttctttttcatgtcacatggtcatggtgtttttataatttctagcattactctttttttctattccagagcttgactctgtaatttgagagtttttatatccaagtttatactgcatttctgctgagtttccttattatgatgtaccccctgttttatagcatattcttttttttttttttttttttaccttagaactcttccctcctgggtcacccttttcctcctagtgttcctcctgttctcagccccctccagagagcacagcttcttggaggagcacaggtaagcctgtga

SEQ ID NO: 65486 - DNA, 1223 bp, Homo sapiens
catttgcttagcagaagaattgtgtaggccgggcgtggtggctcatgcttgtaatcccagcactttgggaggccgagatgggtggatcatttgaggtcgggagtttgagaccagcctggccagcatggtgaaaccccacctctactaaaaatacaaaaattagccaggtgtggtggtgggcgcctgtagtcccagctactccagctacttgggaggctgacgcagagaattgcttgaacccgggaggtggaggttgcggtgagccgagatcacgccactgcactgcagcctgggcgacagagtgagactctgtctaaaaaaaaaaaaacaataattgtgtaaaacttttttgtaccactatgaactatttcttacatgaactgtgtcatcttatagatgatgattggcaggaagcacatgagcgcctggctgaattggaagaaaagctaccagtggcagttaatgaacaaacaggcaatggagagagagatgaaatggacttgttgggtgaccatgaggagaatctggcagaaaggctcagtaagatggtgattgaaaatgaactagaagatccagctattatgagggcagtgcagaccaggccagttttacaagtaagtaagttactgtgatttgagaactatagcagactaaaaattaaagtgaagtattgaactttgccattttattttatctattataatgagagatttacatataccatagaaaattgataatatatttcctgatgatagaagttctagagataaacttggggaataatgtatattctggagccctataatttcgtattctaaagcagcttgaggctcttttggaaccttgttccccagcagcagataagtcacccagagagtatacaacatttcagactctgtatgttttccttttttgttagccccaaccaggaagtctgaattccagtatctgggatggatctgaagttctgaggcgaatccgaggaccactgcttgctcaggtattaaatattttctctttacataaaatttataatatccaaaaattttaagttcctgtcgtcatcctttccttactgaaggggtttataggtctttcatttgctagaattatgtcgactactgcatccagcacttagctatgcctttctttagcctccagggtaaaggttgcaagggagccattggaatttaaatttgttagtgtatgattgtgatttgaat

SEQ ID NO: 65487 - DNA, 1047 bp, Homo sapiens
ggcatctggaataatacctgctattacagtagacattttaggtcactggctacaaatggtcacctttccttaagaaactagtcttctgcatgaaaaaatgtttgcatcatcttagagcaataaatagtgttgcagtaatcccaactccttctctaaaaataaaagcttacacttaacatggtgcttattatgtgctaggcaccattctaaatattttacatatattgttaatcctcatagcagccttgtgagataggtactattattatcctcattttaacaaatgaggaagagtgacgggttaagtaactatagacacaattactgtaaactactagttatgtttaatagttttgggggagtctttggaaatctcctgcctccacttggaaggaatcaccctccttcctacctcccttttattgatagctactatagtctttagagattgagattgccttaaaattaaatcacttcttcctttttattttgttttcattcaaaactccctgagacaggcttcaggggttattacaagtataagtttatagaagcagccaggaattcagtaacccgtatcagagtataggttagttcgttattacggataatctctttcccttcatttgtctgttattcttttgcctaccttttatcattttgaccaataatggactcaggtcaagcactggcatatctaagtaactatatttttaggtcatttgaaaaagatacagggtgaaatattgttttatagtaagggcacaatatctctaaaatactacttcagataattttttacaagagtaagaaaaatctaaaatgatgatgatggtattttatggcatagattcctctggttacatgtttgaaaatgtaacaatcaattcaccagagatctattctcacagaatatggcgacttaaccaatatttttaaaatattattattaaggggaaatagattatccatatttgataggatttggtaaagttagcaagcatgaatactggaagtagtgatagaaaagcatgcaaattagaactc

SEQ ID NO: 65488 - DNA, 1009 bp, Homo sapiens
ttcatgaataactaatgtcttttctttttttttagtctttggaggattgtcctctggatgaagatgaagatgcatttcagggactgggagaagaagatgaagagattgatcaattcaatgatgatacatttgggtcaggtgcagttggtaagtgacatctttcgcttataatatcatcttagcctcctgctcttttcaagtgctgtcttttagaagtgctttatcttattaggggtaaccttattcactaacttggcaagatattcttctattcctcatcttagaatagttcattcttcactggaaacagcacctatcctgctcctctgggtctctttttgccttacctataaaatcaggtattctgtaagccttgccccttccagctatatgatcgatgactacaggttgcccctatgagggattcaaatgtttagagaagtaaacatttaagagagatttaaattaatcctagatgagaggaatttttatttgtataacatataacttatggaaaactagtgtactagtagaaaattcagattctaggatgtgggtatatgtgtttcaaaatttagtctatcactagtatataactttgcaacttatagtatcttcaaaatataaagctttttatagcaagaattttgggggtcaagaaaggactcataagttagaaaagtatgcacagatgaaattttgtccatccctgggtatagatacatattatttatttatttatttattctttttcgagatgaagtcttgctctgtcacccaggctggagtgcagtggcacgatcttggctcactgcaacctccgcctcctgagttcaaacagttctcctgcctcaggctcccgagtagccgggattacaggtgcccgccaccacaccgagctaaccaggctggtctcaaactcctgacctcgtgatccgcccatctcggcctcccaaagtgctgggattacaggcctgagccaccgcgcccagcctatagatacatattt

SEQ ID NO: 65489 - DNA, 1083 bp, Homo sapiens
cggggcagggggcgggctgggggagtcgcaggacttagctggacgcgactggtctggggtcgcgggtctaatcctagggctgggagctggcttcatgggtcgagacagtcccattagttgccgctggggaaagttggcctccgttttggggtggggagggcccgttaagtgctgtaaccagaccacacccccgcccccacccctagaggagccacggagggtagagcactgcatctccccgggtgcttttcttaagtaggtgtcacccgggaattcccagagccgcgtttcccgccctggacccggaaccaccccccacccacctccactcgaattacactgacacacatcccattcacacaggctaccttcaggtgaagggggcctgggcttgccgttggattagggccccagcccgtttactaaagagggctccgagttgggaggggggcgtgtcctgcagaagttccttctgggctagtgctgggagacgcgggtttggagaaggtgccgggaatgtagcaatagcagcagacagtactgaccctgtcaccaactcactgtgtgaccttgagtgactcctaatctctggacgtaaactttctgaatttgtagcatgaaagaactgatgtaaatgatccttaagaatttttaatttaaaaaagcagcgatttggtaaagtagatatttgtgatttggaagggagtactgctggaagttgcctctgataaggaggcagtggcatgcctattggcatgagtttggaagggctctggggtaagaagaacgccctttgacctaatctttccattgtaaacagggtagctaagaggtagccaggcaaggtgtatcacaaacgtacctactgatagaatatggaattctgattctgaatttttgaaaattgaggacaggtatacttgataggaatgatctaagaccaaaccaaaaggaaaacttggagaataaatcagttgagtaagattgaagtaaagggggaaaatagaacacacctaggatgtggtggcctctagcctttgttcgataatctgtaatctttgcccactttgatcatcacaactc

SEQ ID NO: 65490 - DNA, 1006 bp, Homo sapiens
agttcttagccgactccttgctaggcggggacaagctcccgaaaacaaataagacaatgtgatgtgggctacattgggtggcagtcgagtgttctaaaaatatcccgccaggaggaaggcattccgagtagcgggatcccgcgcagcctcagggctgctggcagtgaaagtggggggatggaggaggtgtccagaggaaagacctggagatctggagatacaggacggtcagggtggtcagagaatttggatcttttgcttgttggaaatcgggaccgctccgagaaacgtaagcagctcgatgttgttagtgccagtggagacacttggcactcacaatttgcagacgtttgggaaagcatcgtttctcaagaggaccccgttcccgtgtctgtaaatcagagatggtacccacttcgtagttcgctgtgaagcctgtgagcgaggaggggctttaaaatacagaactttgcactggagcgctccccgtcctcgcagcctgcttggtgtgcaggtggttcccaggcggcttctgcttccgaaaagcagatcgtccctttatctcgagtcttctccccgcctctccctcttctccctaccctatttgtcttcttgggaacaaatggcacattcatcagagtggagatccataaacgggactggcgagccgaagatttaattctgaagaataggatctgctctgtgctttcaggttaaaaagctgtaaatatctttgtaattctagcagtactttgccctcttctgccatctgaacgcgtgctccctgctgacctcatcggctcccataaagatacggtgcgtatggcagaggtcgggctttgagccggccccgcgggtctcggccgtagttctctctcgcgtccggcacacttccttctgcccgctgtgctcgctgggcaggttgtccccgccttagtaccaggagggcttccgcgccccctggtggtcatactaggaaaggcgagtagatcagaaatacacactg

SEQ ID NO: 65491 - DNA, 1062 bp, Homo sapiens
tacagaggttgtccgagctgagttttaagggctaaggaaatgtttgtcagttggaccaatgcctttcagcagaactccctgtgtgatagagtgatctaaaagaatggtgtgtccagggaatggtgtgtccaactgcttgcttggtctagagtgtgcatcatagaaggagaagtatgggtggagctggatcttaaagggccccacgtgctctgttaggcactgggcctttaaattataggagctaagctatcattggatgatgttacgtggcagaaggacatgatcagttctgagtttagggaagttgatcggggaggtggtagcagtgccctcaaattcgactcccttgaatgtggctattaacctggggatgctgattgttgcagaccagccagagaatgagatgctgggggagccaatcaagagactgtccacatggctggagaatcccaaatagccataggatttcccagtaacaacttctgccgtggattcagggggatggtcgtgggtgaaggaaagaggcttctggtggcattcattgcccatggaattctaagtgttcgagagtgctatatcttggacttagagggtcagaggctgatgaagcttgtgaagaagcaggtgtggggggtttatcccctgcctcacctccacctttcacaacagtcagttctctgtgcttagaaatcagcaatgtgctgtgcagcagctgtctgggaagaacattgaacaggaatgtagaaacagctcaggcccttatgctgggtgggaatggaatcacttcctttagatggccattttgtgaatttttacagaggaagttgaatgagattgagaaagcttgggtccccagaggtggctgggggccgggggagagcttcctctttcttataaacaggagcttctgacagggagtgacatagcattgtttcctttgtgataggtggtttctgaaaacaggaaaatctttactcctaatgtgaaaattgaaagcttgtcctttgtaggaattgtgtctggaacctgtttgaacagcatggagaagggtttagcgaccct

SEQ ID NO: 65492 - DNA, 1068 bp, Homo sapiens
cgcttgtaatcccagcactttggggggccgaggtgggcggatcacaaggtcaagagtttgagaccagcctggccaacacagtgaaaccctgtctgtactaaacatacaaatattagctgggtgtggtggtgggcacctgtaatcccagctacccgagaggctgaggcaggagaatcgcttgaacccaggaggcgtaggttgcagtgagccgagattgcgccactgcactccagcctgggtgacagcggtagactccgtctcaaaaacaaacaacaacaacaaaaaccaagaggaataatgtttgtaacacagcatagcatctggcatatatgtgcttaatgaatgataattcaaaaaacaaaaacaaaaagctcactattgttgaagtttctgccaccatactatggtttcttaggtttttaatttcccctggaaagaaaacaagaagtatcgtgctctttttgcagagagaatgtgatgcttcccatcctctagactgtggatgtggaaaagtaaccctccagttttttttctgaaaggaatggagtggggcatgacggttcgtgcccatttatctgttagagtaataaacaggaattaagaataaacttgaatgtgtgctggcctgattgggaagttggctgtaaactctccacagatccccaccctcctcacaggcgggtccatcagagtcatagtgagatcaaacaacacttaggctttgtgagtccagtgttactccaattgtggatcgtggaaggacaatatcctttcactccgtgatgggggtggacttaaggagatgtttgaagtctttctagctcatctcagtctgccttggagaaccagatacattaaagaacttcttccctaagataaggaatcttttccaataactgtgttctcctttttcttctgagccagtcagagggtccctgagaggaccctctttgttaggtgtgaagatggtgggctttggcctctaaaacatggtttgagtccacttttcaagcatttcgtagcagtgtaaccttggtcaggttgcttaacatctcttagttttaatgt

SEQ ID NO: 65493 - DNA, 1131 bp, Homo sapiens
caggattccagcatgatcgggttctggtgaggaccctcttctgggttgtggactgccaccttgctgtatctgtatccttacagggtggaaagagcaagctagctctttggcctctgcttataagtgcacaaaacacagtcatgagggctccacccttacaacctaaatgccttccaaaggtcccatctccctctaagtaccatcccattggggattaggcatcaacatattaattttgggagagcacattcagtccataagaagtatgcatttgtagtggtataacagaccatttgtagtgatataagaagcatacttgtctcctgcagttacttatattcatttatttattcagcaaatgtctactgagtaacccacatgcttgacagtgatgaatatcaagtagtctaagttgagcaacacgtggtcctagtgcttgaggggatctgaatcagttctgggagaagttagggtggataaattgtgggcatagtgcagcagagcctggctggggtgaggggtgggtggagcaatacctggctggaggagctgtgaggtgaccagtcttgaagcatatggatttgctaggtatgcttgatttttgttagaactaagaacctcaaagtgaatccaacttggaaatccacacattaaatctagcaggttaaatactttttaattctttaagtagaatattggatgacaatgacctaccaggcaaactggtagattctgcatttctgggctcttccaatggggcaggcaggaagccttgccagtcatttgcctatttgcattcaggaccattccctactgtccttcctctgctcttctctgtatcacagggaactacatttcccagcttcccctgccaattgcttttggtatatttgactaaggagagtgttatggactgaatgtttgtgtcccctcaaaattcatatgctggagtctaatcgccaatgtgatggtatttggaggtagggcttttgggaggtaattaggtcatgagggcgaattagtacccttataaaaagagacgtgagaaagatgatctctctctcagccatgtgaagatactggaagaaggcagctgtctacaagccaggaagagggtcctcctcagacatc

SEQ ID NO: 65494 - DNA, 1227 bp, Homo sapiens
tgaactgtggccatggtgggtgcgggcgggctggcgtgcagagagcaacatttgttttctaaagcaaagaagcaaacaaattaaagaggacttgactgagcagctctaatatgaagactgcttgggattctgtcattttttggggaaagtgaaggtgtataaattgtgaaaaggagggatcatttgacagttaaaatcacattgctcttgtcacctcgcaataagttttcaatacgtaaatatgcagcaattaatgctcaactagaggtacaaggtacctgggagtttaggagaggccgagactaattcttagggagaataaacagagcttttttgcttagccttccatcttaccccatgcaacctgccagttccacaaactagtactttctctgcttttccttgtttaattagattccactggctaattaggtccagaaggaagaggccatccagatctcgaaaataactccttccttttagttatagttattagtataatatagtaattatatttggccacgcccaacatgtagagtgattgacttgggtgttgaccttagatttccttgggtggctactgatgaggtcagactgttttattaagacttttttacaggattgctatgaggattaaatgagacatgcctgtaaatgcactgcatagtacctggcatatgacaaatgtgcagtaattgctggcatttttgtatttatcattgtcatcacctaacatttattgaacatgtactttatgttaaacatttggcatgtattgtctaatttaatcttcacaaaaactctaaagtgggagttgtgataattctcatttcacagatgagagaactggtgcttagggacacttacagggtgcgttcaaggtcataaaactgctaagagagatggagcagaaactggaacctggtctgtttgatcttaattccttaaatcctatattatctggattcccgtattactaacaaagcattgaaaagtacattttaggctgggcctggtggctcatacctgtaatcctagcactttgggaggccgaggtgggcggatcacttgagctcaggagttagagaccagcctggccaacatggtgaaaccttgtctctactaaaaatacaaaaaaaaaaaaaaggttggtgtggtggcgggtgcctgtaatcccagctacttgggaggctgaggcaggagaatcacttgaacccgggaggtgga

SEQ ID NO: 65495 - DNA, 1960 bp, Homo sapiens
cctgatatctgccactacagataagcaaaaaaatccgtgcgttccacggtttggacacgggtggtttagggctatatttttggttccttaagaacagggaacaagcctgacactgtcattccactctttcatttttcccatgggccctcttacctaaagactgaagtgggaacactttagcagagcatatgggcattgtcttgatcacattcctgccttcccagccagcctgtctcctgccatcctcctcctgcttcccacgcttcagccagagcaactctgtctggttccccaggcatttcctgttcactcataccctttacttactgtttcttctcgtggaattcctgcttttagtctctttctctacctggccaactcacagtccttgagactcagtcctgctcatctccatctttagaggcttttccagatccctccaggctgtgcacaccttgaccagaactcataccttactccacgctgcatattagagctgctgatttatttctcctttgtctcccactagactctaacaccttgcaggaaaaatctagatcttctttctgattccatagtttctagctctgttccaaagttgtagtaggggctgaaggatggcttttgaatgaatggttatagctaacacttagtttgctccatacaacctaggatgtgtgtagtaggtatgtcataaatatttgcctcattttaagttgattagccttggttgaaatctattttccccataagctccctagaaccttctcaaccgaagctcccgtggtaggctctttcctctaaaagcagagtttccacaattttatgtgctgcaggattactcaggagggttgaaagagctgattttgtggttccaaccctgggtatttttattctgtagactgagatggggtgcctggaaaatgcctttaaaaaaataagcactctgtgattctaatgacagatgctggggagtgcgtagggataaataccattctgggcagtggatgcccgataaagctcccctcctctgatgatgattgctgtagttcacaaaggaatcagtcctctcctttctaacggattctgcctgcctttatttacccagaaaccaaggatgacctagagcagctcacgactgagattaagaaaagggccaacaacgtccggaacaaactgaagagtaagaagggaacaaagaaaacaaggccgtccccaccaccatctatctcagctcccctagggtccagctttccgaactgaaactcctcttgatggaagtgacaccacttggtccatctttgcttgtggtttgggctctgtccccgcaatgatccattgtagccccagaaatttaccttttcttaaatcctgactgtactggaaagagtccagaattgaagctaggagatgagaattaaaatgtgctttcagctgctgagtagttttgtgacttggtcctttaacttagtctttcaacttgtctctctttttttttttttgagacggagtctcactctgtcccccaggctggagtgcagtggtgtgatctcggcttattgcaacctctacctcctgggttcaggtgattctcctgcctcagcctcctgagtaactgggacgcacctggcccatcaacttttctcttattggtcttatttccctggcaactacatacttttttttttttttttaagacagaatcttgctctgttgcccaggccagaaggcagtggctcaattttggctcactgcaatctctgcttcttgggttcaagtgattctcatccctcagcctcccaagttgttgggattacaggcatgcaccaccacgctcagtcaatttttgtatttttagtagagacgaggtttcgccatgttggccaggctggtctcgaacttttctggcctcaagtgatccacctgcctgggcctcccaaatcgctgggattccaagttt

SEQ ID NO: 65496 - DNA, 1080 bp, Homo sapiens
agatatttcttggtgggctaggcataccaccttcccataccctcactccccccatttgggagagtatagttcaatgaagctactgtcatagattcagttcttccagagcctagaaggtttacttagttctgttgctagagcctgcattcttgcccagtgtatttggtgcatgcatgctattgatcagaagagaaagcattattgctcagctcaatttaccatttcttccccccaagtatattgcaataactattttaactggaggagtcattagtagcagattccagtaataacagtgatagtgcacctgccattgtgctaggcactttatgtgtcttctcatttaatcttcacattagtattgtgagggagggactgttattctgttttacagatgagagaacaggtacattaagaggggttaagtggctttttcaaagtcacacccagtaagtgccagggcaaggattcaagcctaagtctcatggtgaccagaacccatgctgttaactgttatgccaaaacctggtcatcgtaaaggctgtggaatgcacgtcctgtggctcatctgggagctgaccttttgaggtgacacctacctgttacatctccgtgggctggatgtgtgggaatgagtgaggaagtttcactgaatagcatgtttcttggaggcggagataggttgcaagtataaccttcctctcctctttaggcatggagaagcatattgaagaagatgaggtcaggtcatcggcagaccttcggattcggaaatcccaggtaagacttttcctggtctcatgattagctagtccaatctcttattgttttcccttaactgtggagggattttttttttttaatacaatccttattttgaaactcaatttgaagacctggtaaaggagaactctccaggttgaaataggggtcagggccagagtccagcccttttggctcctctcctgtactctccttctctaaggaggcccctgaagagcttttcaggcttcctagagcacagcttaggatttagcgtgccttcttgttttacaggagaggaaattaatgtcttctaac

SEQ ID NO: 65497 - DNA, 2860 bp, Homo sapiens
gggaggataaaagtatggtgtaagttgctgggaggattagagaaataaataaagccataccctttaggaatgtagtaatgtggaaggcagggccccgtggagtggaaggtgctttggatgagaggaatggtatgaacataatcaagaaagagcaagtgtgtttaggagtggcaggttgtctagggtctggagaaagggtgtgtctggagtagcataaggttaggatggattgagggagggcttgcccatgaactagcatgttatgagggccttggacaccatagtgtagtgaatggggcaaggaaatgttctgagctgggaagcaatgtaatgagataagtgctttaggaaggtaactgctgatagtgttaaggatggcttggattagggcagaaataagatgagtcaggaggcaattgggggagtgttgtaaaggccacggtctttatagggaagtcacgttcctaattttcagggtccttatcagatggtgtttcaccgtgatcttatatttgacgctctacttcttttgttacaaagctggcaaaaagacaaccgatgaggagctggaggagatgttggagagtggcaacccggccatcttcacttctggggtgagtgccctgtgtgctcggatagcacatccctctcgtgagcagggaggccactgcggagctcatgcagtccagcaggtggagggggagctgcaggtgcagggagttcagggaggcaaggagctccccaggagcgtgcatgagggctgtggcaggggcagcctttcttgcaggggtagctaacagtctgtgtgtggcctgttgtagatcattgactcacagatttccaagcaagccctcagtgagattgagggacgacacaaggacattgtgaggctggagagcagcatcaaggagcttcacgacatgtttatggacatcgccatgctggtggagaatcaggtaagtggcagtgagtcccagcgtggggagggaggagaggaaagctcagggtctactgagaacagggagaaagggaatactggaagccagtgaggtagggtgggagaaccattgggaatttgcataaaggagaaacagaatcccatgggaaagtgtgcattcaaattgaatgttgacactttgggtgatcttaaccttgtcattcttgcctgtccctttggccttgcagtcgttgctagttgatacagggtttgatgtgttctgtcaagtacccagttttcctggatttttgattttttttttttttttaagatggagtattgctctgttgcacaggctggagtgcagtggcgtgatcacagctcactgcagcttgacctcccaggatcaagcaatcctcccaggatttgtctttttttctttcttaaaaatcagagatccgggctcctaatggtgacgttttaaaacagcctcctgatatggactagttcactgatgacattgaaaatgtgatcttttctctagttcacagggaagactcaggtttaacataaatttttatttttttccattttttttctgtttgtatttttttttaattttggcaccttttgctaaggcacagagcagacaacaacatgaatgaaggagtagcaaaatagcattgacagaaagactcgaaacactcgtggtgctagtttgacagcttactttgtcccaggcatgcttgctcgggatagaattctggattgcctgcatagggcgctagtttcgcatagttagatggttcctagttcttatgggacagttaagtgtgccacagggtcatggtgctgtgcactgttgccatgaacttccagctgctctgacacttgggataggagagaaaattgcttccatagtaggcagactgcacaacctagttgaagctcgagcacagcttgactagtttttgacattggttccctgccgagggcctggatgctttccccccattccctactggcctctgagaccatttctcaagtccctccatcccacctcttcttttcccccacactgccttgccgaggaactggcttgagattcaagtggtggtaagtgccttgttctgtttacagactgccataaagtgatagagttgggttgggtagttgaggagaattcctaaaatgcctaagattaattggaatgatcaaacttccctgtcaggaagtgattgctaggaaatggttgggaagcttatcaagagaccactgtctggaagggaaaatataaccaaatagcttgggtaaacccaatgtctgtcagttaaagggcctggaaataacttagagaaagcaaatgttccccacctcagatagttattgagcacctactgtgtgccaggcactcttctgcagttagtgaatatactcaattcaggctgaatgatgttgattcaggtctgaatgaccaggaagaggccagcatcctagtgatgtcctaataacaatgagatatccttattttggttcctctccatgtgcttaagtgtaaaaaaaataacaaaggttgtctggggatatctcagagtatatttataggtagttactaggtatctagatagtatgttctggatgcctggtggagtgctggtcacagagaagtagtaaaattcactgaatgtttcttgaacaagtgactgccaccccaccaccaaggactgtgaatgggtgtcctatggaaggccatgcatcaaggtttgtggatgctcttcttgccactgaagattgtaagaaagagaatcccttccccgcattggctaggactgacctgagacgtttacttggtgtgatcagagtctgttctttgcagggtgagatgttagataacatagagttgaatgtcatgcacacagtgga

SEQ ID NO: 65498 - DNA, 2005 bp, Homo sapiens
gcttttcctagagacaagctgcctgcccttccttcccaggtgtgccttgcatggatctggctcacaagctatctccccaaaaacccacacttgaaaggcagttctgtaggatggatgcatggcccaggtggtgctgctaatcttctcctggacttagctcatgaggctttcagatgttacacttgactcctctgttcagaaaccttctcttcattgtcttccactccaggcgcccaagctccgcctcccttctctttttctctaccttgtacctagctcatgctaactgctatctatacattatgtcatatctgatggagcacctgttatttctactttataaatgagacagttgagggtcaggggctcagtaactggcttcaggccacctagtaagtagaggcactgggattcaagttcagatcccaatcattctgtttctaccacaccactgtatttgcccaccctctggtgcccctgccgcttaaggacttctaggcttctgtgctcacgactgtggttatccagctctggtggcgtctgctttttagacttctctcctttgactggttctcttgggctctgatattgttgttgtttagttctttgtttttcatccaactttacctattgcttatgcagggatttaggggactgggaagttattttacatggtgaatccaggctgggtggcattttctgatatccaggcagtgtactgggtctgacaggtaggagtatgggcaaaagtaggaaattagaactctatcaaaaatgcctttacattccctcttaaaatggaaaaaatcagtcagtgactttttatcttggccaactgctccttagagaccccacgatagtggctctgattctatctgtccacatatacagaactgcagtgtgagctgagagctgagagaggccccatatttccctctgctggcattcctagcctagaagtaatttaagaaatttaaactgtcctaggctgggtgtggtggttcacacctataatcccagaactttgggaggccgaggtgagaggattgcttgagcccaggaatttgagaccagactggggaacatgggaagatcctgtctctacaaaaataaagaaaatgagctgagcatggtggtgcatgcctgtagtcctatgtactcaggaggctgaggcaggaggatcacttgagcccaggaggtcgaggctgcagtgagccatgatcatgccactgcactctagcctgagtgatagagaaaaaccctgtcttaaaaataaatgaagtatcctagaaggatgtctgtatgtagagatgtaggcctcttactcagactggtaagatattttctatgtagaggtgacaggggttaggttttggatgagttgttatttttttggttgtttgtaataatgatttgtttttgtcttattcctctctccagaaattgataattatcattgtgctagtagttgtgttgctgggcattttagcattgattattggactttccgttgggctgaattaagagtggcctaagaggctgctgcactgaaatgtaagtaaacgagtggttcttggggactctggatttggctcctcaagaggaaattagcttgggatttcaaattcctcttctttccccctatgattgtccttggacacactgagctttctaaaactttcagtagcctgtggattctttatctccttatagttctattggtttctggctgcagtacgtggatgagctctccgtttgttcttatcctgtagattctgtccccaatctctgtcttgtcgtattaccacttctcccagcatacctgagcaccccaggtgactccccttactcaggaagcatgcttctaagttgggtacatctctgtcttggatctggagtctgtcttctgaattcttactgattttcatggatgttgggctttactttctgtatccttttcaatgtaaatgaaactctgaattgggatttggatctgcagagtttt

SEQ ID NO: 65499 - DNA, 1012 bp, Homo sapiens
agttctgggattataggtgtgaaccaccacacccagcctaggacagtttaaatttcttaaattacttctaggctaggaatgccagcagagggaaatatggggcctctctcagctctcagctcacactgcagttctgtatatgtggacagatagaatcagagccactatcgtggggtctctaaggagcagttggccaagataaaaagtcactgactgattttttccattttaagagggaatgtaaaggcatttttgatagagttctaatttcctacttttgcccatactcctacctgtcagacccagtacactgcctggatatcagaaaatgccacccagcctggattcaccatgtaaaataacttcccagtcccctaaatccctgcataagcaataggtaaagttggatgaaaaacaaagaactaaacaacaacaatatcagagcccaagagaaccagtcaaaggagagaagtctaaaaagcagacgccaccagagctggataaccacagtcgtgagcacagaagcctagaagtccttaagcggcaggggcaccagagggtgggcaaatacagtggtgtggtagaaacagaatgattgggatctgaacttgaatcccagtgcctctacttactaggtggcctgaagccagttactgagcccctgaccctcaactgtctcatttataaagtagaaataacaggtgctccatcagatatgacataatgtatagatagcagttagcatgagctaggtacaaggtagagaaaaagagaagggaggcggagcttgggcgcctggagtggaagacaatgaagagaaggtttctgaacagaggagtcaagtgtaacatctgaaagcctcatgagctaagtccaggagaagattagcagcaccacctgggccatgcatccatcctacagaactgcctttcaagtgtgggtttttggggagatagcttgtgagccagatccatgcaaggcacacctgggaaggaagggcaggcagcttgtc

SEQ ID NO: 65500 - DNA, 1038 bp, Homo sapiens
tgaggcaggagaattgcttgaatccaggaggcggaggttgcagtgagccgagatcatgccactgcaccccaggctgggagatagagcaagactccgtctcaaaaaaaaaaaaaaaccagtgattcagtggtaagtctatcacttttaacaaattttcaagaaaatgaatagtctaaattttagcatcgctatcctctaaggttctccaggctttatagttaatgataagtggctaccttcttttacaaagagaagctaggtccactattagctgtgtgaacttggccctgttattcaacattctctttgactgagtttctttgtctgtaaaatgtgcataacactgtatctgtctcaaaggatgttgtaaggattcaatgatatgtgtataaggtgtttagtacattgtctggtacaacacaacactcaaaagtgtgttaactatcatcatttaagacccaaccactcagcaacagagaaaactctgcagatccaaatcccaattcagagtttcatttacattgaaaaggatacagaaagtaaagcccaacatccatgaaaatcagtaagaattcagaagacagactccagatccaagacagagatgtacccaacttagaagcatgcttcctgagtaaggggagtcacctggggtgctcaggtatgctgggagaagtggtaatacgacaagacagagattggggacagaatctacaggataagaacaaacggagagctcatccacgtactgcagccagaaaccaatagaactataaggagataaagaatccacaggctactgaaagttttagaaagctcagtgtgtccaaggacaatcatagggggaaagaagaggaatttgaaatcccaagctaatttcctcttgaggagccaaatccagagtccccaagaaccactcgtttacttacatttcagtgcagcagcctcttaggccactcttaattcagcccaacggaaagtccaataatcaatgctaaaatgcccagcaacacaactactagcacaatgataattatc

SEQ ID NO: 65501 - DNA, 1111 bp, Homo sapiens
ttttgtgactttaaaacaaacaatttttttttgttgttgagattgtgtgttgctctgtcgcccaggctggagcgcagtggtgcgatcttagctcactgcaacctctgcctcccaggctcaagtgatccttccgcctcagccttctgagtagctgggactataggtgtacaccaacacgccaagataacttttatattttttgtagagatggagttttgccatgtcacccaggctggtcttgaactcctggactcaagcgatccacttgccttggcctcccaaagtgctgggattacaggcatgagccactgcgcccagccagtgacttttaaaatatttttctgaataaaatatagcatgcattgttaaaaaaaaacctataaaatacagaaaacataaaactaatgaacttttaatattattgctgataaccttgtggcacgttcacatactcagacatagttttacatagttcagactatattatccagttttgtacccagttagaaaattataagcatcattccacagcattaaaatctctttgtaaatctaattttcaatatgagattgtggccatactctcaaatatttaacattttcacaatgttggaggtttatgttattttgctgtagctaacagtgtgactaaccttatttaatatttttctcatttaaattttctctttattaccaactcatataagttggagtactgaaataacaggtataaacatttttaagacttggcacataataccatgccagtacccagagctgtgccttccttttatatttgtttcagtgtgtctcttcttattcctcctccttccatgtgaccaggggatctaaaagtcagcttattacagcattgagcattcaacttcatcttgaaagataagcaacagtgagatgaacaacctctcatagacaggtggttggttgattttttttttcccctcttttttctggcacttggagtctagcccttgacttttttgtatgtgaactttaaattttggtttggctctgaacaatctgattgaaatagatgttgaaattttaaaaagatataagagttgttatttttccatatccttggatgaaagat

SEQ ID NO: 65502 - DNA, 2302 bp, Homo sapiens
gcgacccgttcctttgtttccttgcaaccacccttggacctgactcagctaacaatctagccctgggggaatgtgatctacctgatgcgaccctgagttctccccagagcctcctcctgccccaccagctctcaagtaccttttctcctggactgtgtggacccacccagctttcttcctccctgttgtgtgtcagattatgccttgcacttgggaaagctcttgtgagactctcccaaggtgctgtatttttctacctcatggagtattctcccagaaactgcaatgtatttttttaggggagtatctttaacaaagcagaatgattcttctaagtttggcaacaagaaggcttggatctgagtcttctacctggcaggatgccaatcctgtttgttgtccgtatgtcctgaaaacatgagggactggcagatgtcattttggtctaaagagctgacttgtttgaaattcagccttaaattaagctcttagttgttcagcttggggggcaactttgatttttctctgtgttgtagtctctcatatttactcaaggagggaccaggatgatacagtcatctgaggttatgctttgcaaaaggctgacggtatggaatatgtttccatgtctgagtcttagaaactggctgctcattgttagaaagtgatgctttgtgagactattgtcttggggccaaaaataatcagggattttaaattgggcaagggacaaggtgctagaatcctaagctctggaaatatttcatgacactggtgtattcactcatgtgttccagatgtattctaattgtgtatgaaatgtatgtacacataagtgtgtgtgtctcaggaagtaggaaataaaaatggaagctattatgacctcaaaaaaaaaaagccaactttgagctaggataaaaattgggtaaaggacatttgcttacctgcaaatgaatcactgtggaaatgtgatcttcccatatcatcaagaaacttgttttctggatgaatactgggagaataaaatgagaactctggagtgagctaaattgatcccaattaagtttttctgcttagcagacagaaggtataattttttgacaccctttcccacctggtgcctatgctaggcttgtcctgagaacatccctcagtaacttgatattcacatgacctacaggatgtcccatctgcagggctgagtcagttggggaacaccagaggctacacagtagctcttcctgctactcggttaatgagcttggcaggttctttgtctcactgaattcttatcatggaaacagcagcagcagccgctaggaaatcttcaagtgtagtgtctgtgctaacccagtggtaaatcccttagatcccctgctggtctctggcagtctccttgattttgggtaccatgtatattttccgctttgactttaacgctttctaggatagggtaagcacccttaattcaggcactgtccattagcttcctttgcaaaggctacttatggccggtcacaatccagcactcagacagagccaaggcaatatcctcttgcccatggctatgatgtcagacagtggatgggctccagcaacaagagacaaaataactaaaggcctttgctctcctctgacattgaggcctggggcttacagtttggaatacaacatgtgaaggtttttgttgttgtttgtattttttagatgtaaacttgattattttattgctaatttaaaaataaaaatgactttgtattgattgtgaaacggttctggctctgtctcgatgcagaaacacaatgatctggtgccaccatgtggtgatttttattcaggttttagaatgcagttcacacctttttaagccatgtgctggatcagatggttcaaaagtgcaatttttgaacatggtttaactcccacagaatgcagtgtaactatgtttgtgtttcagatttgaggtgttccccccaaaagaatttggttcagtccttgggagtatctggctttaggaggaaatgggggagatctgtcacgatgttatctagaaggtggaatgaccataccaaacatccttttaatctaacttgaatgtctcaccaaaaataacatttctgttggcattctgggtcctagaagccagatccatctcctttttccttctgttgctctcttccttcacaccctcttccatgtccacatgcacttatctccctgcagaatactttttgcgatgatgtttctcatgtattctttctttccttgtctggatgagcagaagaagatcatgatcatgatc

SEQ ID NO: 65503 - DNA, 1031 bp, Homo sapiens
aagaccagcctggccaacatgctgaaaccccatctctactgaaaatacaaaaattagcagggcatcgtggcgggtgcctataatcccagctactcaggaggctgaggtaggagaatcacttgaacccgggaggtgggggttgcagtgagccgagatcgcgccattgcattccagcctgggtgacaagagcaaaactctgtctcaaaaaaaaaaaaaaaattaaatagttttgaagtgcaatttttatcctgacctgtctatggaagttagggaagttatggagtcgtgcagtaagcagcagacacaatgtgctcaacagaaccgggtggaatagatacccacgtggtatcactcagttgtcaattccttagcctttgtcagtattccttcttgatatcttcctgaagaatttggatcatcttttctttgaaaaagaaaagatgcttttttcctttccatgacttggcatttttcctcctctcctcctatagcttagacttctccatgtttctttactgcttcctctttttgcaaactataaacatgccctaaaagttaattttctcctctgtgatttatttctgtattttcccctaccttgagaggggcatggaaagaacatgagcatcagattcagtccaacctgggttccactctcaactctattagttacatgttatgtgatcttaggaatgttactaacttctttgggcctaagggttctatctgtaaaatgagaataactaaatatgtcttatggttttattgggtgcaagtatctgctatctactgcatgggttcttgacttaggtcatcacctctaagagatgactgtccaatttattttttgcatgtcctgacctcttttcctagtacttcctctatgcctccaaaagcctgcctttctgtttctttctttctttctttttctttctttctttctttctttctttctttctttctttctttctttctttctttctttctttctttctttcttccttccttccttccttccttcctttttcttt

SEQ ID NO: 65504 - DNA, 1046 bp, Homo sapiens
ccaaacttcgagaaatctgagaggccaaagaaagagactgacatatccagtttatcagaaagaatcatttaatagagacttaagaacagaagccatgactatgtcacatacagcaaagtgacaagatgatggattgctgtgccattgcccccagactcagggtttatatactatagggaatgaatgtgtacaaagacacaataggaatgggactcggcactcccaatcccactaatgcattttttttcagacctgctggtcctgcatgctgcccctggggtgctgggacacagcccagggagagggcagaatgcagtgctcatggcagagcaggtggcccccaaggctccacactgctgctgctggctggcctagcactgtcgggcaacaaagggcagaggcttcaacctgcaacttccctatttcaatttggccaagagtgcctgcatcacctcctccataaccttcaataaagaagccccagcatgccccaccccaccaaggcctgtactacgaactggtaaaggccctatagctgctggagatcacaactagaccatccagactgtaaaccaaaaataaaatcctaagttccccaactgacttacagatctcacttcttggccaagggtattccaaaataaacctgaaagtctagttcaggctgtgatgggaagggaggtaggacaggcctcattataatctcctccctttgaaattcaagcacaactgactagcattaacatttaatacagagaccttgagaatgacaaaacagactctctgtagcaataagacaccaaattccaaccctctctagtatagaatcacatgacagcataaaccaaaaataaaattctaagcttccctctcaccccacaaataactgaatagaccactctttttggccaaggacattcaaaagttagcctaaaacacaaattcaggccatgattggaaagactggttggatatgcctcattataccctcctccctttggaattcaggcacaactgaccaacattcacattaaaacagtgacctt

SEQ ID NO: 65505 - DNA, 1050 bp, Homo sapiens
gggcatccaacccctggaaaagaacccaaaagaatcccaaattaaaatataattcaaatgaagaatatttctgcctgtgatgagtaggaagaatatttctgcctgtgatgagtacaacaaaggttgtactttaagagttaaacccattaaggttggaacgtttgtgattaagaaagaccagtggagggatagactccctactgtccttcatgatttcctcttttgactttctatagtacatcccccacaccatgcagtcagcagacaggcctcttccaaccacaagtttttgtttatttctgtctgtctccaggcattcggaccgaccaaccagagactgccagaaaagcagagagtatgcaaaggggagacacagagatttcacatgacaggatattcagtctgaaactactcactgttaaactgacactggtcaggagacaatctttgatttcatatattggataatagtactccgaataaggcaatgaggatagataatccatttctgagccacaatgttgagaggcagtcctcagggctaccatgctgtcagcaaggaggaagaggcctgctcctgcagtaacagaactcactgcatttgaggtcaagctgctcaggtcctggaagagaaactctgcattgggttctcatcacagaatcagcacgtgacactattagtcctctgtccattgtactgcaatggtgcttccttgggtctgtttccttcctgtttccttgtgtgggcacaaactgtgttttattcatctttgtatctcttgtcgctatttagttaatcatgtgatataattagtaaatgcttattgaataagaaaatgcatggataattcctccttagggagaggggttctggcccattgactctctatagcactcaagatagagacagtgctgctcaggtcactgccaacatctcccatgacttcctcaatagccttagaatcattctgttgccttcagggcttctagaatatggacttcggtcccctctggtaaactgaatccatgactttgatttacataaaagag

SEQ ID NO: 65506 - DNA, 1107 bp, Homo sapiens
gggattacaggagtgagccaccgcgcccagccaagaaggccatttttaaacaatagaatgagcaccactggttggtgccacaggattgcagagatttggatttacatggtaagattcatgggaggcagggacatgcttgctgtgtgttgagaggtaatcctaagcacttgagaagatctctttgctgtcttccacctaatggctcatgaaaaagggcccagtagatctgtttctcagagagtgtccagggcagagtagtttaattatatatagtctttaatttttaattaaagttttcttacaatccctaatatgtaatatttaagcaatatgagtgtgaaaataatacagaaacagcctgcagagtcacgcaacttaccaaattcacactagcatgagtgcacattttcccttctgtgtatcaccttctgctcagtttacccaaagcagtttataaagtttatgaccattttggaagactggctgataacatttattgacttgggctttgaggaaattattttcaagagaaattaaataacgactcatagtaaacaaatacaaaacaaaagcttttttttttttagtttgtttcacagtatctaaaatggcagagatttcaggaaagtctaatcacacttgaccatgagtgttgagttgcttttccttcctctgaggccaagagttacttatatccaagaccgtgaagaactctttttgacctgttggatatgatcttgtgactgggtcgaggaaaatgaactctagaaaatacataattggttagaatttttaaactttgatttcggagattaaaaaagataactcataataccttttccccaagttttgtgtagtactagttcttccaactttgccataatatgtaattgcagcaatattaattaaaaataatgcaattctccagtctgctaattattttactattttaaataggatcatagttaaatcataattcatccaaattctataaacatttcttttgttgttgtagcctttaggggaaatgaaaatattttaaaattataacatcaagagctaaggggatgtaaggaagagcacagggaagcataaacaggacagaga

SEQ ID NO: 65507 - DNA, 1012 bp, Homo sapiens
ctgatagcttttgataacacaatttcctttgatgacagaggatgaaattatgtatcataagggttgagaaattataatcagtaaatgcaggcataaagaagggagctgaagcttcactgaatacaatacagtatgtcatattttctattatgacatctgcatctctgttcttccctaatttctactttcctgtctctagatatctcttaatccctcccactccatcatcacattctgtattcattgccacattctacctcattaataattgagcaaactcagtccatatatcctcaacataaatatgaggagggagagtaaataagaggattggaaacagcaagacagggaaatgggagaaatttttgttccttgctgactcttttggttcttgaacccttagagagccttcatagacttccctgtggttgattttctgaactcctataatgccaaaagggggagatgaaaaatactagcatcataccaaagtagggccattaaacattaagttataaaatgaaatcgtgattataaactgaaacactaactttgatgacaaggaatatacatgtgaattatttcttcacatacataaagtgatgatacagtgttaacatttggtttgttgtcattttattttaagtaagaacaaattgtttgagtgctcagcatgcccttcatttttttgtaagttaatgaggtggcaaccacagttgagaacacagattggaggaggcaatattgtttttcccaatttaattccattaatgggggcagtgtggtattgggtagattctgcatgttagtcagagtcttcagattgctgttgatcttttggatcacatgaagtagaagttaaattcacatcttctttatatgaatttgaggaagctgaagtgtctggttgcacatcttgttctgaatctagattggacaaataggctaaacatgtgtcttgtactgagctttggccagaagaagaatgaaaatctgccttcacgtcttctga

SEQ ID NO: 65508 - DNA, 1111 bp, Homo sapiens
ttgtcacactctcaggcccagaggactctccatctcttcgggttttttttttttttctctccctctctgagccactcatgtgatgcactgtgacaccaagcagtggtttgacaagtgctgggaaagactaatgaggacaatatacaaaaatggaaggtatacaatatacaaaaacgtgtgagtctatgtgctctgctctcttcttctcagtccaccttctcagtctgagtaatctcatttactgccatagcaactatcactttttaagtaggtgagtcctaaatgatagcattttttgtcaagtccagacccacatgattcgttcttctcaaacatcctctctcaaatggcccaccaacactctatattcacattgtcttaaagaagaattggaataggctcctaccttcaaacatgtgccaacagataatttccctagcctttcccctgcctcagtaaaatatacataggggcaagtcttacttacccctaagattttcatttttctagcaaataatttttgcaaggggctttgagttgaaaaggtcgtggctgaaagttctgtggactcatattctgaagcagtgatttctggaggaaataccagaaacaccggactgtgtgcggtgcttgaatccatgatggtgtcggtgataatttgaaaggagatgatttagttggtacttcagtctagaccatgttcttttcttgtgctgaggctgcctggagcactggaattgtttgctttgtcttggaattatagaaccatagagtcacagagtcatagaatctcaggactgctcaagatcccaagatggctataagtaaaatgcctgggactggggatcagagaacctgacaagtagtcctggtttagttaggagtttactgtgacttttggcaagtcacatccccctctcctggtttctgattcctcatatatacattgaccaaattggactagatgatctacatataaagacattttagggaccgcgcatggtggctcgcgcctgtaatcccagcactttgggaggctgaggcgggcggatcacctgaggtcaggagttagagaccagcctggccaacatggtgaaaccccatctctact

SEQ ID NO: 65509 - DNA, 1627 bp, Homo sapiens
atgggaatattggcacagctttgcagggtgtgacagctggtgttgtggagatggcatgctaatatgctggtaacagggtgcctgatgctcacttaagatgctacatgaatgggagctactgctgtgtgtgttgatgaaattctcgtcctcattagcaggttgtgagcaggatacaagatatttcttcttgccccgtattctcctgagccctgctcagtgtgtttgtataacaaaggtgtccatcctaacaatatggctcaccggttttcaccctgtactgtacctggtgttttgatttagaaccgagttaggtagctgaaaatacagcgtgagctttttaatggggagttggttgactccaggtgtgatcctaaatctagaaggaatttggccagatgttcatgaatttctggagtcccatgaggaatgttgcccagcctcatctgcctcttatctggtcctgctctgtgttaggggcctgagtgccctggggttggaacactatgagctagaaaatgctgatggactgttccacttacgagcaagtagtgagcactaggcataaacaagctgagctctgaggtttttcaactaaacctagccgaactgcagttgcccagaaagctcaggtgagaagggggggctggcattgctttattcattcatcccaccagtgaaaaatgccaggcactgagggaggcactgggggtagtgtgcaggtcagcctagggaaaacaaacaggagcctgcggtgtgataaatactaattagagaaggcctggttgtttgggaatctgttattagggatcagtgttcagactaaaggaggaaaagccttctcacagttgcctcttatctttctcctcagagcatagcggcctgaccacaggggtggccttcgggcatcacgccaagttcatcgcttcaacaggcatggacagaagcctcaagttctacagcctgtaggccctggcccttctgatggaagctgggcctcatctcagtagaggggtagaattagggtttgggggggggggtggggggaatctatggggggagggggctctgtggggtgggacattcacatcatttcactctggtctgagtggtggcctgagaaccatggtggcatggaccaccctcatccatgcaactccaggccccatgggaacggatgtggaaggaagaactgtcaccctcttaaggcccagggtcggagcccagggcctctcccttcctgtcgttcaatggacgtggtggtggctgttccacacccattttgttgcagttcctgtgagacaggagaggctgagccaagggaactgtgaaggggatgggcaggagggcttgtgcagggttttgtaagcagtgatctagtttcattaaaaaaagaaaacaataaccataaccacctccccgtgtctgtctgcaccaggagcacctgggactgggaaggtcaaggggagggagcacacactgggacactggcttccgggaagcccatcttcctttcctttcacagctcttaccctttttttttttttttaattgcacagcagaaataaaaacaaatctgcagatgaaatttgccatgtccctgcggttcttgaccttgtgtctaaaggcc

SEQ ID NO: 65510 - DNA, 1095 bp, Homo sapiens
cctacctttgctgctcttagtctctctccctggtgggctctgaccacaggtctctcttccctcctccacagctctcacctgtgcacagttccaccctgacggactcatctttggaacaggaaccatggactctcagatcaagatctgggacttgaaggtaggacatggtaggcctccatctgaggcccagggccagagggagtgtttgtgacaatgcagtgctaattaggtgcttgtggcacctggccctgaaggtggagagacactggctgtgcgtgtgtgatatgatggtgtggtctggggggtcccgctggctgtccttcctggaaggacgtgagggacatctcaggtaggagtttggtgagccccattttcttcctctcatgatctgtgggtgacgtattttactacccaccgccactgtaggaacgtactaatgtggccaacttccctggccactcgggccccatcactagcatcgccttctctgagaatggttactacctggctacagcggctgatgactcctctgtcaagctctgggatctgcgcaagcttaagaactttaagactttgcagctggataacaactttgaggtgtgcccttccccctccgcccagctttccattgtgtctccttgtttgtcaattatttattgaattaatctaattgcttctgcttatccgcaactgccccatagtttctgttccccttgtgtgaccttctctctttctatttctggcaggtaaagtcactgatctttgaccagagtggtacctacctggctcttgggggcacggatgtccagatctacatctgcaaacaatggacggagattcttcactttacaggtagaggctggtcctgggctcctgggatctctctaggtgcccaggcccggagggaagcctcactgggttaggaatttctagggcttgcatgaatttacctaagcagctttctgttaccacctgaggcagagctttatgactaaggaagcaactgagtcagactgcatggcagtagatgctagtgcttgttctgccacttccatgccctgtggcattgggcaggttactaaagggagagaaaag

SEQ ID NO: 65511 - DNA, 1044 bp, Homo sapiens
gatgggtaaaaatcatgttgactgttgaaagtggtgtaggttgtaaacagaacctctggtttacagggtaaaggtaactcatgggaccagattaatgatattatgggattcgaattttaagcctaagacagtttgggtttggggctgcaggacatggttggtttagtgcttcgcagtcaagatttcccttggaccttagggaaatgagaaatataagaataacatggtgaatttttcatgactaaatttgttcaaattgagagcactgttttcttgcttatggggtattaatagttaggtctcatgaaattgtattgataaaaaaagatggtagttatttttaccttatggcttttaatatcctaactaaacaaaaaattggtgagtgacgcgaaattctctccctgccccaaatcttttggaaaattaacttaccctggaaatccataaaagtggaatgcactgaaatacagccatgcagccccttccagtcccagtactgctcagacctgtgccatacagtacagtagcagttagctgcatgtggctatttaaatttcaatgaaatagaataaaaaattcagtccctcaattgtactagctacatttttcctttggtcctggaaatgggaaaattgctctctgttgcagttagcctttttaccactagatggcgaggacgcctccacaagccctgatgctgtatgagttagcactttaatagcgtttaccattggctgtcttgggcaccattgggtggataggtggttccagggagggcagagctgaaaggagaagcaattgttggcagttgtgggcatccccagccccgttttataagattgttttggtctgtatctcttttctgactctgatattctgtctttgttttccttgtaggacctggtgttttctgcttcccccgatgccactatcaggatttggtcggtccccaatgcctcttgtgtacaggtggttcgggcccatgagagtgctgtgacaggcctcagccttcatgccactggcgactatctcctgagctcc

SEQ ID NO: 65512 - DNA, 1039 bp, Homo sapiens
gtggggaaacagggtcccctgaggcctgtgggggctgcaggggaggaggatgtaccttgtgtctctttcaagtgccttaatccgagccagcagggccttctgcttgcctgctgccatactgtatgtaggaaagtgttctgtggctgctttgtgtcaagaaaagagcagtcactctcagaatcttgattccccatcagccaaagcaaaagatggctgctgctttgtaggcatgtgcctgcaagtgggaccttgctgggcattatatgccctgtgggggtttcagagaccctgaaagaggagggaggacccgcctccttgtctgcacaactgcatgcacttctctccccatcgctccacaacctgaaaccgagaaggagttgctgaccagtgcccaccccggcagcccgggaggaacacaggcagctcctttcccttcacgtggtctgcagagagcagggtgagctgccagctgcccctctccaccagggtaccctgtcttggtggttaggggccacttttcctttgaggctctagtggaggtggatgtccttctctgccaggcttggcacatgatgtgaagaataaatgcccaattcttactgttcaggtttgatgtggaatcacagctgcagtgatatatattttttatcagtgcttggttggttttaaataaagtgcacgctattttattatcttgttctgaataaaatgtatttactccaagtctggattgcttccatgtctcctctactgctaaacccatttctgtagtgcagctccgcctcccaatttctccctgtgggggcagtgtgaagctggcagaggggagagctgaaaaggcaggctggtaccaggtacccttccctccaggagcacaaggaattaggaaagcatgcccccattacaaaacgtaggaacgactggcactgctggaaatgcgtgtgcttgctgggcagaggggtcaccccttccctgcagtgtgctgaggtgggtgggcagcctggagaagacttgcctgccctccccttcaccacccacc

SEQ ID NO: 65513 - DNA, 1037 bp, Homo sapiens
tggcaatgatgggggaggaggggtggatgcccagcagagcctggccaaggattcagggcagagaaagctcacttcattaccatattttactacactggcccagtctgccgacggttgcaccccagaagtgccttggtatcagaggcgagtagatggagggcaggagttggggaaaaggagacattgagaaggctgttggcgagaagaaggccaaggtctgtggaaagtagaaggaatagctgggaagcatccagtcctggactcagattcgaatcctggctttgctacatactacctgtgtgaggctctttaagcctcagtgacctcatctgtgaaatggtggtgagaggggaagggacatttacagcccttttctccctcccttgcccacaactactgtgccccagcatggcacccgggtcagcccctgccagctctggagctgtcatcatctctccctcttatgcctcttcagtggactgtggccaggctcccctggaccctgtctacctgccggcagccctggagctcctagacgcccctgaacacttccgtgtgcagcaggtgggccactacccacctgccaactcctctctgagctcccgatctgagacctttctgctcctacagccctggcccagggcccagccacttctccgggcctcctacccaccttttgccactcagcaggtaaggagggggcaccggggactctcaggctaacaggactcagggcctgaggtctgctgggtacaaattgggagccttccccagccccggctgtgctccccatattccagagggggaaactgaggcccataaaggttctcttctgccaagctgggatcccatcttcctagatcttcccctcccaagctcctcttttgttaagccctctcattctccctccaggtggtcccccctcgagtcactgagccccaccaacggccagtcccatgggacgtgcgggccgtttcagtggaagcggctgtgactccagcagagccctacgcccgggttctcttccacctcaaagg

SEQ ID NO: 65514 - DNA, 1027 bp, Homo sapiens
tctgcatttgtgtgggcacagttacgcacacacacctttcctccttcctcatgtgggtccccaagagaacagcttcttcttgagacgagaaacctcatgggaggaaccacagcttcaacttcttttgttccagccacctctctcccgagtcaagtaaccctaacagccccccgaccttagacactttcacgctcattattgcactggcaagtgcgctggcctgagagagtcgagagcacatactctgggatcagaaagttttagtttgaaacacatctttgttgtcaaccagctttgtgatcatgggctggtctcttaacctctctgagcctcgttacctaaactttaaaatgagaacatatcttcgggttgttgtaagaattaaaagcactttaagacagtatttagcagatagcaggggctgaaacaatggcagttattgctgttataatatgatgtaataattatacaatggtaaaaattattattattattattaccggtgattgtgaagtgaaataaaagggagggtggtagagcaacttcctctatcttgaagttctaagaggggaagcatggagtctgcatgtatgcaaatcccagccacctgaagggggaaggtgcctttccccacttgtggtcctttgctcaaatgtgtgtggttcctgctggagggccttggtgggagatctgctttgtcccacctctgcctacctggctgtagctggttgccaggtggctccaagagcaatgtcaaaggccagcatgaataaggagccaaagttttgggttcacacccctgctctgccaggaggaagactggtatgcaatggccagttcccctgactgagccccagggaacctcaaggaatggcccctacagtaaaatcttaaacaaagaacaggggcttaaccaacaatcctgctgcaacatgcattccagtgacacacagagctgaactcagtgggagcccgtcctacggcctgaggtcagggctgctctcttctggcccatgccttttttttt

SEQ ID NO: 65515 - DNA, 1053 bp, Homo sapiens
tgtggcctatctctgtgggagtggtttctctgtgcatgcgtgcgtgccctcgcatgtctctgcctgtgtctgtgtgccccacaggaggtggccctctccctatggctgtccttctctgatcacactgtggccccagctgagctctacgaccgccgtgacctgggactgtccgtctcagccgaggagcctggtgccatcctgccagctgaggagcagggtgcccagctcggggtggtggtgagtggggcaggcgccgaggggctgccgctgcatgtggctctgcacccgcccgagccctgccgccggggccgccaccgtgtgcctctggcctctggcaccgcctggctggggctgccccctgcctccactccagcccctgctctcccatccagccctgcttggagcccaccagccacagaagccaccatgggtggtaaacggcaggtggcaggcagtgtcgggggcaacacaggtgtgaggggcaagtttgagcgggcagaggaggaggccaggaaggaggagaccgaagccagggaggaggaggaggaagaggaggaggagatggtccctgcccctcagcatgtcactgagctagagctgggcatgtacgccctgctgggagtcttctgcgtggccatcttcatcttcttggtcaatggtgtggtcttcgtcctgcgctatcagcgcaaagaacctcccgacagtgccactgaccccacctccccccagccccacaactgggtctggctgggcactgaccaggaggaactgagccgccagctggaccggcagtcccctggcccgcccaagggggaggggagctgcccctgtgagagtgggggaggaggggaggcccctaccctggcccctggccctcctgggggcaccaccagctcctcaagcaccctggcccgaaaggaggctggggggcggcggaagcgagtagagtttgtgacatttgcgccagcccctccagcccagtcacctgaggagcctgtaggggcccctgctgtgcagtccatccttgtggcaggcgaggaggacatccgctgg

SEQ ID NO: 65516 - DNA, 1050 bp, Homo sapiens
taatcctcccacccccagtgtccatcctaagacaggcatcaaaagaggccctaactttacttcccaaatggtgctttttaaaaaacaccatcactacattaggggcaattttttcacacctccctgtcttcagaatgtaaagggtggggattatgtctctgtttaatatgcagccccctgcactgtggggtttggggcatgttcagtaataagaatgaatacaatagacaaagggggtgtgatgagtgttaacttggttgttccagaggtaaaccaggtctcagggaagagcctggagctgctattgcttaggaagttgtacgtgccttgaaatgtccactacctgaggacgcagcatctggtgggcccggggctgctggggccaaggagggaccttgaccttctggtgcctgcccctccccggcctatgtgccatccgcgtgacgctaggtcagcgctgccggttctttaccaaatgtgcttgcttctcctaagttatttataaagagaaatcactaatggactctactggtttgagtgcttctgagctggatgaccgaccgcctgtatgtttgtgtaattaattgccataataaactttgatgagtcacatgtggtgtggtgttgctgggtttgagtgaagacgtggctgcatgtgggtgccttgaactcttctgcagccttcagatcgtgctctctggaggggcctctgtgattcacatcccaaagccccatccgtctggatgtcagccctcccttgcccgctcgccccagggctggccctgggagtatttaccttccctctcccgctcttccgctttctttcttagccgttttcctattggagcctacgtttgcctggtcctggactgagagcaatggcatgcaaggccacaggatgccacgagggggcgtctggtcctcagcctgctcgggaggtgctgcgttcctgccacctgccgggctggcgggatgtcggcgtgtgggcctgtctgtgagccatctaattctaacctgggcttgcaggatgggctcagaggaacagcaggc

SEQ ID NO: 65517 - DNA, 1031 bp, Homo sapiens
ctgagtttaaacaatgtaatgatgatgtgcttttgtgtagtgtaattttctttgtgtgttttgtgcttgggttcattgagttttttggatttgtgggtttatagctttcatcagatttggaaatttttcagtcagtaactctgcaaatattttttttattcccttttctctttcctctctttcggggactccagttacatgtatgtaagggtgctagaggttgctccatagctctctgatcattcatttttcccagtagtccctttttcttttctctctgtggtttgttctggttagtttctattgctctttcttcaaattcactggtctcttctgcattgtctaatctgctgatattacctttcagtatactttttatcacagacattgtagttttcatctctagaagtttgatttgggtcttttaaatatcttccctgtctctaacatgcttaatctttcttttagcttcttgaacatatggaatatagttttaggaactgttttaatgtccttgcctactaattccattatctgtgtattttttgggtctgtttctattgcttccctcattatgagtcttattttcttgattctttgtatgtctggtaatttttattgtatatcagatgttgtgaattttaccttgtggggtgctggatatttttgtatttctagaaatgttcctggcattgttttaggacactgttaagttacttgggaacagtttgattctttaaagctgctctcaaggtttgttagttggaatcagaacagccttaggcccaggcctgatttttcctcactaccaaggcaattctgtccttagtgctttaccaatgtcctgtgaatgatgaggtttttccactgtggctggtgggcacgcaagactatttctgtttcagtttgagctccaaggattgttgccttggactggtatagatcagtaccagctgagaactggagggggaccctctgtaggtttctgggttctctgtgtggccctttcctctctggtactctgccctgtg

SEQ ID NO: 65518 - DNA, 1023 bp, Homo sapiens
agtagagacggggtttcaccatgttagccaggatggtcttgatctcctgacctcgtgatctgcccgcctcagcctcccaatgagctgggattacaggcgtgagccaccgcgcccggccttcttttttttcctgagatggagttttgctcttgtcgcccaggctggagtgcaatggcgcaatctcggctcaccgcaacctccgcctcctgggttcaagcgattctcctgcctcagcctcccgagtagctgggattacaggcatgcaccaccatgcctggctaattttgtatttttagtagagacggggtttctccatgttggtcaggctggtcttgaactccgacctctggtgatccatgggcctcggcctcccaaagtgctgggattacaggcgtgagccaccatgcccggcctgcaagggtgctttcttcccagacactgacaaatgtgtaagttcctcttgcgaggaccactgtgtaaacacgtgctttctgtctttccagacattgacgaatgtgtaacctcctcctgcgagggccactgtgtgaacacagaaggtgggtttgtgtgcgagtgtgggccgggcatgcagctgtctgccgaccgccacagctgccaaggtgagctgcagagaaggaatggctgctctgggaggggtaatggggatgccacattgaacactcagccctgccatgcccagtgcagtgtgctctgtgtgccactgcattgaaccttcaccaccggcttcggagggagatgctattatggttcctgtctgactgatgtggagactgaggcttgcccaaggccaagtcgttagtaagaggtggagtcagagtttgaatcccagcacatctaacagttagaaccgactgctgctggcctggtgggttgactcacatctgtaatccttgcactttgggaggtcaaggcgggaggatcacctcaggtcaggagtttgagaccagcctggccaacatggtgaaacctcgtctctactaaaaatacaaaaattagccaggc

SEQ ID NO: 65519 - DNA, 1073 bp, Homo sapiens
aagctgagccaagataggctctgatgtttgagagtgggcagagagacatgagaacaaaagaaatgtgtcacttctgttattttacaattatttattgagcacttcttaggggcaggaactgagctagggactggggttatgggagccacagttggtccctgttagggagttttttttttttttttttttgagacgaagtttcactcttttgcccaggctggagtgaagtagcatggtctcagctcactgcagcctccacctcctgggttcaaatgattctcctgcctcagcctcctcagtagctgggattacaggcgggtgccaccacacccagctaatttttgtatttttagtagagacagggttttgccatgttggccagggtggtctcgaactcctgacctcaggtgatccacccacctcggactcccaaagtgttaggattacaggcgtgagccaccgcacccagccccattagggagtttctgaatatgaggaaggaagacaagtaacaggacaagaacagctccattgtcatggggaccttcactgggaagggcaaggtgccagggcccacagaggggcatggaacccagagttgggagggttggccaggggaggctccttgggaaaatgacatttaaaagatgagggacgctaaactcaataattagtttgtgaatgtattatttgcttgtgatttttaaaacatttctacggacaaaatctgttaccttccccagaaacagtcactgtgaccagtttcttgtcaatctttccagagcgacaaaagcctttttggagttttaacttcgtaaaagtaatatttctccccctgaatagaaaagcaagagatagttcattgtagaacatttggaaagtaagaggagaaagatgaaaataagcattctctggaagtccccacccggagatatttgttactaaaatgaagttttttttcctgcccttttccctgggtgtgtctgtgtttgtgagtgtgtgtatgtgtgtgtatgtatgttaagcatgcagcatatatgtatgctttataaaactgggattatatcttatct

SEQ ID NO: 65520 - DNA, 2715 bp, Homo sapiens
cttttttttgagacagagtctcgctgtgtcgcctaggctgggatgcagtggcatgatctcagctcagctcactgcaacctctgtctcctgggttcatgcaattcttgtgccacaacctcctgagtagctgggattacaggtgtgcgccaccaagcccgactacccacattactgtttcctttacgtggactcatttttttatgtaaaggaaaacttgggaagttttgtattcctggtttggtgtgttcattgtgttttcatatttcataaatatgtaatagtgaaataataaatgttcaccccagtgcctcataaaaccgtttcctgtcccgcattgcactttgagaagtagtgctgcagatgaagggtcgaagagttggggggagtcattctgagagagctctggcccctttggctgagagagacaatgcccttcccaggtgcggctctatgagtggacaacagagaaggagctgcgcactgagtgcaaccactacaacaacatcatggccctctacctgaagaccaagggcgacttcatcctggtgggcgaccttatgcgctcagtgctgctgcttgcctacaagcccatggaaggaaactttgaagaggtgatgctggtggggggatgcgagcagacttcttgcttgagccaccgcccctgcaagtgtctctggtggggaaggataagccagcccagtattaggggcagaaatgttttccccggagcagacattctacattgattaagttttttttttttttttttttttttgagacgcagtctggctctgtccaggctgaagtgcggtggtgcgatctcggcttactgcaagctctgcctcccaggttcacgccattctcctgcctcagtctcccaagtaactgggactacgagtagctgggactacaggcacctgccaacacgcctggctaatttttggtatttttagtagagacggggtttcaccttgttagccaggatggtctcgatctcctgacctcataatcggcccgccacggcctcccaaagtgctgggattacaggcgtgagccactgtgcccggccctgattaagtatttttagagactcccaactcaaactctgactaggctccatctctgggcagttggcaaccaaatgggctgcgttggcagagaggtcggggagaatccctctagggtgacacttgttgaacaccatgctatatcttctgcagggtggggccttgctcctgaataaaggaaacacaagtcccagaactggattccgtgcaaactgctgattatgctttcttctttcaccttgtctgttttaagattgctcgagactttaatcccaactggatgagtgctgtggaaatcttggatgatgacaattttctgggggctgaaaatgcctttaacttgtttgtgtgtcaaaaggataggtgagtagtggccagctctgggagtggtggggagggctgggagttccttggtctctggtggatgcaagcattgggttctgtgtcaggttcaggtgctcctgtttacagagatagaactttcctcgtcagagaataaaaggtgacagaaatccacctctttagactggctcccctactgtggagtatgtcagctccccagggaaattgagcaccgtgaccactgcacgtggtcctgtctcagggcctgtggtggaaacaggaggttcagaaagtgactttcttaccgcctttcagcgctgccaccactgacgaggagcggcagcacctccaggaggttggtcttttccacctgggcgagtttgtcaatgtcttttgccacggctctctggtaatgcagaatctgggtgagacttccacccccacacaaggctcggtgctcttcggcacggtcaacggcatgataggtaaggtcacccctgtggggcacacccccacacaggcctccttcctgataccagcattctgagggactggggagagcaactgtacaagacctaggtgtttactagaggaggctgcagcacattagccctccctgagctgctcacctgggctgccctttacgtagaggatacatgctgtggggttgagctctctgcagctcactgcctccttcacttcttcagggctggtgacctcactgtcagagagctggtacaacctcctgctggacatgcagaatcgactcaataaagtcatcaaaagtgtggggaagatcgagcactccttatatccttcccagagccatccccttgctgggaagcacatcccggcatatgtggcacacggagtcacattacccggaagctactacatgtcttgattaggttcctgtacagaacaggttttttgttttgttttgtttttgactttttcatgtggaaaatttcaaacatacacaatagaacagtatattgactcccaaagtacttatcacctagcttccgctggtccatcttggaaatgtacatttatattcctgaaatgtgtccgcctctggccctctcggtgtagcaggccaaatgtgaatttagatcacaacacaggagcacatcctttcagggatttggttgagggcaacagtgtctgagactagagaaactaccagaagaaagggaaaggtgaagaagcggaaaacactgaaagaatctgccaccctgggacccccagaatccaagtgctattggaagtttgtgtagtacaggagatataaagggccctcccc

SEQ ID NO: 65521 - DNA, 1104 bp, Homo sapiens
tttgaaaggccaaaagaacaaaagggaggggtgggagaagtgaacgatgggtaagggaatctagtgacaacaggtataaaaattcagaatcttaggtttgttttccacttggttgctcaggcatttaggtgctctttccagcttcaactctgtgtttatattttaatatcttttctcgttacacccacccaagatggctctaaagactatcagcccggaaatctcagatcagatagctgaaatgggatctggtttccatcttgagagagagatctagagtttcagggcgagggggcagatcctagataccaactggatttctctgcacattatcttggggctcatacttcacgtggtcattaactccagtagatactgagtctgtgttgtttttttagatgagtggttttggggggcaagaatttgtaccacaggggcaaccagaggattcttttgatgaggtaaagtgtgggctcatagagactcaaacatattttttccacccccaggaaaactacagactgtggctgaaaaggaagtgaaaggggccgtgtactctatggtggaatttaacgggaagctgttagccagcatcaatagcacggtgaggcctggaccacttggtacttactttaggctgcccatcattgtctgcagaatgtgtctctcttaggttgtctggggccacgtgtgtgtcagatctgaaggagaacaaagtagcgggtgtggaggatagagctctgagttgagaatctcggaaactgaggttgaaccacgcattagactaggttacgtgaacccccatgtgtttcagatcctgagtgctgtgggacttgagaaacgagtgagacctatggtccctgcacgtaggatgttccatgccaaaagaaaatgagccaaatcagaatatcctgagtgcattcctgaaagctagtcctttgaaatattccactgcttatgccatgaccctacctcctcccttgctaaaaagtttttttccatctttattgaggtatagttgacaaaaattttgtatatcgaaaatggacaacttgatgttttggagtagggagatagcagcaaacaaaatggacaatgagctgc

SEQ ID NO: 65522 - DNA, 1301 bp, Homo sapiens
ttcaagcgattctcctggcccagcctcctgagtagttgggattacaggcgcgtgccaccatgcccagctaatttttgtatttttagtacagatggggtttcactgtgttggccagcctggtctcgaactcttgcccttgtgatctgcctgcctcggcctcccgaagtgctggaattacaagcgtgagccactgtgcctggcctggcttccaggtttattgctagctgtgtgaccttgggaaagcctaaacttcagttttcttatctgcagaatgaggcagataacagtctggagctacacatactaggctcagtggtgataccagctggtcattttcttccatgtattctctgcctttcatgtttccacatatctgcgataggacctccctccgtagtccagagttgaagtcttcatggcttctgtttttatttgaagtgcccccctcctcttcccattgagggtagtggagtctgtccccattaggtcacctgagttcctttttagctgtgcttgattgacttgaagcatcactgttttgtctttaatgacccttagatttttactgtttgggattgatgtttcaactacatgcctcctctgaaacactctcctcaggctccttgagctgccagccatcagagttcttggctagctgcagcctttgtgtcctgatctgacgggtcccttcacaatgatgtctcagcacttcttctgtgtttgagaaggatgatgtgcattctctctgtttgcaggctctgtccagcagtgtaagctccagcaagctgttctccagcagcactgctcctcatgagacctcctttggagaagaggtggaggtgcacaacctacttatcattgaccaacacacctttgaaggtgcacatgagctctttcgataatttttatctacgccctccctaatccaggctgttctgggctctggtacctgcaaagcctgacagatgtggcagactgtcctaggaggagcagaaaggaggggtgggaattctgtgagatggcagtgagtttggagggctgggcatcctctccttagcttaggctggtgggggatggataatctgatgagacagggacagcaggtggtacacgctttgtcactgcctaagccacaggcctcagaaatacggggttatgtgtgcgtgcagatatgggtaacctgtcatcacgtagtcatctctctactctctagtgcttcatgcccaccagtttctgcagaatgaatatgccctcagtctggtttcctgcaagctgggcaaagaccccaacacttacttcat

SEQ ID NO: 65523 - DNA, 1906 bp, Homo sapiens
tactcaaaaaacaaaagttaaccaggcatggtggcatgcgcctgtaatcgcagctacttgggaggctgaggcaggagaatggcttgaacctgggaggcgtaggttgtggtgagctgagattgcaccactgcactccagcctgggcaacagagagagactctgtcccaaaaaaaaaaaaaaaaaaaaaaaagccaaaaaactggtggtcacagggtcttactctattcatatcttcccacaggatgcagtttgtattacccaagtaagtctcaattagaatgaaataggccttttccccaccagctgtaggtttgtaagctgtaagctacttttaagctggcctccttcaggcattcatgcaaaaatgacatctattgtaatcattagcaggactttggggaataagaaatagaagcctcatgtagcttattcgtagggctctattagggctgcatttaccacctttccactcctgtgtggaccctggcagatgcttggagacatttgttcatctgctgtttatctagatcacttcagcatcggtgaggttggtctctcaagaacccaaagctctggtcagtgaatggaaggagcctcaggccaagaacatcagtgtggcctcctgcaatagcagccaggtggtggtggctgtaggcagggccctctactatctgcagatccatcctcaggagctccggcagatcaggtgtgtgtgtttttctgtctgctcgctttcctcctcttttctctaggacttctttgagccttggattccttcctctgccatattcttctttgttcagccacacagagatggaacatgaagtggcttgcttggacatcaccccattaggagacagcaatggactgtcccctctttgtgccattggcctctggacggacatctcggctcgtatcttgaagttgccctcttttgaactactgcacaaggagatgctgggtggaggtatgtgtcatttagggacctgggttgggacagagtcaaaatgtggaacaagaacataatgtccccctttctcacagagatcattcctcgctccatcctgatgaccacctttgagagtagccattacctcctttgtgccttgggagatggagcgcttttctactttgggctcaacattgagacaggtgagagtagtattttgagtgagggactctttcaaaaatagagtattagaattacacagaattcttagtcccagggttctgcttttgaactttcacaggccagctttttgtcctgttttctttcttcctttctcctgatgtcattctctctgtaggtctgttgagcgaccgtaagaaggtgactttgggcacccagcccaccgtattgaggacttttcgttctctttctaccaccaacgtctttgcttgttctgaccgccccactgtcatctatagcagcaaccacaaattggtcttctcaaatgtcaacctcaaggaagtgaactacatgtgtcccctcaattcagatggctatcctgacaggtgagtctctttttccttatttaatgagagctattgattgagggggtcatgatgttttcctcaaacccttacctcaaagcctttttccggtgtcaaaatcataactgagatgggaagtatagtgcagaggttctcaaaactggctacccaatagaaacacttgggaagttttttaaaactacaggatttttggaatcctcagtgggtctgaggttgagctctggaatctgtattttcagaaaacttatcaggtgattcagatgactgtttcataatccctaatttagagatcattttgtgtccctctagagcaggaattctcaaagggtgtccccaaccagcagctacagcattacttgggaacttgttagaaatgcagattctctggctg

SEQ ID NO: 65524 - DNA, 1232 bp, Homo sapiens
gcagagagggggttccagctcaggactccatgttccagcccttccagtggtgtcaggctgccatgtctatatatatatatatatatatatatatatatatatatatatatatatatatatctatcctttttttttttttttttttttgagacaggatcttgctgtgtcacccaggctggagtgcaatgacatgatcatagctgcagcctctttctcctaatcttaagcaatccccccacctcagcctcccatgtagctgggactatagttttgtgccaccacacctagcaagttcttttgtatttttagcagggacaaggtctctccattttgcccaggctggtctagaactcctggttccaagcagtcctcctgcctctgccttcccaagtgttgagattataggcatgagccactgcccctggcctgccctgtccgtagatatgcatgctaagtgttggtctgtcctatgcatctgaatccttggtccttgttccaggattatggccactgcggtctgaccctaatcgtgagactgatgacactttggtgctctcttttgtgggccagacaaggtaaggatgggtctagtgccagctgtaggtgctggtgagaaggttgtgaggtggggaagctggtcccaggctgacccaggccctccattctgctgcagagttctcatgttaaatggagaggaggtagaagaaaccgaactgatgggtttcgtggatgatcagcagactttcttctgtggcaacgtggctcatcagcagcttatccaggtgataactgagaaaggggcaggtgttaccatatacttgaattgacctagatgcagtacagagcaccactggattttaaaacaaccaatttttatggctccaaaaataatgtaaaaattctagggaaaaaattacagataatccactactcagagatcacaactcttaaccttagagttgctccttttagctttatttttcttctgcaaatgtctgtgtatttatttacattttcttttatagactcgggtcattatatatataaacataaaaatatagtttcggatcctattttagcactaattatatcttccgagacactcaaattttttccctttgttaaactagtgatacatccttatttataaaattagaaaatgccaaaatgcacaaaaaaagaaaaaatcatgatgctaccatccaatatgactcttggcagccctttccaca

SEQ ID NO: 65525 - DNA, 2361 bp, Homo sapiens
agcctgggtgacagtgagaccctgtctcaaaaaaagaaaaaaaaaagattattgctgatttcagttctgggaggaggctcccaaaaagtttaatattaatacttaggcagtatcttttggagcaggaatatgcaagacaaattatagatttttctgagtgtagggatgcaatagatgaagaatcaaaaacttcagagatttagaaacatttgcttagtgtgacctgggaatttgaaacagaactgttctgaattatggctgcagttgggagttttctcagcagatgtctgagatgtgggtagtatctggatcccacgtagggtccattctcatttctttcacgttgctgactttcttccagacctctattgctgagtgcttgacataccttgataatggtgttgtgtttgtcgggtctcgcctgggtgactcccagcttgtgaaggtgagaagacacttgtttctggtttcttttttgctgtactcactgtttcttcatcaaatttctcctatgtttggcacctctcagaatctctccattttatccacatccctactatccagctttctacttggttaatttaacatcctacccctgactagctctttgcctttgtggttcattcagcaaatttgccaggcaaggtgctaggtgctgtggatacattgatgaacaagacccagctcctaccttcaaataggtcatagtttaatgtaatggacttcttctagaatatgaaaacttcggaccttctctgcagaaaaatgcatgcaaacattttacattaattttcaaacattcactacttctctgaaatccatccatggactctaggtcagcaatccttggctgattaatgggtcacctgtgggacaaccatattctttcgtcaatagtccccttctggaatcatcccttggaacatgagaatggcagatctagaaactagttattgagagtttcttttggacaataaccatctcttttgggtgggtctgttagggtgttctaggactaacataacattgttctttcttattagctcaacgttgacagtaatgaacaaggctcctatgtagtggccatggaaacctttaccaacttaggacccattgtcgatatgtgcgtggtggacctggagaggcaggggcaggggcaggtaagggccattctgaaagtggatagttggtatatgcccactcaaactgtgtcctcctagctatgcttatctagaatggggagggtgcactgaaaatacttttaagagccccctcatgaatcccagtgatataaggataactactgtttattgagtgcctatcttggtctgccaggcactttatatacattatctctaattacacaagtaccctagatagggatatttggccatctcagaagtgaggaaaattagggctgagaaagattaagtaactttttccaaagtcacctaacttaataagtggcaggtgtatctaacagatcctgtgctcattctagtaaactaggtcccagcgatctaagcaagcttgctaggagcagtggtagaagctttttgcttcctggactaggatgtcctgtctgctctgtaaatttgaaagactttggaaatcaacctctgccaagtctgcatcctcaaacctagccccacaataaaggttcttggatttaggtataccgtgtttactttctgggcatcagtatgactggcccagtatcttgagggggttctttagaaacgttttctctgcttgcagctggtcacttgctctggggctttcaaggaaggttctttgcggatcatccggaatggaattggaatccacgagcatgccagcattgacttaccaggcatcaaaggtagcttttttggtgggcataggatgtagatcttacatgagggactttggccttgttacatgttgtgaaggcgttttggtgggagccagaggaaagcagatcaagtgaagagtgaaagtcgtaacaacagatcagaagcttaaacatatctgaaagtataaaagtaaactttagaaaaaaaaaaaaaagaaaatactactgatcaaaattggtagtggaatagaggactaggggattaaaagattataaattaaaattaatgttgtttatatgaggcaaccgatagaattcataaagaaaggagagactgaggatattttatgaagatataagtataaatgtggtttctagataaaaaatataaatcttcctaaattccaggagaattttaataaaaaaaagatcagaggctaggcgaggtggcgtggctcatgcctgtcattacagcactttgggaggccaaggtggaaggattgcttaagcccaggagtttgagacca

SEQ ID NO: 65526 - DNA, 1076 bp, Homo sapiens
attgataaattataaaggctaagaaagtcaaaaatgtcaaggacttagaatatcaagttgtaaaaattaagccttaaaagtttcattttactttctttttgagaaaaaagaacaaaatctagctggctacagtggcaagttcctgtagtactagccacttgggaggatggcttgagtccaggagtttaaggctacagtgcactgtgatcatgcctgtgaatagccaccgtactttagcctgggtgacatagaaagaccctgtctttaaaaaaaagaacaaaatctgtggtagcattgccacagtggtagggggtaattagtggtattaagaataaataacaacatttgtagtagcatgcatagttcagtagattttggcagcagcttcctattctgtgtatttctattttcctgcagaatgacgacatatcagtaaacatataagatatattgatggagcgcctcagaaaattatcttcaaaataaaaaagctccccattttctattaatgggcaataggatctatcctcattttcatgtaatgttatctgagcgatttgtctgctggtaaaatggctgggtttggtaaagggagtggtccagtagggtttgttttctggtgtagaagatgctgaatctctaatgactgtttccttccaattggcagcaaagcacgattgtgtgccacaatcgagtggaccctaatggctcaagatacctgctgggagacatggaaggccggctcttcatgctgcttttggagaaggaggaacagatggatggcaccgtcactctcaaggatctccgtgtagaactccttggagaggtagagcttgttctccctgttcctctacaatgttcttttaggttcctaaagacaccaaatgtgtggtcccacacctcaactctgggaattatgttacttaacacctaacaacaaactgttgttcctgctgtggaagttgactgttgaatgagttaggtattggagcatctcacaggatcctgtgataatctatccaagcagcctgtgagaaaaggaaaagaaagggaaacagaaaaggatataatctgga

SEQ ID NO: 65527 - DNA, 1031 bp, Homo sapiens
gtagccctgataatggggggaagttaagctaaggaacaagagtggaaaccaggaaaaaaaagtaaaagcttttacttggaaaggattagaagttgagaagaaaaatgggggagaatgcatggggaagaacatggagaagactccccacccataggaatagtcgaacaccagaagagtggcagtaaaaatactaccaggattagataatggccagttaacaaattctaagagtctcgtaaaggctatcatgttccctgggctttgatgtcctttttaaaataatgatgaccttaaagtttgccttggggctaactagacctgtacttttgccagtcctggtttggcagacccagagtgctgagcattctaattttgctgtctttcctgcagtcccagagccctttgggggggccatcatcattggacaggagtcaatcacctatcacaatggtgacaaatacctggctattgcccctcctatcatcaaggtgagcgcagtcctacctttttttcctttcatcttttctttccttgtcctcaccttgctcctccctttctcttatttatcaaaaggagattcacagatgcctgttacacaatttactatgtatataaggtattgcgttggccattgggaatacagagagagattagcctggatttgcttacagagaacttgcttgctaacttagataaatgataatcaaaataggcttccccttttcattgactggggcaactttttttgtcaaagagacagggtcttactctgtcgctcaggctggagagctagaatgcagtggcatgatcgtagctcactgtagccttgaactcctgggctcaagtgatcctcctgtctcaacctcccaagtagctaggattacaggcatgaactaccacatggggcaactttaagaggggaaaattttggcagtttcttttttttttttgagacggagttttgctcttgttgcccaggctggagtgcagtggcacgatctcagctcactgcaacctccgcctcccaggtt

SEQ ID NO: 65528 - DNA, 1029 bp, Homo sapiens
ctaatttttgtatttttagcagggacggggttttgccgtgttggctaggctggtcttgaattcctgacctcaggtgatctgcccacctcagccttccaaagttctgggattacaggcgtgagccactgtgcctggcacacagtatctcttatagtacctagtgcagtgtgacaagttcatttttctaattctttaaacctttcttggttggttgaattgttaagaatggtagatctcagatgctgcagtctacctaggaattcatcccaggctcagctagtgcttgtcagtatagtgatggataagggtgggagggctgacatgacaggactgtcagatgctgggtagtggtggcttattccttacagcacctctctctagcccaaggctcacccttcctaagggctaaccattttacctttcccccccaggaccctcaggggcggcacgtaaaaacctatgaggtgtctctccgagaaaaggaattcaataagggcccttggaaacaggaaaatgtcgaagctgaagcttccatggtgatcgcaggttggtagggggtttaggaaatgtgcctccacctgggtctaggctagttccctgttcttgttcgctccctcaccttctctgcccttcgttttggcgctcggtattattgaaggtgtgcattgtttaccactcctttatgttttctttctctaattgtgctttgtttttttctgtctttgagattttctgtttttcacttctccccccaaaagtataacttgtcttttacttgggtggagggattgactataaaacattgagattgatttgcacagtggcatatggaaatgagtctcattattttattgctgggcataacatttaaaactgaaaggaagccaggatctatagtcccagctactcaagaggctgaggtgggaggttcacttgagcctaggagtttgagttcagcctgggcagcataatgagaccccatctctttaaaaaaaaaaacaacaacaaaaaactgaaagggagcaatag

SEQ ID NO: 65529 - DNA, 2184 bp, Homo sapiens
tccatctccaaaaaaaaaaacaccaaacaaaaaaaacaattaccatcagtattttcattattttagcgcaaatgttttcatccaaatcaccaccacattgctttatgttgtcttaactgaatctggcaagaaagcagtgggttcaaaattttaattataaccctttgaacaaaacagcaattttttggagtctgtgttaaataagtaggactttgttgatccattttagcttccgttgttattcccacattttttttcctctttcttcaaatacttggggaggagtggaggaggcattacattcatctttcagaatttgaatgggatgattgagattagcttgagattgaaatagatgaagactttgtttgtagaacagagagatggagaatcatgaaagtgagaactagatgtttaccagcttcagttctggctttttgtacatgcccttagggtgtatgtgtacctagtgtgggttacaagctcaccatgtattttctctttagggagagaagaatttggaaaattcttaaagaatttggtgtgcttaaagactggacaggttgttcctgttttaaaaagaacctcttttgatagcataatattggtttccagggggagagcaaggacctgctgtttatcttgacagcgaagtacaatgcctgcatcctggagtataaacagagtggcgagagcattgacatcattacgcgagcccatggcaatgtccaggtgaggtggctgctttaggccaatgaaagttttctaagtagggctgtcatgattcatggaaaaaattaaagtgctgggggcagctctctattcgatcagagaaataaggagaagacactatgggtttgagctttttggagaaaggactcctgtagttcactcaagacccaagggacagggtaataattcattgagattcagtgtttcatgaaaaaggcatgcactgacattggggctccaactatttggcctatcaaatagatccattagttttaatacctctcctaaaatttttctgcacaagtggtgcccagcgtcctctgttgctctgtggatgttgaggttcttccctaatcccgattttgtttctcaggaccgcattggccgcccctcagagaccggcattattggcatcattgaccctgagtgccggatgattggcctgcgtctctatgatggccttttcaaggttattccactagatcgcgataataaagaactcaaggccttcaacatccgcctggaggagctgcatgtcattgatgtcaagttcctatatggttgccaagcacctactatttgctttgtctaccaggtactggatcaggaagagagagcgagaaactgtgaggttgatgtgataggagttgtttttgctaactggcatgtctgggtttggtaggatagagagaagtgtttaatgtgtttgtcctgaaatgttttgaacaacacaattaatatgggtcagactttcgttgcttcttgagtgcagtagtacttattgtggaggcagcaagctctctggggcttgtagcaggttttaatcctgagattacactctggttgtgggccttgggagatttcataggatgacccagtttatactttgattctcttactggagtgctaggggattattaaaacttagttgtcaagaaattatctagatcttgcctttatattaagcaaagagaaattgtcttggtgatgccttatatgtgttttttaagaagaggtttacattttgtccagtaatcacttactggtgacttgctggcttattttaattttattttattattttttttgagacagagtctcactctgttgcccaggccggagtgcgatggcctgatcttggctcactgcaacctccgcctcctggttcaagcgattctcctgcctcagcctcctgagtagctggaattacaggtgcatgccaccacgcccagctaatttttgtatttttagtagagacgtggtttcaccatgttggccagaatcgtctcaaactcatgacctcatgatccgcctgcctcggcctcccaaagtgctgagatttcagacgtgagccaccgtgctcggcaacttgctggctcttaacttctattttagtctgcctaaaactgtagcagagctgatcctgggcagctgttctctggtccagatctg

SEQ ID NO: 65530 - DNA, 2826 bp, Homo sapiens
gcaggcaaggttctagtctgggatatgcacgaatcgcggtctcccttccctctctatgcctccgcagtccttcccgttcccaaaggaggaacagcccgagggctcctggagcaacggaaggaggactggatgcggggaagggcaaagggcgcggaacggggtggggagtctgcgggcgagctcggaggacactggcgcacctcccccgccggctcacggccgcatccgccacatccgaaggcgccgcgacttcccggagaccccgaagcgtgcgctctcatccgggtcctgcgggcgctggcggaaagaggcgaggcggtgcctccgggggcggggcctccttcggttggcggcctcgggcttcgggagtcctccaagaggccaggtgaggccgtcccgtgatgccccgcgccccggccgctctggcctgcaacgtgtctctggggcggaggcagcggcagtggagttcgctgcgcgctgttgggggccacctgtcttttcgcttgtgtccctctttctagtgtcgcgctcgagtcccgacgggccgctccaagcctcgacatgtcgtacaactacgtggtaacggcccagaagcccaccgccgtgaacggctgcgtgaccggtgaggctgccggggccggagaccccggcgagtgagggagttggggggagccgcggcctagggaggcccgccgccccgggggcggccgggcaggagtgggcccggcgaatggaaggcgctggcggccgaggaacctcccccagcaccgcgacctcgaaagagtcgtccctgtacgcgctttttgggggttggaagccgctctcgagggtcccctttcgtcctggggaggtcattcggcctcgagaacagggcgggcccagtgagacagaggagtgtgagttggttgtgcggtgtcgtttgggcccggagattggctttctgtggccaggaaaaggggaggtggtaatgacgactttggggtcaagattttcctgtggggaagtctggggggcccaggaggtggagggatgtgaggaatgcccgcattatcccacagagggagaggagccctcttcaggctaacccctttgcctggggctgttgtttacatgagggccctgctggagaagagggtttggtttgcctggcccagtgctgggtttgccttgttgacgatgcgcttggattgttaaggacaccgatgttcagaacccgggaagagtcatcttaacccacattctcagctgaatatgcagaccccaagcttgcatgtttatatacaccctaatcatgattccaaaacaaaactgttgttcagagttggaggtagctgagtgtggatggaggtattggtagactgccaggagggcagggggtgtggacaaaacagtgttttcatataaagctctgggacttcttcatttgacttggtctgtcagataaaagttttgtgagactttagatgaagactggaagaagtgaacactttctccggcattctcaattagagcctgccactgtaactgtaatagagtaaaattggaggggcaagaggcatgagaagggattacgcagtcattgtcatttggaggacacacggctcttaggtccagtccagttttcttagtctgattagggaagtagctttgttgaatgcatgaactgagactctttgaggtgccggatttggcaagaaggggagtagctggagggagttggagaagtatgtgaagtaaatgagaattctggaggtatttagacataagtgataggattattttgaagggatgggaggcccttcccctgagttcaaaagttagagggtctgttctttcaggacactttacttcggccgaagacttaaacctgttgattgccaaaaacacgagattagagatctatgtggtcaccgccgaggggcttcggcccgtcaaagaggtgggcatgtatgggaagattgcggtcatggagcttttcaggcccaaggtaagtgttgcagttgggacaagcagtggagggggaactgttggtcgtaggttgttttatgttatttttgtttgtttatttattttctttgagacgggggtctcacagtgttgcccaggatgtcttgaactcctgagctcaagcaatccctccactttagcctctggagtagagtagctggggtattgtaggcatgccaccgtgcttgggctgtgttaggttgttttgcgaattcttgggatgggtggaatatgctttaggagaaaaactcttctcttttttctctctttggatagcaaatttcagtatgtactcttgaccaagctttctagaagtaaaaggagagattcattagggaaacatttatgaagttgacttctttagaagggagaaattaaagcagtttgtttcagaggataggctacagagtggggcagtcctggcttcatttcttgttaattctgactttaggtgccacttaaggcacctttcagatcaaatcccctgggttgttgtgacgatgaaatgattcagtaacatagggcctatcatatagcaagcatttacagttatgttaacaattaccaggccgggcatggtggctcacgcctgtaaccccagcactttgggaggccgaggtgggtggatcacgtgaggtcaggagttcgagaccagcctggccaacatggtgaaaccccatctctactaaaaatacaaaagttagccgggtgtggtggcacgtgcctgtaatcccagctacttggcaggctgaggcacaagaattgcttgaactcaggaggcggaggttgcagtgagtggagatggcgcccattgcccgg

SEQ ID NO: 65531 - DNA, 1026 bp, Homo sapiens
attaggtggcagagagacgatttaactcaggcttatctgacgcacagtccgtgttctctgccatcacaagaccctccctcagccctttccaaagggctgtaggatccccttcccagtgcatggctcacccagggagcggacggtagcgtcggctatgatgcccagttccaggaatgacaggccacccaggttgttgaccatcatcacaactgaggagcctgcgggtagacatgacaccccaggtgagaccctctgggcgtctcctccccagaggtttaggaggggttgggagacgcgggcgagaggctacccaccgggctgcacaggcacatgggacgcgttggtggtgtttgtcatgtggtcgagcatgagtttcacaatctcatcggcggttgccatctgtcagagggagccaggaatgagctgcatctggggggccttggccttagggcggcctgtgccagagggaccacctacctttatccggcgcacaccagcttccccgtggatccctgcggatagatgtggtcactgctgacccactcaaggcctggggatttgctcatcgtttttatcaaggactcacacagtgctggactcacacagtaagtgggcgggagtgggggatggaaatggacagaataatgaaaaacacgatctctgttctctgggagcttgtggcctggtggtggagatagctttaactagagatagttaaggaggaagcacaggcgaggaaagaaagctttgcagccaggtgatctttgaacagccgttgaaagaagggtgtattctggcagggacaggaggacctgggaatggcaggcaaaggctaggaggtgggcagtgcacagagctccacatggccaaagctgtgggtatagacagcaaagcaggtagaaatcaggcaggttggcccaggctgggcctcaaatgaccaggtaaaaatactaagaccacctggggagaggaccaggttgatggctctaagggtatgcaaggtgggcaaagtccagggccaaggag

SEQ ID NO: 65532 - DNA, 1045 bp, Homo sapiens
ctaccctacatgtgtgccaggcatgtgctgtttgtctccacatgcatacagtgcccctgctcaccctggtgccatcagtgatcgctctagaaagagacctaggggctggcttggctgcagtttcttttttttttttttttttttttgagacagggtctcgctttgttgcccaggctggagtatagtggcatgcttatggctcaccgcagcctcgacctcctgggcccaagccatcctcccaactcagcctcccaagttaggactataggcacacactactatgcctggctaattttgtattttttggtagagacagggttttaccatgttgcccagactggtcttgaactcctgagtgtaagggatccgcctgccttggcctcccaaagtgctgggattgcaggtgtgagccaccgtgcccggcctggctgcattttttgatctacaactgaaccttagactatgatgatttcttttccttctggtgtcccaaatgcccattcgactcccgaggagccactgaattattaattcaatgctaagaaaagcccctctaccattcttacatgcatcaggtgtgtgtactggaaaggggatgggtcgggggtctcagtggaagcagcccagctgaggagacactgccttaggggctcaggtaataaagatctgcctggtagaagatgggtcatgatgcctgcagccagggctgtgggcccccttgtttacatgcttgggaaaaggtccctcagaggaggcagtgtctttcttgcttccatgtattatagtttattaactttctttttcacgctcactggggttaaggtgcggaaagcatttcacagggagtcttaaaaccaaattaggattgccaggtaaaggctgcacaaggaaaatgccttatctctgaagcccagagctggcaggggagggcatgacccagggactccaccctcctgcaaagggaaagggcatgctggagaggcatggggacccactccagctcactctgggtgctgtctgtagttctggaagcttggtggaggat

SEQ ID NO: 65533 - DNA, 1142 bp, Homo sapiens
cctggaccctgacttcggacttggagaagaaacgccgaggaggaacgggagttagggggttagcagcttggcgcgctgggagccggccacccctggtctccggacttcacttcccaggaggcctcgcgcgcgactggaagtgctgcgagcctataagaaggcgaggcggcacccgccgctctgctctggggcggcattgccagccggctgtaggcattcagggcagtgtcttctgcatctcctaggaacctcgggagcggcagctccggcgcctggtagcgagaggcgggttccggagatcccggcctcacttcgtcccactgtggttaggggtgagaaggatcccggggctgggagttcagggacctgggttcgaatgctggttccgctgctatctcgcttcgcactgtcgcgatccccttgctcggcctcaattttctcttttagaaagtgggcacctttctccgcgctcttccttccaacgcggtggttataaaggcacgaaagctcttcagaggacgcagaaagcacctggagctcctcaccccaattttcacccattgttagctggcacgagcacccagcagaggagtcagggatcacccctcgggtgcctggaacggttctttggacacctgagccggacctaggcacagcctgaagtcggggtctataattattccggtgctaaggggtaacttgttcacctacctccttggcaggaatattgagcccttcactcctcatgttccgactttaacagaagctacctttgagaataaggaatcctcagagctgagagggagtggacccgaattcctgtaccagctcggccacttaccttggctaagtcattttcttgttttgggccccagtgtcacagtgtttttgatttgtaagatgagggtttagggcttgtatcctaaatctggtcctcaagattcttgaagtcccccagtccatcggggagggagagcaacaaactgattttctaccccttcatttatttgtagttctaaattataaaagtaacactgcaagagtttggagtagagcctttttctttttctttcttttttttttttctgagacagagtctcactctgtcgcccaggctggaatgcagtggcacgatctcggct

SEQ ID NO: 65534 - DNA, 1054 bp, Homo sapiens
cccaccaacatgaggctctccgtgctcatgtgggacaggtatagcacagctcgtacagggagcatgtggctcaggtcctgcttgaagcccaaggagcctagatggtccacacgagatgctctggccacggtgatcaaggaggagaacttgaggtcagcaggggactggttctgagaaggggcaggatgggaataaccttgcccctccctatactggagtgtagaagagtctcttgggctgatggtcctggtttagaagatggtacccactggccttatgctgagttgcttgcccaaatgtctgtgctgaagaaaagccacacagcctttctcaggacaacttgccccaccaattctcactggtgtggctaaagtaccagaagcaatatgtgtggtgtcagcctgatgggctgctggctgaaattctgtacttcaaatcctgtccatacgatggcagaaagaaagaaaatgttaaaagaccagtgaatgagagcagctggcctcgactgttctatattccaagcctcctggccccaaaggatagggagagtatcttccctgagtgggaaacgatctacctaccctaaacaggaaaggcaatcccatagccaccccttcctccctctagaaaaaagtcttctagaccccttaggcttcagaagaatactgaatccctccctgggatgggaacccaaccctctagtgatgagaaatggtccctcagcagcagtacctggagaaagcagccaaggtgagcacctcaagtaaaagctctgagccacagaagaagagcaagatgccattcatgatggcttccaggcggagtacgtaggtctgcagcagcaggtaataggaggccatcatggcagatgggaaggtcaaggccacgctaatactgagcggcatctttcgctggcagaggtttccctttgtacctgtcagacacagcccatggagtcatctccaaatggtctgcttttcctggcccaggggaaaggcgtgggagatgtgatggaatggcaaggcacaaaaaataatcctgagtgggggtgtgc

SEQ ID NO: 65535 - DNA, 1099 bp, Homo sapiens
tttataaggcacccttcaacttccaattgagccttccaatcatttatattgctgtggcagtgagcttaaccagtgaacctctaaataggccatacagaatgggctctcttccagtttgataccagcgatttcttcaacacagggagaaagtagcagaaaattggtattagtgggatttgtaattatcagggcagttcctattgaaggttttgttactgtgtcatggctgattagacctgtctactctggtttttggatagtccccaagggcaactgggaggcaagggcacagaaggggtaggaaacaagaaaaaacatcagtgctttggacagcagagcccctcaggataagaatgagcttgatcatagaaagtaagagttaaagccagcatagaatgcttaaagttacattttacttcgagtaagagcagataatctaggattcatctgaaaacagaagagcctcaaggttttctgaagtggattccgtcatggctcctcgtggcttcttggaattaaaaaacatggccactaccaaggaaatgaggaataattttaaagatgcttacttggagaaagaaagtatacattgatctagagtgacagttctccagcttaaaaaaaaaaaaaagtgttccttttatgttgactcaaaattttatttttgagacagggtctcactcctgcacaggctggagtacagtggtacaaacatagctcactacagtcttgacctcctgggctcaagctatcctcctgccacagcctcctgaatagctgggactacaggtgcgcatcaccacacctggcttgtttttaaattttttgtagagacaaggttctcaccatattacccaggctggtcacaaattcctggaatcatgcaatcctcctgcttcagcctcccaaaatgttgggatcacaagtgtaagccactgtgccaggcctcaaaatactaaaataaatgaccaaaaaaaaaaaaaaaaaaacatcagctggttgcagtggctcacacctataatccgagcacattaggaggtagaggcgggaggatcgcttgagcccaggagttacagaccagcctgagcaacaaagaccc

SEQ ID NO: 65536 - DNA, 1148 bp, Homo sapiens
ctcataaaggcacttttagccaggactcctttaaaaagaaaaaagaaggatttaagagtttcctgtgtatgtgcatcctgcctgctagggcctcttgggtgtttggggattaatggatttggttgtgtacatacttgttttcttaccactaaacctcccatttccagatttttccccctccccttaaggtaagctatgacttgcacagaatagacttcttaacctatatttaaactcaccttattcccttttagcaacttttcttgaaatatgtcacagtttccatacttttgcagccaaagtctccttttcagtcgaacgttcagagacctcattttgttctgttttttcaccgaatctttatagtggatgtcactgctttttttctctctactcacagtagcttctcctccagccattcctcaccacttctagtgtcagacagtcctgctttgttttcccagacttgcattctctgtctgcattccttacttcttatgttgtagcgttagaatatgtgtgttttatataagcccctgtcattcagaaagtaacctctaacttgtgttttctttcttttcttctgatgttctcattgcaggagtctggttggaagcaaatgtttttttaatggacttgcatctcctcaccttgatcaggactaaaggacggaggccgccccacccccttccctttcctccaaacccctaactccctccagacacccagggaataccctctgccccacaggattgaagactgcttggcagtcctcccaatcccacacctcctgtttgccaggggaaagaacctaaagacttcgtgtgattgggaggggtggcagacaggaagaaaacatgtccaggcccctggtctccatagagaatggtgctttgtccaagaaaacgtatgagtttctgattctccgggagccgttcaatggtgaggttgatgggaagacttccttcccaaagaaaatagatcctccatgcaggatctaggagagtgactgggtgtgccaaaatatgcccagggtcctgccctcagcactagatttaatggggccaagagggtccaaaccccttgctaacataccacttctttgtttaactcctttacctttccagccctttgaggagggaccatga

SEQ ID NO: 65537 - DNA, 2070 bp, Homo sapiens
cggtgaaaccccatctctactaaaaatacacacaaaaaaattagccgggcatggtggcaggtgcctgtagtcccagctactcaggaggctgaggcaggagaatggcatgaacccgggaggcagagcttgcagtgagccgagatcgcgccactgtactccagcctgggcgacagagtgagactctgtctcaaaaaaaaaaaaaaaaagatgtccttgattatttgcctgcttgatctaaagtaatggtaattgaaaaggaaggtgaggggaaagaatagtagttctttttggtgtctttgggatggcgatatctggatgaagaaggacaaagaaactcaccacctgtgagcccctatagttcatgagcagtagctggaatgtaaatagttggaaaattagcagtattttgcccagtgacaacctactaaaaaccaaaatactccttttaggtttggctactgccctctgtcttgttctttggccattagcttaaatagatttatagccaggaattgtttttatcttctcccaaacaagtaagtggaaagatgaaaaattactaatattttttgtctctgttctctgttgttagccactcatttattccacaaaatcctagagtgcttaacatcattgaaatctaggttaactcatgtagaatcaacagttaggctgtgggctccaggtacttctttctagattttgcaacaggttgagtttggggagatgcccatgtatcctctggaaaagcagacgctattgtagatggagaccacaaacaactttggcctaattcagtctcaggtgggcatgagggcaggcattagagttggtcttggtccagtcctaactcccttttcttgtttgagtctgcacagttgctagtgttacttgtgggttgaaaagcacatgtaggctacagtgtatgtcttttggagctgactgggataagagtgaacaggaaggtgatgattgacctgtgcagagcatgcactgtcgtctttggggctgcattcagtttagtagttagaacataaatgcatgtcaccattcctgatggctttgctcctgacagccttatgacagggaaattaccagcgagatccactgatccagcagtagtttgagaattaaacatctcaacctgagtctttagctgtcactttgcattatttcttccacttataaaatggggccaggcacagtggctcatgcctgtaacttcaacactttgggaggccgagaggggcagatcgcttgagctcagggaccagcctgaggaacatggcaaaacactcgtctctaccagagatacaaaactagctgggcatggtgatgtgctcctgtagtcccagctacttgggggtgctgaggcaggaggagtcccagctacttgggggcacttaggtgggaggatcacttgagcccgggagatagaggctgcagtgagccatgtttgtgccactgcactccagcctgggcaatagagcaagaccctgtctcaaaaaaaatagtaataaaaataaaataagatgagactatttctcccattatgaggataactctcttttggtaactttgaaaatgctgtaacaatattgcctagaaaacagtcatttgacttgtgtaggcccatgacaagatgggaaaaattaactctgaggcaggttttctacttcctcacttttcctggtcacccgtttgatatagtggttattgcatctgaataatagtctgaaagaactgaatcaggcaccccaagaatgtcaatttcttacattctcaccctaaggactcttaattccatctgtagtgaccaagttatggcttaggaagtttcatgttgggaagatggtacatggtcctcatttatagcaaccttttagttagaaatgaatcatatttatattctatgatgacagctgttccctgagagtgaaaggtacattttgtccagaggcagcaatagaacagtagccttctttgtccatcttttctcggcgtaagacccagttctggggcctgaaggctaattggcccacttgaaggaatctctgatttctgcctgca

SEQ ID NO: 65538 - DNA, 1627 bp, Homo sapiens
tagatgtcaaatagcccctggacaacagtgtgtcagtttgttcatctgacaacatctgttaaattccgaactgctggaatataggtgtcatccagttttacacttgcaacatctgccttgtctcttttaccgcggttgtttgggacggctagctactcttggtttgtgtctgcctgagttctccttttggtccagttagtttaccatctctcctcacccttggcctttctccttcatcctttatcaggggattacagtgacgcaattgagacgctgctcacagccattgcggttatcaaacagtcccgggttgccaatgatgagcgttgccgtgtcctcatctcctctcttaaggactgtcttcatggcatcgaagccaagtcctacagtgtgggtgccagtgggagctcttccaggtgagttggtgattgtgtcctcacctaccagccccaagcagcactcttccagggatagggagtggggacaaatggagcccagggaatctgggaaagacctggccgaaagtctggacgttagccttcatgtctttttggggaagaaactaatcagatgctttcattaataagtgttgtaacatctggaatctggtgggtgaggcagtgggctcatgtaggaaaaaatacagacagatatttttaagaacatgggttttggagccctacaagcttggattggaatcccagttctgctgctaactatctgtatgaccttcttgtgtatggaagttagtcaactttccaagccttatttttctcattttctaaaaaagggacactgatagtatttatcttacagacctgttgtaaagattaggtcagataatccatacaaaattattagcactacacctgataaattagttctcaacagataaatttacctgttaatcatcttcccaaaaaagagtagtcctcaaagagctaaaatcctcagacagcaggcccatgatagagtaatagaggaatagtttaggcaaatatcagaagacaccaaaacaccacattcttggaaagaaagtggtaggccttctgagtgaggctgaaggatctttctaataggaaaagacatcgctcccgggaaaggtcacctagccggtcccgggagagcagcaggaggcaccgggatctgcttcataatgaagatcggcatgatgattatttccaagaaaggaaccgggagcatgagagacaccgggatagagaacgggaccggcaccactgagaaaggtggggagaagccccgttcctggctgctgggggattttttattaaaaaaagatttatagtgaagaattctctctctttaaagcaaaagtaaatgcagcaagggtagggggaacttctgatttacataactggaatttcagggcagattttctgcacatttatggggagtcttaccctgagattcagctgtttctgcttgtttcttgactgccttaacctggtatctgagtgagagtatggtgtctgcattcaggtaccaatttgaatcccagtttctccactaataattggccatattactttctgttccacagtttcatttgtaaatgaagataataaaagcaactgtcccagtgacttgctaagttttagtgagagag

SEQ ID NO: 65539 - DNA, 2220 bp, Homo sapiens
tagaggattttggccattgaaatgtagcgggagttccccagattggagacatgttttgtagcaagcttttgctaagcatccttactgtcagctgtgtgctatctgcttgtgctgtgggcggatcttttattggcgtatctcccaatttttcttatctttcacttaacctccagttgtctagtcttcatgtgtgtctctttctcaccctgattactagttttagtatgtaaatagaagtgccatccagttcctgccactccctctcttcccttaaattccctagccaacaccctgtggcaaagagaacattttaagtgtgcaacaggaagaggttaactagtattagtttaaggagagaggtcctgaactcttcaggagatgtggggtttcaagtcaactgcaattcacctgaacatcagtgaacactgtcattttctcgtgggctatcaggatccttctacatttaaaaatagaagatacatataaggataaattaaatctgttctgaagcacttctggagttatggatggaaaacattctttgacaggatttaggacgatattgttttttggatttaatgtcttcactgagttgcttctgacctctgaagccaaaaaaaaggcagtagatgattttaccttctcagcctctttagtcaccttcctttgtagggtgtctgataacttctgaaggatgaactggtcctgtgggtttgtgtaaagcctgggcagtaacatcagttctgttttgcttcataggaatacctccacgggcccattcccgagattctagtgattctgctgatggacgggccacaccctctgagaaccttgtaccctcatctgctcgtgtggataagccccccagtgtgctgccctacttcaatcgtcctccttcggcccttcccctgatgggtctgcccccaccaccaattccacccccaccacctctctcctcaagctttggggtccctcctcctcctcctggtatccactaccagcatctcatgcccccacctcctcgattacctcctcatcttgctgtacctccccctggggccatcccacctgcccttcacctcaatccagccttcttccccccaccaaacgctacagtggggcctccaccagatacttacatgaaggcctctgccccctataaccaccatggcaggtaaggactattgttcctttcagatttgagccagggtaaataagtgtattaagcattttattctccctgagaaagtgagcactgaatccttgttctttcccttatagacattctgttatcatagcattgactcctgggaagtagtaccatgtcctttatacccctttttaaggtgcttaattaaatgcgggagcaggtgttatgaatgctacagatgtctagcattgttctgtgttatgccaaaattaccaaagtgttgtagagtacagtaaaaataataagggatgtgagcaatcaaggatggtattttctctgtacagccgagattcgggccctccaccctctacagtgagtgaagccgaatttgaagatatcatgaagcgaaacagagcaatttccagcagtgccatttccaaagcagtatctggagccagtgcaggtaactcagtgcttacctttgctgccttctccttaacctttacttttttttcctgattttgtcatttctactggcaaaagttcaacaagataaagttggagtactgtagatatcaagagcggcatactttgaagagcaatatgtaacctgatttcttggccttggggaagctccggcagtattacttagtctgtatctaggcctgccctcatgaaaaccaacttaatgcctagaatataaataattaataccatctcgatgtggtgtttgctgtagagtgaaattcctgccttgtggaaatctccatctcagtggttgatctttagatctagtgtctgtgtagtagacccaataccagatatagaccctgggtcttctttaggaatgatgttttgactggataatgtgtttttttgtttgtttgttttgagagggagtcttgccctgtcgcccaggctggagtgcagtggtgcaatcttggctcactacagcctccacctcctggtttcaagcgattctcctgcctcagcctcccaagtagctgggattacaggcacttgccaccacgcccggctaatttttgtatttttttgtagagacagggttt

SEQ ID NO: 65540 - DNA, 2658 bp, Homo sapiens
aaaaggaggtttttcttactttgtttcctggggtaggacaaggaagttttgtacatgttttaccaagtatttaactggattctaataaactagagtgaaatagaatgaacaaaatgaagtttgcagacctacctttgccaacccctcatctcttaggacccagagttcaacaatacagatcagattgacctgtatgatgatgtgctgacagccacctcacagccctcagatgacagaagcagcagcactgaaccacctcctcctgttcgccaggagccatctcccaagcccaacaacaagacccctgcaattctgtatacctacagtggcctgcgtaatagacgagctgccgtttatgtgggcagcttctcctgggtgagtgtgggtaaccaaaaatgcttaggggtgggctggagggagagcactgggaggtgatggcattttcagaaactactgttgcactgttttgtgctctgatggggttggatttctttttcctgggatcaggttggattgatctctgaaagagaactatcctgaggacgtactggtgccgaagaaagcaatgattaagtgggtagttgctttttctgccatcttgttactgcccctgaccctggggctttatgtctagcagggtcatctgagggacgagatttcagagtgaacaccttgaactcttggtggtcattagatggtcctgtgataatggtgggtgatggggattaaagaccttgataactctagtatacttggggtaggtggtgactgttgttctgcaagttattttgtgatgttttggggctggtggtgggggtggtttttccaaattaggaagtatatttactgtgggggaagttctggcaatggtcaactctagcctgacagatctataattaaaaaattgctagctgtcaatgtttgaactgatgaccagccagcccaaacggcagtcaaagttacaataagttttaatcttcgtaatctctaaagatggagattgggggtgagtgggtttggaattctgtatgggtgaggacaataagaaaagtctgcactaattgaaatattgccaggcttttgagtttcctctggggggacttagttgtgactagaatcctgggtttgggacattggcgggcgggggtgtagctcttgacatctcttccttttccatcttgccggccccagtggaccacagaccagcagctgatccaggttattcgctctataggagtctatgatgtggtggagttgaaatttgcagagaatcgagcaaatggccagtccaaagggtgaggtctggatttgagaagccccttttaatttgtaaccattgggataaaagatctgtactatattttggccctggattttaatcactcccacccctggcccagcttactgccttggttttggcaaactgccttagaaagggacctagctgcagtgtagtagaatatccatctgttaaggggcgaagaatactgatttttaattccaaaaaaataaagatttaggctgtctctttgttgttagtgctgtatgtgtgtttagtttagcaagatgtcctttgctttatcaatttttactaaaagtggaagagaatttcttttttcttctcttggctgtctacagatttcattcatttttaatttttctttcctaaggtatgctgaggtggtggtagcctctgaaaactctgtccacaaattgttggaactcctaccagggaaagttcttaatggagaaaaagtggacgtgaggccggccacccggcagaacctgtcacagtttgaggcacaggctcggaaacgtgagtgtgtccgagtcccaagagggggtacgtggagaccatctgtatgaggggggggtgtttgtgggtttgttttctatggtgtaggcttagcctacagtgtgggtgagtttgggggagggtgatggtggttgtgagtggtgtcatggtcgacaagtagtcctcagaataggtctatatagaagaaagagcattgtgctgggagtcaagtaggttcaggttgtagtttggttctgccactgactcgtgtgaccttggccaagtcactttactacttagggcctgtttccccatctggactagtgacatgatgtttaaagttccatcacctctaaattctgtgtttctgtctaaaacttggcattaggtgaatgggcttaatttttaagacatgcctctctataaattatcaagaagcagccaccctaaaatgtaactaaaaggtgcctataatcttttcataaacgttgattggaaggatactgtaaggaatcaaccaagaggagtgttggagaataagacttgaacaatatttctccagcattgtccaggggagagggtgctcttttgattaccaaatgttttagtctgcttggcagttatatcccattagtaaagaaagttacaggccgggcgcggtggctcacgcctataatcccagcactttgagaggccgaggtgggtggatcacgaggtcaagagtttgagaccagcctggccaacatggtgaaaccccatctctactaagaatacaaaaattagccgggtgtgggtgacacatgcctgtaatcccagctacacgggagactgaggcaggagaattgcttgaccccgggagacgg

SEQ ID NO: 65541 - DNA, 1050 bp, Homo sapiens
cactgcagctaggtccctttctaaggcagtttgccaaaaccaaggcagtaagctgggccaggggtgggagtgattaaaatccagggccaaaatatagtacagatcttttatcccaatggttacaaattaaaaggggcttctcaaatccagacctcaccctttggactggccatttgctcgattctctgcaaatttcaactccaccacatcatagactcctatagagcgaataacctggatcagctgctggtctgtggtccactggggccggcaagatggaaaaggaagagatgtcaagagctacacccccgcccgccaatgtcccaaacccaggattctagtcacaactaagtccccccagaggaaactcaaaagcctggcaatatttcaattagtgcagacttttcttattgtcctcacccatacagaattccaaacccactcacccccaatctccatctttagagattacgaagattaaaacttattgtaactttgactgccgtttgggctggctggtcatcagttcaaacattgacagctagcaattttttaattatagatctgtcaggctagagttgaccattgccagaacttcccccacagtaaatatacttcctaatttggaaaaaccacccccaccaccagccccaaaacatcacaaaataacttgcagaacaacagtcaccacctaccccaagtatactagagttatcaaggtctttaatccccatcacccaccattatcacaggaccatctaatgaccaccaagagttcaaggtgttcactctgaaatctcgtccctcagatgaccctgctagacataaagccccagggtcaggggcagtaacaagatggcagaaaaagcaactacccacttaatcattgctttcttcggcaccagtacgtcctcaggatagttctctttcagagatcaatccaacctgatcccaggaaaaagaaatccaaccccatcagagcacaaaacagtgcaacagtagtttctgaaaatgccatcacctcccagtgctctccctccagcccacccc

SEQ ID NO: 65542 - DNA, 1751 bp, Homo sapiens
cggtccttagttcttctcttttttttttttttttttttttttttgagacagagtctctctttgtcgccaggctggagagcagtggcaccatcttggctcgctgcaacctccttttcccaggttcaaatgattctcctgcctcagcctcctgagtagatgggactacaggcgcgcgcaccgccatgcccagctaatttttgtatttttagtagagacggggtttcaccatgttggccaggatggtctcaatctcttgaccttgtgatctgcccacctcggcctcccaaagtgctgggattacaggcgtgagccgccgtacccagccacctttgttattaatgaaaagcttttccccttctaatttcttatctgtggattgataatagtgccattcatttcactttgagaaatacgcagaactcattgtccagtggtcactgctttgttagagtataagttattggcctcaatagtttgttctctggtctcctcagttaaaaaggacttttttatgggtctaagacaggctaaaggtagtatgtggactttaatagatacatatatccaacgggcaatatttgacactaggcaagctgaagaaagtgtgaattttgaatatcttatgttttgtggaaggtgagggatgagtgcttcccccccacacacatatcaattagttatttttgacaaagttagtgttagtgtcatctggaagctacagaaattatttaaaaaacaaaaaaacaaaaaaactttggctagaattgttagaagctggcttagtctgaaggcacccagtacaaattgtgttttagaatgttttaagaatgttactgatttcgccccaagctggcccatgcacaggaagcccttcatgtgcactttgctcctcaaggaaaattaatatttttcctagatggaaccctatggtgcttattccctgatctcttagagcatttgctgcaaaagcctgtttttgccagagctactttattcctgtaacacagggagtcctgggattcacattggctctcttgggccagggagaactctggaaaggtgactgagatcagttgctctgctgggagttttggcttttcatactgagacaggctttgcacagtgtccagttctcttccttatgtccatcaataagtatttatttattgagctacttgtgtttgctaagcactgtgccaggactagtgaggtaaaaggaaaaaaaagtgggtccctgtactcaaaacagattccactcctggtgggtaggggtggtggacaacgacaatgtacagtgaaggacaaggagggtgtgaagtgggaactgtggaaatggtcattataaagccaaaatttttgattaagccttggttacaattaaaagaaacaatggtatcaagttggttgctctgagaaaaataaatcctaggctagttacttccctcagtgggatatgaggaagaagagggtggaggttaggaacactgagcagacaagtggagaagatcttatttaaattgaaaatcacacatgttctcttttgtttacagggaagcaggaagtttcatgagacagtcacagttctttctgtgccattaaacacaaaattctttgagatagttattcagtattaaatatatgtttcatgtttaatctccctggaatgaaactttgaacatcagtgcatgtaaaatgtacttttcacttaatttgtagaatttgattttactttaatctattactgcataaat

SEQ ID NO: 65543 - DNA, 1031 bp, Homo sapiens
cggcggcctgggagagcggtgggcggcgcgaggccgggggcggggcggagcgggtggggccgagctggggccgccaggatgctgcgtctctggagatgggaggttagcaatcattaccctcttcccagcccaggaccctcgtgccttctaattcttgcatttttccgaatcccgcagtggcatcttccttactttgtccatcctccggactcgcgatcttccttccggagccatgtcagaaggagtggacttgattgatatatatgctgacgaggagttcaaccaggtgaggtgtcatcaggagctttgggattttccttgatcatctgaggaatcattttcagcaaactggcagtggtttcaagctgtaccagtcctaggcttgaacacgcgtctatccggtctaaaatttttctcctgcagaaactttaaagactacactccattcctctttatgttaatttgaagctccaggcttaattttaaaggctttgatttaagagcaaataaaaagcaggtgtaatagaatggtgaatcaacctgtggaatttactccccaggaagccaaaggtgggtgtcagactaaccacacttaaaaatcaaaagtacatttgctacggtattcatgaggacagtgttgataccggttcctttacattctcaacctgcagctggagaagtgtagtcccctccatcgtgacagtgcaaaagcaaagtagaaaagatgactttaacatttagtttcaactccattccaattaagttttacttccttttataagtaggttgactccagtcatgagaagtccacaggcattttggtataataaattgtattggttacctttagtctttctagagggaataaaagagtaaagacgttagacaaaccagttagaaaactgataatagacccatgcacataccctcagttggatttgtttttattgtaccagggaacattatacagaaatttatctagagctgggcaaggtggctcttgactgtaatctcagctgctctggagcctg

SEQ ID NO: 65544 - DNA, 1097 bp, Homo sapiens
gaagtgtttttaaaagctctagggctgtgtgacttctgtgttgctagtggtgccctccctggaggggttttgccctcagagctgtaatctaggcagtagaatcagtcacccagactggaccaggtgcatctaaaggtgttgactagaagaaggtcggccagatttgatgagcaggtggttggtgattataggagccgcacacagggactacacacgcacatgtttccagcattgttgagctccagggttcctacagagccacctcatggttcctgcctgctcttcagtatccctggtggctcaggagggaagggaagagatctagcctttacgtaatcacagttaagcctcacagcactctagactagtggtgttacctgtattttatacataagaaagtgggctcagagagaggaagtaatttgtccaaggtcaggtagctattgagtcgaaaaagcagaatttagtatagctcagtctgcctccaaagctcttgaactttctactagaacacactgccttactgctggaaatttaatagaagtctctgtttgggaaagctgtggcaaatagatgtgacagttctgagacatgacctctgtgttacatggtgggtaggaatctgccaggtgcttcgccaagtgagtagatctgaacttgatcacccagtgaagcttctgtgaggaagcagcgcagtgcactggttacacatttaaatcctggctctgctgcttacctgctggatacatgaattgacctgagcctcagttgcctcatctataaaatggggatgacaatgcttcctgtctcagctagttgatgagatgaaacacacaaagctcttacatggtaacttgcacagtatgtactctagatatgaatgtcagcatttagtcatagcctcagtctgagacttaaaacctgtccctaacacaaattgcctggcatatcaatgaggtcaccatagctacatccagggtttctcatctgcaggtcagaaagctgagcctattaatagaaccacagaatgtcttacctcccagtgaagacgagagagaaaacagaccctggtgacaagacctttgatggaaaaatct

SEQ ID NO: 65545 - DNA, 1046 bp, Homo sapiens
atatgagcgtctggccctgtcctgaccgactcaagtggtcttgtgagtcctgcacaggctctccacgtgacaccttaaattgggtcaggaaaggctgttctctttccatcgtttccttttaatcatcctaagtcttaaaaatccataagccaaacaccttgtgctggagctttctgtgccttagacagagtgtgtcttttgggggtcattgtagaagcactcttactggctttgagtgttatctggaggtcatctggtatgtcttctgctccagccagggtggcaccaatacagacctggttcatatttttaaacatcactgggaaaagattccgatgggatagttggggtctctcatttatccttcagtccatctgcagctatttgtggctagacaaagagaggaaggtttaatgataagctaaacagctgtagatggcaagcaggtctgtgagatttttgagctgacagccccacttaatagtatgttctgtagtatctgaggacagtggactcaccatcccgcagctatcaagttgatgacactgatcagtacccagtgaaactaactcctgacacctcagtttcccagtgaaccctctgggaatgaggagtggtgttcgaattttcctgtcagggaagatggcattggtgggataggtggcttcaggccagcagtactttttgtggcttaagaaacaagtgttgttagcagtttgttagaggggtggtagaaagtttaagctatccaggacaacatcagtctttaaaggagatgggtagatttatcatcacctatagctgcaaaagaagagttaaaagccttttgttggatcccggatctcagaccccagatactcctttttttttttttttttttgagacagggtctcactgtcacccaggctggagtgcagtggcaggatctcccctcactgcaagctctgcctgggttcaagcgattccatgcctcagccaccctagtagctgggattacaggtgcacgctaccatgcctggccaatttttgtgtttttagtagagacg

SEQ ID NO: 65546 - DNA, 1022 bp, Homo sapiens
gagctctgggatgctatgttggggcggcaagcggtgggccgagggccgggtaggctagcacgggaggtaagggtggtatgggatggggcgggggcggtctagggcaataggagagcagagaatgggggaacttgagggtggggggagggcaccggagccttgccaccatcccaggactttgggcaagtcacccgcactccctgggcctcggtttccccatctgtaaaatgatggtaataatacttcacctacctcataggggaggttgtgaggccaccatcacctgacctgggggtcaaggcaggaggactccgaaggtgctacccgtgagcaaagtgtaattaccgaatcctgactgcaaggcccacctgcccctcccccacagagcctccagagctagctgaggccaacgcaggcccatccgtctcttcactctgtcgcaggccctttcatgggcttcgtctgccatctttgtgggtgccctagacttagtccttatcttgtcctggtttcctttcttgtgaccatctccccatgaaagtgctgtacaaattccacccgccccaggacccccgcacctgccctctggcaccagatgccagggaagggacagaggaaaacagccacaaacaagccaggggggctccccggagccccaggggtggggattggtggccactgtttgtatgttcttgagtgcaagtgttttataaaaaataaaacaaaaacccaccatcacaaaaaaaaaaattttgcagcgaagagaaatgaagaaaaactgaagaaaaaaaaaaaacaggaaaaaaagaaccatacaaaatttttccaccacacataccctctaagccagcaagatttcctctttgcaaaatcatatttttgtgggaatgggccctgctttttgtggcaaggcctgttctgattaataaaggatcgtgaaaaagtagggccttggctgtttcctccgtgggtcccagccctccctcacctccctgggggcagaggcagtggggtgaagggga

SEQ ID NO: 65547 - DNA, 1034 bp, Homo sapiens
gtcccgagccccgactagctttgccctaactccttcatcaaaagaccccccgccagcttcccacacctcatacgcagccacatctgccctattctccatgctttccagcttgcctgcccttcctcatctctccctgcctgtgcagacctccacccttctttcctccacccctccatcccccaatgcttgtagaccttccattcattccgtctcatcgtgcgtggtctctgatcgtccatcacctgaccttctccaggactgtcttctcacccttccccactccctggtccccgggagcagctccttctgcccgactcactcacagtgcagggaaaggaggcagggaaaagaccaggattctgtgagttctgaggttgccacacacaaagaagctgtggtttctctgcctcggccactgatgagactaaaactggcttccccttggagacggcagatttcaggctgatccctgcttaagccctctcatccccacgctggtcctggtattgatacaagacccagctggtgacaaagcctccaatcctgggggtccacgagcctgggcctgacattcccagaactaccgccaggtggcgccaggcccccacagtctgtggccgtggtcttagcccccagttccactctggatgggcctgtgacaccccaaagagaagaaggggactctggatagggtccccacatccagggcgtggggagaccattggcatttgggaaccattttccttcgaacggcttccccttgagctgagcattctgcttgctgcagtagacgggtcgccttttgcccataccgaaattttctgaaattaaatcgcacacccccaccatttcctctccctgggatctggaggaacatcatacatagtaggtgaatcgttttgtagagtgaagaatgctaatgtaaagcaaatagtcacccacgttccttgtaaatccaaatgtttctatattgtagctttgcttaaaatggggtcggccccaactgcatcctcctctttggcgggctggggagc

SEQ ID NO: 65548 - DNA, 1050 bp, Homo sapiens
ctcatctcggactctgttcaagaatcaagatgtcagcatcatcctggattatgttcttccaagaatcagaaagagggaacattgtgggaagacctgggttctatccccagctctgatgctacttgtctgagattttgggcaagacctggcctctctggggctcagtttcctcattggtagtaataggagggccccaggtgatcgctaaggtccatctgctgattctcccaggtccctcttgttcttgcctgggtctttccttgcctctggggaaagcacacggccctcctgcctcagcttccattcctggaaggggaaaaggatcctaggaagtccctcccccacggtccctctaacccttccccactccctcccctagacccctacgtgaaggtatggctgatgtacaaggacaagcgggtggagaagaagaagacggtgacgatgaagaggaacctgaaccccatcttcaatgagtccttcgccttcgatatccccacggagaagctgagggagacgaccatcatcatcactgtcatggacaaggacaagctcagccgcaatgacgtcatcggcaaggtaggggcgaggcaggtggtgtggtgcacctgctggcaccagtgaggctccgttccttaaaagaagcagcgggggtagtggacgggcacaggctggacaccaggagagattgggatcagtctcctctcctctcaggcctctgtttcttcatccaaaaataaggggatgagatgaccccctccctagggttcctctctgagtgtcctcctatgggtaagtcagctcaggacagactgccagctgagcagggagaaaaggagtgcaagagaggaatggcctggatctcaaaagaaaggtttactggacaggatgatgacgttggagcagtattgcccggggtcccatctgcacagggtgagctgcgtggggcagtgttgggagctgcagtcagactccaaagacctcgtttcagttcccactccatctgccgataaacaaccatatcaccttgggcaagtggctcggcctctc

SEQ ID NO: 65549 - DNA, 1094 bp, Homo sapiens
tcacaagccaagcagggagaggacagccgggccaaattgtggaaggacttgaagccaaggtagggtgcccggcttttattctaagtgcactgggagccattgaaaggctttaagcaggagcatatcatgatggaatttctatttttaaaaggtctctctggctgccgcattgagaatggacggtaggagaaagcgtggatgcggggagggcggtttggagacacttgcagctgcctaggcaagaggtgccagcggctcggatgagggaggtggcagtagagaaggggacgctgcggtaggaaggatggaagcacaggcaggaggagaggggtgtggagtcacaggacacttgtcacctcctgcttctgtgcctttgccttttccctcccaccgatgcttccccatgtccctctgccctgagtcctggggcctgcgtactggcagctgtggccacctagacagagccacttgcccagacccgcctcgggacgattggcagaggctgctcagccactgagatggacacaaggtgcatgggtgaatggatgatcgcagttctactctttactagctgggagtctgggcaagtactttaagccgtctgagcctcatctgtaagatggacgagatgccattcaccttggagaattgttgagggaatcccatgagacggtgacagttcttgctagcacttcagtaaggtctaattgcaatccggtgtgcctgctggcccggtggggtggcagcgggagggcacagggcctgcctcctcttcccagggccttccttgcctcccgggccccgtgcagcccctctgtccccctcttcactcacactcatctatacccccaggttttccctatgagaaggtggtgcagaggatcctctacctccaagtcctggactatgaccgcttcagccgcaacgaccccattggggaggtgtccatcccccttaacaaggtggacctgacccagatgcagaccttctggaaggatctgaagccatgcagcgatgggagtgtaaggccccatgggtgggtcttagctggacaggcagcagggcagggctgggagatctggtcccagaccctt

SEQ ID NO: 65550 - DNA, 1040 bp, Homo sapiens
cagcgtggccaaataactctaacgttctcatatcttcagcagtcaatctcacactctccctgctcttccactctgtttctaacctgactttacctctccagctgtttcgggctcctttccttccccctgcctgcccgtgtgagcacgtgtcctctcgtgtgtgtgtgtgtgtgtatgtggtgcgtgcgtgtccacatgtccatgtgtgccatggccctctgggaggggcgcccgcgtgtcgctgggtggagtgggcgtttccgtgttgtagaggcagggccaggttgtcacagcaggtgtatcgtgcttctgataatcaggatgttgggccctgaaaccactccctgccctttccgtttcagtttgtctcccttcacgtgcacacgtggcatgcctgggtctccccagtgcatctcctctcgggatccctgcgtgccatcgctgtatgtgtgtcgtcactgctgctgtggttggcctgactgtggcctctgccatcctctccctgcccctctggatgtctgtggggctcatgtgcatgtgtgtgtgtacatatgcacgcacgtgcgtgtgtgcgtgcgtgtgcgtgtgtgtatgcgcatgtgtgcgtgcgtgtgtacatgtgtgtgcatgcatgtgcgtgtgtgtgtgcgcacgtgcaccctgctttgggatcctgatgtctcccctccagggcctggcatattccatgcatgtctgtctgtgcctgtcgtggtcacctgtgtgctggaggctggtctctaccagagggccatggctcatgtccaccctcagcgtgtggctcccagtttgtggctgtgtgctctcaaagctgttctattttagcctgtcctgagcctcatgctactggtcccccgtctcctcctccctacctacccctacctctcttcctcctcatgggacattccatcctggtccctgggcaggcttttagtgcccccttcctgacccccagctgaacggagcctgggctcaccacccagccattgggtcaaagaacccagcatcctgggaacggcatg

SEQ ID NO: 65551 - DNA, 1048 bp, Homo sapiens
aaacaaagaaccctgaaaagagggcaaagatccacgccagaccctgaattctaaggctgtgctggccacagggtggaggtctgccgcttccttgcctctgtggacaaagtataagaactgatggcttccccggcctccccaggattactaggccagctctgcactggcctggatttcttcctgtctccaaaggatgccagtacttagaacacagaggcagactttcctggtgtcccccagcgaaatagcgggaggggccacagcagctccctctacccctcccactccaacatgacaggcagctgcagggcccaggggacctgccttcaccacgcagcctcagcagcactcgcagcccactcagaccggcagggaggtcggcctagccaggaggtattctggcactagctgagccagggccagaaggtgggtgggcagagccggcctggggcctcagggtgggcgcgagggctttgcagcctcctgggcgaggcagtggcggcgacggcggtggcgacagctccgatggaggcctggcgaggtccggcagcgcgcaccctgcactggggcctcctagtcctggccctcggcttctttctcttccactgtgatcccttcatctgcttctcctttctctcctctcctccacctgccccaagtttcgaggactccaccctgtccacggccactacccttgagtctatccccagctccacgggagagccgaaatgccagcgaccccgcaccctgatgcggcagcagagcctgcaacagccgctgagccagcaccagcggggccggcagcccagccagcccaccaccagccagagcctgggccagctgcaggcccacatggcctcggcaccaggccccaacccccgggcctatggccggggccaggctcggcagggcacctcggccggctccaagtaccgggcggcagggggccgcagccgctccaacccaggcagctgggaccacgtggtggggcagattcgaaaccgaggcttggacatgaaatccttcctgtaagtcctccccttgagcg

SEQ ID NO: 65552 - DNA, 1071 bp, Homo sapiens
gggcagcaggcctgtggttgttccatctcatcctgggtatctggcccactctcagcctgacaatcacccatcagctcccaggctttccctcttacagccagcagatggctctagacccagaagttgagccattccatttttgaccatcgggtgactccattggctgtcccagtcttgcttgaaccatacatcatctgttgtggaagccactcacgagcagccgcaggctgccccatcggttcatcctcatctcagccatccccgttggctgtcccagtcttggtcaccgagctatcccaccactggctgttgggaccgtgtattcctggaggttgggttgtcaaaccccagctagcttcacttgccagatgtcatggggtgttctagacatcaggcagaaggagccgtcccctctgtaatagctgtctgagcttgtcgaacagtcaggcccactcttggctgatggacgtaggattggcccctgttttccacagacagtatatcccctctcatggggcagctttattctcatcttggcctttggaaacttctgattcccctcatcagagcccttctaggccctgagtcctttgagctgtgaccagtctcccttggggtataaattccattttcagaagttggaactcccagctaatggagcagcctcccatttaacaggccaacagccctgccccttcctagctgttgggccatcctgttgcctcaactgagggtcctcctgattctcttcagaagacctgtggttcctgccattgggagcaccgaaggccaccgtaccaagatctctttcgctagttggcttgagtgcacacaagccaatttctcccaacatctggccccaggagggtcccacagggaagccacacaccccttcagagagcccggcccagtgccccaccctcccagcctgccccggccagtctccaggccggttaggcctccatgccatccactggctccaggcctggaggaaccaattttagtttcctgtgactgagaggttgtaaattggactaattttggatgtgataggaaaccaaaatgaggtca

SEQ ID NO: 65553 - DNA, 1100 bp, Homo sapiens
caaggagtttattctaaacatttcaccctacgccccttatggcgacccacgactgtccctcaagtgagtgactttacctggtttgatcatatgtaccgagtatccgcgcacgccctccttccctcctcctgcccccacccacctctggacccgctcactccctctctcctctcgctcctgtcccccaacttccccacccatccaccccatgggcaggccgaccatggagacgagcaaccccacctgccccaacccacctgcctgcccgctcccgtcccctcccccagggccagccttgcaggagagccccctcggcagccatacctggcccccccagctggtcccggggcccaccccaccttctgtgcagtcaggatggggttgcccgtttgggtcccgccccctcggttgtggtcgcttcttcctccccgctgtgtgctgccgtggctgctcggtggtcggtggtcggtggtcggtggttcgtggcggtggtggcggtgatggtggtggtggtggtgatgaactctgactaacacggctttctctttctccctgccttggggcctcctggcctggacagcccgctcttcctccgtcgttaacccttcgttgtcctgtgggatagagttggaggtggctgccctcccccaacccccgccgcccctgccccaggcggtggggaggggccccccctccgttgtcgtggtgcgttgttctccgacccccagcccgcccggtccccctctctcctctgcaggctccgctgttaacccatttgcagtgctgatgtctctctctctctctctgtctgtctcatgtccgtctgtctctctcctcctcctctctcactgtctctttcttccttttatctgttattgtttttcttcctcttccaccccccgacccccacgtatggcctgccctctctcccccaccgccacccccggtgcccctctggcctggctgcctcgtgcatgcctccagtggcaccctcctgtcgggcgccaaagtggccgccgcggcggggctggcggtggagcgggaaggccggctgggggagaagccggcaccggtgccgccacccggagaggacgccttga

SEQ ID NO: 65554 - DNA, 1029 bp, Homo sapiens
caatgagggtgtgacctgtacctgtcctccccaggggcgccctcgcgcgacgtcctgctggtctctgccatcatcaccgtcagccttagcgtcactgtcgtcctctgcggcctctgccactggtgtcagcgcaaactggtgaggctcctgagggccccttggagggtggtgcctagccctgcacactgccccccctccccacacacacacacaattacaggcttgggaattttcccaagggtgcacacaggtgactcacctgtccgcatagtcaggggcacttccatagaaattcagaccgcgtgcatacgcatgcatgcatgcacaccctgcgtttacccgggtctcagccctatacttctgtttatatacccaaagccatgcatctagggacacattcggggacagacttaggactcacaggcattcgcacgcgagcagctacacacacgcgcacacacacacacacgccctgcctcccgcataaagcaccgcaggcacacacgcgcagactgagaatagagcccccactctaagcaccgcgccccctcccctctgcccgctcccctccatgggcgtggctgagccggtggccaatgcggaggcgccgcccgccccacccccgcacatccatcctggctcttgggtttgtacaagcacaaacggctccttttcatttttaacgagggctggggaattaacgagcaggattagtccatcaataagtaaagagaccgtcaggagggacattcatcccctgagggcgccggtagggggagcggggctgagccgcccgccccgcatcgcgccgccccgcccagcccgcagcccacagctccccgagccgctgctccgcaagacctccactcccgtccccactcctgccgcccggcccagaagtgtggtgggactttgggggcagcagggggcgaggggggcgacggtgggcccgggggtgtccgaggtgctacgcctttggcggagtcaggtgaaggagggtcactagcaagcatcccccatctccccggg

SEQ ID NO: 65555 - DNA, 2039 bp, Homo sapiens
cactaatccagggcacgatgtgataatgctatgataatagctagcatttagtgcctacttattccgtgtcaggcactgtgctgagttcactgtacatgctaattcctttaaacctcaccatagtcctatgagactatactattatcagccctcatttacagatggggaaaccaaggcacacagagattaggttacatggcttggaagaatcagagccagaatttaagcatgagcaatctgacttcagaggcctggcactaatcactattctctaaaagaaggatgtaggcccagtatgctgggaactcagaggcaggagaaattaattcccactgggcagactaagggaggcttcctggaggaggtcttttcatctgggcctaaaaaaatcaggagtttgtcaggcaaagttgagcatggggaaagaacagaaggggtcctagtgtatgtgtgtgtgtgtacgtgcgtgcgtgtgtgtgtgtgtgtgtgcatatgtgtgtgcatgcatgtgtgtgtgcatgcgcgcacacacacttgtaaaagagagctctcaactcatcactgcagcctctcccatctcatcactgcagcctctcccatctcttctcttccatcttatttgggtgacaaatgagataacatatacaagcattgaacattcaacaaatatttgctgagcaccccccgtgtgtcagacgccgagctcgtcatagagtatactggagtgagcaaagcagatacagcccctttctttgtggaccctgtagtgtggcatatagtaggtgcttaataaatagtagcacctattattatctttgttcctggaggcctgggattcttcctccttcattctttcaataagcatttattgagcacctattaaatgctccaccgttggtgctgggaatacagtggtgaacaagagaccaagccctgcccagatgctagaagggaaggctgtgcatggacatcttgtccaccctcagaagcaggccgcttcctggggtacacagacctgaccctgagatctccttggggggtggcatggccaggagcataggctgtgcccacaggacccagcaaagcacacaggactcagttagacccttcatcctgagctgtagtcagctgatatgcctaccacaggcctgggtagaggggcagcagcctgccccagctcatacctcactcccaagacatcccggcattggacctaggagatctggctctgcctagctcctggttcaccctgccttccaggtttcctgatgttgcctgtctgcccttgtctatgctgtgccttacccgccgggacctaggatgtctcctctgcctcaggataggttgtggcactcaaccctgtcaaaaggctgactagggctccaaattttctttcccccagtgttaatatgctgacagtaaggggacttgaaaccatgcatgtcatctgaggaggggttagagggctggggcggctttgcctggagaagacttgaaggggacattagaactgtcggcaaggatttggaggcctgtcatgtggtagaggcagccagctcgttcctggcagctctggagggcaggctcaggaccagcagggaaagttctggggagacagattcggctctgcgagaggtacagcagccctccctaacaatgcccgtccaggaaggacctgcttcctgccttctgctccctgcagaagctccctgtcaccaacagggctgcccatgggctttgtgcatccctggggcctgacttcatgactttcaaggtcccttctagctggagacacagtgactccatatgcagggaatggttcactctggctggtaggcgagaacatgcttgcaccccttgatggcgacatcccccttaggatctccttaggatgtcggcatgctggccgaggacatcatgtcactattattcacaacatcaatgcaatttgcagtggcaagtgtttgtttcaccctgcctttgagggctgtccgagggaggctgaagggtctgggaaatctgtgggggccgtaccaact

SEQ ID NO: 65556 - DNA, 1054 bp, Homo sapiens
tgtgttaccatggagacaggccccctccagggccctggttcacactgttctgtggccttgcagggaagcttgatcaacaagctgcccgcttgagggctggggcatagtggggagggagatagccccaaagcccctcctcatactggggagggggttagagcaggccggattgaggtgggaacgtacaggccagtaggtgacaggtaaggggacagctggaaggcaggtcaataggtgggtgctgggtgagcaaagacaggccctgggcagctgggttctgctcctggctgaccccaagctcaggcttaaggggcattgagggcaacatggagtgccagtgggggctgtctccttgttacaccctctagcccggccattgcaggatgttgtgtggaacaggcagaggagccgtatatggttccctccccctcctgcccctcctgagtccccccatcctactccccacccaccccctattctctcacggactttgaatccttattgaatctgatggaccgttttcgttttcaataactggttcccccaggggagtgaggccaagaacagaagaacagcagggagaagagctgggaggggtcacgtgggggcgggaggcccagtccggagctgatgacccccagctggagaatgagttggcttgatggctcctcagagcactgtggcatcacaggtgggcatgggcagccctgtatagagctggtcctctgctccacagacagtgcccggcaggtggcatatgtggccgagaggtcaactttctctcgtcggggcagtcactggtctggccaggtgccggcaccagcctgtgccaggcccagcccgggtgcctgcctgccttgccagggaaccccagctggtgatgccaggtgaattctgccagttccgtgggcatggaggtccctgaccttccaggcagcaggggcagccctgctgggccctgtccaactagtgtctgcagggcagggctttggtctcacccagcagaattccccaagggctggaacagagttggcagacagcatgggacttgtgg

SEQ ID NO: 65557 - DNA, 1098 bp, Homo sapiens
tctccctccctcctctttcctcccatgcctgggcaccatgacatcaccactcctccaagcacctctgccctcaccacggaggccagcttgacgtgcttggcatcttctaggcaaagggtctggagtccagtaccatccctggtgtgctggcagccctcaactcttccctcaccccctccttgaatgggcctctctggctgcagttgggacctgtcttgcccaccccagttgcagctgcgggacccaccagtgcctgtggtagggcagctgtgactgggaaaggggctggcctgaggctgactcctctccggtgtgggcattgggctgggtggggtcagacataggctggagagggcacagtctgcctttgagcctagtcatctggggtccttgaggagtcaaagatctcattctggcctctgccctctggcatccctgcccacctttgtaggctctatagttccaggtcagatttcccttccccccagctcccccaaggctccctagactcagctccccaagccagggctctgtgtcccccatttctgcctccccatctccccttggctggtactggttggtactgagatatgcaaattgatttatgtgtaactcaggccacccctcccctcccctctggtctcccaggggccagtgccttttatatcctgatcctctcatcccactctcaggaacacctgcggcccaatccttaaaaaaaaaaaaatctgtcctctcctgctcccctttgcctcatgctggttccagaagatccctgtggtactccctccctcatcccacttactatgcaggtccctaagggctcagctactgtgaggaccttacctgacaggtgtggttctctccctacttgggcctcaggcccccaggcccttggttccctgatctattgtgaatgaagaaaaggactgtgggaaataatcggagtccagtgaagaacccagaccagccccctcccatgcacacccaggctccagctccacactctgtccagcctccctagaccagacctgcagcctcccttctgccccctcccagacttcacggcctcttcctgccctcagccttcaccctctg

SEQ ID NO: 65558 - DNA, 1224 bp, Homo sapiens
cccaaagtgctgggattacaggcatgagccaccatgcccggccaaagataagtctttttcttatgcataagtcagcgtgtctggtctggggtccccggtcacagtgcacctgccctgcctgaggtgaggctcctgcagccaggggcagcccagactcccccactggggtgactttcaccatcgcctccctcacctccagggtatggctgatgatccccagggcttcacaccgcttctcccgctttcttacttcctctctgctttgagtcttccctgatgatgcccagcactcctcccattttacataagaggagagggtggggaggggacagctgagaggtgggaagcccccagcttgcaaacctctgaggccaagtttagtttggcatcacctaggtgactaaatctaaattccagagtctaggcacataggatatgctcggagagtaatggctgcatgaatgaggctgggaaggcagccaaggatggggcagaggcccaaagctgtgtgaccttggcacgtcagcattcctctatgagcttagggtactcatctgtaggattcggggaatcagggaggcgtggcatctgagttccctgggcctctccagctctgaacttctggggactgtcacatgtcttcagtcctgcttccttgcctgtttttttctaagcaatttttgctgcccaagaagacctcacctgtgtgttccagctacccagtgagtttgcgcgtaaatggctgctcagggcagggctctccagtcaagggcttgagcaaggccactgctgtccccacagccaggcttccatgctgtggcaggaggaagggagaccaatgctgggacatgagagcgatccaccacccatagcagagggccggggtgcctgggtgtgcttggacctgacattggcctcacgtgcaccctttgtgcctctgcgccggctgcctgtcagttgtcaggtgtctgcctttcatcctttcctggccaaagctgcctttattcaagtgccccctgccaggctttgtgtctgataccccatttccggcagccctgaatctgtggccctttgagctgctgttttccatcgagtggctccgtggggaggaagggtgggagaaatccattcaagtcatttgttttaaagacattgaagtaaacccatgggattcatgcggtcacatgttttcagtcttctttcaaagtaatagttgggtttctg

SEQ ID NO: 65559 - DNA, 1049 bp, Homo sapiens
catcatccacgtggtccacaaccaccctgcagagcagtgctggtaggttctgccagggtctgctgctgcagggggtagtggccagggcaggggcagtggagagcagggccggccttggctcaatcaccgctcggggctgggggtggaggctgggagaagatggcccagggcctccatggaggggtttccccagcatcgggctctggaaatggaacaaaaggccagccctgagcaggactccaggcgtctctctccatagtctggctttgcctccagtgtcagcccttccctggtgtgccccagggcagctctccccactggtggtccatttaaaagtaggtgccctggagggctcacccctcaggccctggccagctcacacctcagttgtcacttggtttcaccaagggaattcctcgaagacagctgtgagcaaggtgggggctgcgccaggagagagaataggagcaggcaagtgggtagacctttcccactgtgctccttcagacggctgggccctggctcctccctccagggtcggcttcctcccctgacacagctggtgagctgggccgtgcagcaggtggagcaggtgtggcccaggccaaaagcaggtcgaaggctgtggagggaccatggctgaggctcgaggtcagcctttcccaggctgagggcagggcaggagccaggccagggaacagagccctgctgccaggcaggccaggggcctccaaaccatgccagctctgctgagcagggcagagaacagagccaggaggccctggcaccgagggccaggccaccaccccacccttaactcccctctgtccatgtccctctcagctgctgtgagcaggaggagcccacatactttgccatctggggcgacaacaaggccttcaatgaggtgatcatctcgccagccatgctgcatgagcacctgccctatgtggtcatggaggggctcaacaaggtgaggcagctcccggcagggtaccaccagggaataaggcactgtcaccccatcagaaccccgtaagcaccatcag

SEQ ID NO: 65560 - DNA, 1103 bp, Homo sapiens
acttggagtggatgtagccatagcccaagggtggctaaagattctgggtctcctagaagagagggttctccggctgggccagtggctcatgcctgtaatcccagcactttgggaggccgaggcaggtggatcacctgaggtcaggagttcgagaccagcctggccaacatagtgaaatcccgtctctacaaaaaatacaacaattagccaggcgtggtggcaggcgcctgtagtcccagctccttgggaggctgaggtgggagaatcacttgaactcaggaggcggaagttgcagtgagccaagattgtgccactgcactccagcctgggcaacagagtgaaactttgtctcaaaaagaaaggtaaaaaaaaaagagaggggtctctgtaggcagcctgtgggggctcttctgcatttttggtaagaagctgggagagaacaaagactactgtgactcagatcgaagaacctgatagaaaaacggctcaagagccccatctttgtcaggtgtggctgctgggcccaagctaactgagatttgatgcggagaggcaaagggttgcttgcacaagcaaacatctgacctgaaggcattttgactaagacggctctggtcacaagttgaagcctgaagcagggcagctagcagttatagattttttttttttgagacagagtctcactctgtcgcccaggctggagtgtggtggcacgatctcggctcactgcaacctccgcctcccggtttcaagtgattctcctgcctcagcctcctgagtagctgggattacaggcacgtgccaccatgcctggctaatttttgtatttttaggagagacagcgtttcaccatgttgatcaagctggtctcgaactcctgaccttgtgatctgcccacctcggcctcccaaagtgctgggattacaggtgtgagccaccgcgcctggccatagatcatattaataaagagagaaagcccaaaccaaaggaggtgaggccactgtgccttgcccccatgtaaactggttgggagatgagccacagcactgggggccctctgtgactggggcgatggggaggggctgccagggcaggcagggagg

SEQ ID NO: 65561 - DNA, 1356 bp, Homo sapiens
ggactgacccctggaggacacggcaggacagtgcctgttgggtccgagccatcccatcgagggcagtgggcacccacggggctctcgactcagtaagcacctcatttgtgcctcacagcaccccataagacagaggcacagtgaccccatttgacagattagtggaaaggacttgttccctgtcacacagctagaaagaggcatggcaggatcggcctctctgtacccagatccatgccctgggcccctctcctcctctgagactcaaggtggccttgtggtggggcgggggggcattatcagtgcttcctggaggggtgccaggcagtggagggtgagagccggcccccacatggatacctgggtgggaaggagcaggggcatctgttttggagggccagcctgggcagggatggagggctgggccctgaagcccagggtctgcagggagctgggcctcttccctagcccatctctcctgccctgcaggccacgacatcaacggtgccctggagccctccaacatagacaccagcatcctggaggagtacatcagcaaggaggatgcctccgacctgtgagtggccccctcgcccggcctgcacccgcccagccccagcccttcgcctcccttctgtcaccagggaggtctgagggccggacctggggtctgctgtggtcccacctctgaaagctgctcctcgtcccttcccagccactgactcctccgaaatctccatagttccctgcagggagggggcggctacttccctgctggggctggggtcctggctggagctgagccgccccccttccccgcagctgcttccctgacatctctgctccagccagctcggcctcctactcccacgggcagcctgcgatgcctggctccagcggggtccaccacctgagcccccctgggggtggaccctccccggggcgccatggtcccctcccacccccgggctacggcaccccgctgaactgcaacaacaacaacggcatgggcgctgcccccaagcccttcccggggggcaccgggccccccatcaaggctgagcccaaggctccctatgccccagggtgagtaagggcagggagtagggggatacagcggcataggggcaggcagggagcagggctgtggccgtgacctgggaggtgctagacactggcctggcatgggatgggctgggtgactggctgtgcgtgggcaggtgagggaagggaggatgagtccaggtcaaggggggactcctgggctttgttctgaggcagtgggcagccacaaagcttctaagcatgggagtgatgagggctgacgtaagtgctagaaaaatctcgatgctgtgt

SEQ ID NO: 65562 - DNA, 1335 bp, Homo sapiens
cggaagctccccttccctggtttttgtggcccaggccctctgtggcttgtttctgatcacagggcctgctctccatagagcccccactataaagggtgaccttgagtgtgacactgcaggcagggacaaactcattcattcctcaagcgattgctgtgattctgtaagccagccctgttgctgggcatgatggagacaccaagtcaggtgtggctcctgtccacagtctgggggaagcgaagagtgacagaagcagaaaatgacagcacagagcaatggggagtaggaggaggcaaagcctgagggcttcctgaaggaggtgtcctctgggcggggcacatcctggcccaaacaggctagagaggggagagaggtggatactacccagtgggaggggctcggggagagccagcccccacggcgcacacttctgtttccccaggctccctacacacccctccaagaagaggaagcactctgaatccccccccagcaccctcaatgcccagatgctgaatggaatgatcaaacaggagcctgggaccgtgacagccctgcctctgcaccccactcgagccccatcgccaccctggcctccccagggtccgctctccccgggccctggttccttgcctctcagcattgcccgtgtccagacaccgccttggcacccgccaggtgccccctccccaggtacatggctggccaactcttcaaggtggggtgtgggacccaaggtgcagggcccacatgggcgttccctccctccaggcctcctgcaggacagtgacagcctcagtggctcctacctggaccccaactaccagtccatcaagtggcagcctcatcagcagaacaagtgggcgaccctgtacgatgctaactacaaggagctgtgagtgccctacaacactccccactcctccaggcccccccaccttgggacgccccagcccaggaccccatcaaggtcctggagcagggcctgggagcactcatttcacagaagagcaaacaggctcagggaagagccaggactggcagtcagggctcctgactcctaggccagccccaggcctccctgagaaggtgatgactgccagggaggggcagctgggaaccaagtcagggagaagtgggcagatgggtgttttttcccccggttcctccttccccacctcctccctctgcattccaggaaggtagccggaagctgagcccaagctgggccctcccggcagccccctccctagagggagggaggaggggctggggaggatccggtcagaggctgcctgagcattcctagcaccccctcaacacccagatggctcc

SEQ ID NO: 65563 - DNA, 1121 bp, Homo sapiens
cccctggtctgggttacctcccttccttgtcggaatgtccacagcagctgggacccccaactcctgccccacttgagactcagggggccacagcactccctatccttccaaggcccccagtgtcctcccagcaaagccccggcttccaagctgcaccacgggggccttgggggccctgccctccgctccagctctgccacttgtggtaccatcgcagcccccgccctccaccctgtggctccctttgccttggatgcccttcccaacacccatccctcctctccaggcagactccatgctggtcccctccccaggggcccctcccctaagacccattgggaggcaccacagcacaaccccagtagtggctgattttgagtctatgagctccctgtgggcatggctgggtctgtcggcttcggtgtgatgagtgagccaggcatggtaccttggcatggctctgccagtgcacgtggaggagtagaggagacgtgggtatggagaggatctggggagtgagtgggcctaggtgcaagtggatgggcttggaggctgctgtgaggtgtgtgggtatggacatgagggagggtggggctgtgagtgtgtgtgtgtgtctgtgtgtgagtgcatacatgcagaggtggggggagcgtgtgggtgtggaatgggggtgtgggtgtttggggagtgactgcatgcgtagctgtgcagaagttgggggagtggtatgctgtgaggggtgaggagggtgtgggtgtgaagtagggtgtgggggggtgtgaccatgcagaaggcatctgagcttgtgggaatcgcggctgagggctgggtgctgccctgtttcctggtgagctctagttgggccaggcctggctgagagggggcaggagggcaggaccagccgggtagccccatcctgaggtgccactggcttcactccccacagctggaggccctgaaccagtccattaacatcgagcagtcccagtcagaccggagcaagcggcccttcaacccggtcacgtgagtgtctgaccctgttgggggtggtacctagaagggtccacaactaaagctggcttgggaatggaggggccagggaggtacccagggtgtccgcc

SEQ ID NO: 65564 - DNA, 1022 bp, Homo sapiens
cttcagcgagaccaccgctaacaacatgcgtaagaagggcaagcccaacccggaccagaggtgagcaggtgggggccctgccccggagcccctccatttctgaggcaggaagacactgccctgggtggcacaccaggcacagagtcctacaggctgagccatttcacagatgagagacctgagatttagagcccttcattgacttaaggatgggaagagcagaagcctggcttctgggttgagaaacagccctggcttcttgctgtgggccctggggaatttctgccccctggtggaggctcgggttcctcctctgtaggagggggtgagatgaacatgcatctggccagggaaagggtggccctgggggcgggggcaggccatgagtacttctgagacccctgtgtgtcccaggtacttcatgctggtggtggccctccaggctcatgcacagaaccagaactacacgctggccgcccagatctcagagcgcatcattgtgcgggtgagggccacctcctcccagggcgtagacagccctccccaggactgggagaaacagcaagcagaagtacccgggtactgagagtcaggagtgggcatgctcatcctgctaggcactggctgtgtggccttgggcaaagctcccaccctctctgggctgcagggtctccacagtaaagcagggaggtggacgaagcctggtagcttctgggatcccacaagtgacaaaaagttgtcacagtgggagggacagttcaagttgggcttggtgcagtgagaaaccctggctggaaggggaggggctgctgtggagtttccccctgctcccagggccctgcaggtcccctccctatcccccaggactgatccagccccaactcgcggtaggcctccaacccaggccagttcgagagcgacagcgatgtgttgtggcagcgggcacaggtgcccgacaccgtcttccaccacggccgcgtgggcatcaacacagaccggccggatgaggcgctggttgtgca

SEQ ID NO: 65565 - DNA, 1056 bp, Homo sapiens
tgggctccggggcctgctccgggacggccgcaggaggggttcattcccgggcctggctccccgcaggtggacaccaccgagcaattgaagaggatctcgcgcatgcggctggtgcactacagatacaagcccgagttcgccgccagcgcgggcatcgaggccaccgcgccagagacaggtagggaccgggctggtgcggactggggtccggaaacccagaaacctcgggcctcagtgaccttgccccctgtcacctggaaatcctactcctcttgactcccggaactgcgcccctgggaatcatgccttctagaagtcccgcccctcggaccttggaaaatcgcacctctccaggtccccggaacctcgccccattgtcagtggaaatctgagaatcacggcccagggaccctcgcccttcgcgctagatgaatcctacctttaacctgccagaatactacccacttgccctgggatccttacccccaggaatccgccccaccccagcccaggaacctcacacctgagccctggaattgcaatcctgtgaacactggttcgtgggatctccctgctccagggctccttggaatccaaatctctgggttccagaacttcaccctctccagtcttgctcccactgtacattacaaagctgtgagtagccctttaccacccccccacccatctttggcttgtcccctgcccccaggtgtcatcgctcaggaggtgaaggagatcttgcctgaggctgtgaaagacaccggagacatggtctttgccaatgggaaaaccatagagaacttcctggtggtgaacaaggtctgtgggtgggggaatgggagggagcccagaggcaagtggggagccagctggggaacactcatcacctccatagatactgggggcactgcaaagcagaggcaggagcaccctcggctctcatgctgcctccagagcgccctctgcaccccacagggaaggggtgagtgttcaaggagatgagtgggtagggatttggcccctggagcctgtgtgatcaagggcaagagaaac

SEQ ID NO: 65566 - DNA, 1113 bp, Homo sapiens
gctccagctctaacggtcacccttttctgtggctccagcgtggtgtccatgtccacactgtacgtgctgagcctgcgcacagaggaggacctggtagacactgatgggtaggttcctggaggccaagccaagctgccaggccaggtggggctttggtgggcagtcccaggtcagagagccatgagactgtcttctctaaaggagttcatccttagcctcttagcctgctggggtgctgtggggatccagggagggcctccttggagggtgggcagcctttcccagtccctgctgacgctgatgtttctgtctggcctgtttagtgcccctccaggtagctgggcctgcgagtcagggctgtctgaggggctggggttggaacatggggtaggaggaaggagggccagggcagggccttgggctctgtgagcccactgtcacccccagctcctggggccacctctgactgtgtcttctcttctcttcccctttgcctgtctcaccctttgcctttttgctgccccttagctcttttgccgtgtccacttcctgtctcctggccctgctccggccccagccccctggggggagtgaggccttgtgcccatggtacgtgctgaccagcgcccctctcctctggctcctgctgcccctcttcctgcctccctcccctccctctctgcctcttcctgccctcctgcctctccaggactgtcaggccctctcccctcaagctctcccagcccctctgagctcagcccatccttccccagcaggtccagccagagctttgggaccacgcagctccgacagtcccccttgaccacggggctaccaggcatacagccctctttgctgctgggtgcgtgtctgggcaggtctgggtaggacagggaggttgctatgttctgtctttggggcttctctggctcatacagcctctggcctcctcagtgaccaccagcctcaccagctcggccccaggttctgctgtccgcaccttggacatgtgttccagccacccctgccctgtcatctgctgttcctcacccactaccaaccctaccactggtcctagtcttggccccagctttaaccctggccatgttctca

SEQ ID NO: 65567 - DNA, 1109 bp, Homo sapiens
gtatctgatacctgtcctgaccacacagggtgtcctggatcctgttggggtccttgggtccctgggtcatgcctcagagctgaaaacgtaccaggtccagcaaatgttcagcggccccagcttcccccttcctgggtggatagtcaggcagcagcaagactgtatgtgaactagatgagcaagaagtcctgtctcccccatctgacttgtcacacttcagtcccacccctacccagccagccagcctgcagtcggtttgttcagggaggctgcgaggagcagcgtgctggtagcggtgtaatcatcggcctcggggcagaggggagcctgatttgtgtgatgctgtcaacactgctgatttcaagctaccagtgtaactgatgtttctgaacccagaactgggagagatgcccgcagtcaggaacacaggcctcgagcgggctcctgcacacctggcaggggatgtgaagacccatccctacttctgggtgttccagttcttttgaggaggcagacgtcaggctcatgggaactgggtagtcctagggctgctgaggaaagggtgtagtgtgatgctggccattgtggaggtctggaaaaaaataacctggaacttattcatactaaggtgtgagtgactgcttcaagtctggcaaggaaagacttgccagcttctcatttgtgtcctgccttgtcaccttactcctgccccaacagcctctctccttgcagagccagtgccctccctgacctccatccaggtgctggagaattcgatgtccatcacctcccagtactgtgctccaggggatgcctgcaggtgggctgggctccctcccctcacccagggaggtcctcaggtgacatgagcccaggtggtacagatcacccggaacttgccctttcagggaggagcctcccccataaggaagggtagcccctttccaggctacccttggacactgtctcttctggagggctccagtacagattgggggctgaggagtccctggtgggggtggggggtggcagggtaccctcaggctaaggtgccagttttgcccctgcaggcctgggaacttcacctaccacatccctgtcagtagtgg

SEQ ID NO: 65568 - DNA, 1023 bp, Homo sapiens
ttggtagtggactttctggggtttgcctgttacgccagactcggacttctaagctttaagtgtggcccaggaggtttcttctccctgggagggcttggctcccaagaagtcccagggcagccgaggccagccctgcctgggttggagaaactgactttgtgccttaagtctactcagtgcctggtgaagccaccctcagcccttcacaggcctgaaccagtaggggccagtgggccaggtaagccctagagccttgaaccaggaatatccaggaagaggaaattccctttgagcccccagatggtattgcagcttcactgcctgcgttcctgggagcgtctggagctcacagtgatcagtgaccacatcattctctctgagcagaggagcaggaatccctcaagcagcagcctggtcttggctggtgggcagatgcaaatagcttttgctgttattaatgaagtaattactaaatgcacttaaaccagggcaggaaggaatggaaggatggagctagaaagctcagagtgggccagagcaggggtgtgacacttgcaaagacagggctctgactctgatccctcccagggagcctccgacacccatcccactcccaaccaccaagaccctgggttagggaagaagttgtatcttaagtgccaccttcaagtttcttagtggtgcctggtgcattccgaggctacatccaggctcatggaaggagtgtagtattcatttagccatgtctgccatgggtccagaaatgggaaagggaattgctgtccttgccctgtggtatgctgccacctctttgggaagcaggccttgcccctgtcccaccactcattctcagctttgaatgggaggcctttctatagtggaggcctttccttgaagcctatgaactgcaggcccccttttgccattgatctcaaagcacttgtcctcaggatagggaagagcagggggatgcaggaatagcagggatagcttgctcccagccccctccccaatttggttccg

SEQ ID NO: 65569 - DNA, 1033 bp, Homo sapiens
caagggtaagagctgcaatgggatggatgcgtgagcctccaaggcacagcccagggaagcctccccagagtcaggtcagcagggtccttaaagctcttaccagcatgaccccttggttgatggagacagactcagtggaatgggtagggacactagacatttgtgcctctttccctgcccctcatacggatttgagccaaatgtgactctcagttctgagctcacatggcccaaggcctcgatctgcctttgggatgtaccacctagaagtgtggacgcaggcatcccatggctgtacatttacattcttagaagtcagaccccagtgacttggagaggctgctgggaagtcagctggctgaaagggggtcaagatccagggcttaaaacttgctgcagacaatccaccaaacaggccactaggaatcagctctggtggctcatcctcagaggtgtgtgctcaatagcccttgccccaggagcacaggggtgcagggagagaaggaggaaagaagggccattggtcttattttgatacccctctcctcttttaggtaacaaccagatggcttcactgaaacctgcttttgtaaattacttttttttactgttgctggaagtgtcccacctgctgctcataataaatgcagatgtatagcagtcctgtctggggcccattctgcaggggtggtgggtgctgggacctacattgcttccccaatctcttccctttcccatttctcatctgcctttcacagttcctgctgctgatctacttaagggggatgagatttgtgtagcaccggtgttttgtcattggaatttaaggcttacctgtggatagggtctgggcctacccttttctattgtttctaggacaaacttctctgggaacccacatcggtccattctgccctaggccagtccctgccataaacatagccaccattctctgtgctggggcatcctcaccaggctcagcttctccccctaagaaggcttttctcctcagtggctacttttaatgcaggtg

SEQ ID NO: 65570 - DNA, 1112 bp, Homo sapiens
ctgtaatcctatagtcccagctactcgagaggctgaggtatgagaatctctagaacccgggaggcagaggttgcagtgagccgagatcgtgccactgccctccagcccgggcgacagagtgagacgccgtccaaaaaatgagactccgtcaaaaaaaaaagatattgagatctgggtaccaccagtcagtgacttatagcgggggttctcagcttggtgtctatagacactggtccacaaagctccggaaattgtaggcaaactttttcttgtatgtggtttttctcaggcagagagttcgtacctttagtcacgttttcatagtggtcagattattggcctcagaaaatgctaataagggccattgatctgcagctacatttccgggctaaaatcagcctctgtttcacggcagcaccaggctccttgataaccgcatgttctctccaggctgaaatcgtgggattctttgatagctctgatctctttccctcctctaggagctcgaggccatgagcagatataccagcccagtgaacccagctgtcttcccccatctgaccgtggtgcttttggccattggcatgttcttcaccgcctggttcttcgtgtatcctttcactgagcagccagaggaccagcattagtgatgtgggaagctcagggagaaaccacgctaggtacatggaccccgccggttttgtacattggattggggctgagagaaggtaaggaggagaggagggctagtgatgcccaggggcaggttatagccttatttcccaagttcaggtgagctcagtttgttctttggatttccaggacagtgagcaggggacctggctggagtggaggtggggaataggggtgctacagttggaaaggtggtataaggaagggtgcactcaggtgtcaggaggtctgagggctagtcccagctccggccctcatgagctgtgtgacctggggcaagtgacctaactcctctgggtctcattttcttcatggcagtggagcaccagagtccaaggcatctcttaggcccctctgcctggctgctctgagccagataggcctcccagaaggcattgagccaatgcttttctcctcag

SEQ ID NO: 65571 - DNA, 1028 bp, Homo sapiens
ccccagcgccaagcggaccccgtcgctcccggaggcgcttcccatggggtctcacctggcctttgggacacgcggcctcggcggctaaagcttggttcggggttgccccgggcaggcggtcctaagctcgctctcccttctcagcttagcggcgggtggcctgacgttcagccgccttccaaagcccgcgctcccgtcacgtgacctgctcgccacgcacagcctcttggggcgcgtagtgcaggctgcgtcccctcagacggctgctctcatggcaaccagtccctccagggagaacagagtctctcagcgaccctggcgtacccttctccaccgcttgtccccactccacccacaccaggtccccgcaggcccctgctccctctacacccgaaatcgcaggactacaagtccctcaatgccacttgcgccggaggcacttccttttccggttgtgctaggcgcctgctcctgccgacgtgttcttccggtggcggagcggcggattagccttcgcggggcaaaatggtgagagcgttgaggggagttccagacggagatgcgaggacccctcggggtctgacccacaccgcgcttatctcctcagacgccggagatccagagggctagacgctcctggaacctccggcttgggctgaagggtggggaagggggaagccccttgccatgaactccttaggtttctcagctcgcgatttctaagggcgagaggcgtggggcgaattttgaataccttccagtttgtatatctctgttatcggtggtgtgttatctttatttggaaagttcttctgccgaacccgtgcccatcctacaatgccctgggcaaatgtttattggtgaagcacttccaactctcaggcacttggccagactttcctaggagcgcccacagcctctgtacagatctctggccacgttccatggacttctttgttttcggccacgcctcctagtgaccaccgtctgacgcgcatctagctctgggatgatgtctattcatcttt

SEQ ID NO: 65572 - DNA, 1049 bp, Homo sapiens
cggcttgaggcaagagccgaagggttgaacaggcctggagaggggacattagaggtttctgtctgttgtctcagttaaccctggcagcagccctgagagacaggcatggtaatcgttcttcttctgtagacgagaaaataaacctcagtggcttggtaatgtcacacggatggtaaatgccgcgcctagattcaaggccagagcttttgccgctgcagttcacaggggaattattcatattaatcaaatgaataattcattgtcaattaattattaattgattaataatccagggatggacctggaaggacgcgtgagaggatggcgagaggagggcacagctaaggaaaagtgggaaaaggcgggccttattccagctttctgttgagatcccagaatgtagggttaggttgggaaccagaacatgaaagatcgtgatgccatgctgaagtgtttggactgaattagaaggaagaattgaacagtcattgatgctctagaaagaaccctgtgaagaaagagtgggaacaatgaaaaggcctgatggagtctttcgtttcttctttctcttttcttttgtcttcttttcttttcttgacagggtcttgctctgttgcccaggctggagtgtggtggcacaatcatagctcactgtagcctggaactcctgggctcatgtgatcctcccaccacggcctcccaaagtgctgggattactgcccagagcctctgtgcctggccccagtagaatatttcttggagtattggacacataccaacagtgggcacaagatgagttttttatttttttgagacggagtctcactctcttgctaggctggagtgcagcggcacaatctcggctcactgcattctctgcctcctgggttcaagcgattctcctgcctcagcctcccgagtagctgggattacaggtgcacaccaccacacccagctaattttttttttttttgtatttttagtagagacagggtttcaccgtgttggccaggatggcaagatgattttaaattgcaccccctaaaaat

SEQ ID NO: 65573 - DNA, 1010 bp, Homo sapiens
gaggtgctggacccagagtctgtggagctgaagtggagcgagccaaatgaagaagagctgatcaagttcatgtgtggtgaaaagcagttctctgaggagcgaatccgcagtggggtcaagaggctgagtaagagccgccaaggcagcacccagggccgcctggatgatttcttcaaggtgaccggctcactctcttcagctaagcgcaaggagccagaacccaagggatccactaagaagaaggcaaagactggggcagcagggaagtttaaaaggggaaaataaatgtgtttccccattatacctccttcaccccagaatatttgccgtcttgtacccttaagagctacagctagagaaaccttcacggggtggagagaggattctaaggcttttctagcgtgacccttttcagtagtgctagtcccttttttacttgatcttaatggcaagaaggccacagaggtacttttccttttttagctcaggaaaatatgtcaggctcaaaccacttctcaggcagtttaatggacactaagtccattgttacatgaaagtgatagatagcaacaagttttggagaagagagagggagataaaagggggagacaaaagatgtacagaaatgatttcctggctggccaactggtggccagtgggaggtgatggtggacctagactgtgcttttctgtcttgttcagccttgacccaccttgagagagagccaccaggaaggcgcatcttagcagatgggaggaactgctgagagaagatgggcagaaagctggagcccctggagttggctgtgtctgtgtttgtgactgattactggctgtgtcttgggtgggcagaaactcgaacttgctatgtaatttgtgtctagttattcagaggagtaagatggtgatgttcacctggcaatcagctgagttgagactttggaataagacactggttttcatgcgctgtttttgttttaaagttatgaagaaaaaagtcaataaaattc

SEQ ID NO: 65574 - DNA, 4607 bp, Homo sapiens
atggaagaaaggagcagtggcactagatactgcaggattggacccctgagaagctgaagatgagtgagtctggataaccaggagaatggctgcaccatgcaaacaaagagctgctgagaggaagaggaagagttgttcgtgactgttatgctcgctgcttttctcactataggacttggcctggatgattaccttctacgtccgcttcttcctcacttatgtgccactattggggctgaaagccttcctgggccttttcttcatagtcaggtagtattcggtgggggcggatagggactggtgaaggaaatgttggggagtgaccagtctggtctaggggccgtgctggggctttgggtaacagtgggtgtttcaggagttggcttgggaaagtagacaggctggagcagttatctgaggggggaatcagaattctgggctctgtgtgtactgtttttgtctgtgtaatacatctaacaggttcctggaaagcaactggtttgtgtgggtgacacagatgaaccatattcccatgcacattgatcatgaccggaacatggactgggtttccacccaggtaagggacagtcactcagaagactggagcataacacaactattgaaaaggatgcgtaggtgaaaacagcaaaaacaaaaagtcccccaaacagcattttctcattagcctgaggctcttgttctgcaaccatgtgaagggagtgaccaagacagtctcatgtcccttcctcagccagctttacctggagaatgctgggctggcctttccatctgatattcaacatgctctcccctgaccttttccgccagctccaggccacatgcaatgtccacaagtctgccttcaatgactggttcagtggacacctcaacttccagattgagcaccagtgagtagggagcctggggaagcagggtcctggggagggtgtaagtgttgggtacaggtgggagcagagaagcaggaaccactgactcccccgttctccctaaagtctttttcccacgatgcctcgacacaattaccacaaagtggctcccctggtgcagtccttgtgtgccaagcatggcatagagtaccagtccaagcccctgctgtcagccttcgccgacatcatccagtgagtatctgagaccaggaagatggctagtagggagggaagagggcagggcaatggaaatgatgacatgtagggtggggagtgaacagaaggtgttcccagtcgtgtgggatggagttcaccatggcaaaggcaggattctttattggacctgtggccaggtcaggcctttgccctcattggggttcccctcagtaccatggcccaagctagctttctctaaagtagaggggaggaaaacctccagatggaagaaggccttaacctcactgctccatctccggtgggttcaactctgcttgtctccctcactgtctgcccccattttgtccctgcagctcactaaaggagtcagggcagctctggctagatgcctatcttcaccaataacaacagccaccctgcccagtctggaagaagaggaggaagactctggagccaaggcagaggggagcttgagggacaatgccactatagtttaatactcagagggggttgggtttggggacataaagcctctgactcaaactcctcccttttatcttctagccacagttctaagacccaaagtggggggtggacacagaagtccctaggagggaaggagctgttggggcaggggtgtaaattatttcctttttctagtttggcacatgcaggtagttggtgaacagagagaaccaggagggtaacagaagaggagggacctactgaacccagagtcaggaagagatttaacactaaaattccactcatgccgggcgtggtggcacgcgcctgtaatcccagctacccaggaggctgaggcaggagaatcgcttgaaccggggaggtggaggttgcagtgagctgagatcacgccattgtactccagcctgggcgacagagcaagactccatttcaaaaaaaaaaaaaaaatccactcatataaaaggtgagctcagctcactggtccatttctcagtggcttctccatcctcatttgcaaacctcagagggataaggcagttgaacctgatgagcaagaattataacagcaaggaaacattaatgcttagaattctgagatccagcacaactcagtctgtgggagctcagctcgctgcccagggataggtatgacctatgtctgccttaggctgctgggagatgccattctccagtttcagaagcaggcagggcaaaggtcaagactgtggtattggggtcttttggctctgaaggatcctggaaccactgattttggtttattccctccagggtctaaagagaacaagaggtgctagctcttaccaaaacagatggtagagagagttgctggctatttaaaaagctctttcatcttttaattcacctcttcttttcacctctttaaccactcctcaggaacagaacacttctaggactgggggtcttttagctccataagcaagtgagcagatgggacaagttagtcttttctccctagaaacaaaggggatgcccagtggtttccctttgcttcccaacctaaaatttcaagtttaataaaatagcaattagcagaagtgaccaaattgggagataattatcagtcatgaggaaagacacagatttcggtcataaagaatgtaagggctataagtagaaactttctataacctaaatgatgttatagaattatttttgagcaggagcagaaagattaaatatgatcacttcatacttctaaatcagaaataggaagattaaaaccacagaacagtttgtgatttctattgctgtagctaggtatcttactctgtccactcttgttcaagtatctaactcttctggaaaccaaataggctttagaagagattatcctatattcctatcagtataatactaaaatgtaactttttaatcatctggtttttaaaagataaacagtttagcccatctctccagagagcaaacataggaatatgactcaggagcctcctagggcttatcatcagccctcacacccgcttccccctccaacccacagcctttgcttccaggtggcaggattactactttgcctcttcagcagcatctactctaggcatattgatcattttagacactgggagaagagaacctcaaactaggaggaaaagacagagcctccacttagttttgggaggggatggcagacagtcaaggagatgagcgtcctaaggcatgttgggatagggtcagatgcaccacccatggagaggtttgtcaacacaaagacatggaaggttagaggtttgtcaacaaaaagacatggaaggttaggtttgtcaacacaaagacatggaagattagaggtttgtcaacacaaagacacaggaagaatgggctgcagaagatttagatgttttccatttgggcacattttacttagctggagaactaggtttaaaacagcctgggtaggaaaattagaagcaagctggatgcagtggctcatgcctgtaatcccaacacttttgggaggtccaggcaggaggatcacttgggcccaggaggtcaagcctgcagcgagctgagatcacaccactgcactccagcctggggtgatagaacaagaccctgtctcaaaaaaaaaaaaaacaacaaaaacttagaattgaggagttgtacctccattggcttcctcactccaaaataggtgctgatccttcctattcctattctttgccaccttttgggtgtggtgtcaccagcctgtttagccaagtagctttgggcataggctgcccaatctgagcaaacaccagtgaggctctattgagccaagaccaagtcctcaaagcacctgaaccactgtggccttctcagcctacagcagtgtggtctcttacatggccacaaagggacacacagtgacaaaaggctcggaatgttacaatggtaaaatgagtgatctcaaatccactgacagatataaaataggcttagagaggaaaagctgcctctggtcaagtagatcatggcagcatgaattccaactcacttttttacaactccaacttctatgtttatctttgttactttcacttttttacaacctggccagaggcattttttaaatcaggcccaatatcagtattctttttgtgtgtgccaattttgttatcacatccctatgaagttgaaaaataaagttaattttgaccaaaagacttcatttgtaacccatgatgttcatctgtgtgtgcacaggattcctgagtgcctctgctacgagttactgttcacctctctgtgctcttaagttcttgaatcactagactcccctttgtattgggcagaggaagaaacatcaggaccctccagaaaacaccaaggcaagggtgaagtatggcaaggaagagcaaggcaaagtccttctgatgactcccgtgttcaaatgtgagattgtcaataatctcaccaagtttcacacgtatcacttcctcctattcatgaggcaat

SEQ ID NO: 65575 - DNA, 1029 bp, Homo sapiens
cacccagggcctgcactagaaccgctgttcctaccgcggcgccccctgggagccaacgccgcgatgcccgcctgacgtcaggaagtcgaatccggcggcgacgcctttagggagcccgcgagggggcgcgtgttggcagcccagctgtgagttgcccaagacccaccgggggacgggatctcgctccccgcgccacgaggctcggccaatgggaacgcgcgctgcgaggcccgccggtctgccctgcggtgctgaaaacccggcgcgcaggcggctggctctgggcgcgcgccagcaaatccactcctggagcccgcggaccccgagcacgcgcctgacagcccctgctggcccggcgcgcggcgtcgccaggccagctatggcccccgacccggtggccgccgagaccgcggctcagggacctaccccgcgctacttcacctgggacgaggtggcccagcgctcagggtgcgaggagcggtggctagtgatcgaccgtaaggtgtacaacatcagcgagttcacccgccggcatccagggggctcccgggtcatcagccactacgccgggcaggatgccacggtgagcgcagccaggcgggggcacaggagagggcgggaccggaggctgagtgcaggggagacagagttacgcactccgagccaaacaccgactaattcggaggaaagcccggaggcgcctgatcatacctgttgcccggtgattgggtgtcctgcggatgcgggatgaaaaggcgggagagaggcctggagaagtggagtctggggagtggggatggaggccaacaacacgcacacacaaacaaagggtcccgcctccctgccgtgcattccatctgcagccccgagcctcaggtctctgggcggggacagaaccccgagctgggtaggctaggagggaggagagcaaggatgcaggccgcctggggagggagggggtcagtggccaggggagggagtcacatcctgtctcgatggctaggagaggcagcgcagccgcgtctggac

SEQ ID NO: 65576 - DNA, 1062 bp, Homo sapiens
cttgctggcaccctggtggccgcgccggctttgtgtcggcatcaggtgcaaacccccagagcgccgggcgtgcgcgcacgcgccccggagcgcgcggagcccattcgttgcccccaccgggatctcctctaggatctcctccggcgcccggggccggagagtgggggagggaggaggtcggacacgtagcctgcctcgcagcagggctcgactccacgcgggagggcgggggagccggggacccgccgctccagcccgctggccttcgaaagatcctcctgggccaatggcaggcggggcgacgcgaccggattggtgcaggcgctctgctgatcgctgtggaaactcgggcggcggggaacgcgggaggatgtggaacccgaggcggggggagccggaggggcgggcagaggaggtgtcgaggccctgagctcccggggagtttttactggaggcaaaagtccatagcgggagggctgagggaggggcggaggaaggggaccgcttgggggcactgggaagccagggatcctccgccaggaaggcagggacactcccgagcgcaggcgagaaggctgggggagggggcgcggtgggaggagtaggagaagacaaaagccgaaagcgaagagggcccgggctgcacacaccggctgggaggcagccgtctgtgcagcgagcagccggcgcggggaggccgcagtgcacggggcgtcacagtcggcaggcagcatggggaagggagggaaccagggcgagggggccgccgagcgcgaggtgtcggtgcccaccttcagctgggaggagattcagaagcataacctgcgcaccgacaggtggctggtcattgaccgcaaggtttacaacatcaccaaatggtccatccagcacccggggggccagcgggtcatcgggcactacgctggagaagatgcaacggtaagggtctgggggcgccccagccacccttctctgctgcaggcggagtcaggatccctggctccccgtgggccaaacagacctccggcgctgaatggagcttgggacgtcctgtagggaagg

SEQ ID NO: 65577 - DNA, 1405 bp, Homo sapiens
actccgcgcttgtcccgcactctccatccagactgggtggcgagaaggaaagctcgtccccggccggagatcgctcctgctgggactcttgtctaagaagttcctcaatggccacctgggaaaaaccgcccagcagctcgggttcccacgctccagggattatctagactcaccccaagctcgagccggccttcttggggaccggcgtccgggattggtggaaggagaacggcctggggtttgcaaagcccaggtcgagtgaggccttgagccggtggatttagcagcactagactggcttggcaacaggtccgtctgcactcgaggttactctcgggcgttcaactcaatggctctctctttttaaatcctgccaagaacacccttccctcatcttgcactcctaaaggttgtgggcctctctggagccattgctgcccaccttacccccaccaaatgcgtggctcagtgattaccccgcaccagctacccgcaccggggaccccagtctgaaatcctggcatttatttaaggatgcagctggtatcccatggattcgaatgggccagaaggaaaagaacagaggcaaggagggaagaaagggcggcttttggtggtggtagtgaattggatgcagagaaaaaaggtctgatgggatacagaaattggggaaagtgaataggagagaggcagaaaggagggatgaacttgacgtagatcattccacctggaggtctaggatgcccaactgttggtgggcttttgctctctaagctgtgtaggcccgacccttaacttccccacctcttgcatctcatggagacaggcctaggggaaggccagaccaggccaccataacccaagctggacaatggacaggtggtgtgggccagcagggccagggcttatctaagattgggaaggtcagcgatactgaaattccctacagctttcagtcccatcctgttttacttgcttgtggacattgcttaagcccagtgggtttgtgatgctatttagaacttaggtgggtatgtttcacataccttcagtgctatctcacctggacctttacgcggcccagtgaggaggttgggttaatgtaactcctaagtaaaggaccttctggatcctggctgggatctttccactatatgttgctggacttgggctggtctgtttctgatttcataggtaaattgtagaaggttcctgtcctgtccaggccctcaccaaaaagtttccagaaggaaaagtcaaatacgatgaatttggtctgattattccacattgttaaacatattttcttatgtgaacgcttagtctggcaattgccttgacctttctggtttaattaccatatcagattgatttatttcttccttgttctggatgttctcagtgc

SEQ ID NO: 65578 - DNA, 1970 bp, Homo sapiens
tctgagctgacagccccacaggcccagtggcagtggtaagccctggttagggccaaggggacatacatgccaccttaatgatggcctcctcagcccttgcactccctggggccactcccgtcctggtccctgaccctggtccatccccaactttgcaggtccctgaagaagtctgggaagctgtggctggacgcctaccttcacaaatgaagccacagcccccgggacaccgtggggaaggggtgcaggtggggtgatggccagaggaatgatgggcttttgttctgaggggtgtccgagaggctggtgtatgcactgctcacggaccccatgttggatctttctccctttctcctctcctttttctcttcacatctcccccatagcaccctgccctcatgggacctgccctccctcagccgtcagccatcagccatggccctcccagtgcctcctagccccttcttccaaggagcagagaggtggccaccgggggtggctctgtcctacctccactctctgcccctaaagatgggaggagaccagcggtccatgggtctggcctgtgagtctccccttgcagcctggtcactaggcatcacccccgctttggttcttcagatgctcttggggttcataggggcaggtcctagtcgggcagggcccctgaccctcccggcctggcttcactctccctgacggctgccattggtccaccctttcatagagaggcctgctttgttacaaagctcgggtctccctcctgcagctcggttaagtacccgaggcctctcttaagatgtccagggccccaggcccgcgggcacagccagcccaaaccttgggccctggaagagtcctccaccccatcactagagtgctctgaccctgggctttcacgggccccattccaccgcctccccaacttgagcctgtgaccttgggaccaaagggggagtccctcgtctcttgtgactcagcagaggcagtggccacgttcagggaggggccggctggcctggaggctcagcccaccctccagcttttcctcagggtgtcctgaggtccaagattctggagcaatctgacccttctccaaaggctctgttatcagctgggcagtgccagccaatccctggccatttggccccaggggacgtgggccctgcaggctgcaggagggcactggagctgggaggtctcgtcccagccctccccatctcggggctgctgtgtggacggcgctgcctcaggcactctcctgtctgaacctgcccttactgtgtttaacctgttgctccaggatgcattctgataggagggggcggcagggctgggccttgtgacaatctgcctttcaccacatggccttgcctcggtggccctgactgtcagggagggccagggaggcagagcgggagggagtctcaggaggaggctgccctgaggggctggggagggggtacctcatgaggaccagggtggagctgagaagaggaggaggtgggggctggaggtgctggtagctgaggggacgggcaagtgagaggggagggagggaagtcctgggaggatcctgagctgctgttgcagtctaacccactaatcagttcttagattcaggggaagggcaggcaccaacaactcagaatgggggctttcggggagggcgcctagtccccccagctctaagcagccaggagggacctgcatctaagcatctgggttgccatggcaatggcatgccccccagctactgtatgcccccgacccccgcagaggcagaatgaacccatagggagctgatcgtaatgtttatcatgttacttccccacccctacattttttgaaataaaataaggaattttattctcacttcctgtgtttcctgcacgccaatgccaggccatggtattgggtgatagatgaggcccttctagctgggcctgggcaccaggaggggtccccat

SEQ ID NO: 65579 - DNA, 1041 bp, Homo sapiens
gaggcttagggcgcggcccaggcctgaaggggagctctgagacagagcaaacacccaccccagaacaagccgacacacagggagacgggggcctggagccagccctgagccagaggcagaatggatggacagacaggccatggaggcagcactgagccagcaccacacgtccatcctgggacagacgggcctggacttcacggcaagacccccctctcttccccactgggttctgccaccaccaggaggatttcaagaaagcaccaaagaccagggagctcggatccatactcggggggcctcagcccttgggaggggacacctgaggcagccagcgccccctccccagtccccagaactgcctgcaggtgccttgttgctggcttgtcttcagaaagggactgttctgggtggctggatctccagggtaccctccaccccagctgccaagccctgggccagcagcacccccttgtggccatcctgtgccttgttcccggtggcctccctattggactactaggaggggctggcagggcctccatagcacagaattgccccaaagccttgttaagatgagtcaagacccctcccccgcttcctcccttcctttcccccttcctccctcccccttcataaaggcctcccttgtcaccttccctcccaccccgtctcagccctgtgctcctggaggccctgctcccaaaaccgctggaaggactggggcactttctgccacagtagaacacagacagggcttcagatcacccacgcctgttttcagctgtgggtggccatgcagacacgcgccctggcatgtggggcctgggtgggcaggcaggacctgggccctcccacccatcagagcccactcaggaccagcgttcggagctcccacctggacgcatccctcaccacgtccggatttccttctttggatggaatgtaacgcgatctctatttaataaaggcaggctttgttggtacaggctgggtggccacgcgccctcactcctgcaccctggggctctggccaaggct

SEQ ID NO: 65580 - DNA, 1098 bp, Homo sapiens
ggcgaagcatccccattaggaagcaggttaggaatgtgcttcatccctagtgagaatgaaagtattaacagcataagtatggaaggtcccttcatttcaaataccaaaatgttgcagtaggagggcaaaggttgagacgatccttttttttttttttttgagacagtctcactccgtcgcccaggctggattgcagttgctcaatctcactgcaaccaccacctcctgggttcaagcaattctcccctcaacctcctgcgttgggactacaggcacaccacgacgcccagctgatttgtattttttttggtagagatggggtttcatcatgttggccaggttggtctcaaactcctgacctcctgtgatccacttgcctccacacccagcccaagacaagattcttaaatattaacatcctttgctgaacaggccacagatgtttgccaagttcctgtctagccctagaagcaagactgaaattgttgcccttttaagttttcaatcataatagctgcgtgttctgaccgtgaaagtaactgcttgagaatccagaaaagggaagttacacttcctcccacgtgattggggctgaagtggggtgtttataattgggtgaaagtgtccaggaaatctggaataaagggaaatatctgattttgtgacagctttgggctgaccccaaggaagcaagaagtattttggtgaggttcccaggcagtgagaaaatgacctaagggcgctggacaccctcaacctcaccatctaccagttcctaggagtgaggcagttcctgccaccctttcctgtagtgcttgggtactaccctaaatagttatgggggaagtgttcatctgtcatccagctgactgccacctcatggttttgggtcagccacccttgctcaaagtaagttggggccagtgataacatctgctcagctaagcctggcctgtcagccctggggcagttctccagcagcattctggtcagcacaacctcatcttccttcacctggtcccaagaagtcttccgggtgataccagggtgaagtgagaaaaggtcccgaacacttccctaggatccctgtgaaggtgg

SEQ ID NO: 65581 - DNA, 1025 bp, Homo sapiens
gtggtgtgcctgtagtcccaacgcaggaggttgaggggagaattgcttgaacccaggaggtggtggttgcagtgagattgagcaactgcaatccagcctgggcgacggagtgagactgtctcaaaaaaaaaaaaaaaaggatcgtctcaacctttgccctcctactgcaacattttggtatttgaaatgaagggaccttccatacttatgctgttaatactttcattctcactagggatgaagcacattcctaacctgcttcctaatggggatgcttcgccagccaggtcctcacctgtgtgtacaccagcaggacactgatccagtcacagccatacagctgtccacactgaagaacatgtcctacaacagcctgaatcaaatggttagcttaatagataaaaatcccagactacttcagcctttaatgccttttattcataaaaactgtgaaagctagactgaaccattggaaacatttaactcagactctggattcagagtcgggaacccttagttctatctgaatccaagacagccacaccttagtatactgcccaaactaatgagtttaataaatacaaatactcgtttctttttgattagtgtgattagaactgaacaacggcacttaaggaatctggaagatagcctggatagatttctgattcatcccaagacctcaaagacaacacctgggtaccaaatttctttatttgaaggaatggtacaaatcaaagaacttaagtggatgttttggtacaacttatagaaaaggtaaaggaaaccccaacatgcatgcactgccttggtgaccagggaagtcaccccacggctatggggaaattagcccgaggcttagctttcattatcactgtctcccagggtgtgcttgtcaaagagatattccgccaagccagattcgggcgctcccatcttgcgcaagttggtcacgtggtcacccaattctttgatggctttcacctgctcattcaggtaatgtgtctcaatgaagtcacacaact

SEQ ID NO: 65582 - DNA, 1951 bp, Homo sapiens
gtttttaatttgtgtgtgtgtgtgagagacagagtctcgctctgtcgcccaggctggagtgcagtggcgcgatctcggctcactgcagcctccgcctcctgggttcaagtgattctcttacctcaggctcctgagtagctggaattacaggcgcacgccaccacgcccagctatttttttttatttttagtagagacggggtttcaccatgttgaccaggatggtctcgatctgctgacctcgtgatccgcctgcctcggcctcccaaagtgctgggattacaggctgagccaccgcacccagcaggggtttttaattttataaataaatatgtggtacagctggcagactcctgagctcagttttaaccatgctttaacatggttaatacaggagcagggaggagaaaaggactaagtgcagggtcagtactccagcgccctctcatcagacaatgaattctgacactggctgtaagttttctgtgcagtaatacagatccttaagacattgccccaggcaatgcccataatatcctaaaggttccttgaagttaagtttcaaggatcaagtttcagttttctattttagaatagaaacattactcttgggttcaatccagtagctcatctgccccccagtctccttaggcactgattccttcatgctgtgctttgagaaaggaagcctaggctgacgagaccatcttgcctccctgtagatcgtcacagctacctgtctctggggatccctagtataacacattcagtgttcccctttcagtcttactactttgaccgcgatgatgtggctttgaagaactttgccaaatactttcttcaccaatctcatgaggagagggaacatgctgagaaactgatgaagctgcagaaccaacgaggtggccgaatcttccttcaggatatcaaggtgaacaaaagatcctaggggtgtcatacttcatcatctggcagtgttcgggtatcagaaatcacttaaactagcaattgcccttataaagtgatgatacactgggcttttgccttttgtgcttttttaggcttaccatctaaactaaattaggcaaatagtaatgtcccttttgccaaaacgtggtggttagagatgatgggcttgctgacttctaggttagttggtagagatgcattaacctattctcattcagaaaccagactgtgatgactgggagagcgggctgaatgcaatggagtgtgcattacatttggaaaaaaatgtgaatcagtcactactggaactgcacaaactggccactgacaaaaatgacccccatgtgagtattggaaccccaggaaataaatggaggaaatcatttgccttagggattgggaaagctgcccactaactgtcttccccattgttttgcagttgtgtgacttcattgagacacattacctgaatgagcaggtgaaagccatcaaagaattgggtgaccacgtgaccaacttgcgcaagatgggagcgcccgaatctggcttggcggaatatctctttgacaagcacaccctgggagacagtgataatgaaagctaagcctcgggctaatttccccatagccgtggggtgacttccctggtcaccaaggcagtgcatgcatgttggggtttcctttaccttttctataagttgtaccaaaacatccacttaagttctttgatttgtaccattccttcaaataaagaaatttggtacccaggtgttgtctttgaggtcttgggatgaatcagaaatctatccaggctatcttccagattccttaagtgccgttgttcagttctaatcacactaatcaaaaagaaacgagtatttgtatttattaaactcattagtttgggcagtatactaaggtgtggctgtcttggattcagatagaactaagggttcccgactctgaatccagagtctgagttaa

SEQ ID NO: 65583 - DNA, 1246 bp, Homo sapiens
agctatgatttctaacaccatgccccgggccaggagcctcagggtgcccgttcgggaaaatgggagccgaatcaggatcaccccatgcgcccccgcacccttcccccgccggttccaacgcccgggcgcccctagaccggggggggggttctgaggtggacttcctgcgcctcctcgcagcttccctccaactccactaaacgggcacagagacgccaccgctgtcccagaggcagtcggctaccggtccccgctcccgagctccgccagagcgcgcgagggcctccagcggccgcccctcccccacagcaggggcggggtcccgcgcccaccggaaggagcgggctcggggcgggcggcgctgattggccggggcgggcctgacgccgacgcggctataagagaccacaagcgacccgcagggccagacgttcttcgccgagagtcgtcggggtttcctgcttcaacagtgcttggacggaacccggcgctcgttccccaccccggccggccgcccatagccagccctccgtcacctcttcaccgcaccctcggactgccccaaggcccccgccgccgctccagcgccgcgcagccaccgccgccgccgccgcctctccttagtcgccgccatgacgaccgcgtccacctcgcaggtgcgccagaactaccaccaggactcagaggccgccatcaaccgccagatcaacctggagctctacgcctcctacgtttacctgtccatggtgagcgcgggcgggcctaagcggtggcgggggccgggcgcggttcccggggcgcgcgctggggcgggccgggggtgtggccacccgcgggctctcccgcctccctgcgcccttctggaaaatggaggctgctcgaggtttccgaggacttctctggcgcagaaagtcggggcagctggttcttctcggctgtaccctgagaatgctccctcctaggccagggccgcctctgcacacccttcttttttaaggagaccttggtgtcctgaaatcctggggttgcaagactgccagcctgtgtgatcaatcctgcggttaggaaggtggagttttgctttcccatcttttcctctgcctccggcatttggccctaaatgccagcgttttttgcttaggtatccagctcccgtccgcctgtgtgtggcggagctgctgggtaacggtgtcgaatagcaaaccttgggggctggcgggaggtggcttatcttgtgggtagatcc

SEQ ID NO: 65584 - DNA, 1818 bp, Homo sapiens
gtatagcccgtggttaagggcacggttctatttatgcccctgatttaccggctgattttgacttctctttgcctcaatttcctcatctgcccatgcgtatcctcaaggttgtggtgagaattaaatgagatgatgtctgactcgggcatggagtatgactcagtaaatgggagcagctgctatgcgctttctgcacagaggtgtggtaggcgcccaacttacagcaccctgaaaaggacaggagtcatagaggaggacgatggggccttcagtctggtgtatggtgtggaagaagtgttggagaggaggaagactggagagtgtcttcctcggtgaggtgttgagtgctctttatctgtgtgcaggtgcttacatgggttgaagaagagatttttgctgctcttccaggagcctgattcttggtacactgattccttctttttcagggtcacctctgttttaacttacggtaaccctttttaaatcgttgcgctaaggtctgctagaagcaaacctccccgtgaaagaagtccaattgctttcatggactttgtgaaagaagctctcatccacgttgcccatttgaacaaatactttttaaaaagttagccagttgttgcttttctctgcaaacctttggcttccttaaacagttttctcttttctggcctgaggtcctgcgctttgccagggctgtggtctgggtgcagaagggttaggggaaggtgagggatgacagtgaaaagggcttgcccatgattggctggctgcagagccgaggtttcagcccaaagcctgtacgatcctgcccatttggccctgccctgattattgctgcccttggcatctgggaacaggggttttgaacatgtgttggtcagttctaacctgtgcagattaagtttatttggtgccctttgtgtggtgggatgagcacctataggatgtttatttctaggtgtagagttgatgggtggattaattcatttaacaaatagtccttgttgccaggcactgctgtgctctgggcattcaacgatgagcaagacagacaggggtttgccctcagagagcaattgtttagtgggcagggacaggcagtaagcaacaggtaaacaagcacgcaagtgctctgcagagaattacaatcaatgaatgggatcatggctggggctactttagattggttttcaggttttcctgaggatctgagatccaagccatgaggagtgagccatacaaaatgtgagacaatgttccagacgcagggcagagcttgttgaggaacaaagactactgtgtccttgaatcaagcctgaggaagtcccatgagactgaaacctgacctggtgctacgccctgtgagggatcaaggggtcagcaatttatcccttccttacaagaccttccattgtaggtgggaggctgagttgtgcatggtttttttttttttgagatagagtctccctctgttgcctgggctggagtgcagtggtgtgatcttggctcattgcagcctctgcctcctaggttcaagcgattctcctgcgtcagcctcctgagtagctgggattataggcgtgcaccaccacacacagctaatttttttgtatctttagtagagactgggtttcaccacgttggccaggctggtcttgaactcctgacctcgtgatctgcccacttcggccttctaaagtgctgggattacaggcgtgagccaccgtgcccggccagttcttggttttaaagaggtaagtcaggatggtggatcactgccattgacttgaggcatgcagtttgttgttatggcttatg

SEQ ID NO: 65585 - DNA, 1407 bp, Homo sapiens
gaaagtgagaaaaaactgtttttgtgttttctcttgctcaatgcttgtaggcaagttttcttaaaagcaagatattgcttactgttcccttcttgttctatttatgctccatttggagggcatttcagctcaagggagagggttgtgggaggccccttgagggcatatctctggatcactactttctcactcattcctttggaacacagaatctcttctgctcactggcctcttaaagaggcagttgggtttgatgttctttggcctgatgtctggagtcagcttgtatgtagtgcagggtggctgtgtcttagccctcacttaaccatgagtagtaagatgagggcctactggagagcgagagcaggactgtgtttgggcagggagtgaggggccctggggtggccaggaagacagatggcagtgccctgtcatcttaagcccagaaaaggccatttataaggaggactgtcaatgtcagaattggttgggaactgtggacttatggggacagtcatgctggcgggggggtggggacagggaggtatttgaagagtgtgagtagaagggcttctctttgtagagatgaggctaggggatgagtgtttggaattctgcagctctggggagtggctgtgagcagagaggggccctggttcgggcactgggtgtttgtggtggttgtgggtcaggtgggtattgcagcttggagaaagccccagacccctaccctgggcccctaacttgtgcctcttgtccctgccttcaccagacagagccaccatggggacgacggccccagggcccattcacctgctggagctatgtgaccagaagctcatggagtttctctgcaacatggataataaggacttggtgtggcttgaggaaatccaagaggaggccgagcgcatgttcaccaggtgaagacgggcacagtgagaggctgggaacaccagggcctgtctgggctgctttggtcttggggacacaacagcccctcgtccccgcctacctggcaaaacagacagcctgtcagggctccctgctgtatactgtgtgtgcagtgtgctgggggcctgacctagtgtcatgggaagaggcagcaggagagatccagtcccttgcctattcgccatcgttgctggctgggcctctcagggtatgtggcaatggacgtgcgcctgggagcttgcttccctgccgtgtctccaggaggaagccctgagtgcccgcaggtgacttgcacatggccttggagagctcacttggtgctggacaccccagcttgacctgtcgctgccaggaaatgggcaggggccaggctgggtgggagaggggaccagtggttcccaggcagcctcgagtgacaccctccttgtgccaaacagagaattcagcaaagag

SEQ ID NO: 65586 - DNA, 1269 bp, Homo sapiens
cctagccagttctgtgcggactgtggcatgatccccaatttacagttaggaagactgcggctcagacaagaatggcctggggcctcatggctagaggtggcagaatctggcctggaacccagatcttttgccttcaccttctcttatcatactctatccaagctggtggctcttggagagactgggtgccaccctgtcctgctgcccgtctcagcctctgccctgctgcccctgccaggttatcccgcagaaagtctcggagcagccagctgagctcccgacgcctccgcagcaaggacagtgtagagaagctggctacagtggtcggggagaacggctccgtcctgcggcgtgtgacccgtgctgcggctgcagctgccgcggctaccatggcattggctgcaccttcttcacccacccctgagtctcccacgatgctgactaagaagcccgaggataaccacacccagtgccagctggtgcctgtggtggagatcggcatcagtgagcgccagaatgctgagcagcatgtcacccagctcatgtccaccgagcctctgccccgcactctgtccccgactccagcttcagccacagctccaacctcccagggcatcccgacatcagatgaggaatcaacacctaagaagtcgaaggccaggatactggagtccatcacagtgagctccctgatggctacaccccaggaccccaagggtcaaggggtcgggacggggcggtctgcgtctaagctcaggattgcgcaggtctcccctggcccacgggactcgccagcctttccagattctccatggcgggagcgggtgctggctcccatcctgccggataacttctccacgcccacgggctctcgcacggactctcaatcggtgcggcacagcccgatcgccccgtcttccccgagtccccaagtcttagcccagaagtactctctggtggccaaacaggaaagtgttgtccgcagggcgagcagaaggcttgccaagaagactgccgaagagccagctgcctctggccgcatcatctgtgagtctgggggcttggcagtggcgggtggtccttggtgccaggctcagatggaggctttctgagggatcatctagcaaggagctgtccagagagctttctgcagtgaggtagatgttacacatctgtgctgtcctgggatggtggccgctagctggcctcatctggcgattgtgtcctcaaaatgtggctagtgtgattgaggaactgaattttaaattg

SEQ ID NO: 65587 - DNA, 1006 bp, Homo sapiens
ggcactttaagatttataaaatgaaaggttatttcatttggtccttacagcagcattgttagcttgtgaggaatttttcactttacagaggaggaaactgaggcttaaggaggccatggagtctgtaaatcgggaagctggggcttgagcgctgtgtgtttcattctgtccagaaagtcaggtgcttgcagaagaggctttgtgcaaggccgcagggcagggcctgtcaggcaggggagggcacctcaccttggcagctttctctctgcctgagtcacactgcctggggacgggcctgctccagggtttggggtgacatactctggggcgtgtgcagatgtgcagtctgccacactgtctatttctggattctcagaaggatctaaatggttctgatctgttttggagattttctcaggcctggatctgatcttgggaaggggcttcaagcgggggcaggtgagcctgggcctgtagagggagggccaggcagggttgcagagaatctctggagacctttggagcagacatccagatctgcagctctcatgcccttccatcactcttccctctctgtctaccctttccctgcccatgaatgggcttctgatttgactggtgcatgttacctgggtctgtctgactcccagcccagcatcatctctcctcttgagggggtggaggagagagaggaggatacaggatctaggatctggagtcacacagaccctgggtgaccttgggcacaccccttctctcaacctcagcttttctgtgaaatggtgataacacttgctttgaatgtgaatagataactcatcttagtgcttgagtgtagtggatactcagtacatcttatttgagaaaactcaccaatggctgatgctcagtttgggtgcgacaaggccgacccctagtgaggagctgcaagggtgtcagggagtggggcggtgacaggggaggaggcttcctgggggtcttcctgataccaggctctgggagaggc

SEQ ID NO: 65588 - DNA, 1028 bp, Homo sapiens
tcagcacacagaagagtagaatggcatgtacttgagtttagatttagtaaaattaggacttttgcaggcgcagtggctcacgcctgtaatcccagcactttgggaggctgaggcaggtggttcacttgaggacgagttcaagaccagcctggccaacatagcgaaaccctatctctactaaaaatataaaaaattagctgggtgtgatggtacatgcctgtaattccagctacttgggaggctgaggcaccagaatcccttgaacccatgaggtggaggttgcagtgagctgagattgcgccactgcattcagcctgagtgacagagtgagagtctgtctcaaaaaaagaaaaaaaattagtactttttacaccttcatcaaggacattcctcagtgaaactggacatctctccttcccgtgagtgtgtggtccgaggatagtgtttgatgctctggccttgactggggctgaggcttcagcagctagttcctcattgcttttgtgccatcagggcaaatgtcaacatagtgaaagggaaagtaacattttagtatcataattttagtatcatgattagttacgacctcgtggatcccccatgggtctcaaggacgtccaagggtcagaggatgcaagctgagaaccactggcctggacatcctcctcctttgtaaactcctccaggccagctcaggtccccccatcataggcttttaaaattctctgctctggaccaggcgcagtggctcacgcctgtaatcccagcactttgggaggccgaggcgggtggatcacttgaggtcaggagttcgagaccagactggccaacatggtgaaaccctgtctctattaaaaatacaaaaattagccggaagtcgcttgaacccaggaggcagtggttgcagtgagctgagattgttccactacacaccagcctgggcaacagagcaagactccgtctcaaaaaaaagaaaaaaaatttctctgctctgttccaccattgcccatgctggtgttgttgatagg

SEQ ID NO: 65589 - DNA, 1034 bp, Homo sapiens
ccccccgaggaggctgagcctgtggcggcagctgagccagaggtaagacggctgcctggggaagggaggactcacctctggggctcccgctctgcactacggccatcctgggccttgggttccaggtcaagacccctaaagccttggttctttccacaggtccctgagaacaatggaaataactcgtggccccacaatgacacggagattgccaacagcacacccaacccgaagcctgcagccagcagcccggaaacaccctctgcagggcagcaaggtgaggcttcctgacctgccgtgtgcagtgcccggagccacagcgggccttggcggcctcggcctgaccttctctctggggataaggaagccccattttctgggccagtaggctaaagagaaattaaacctgggggtgcagagatcccttttgagtctgtagacttcacctcccaccgttgggctggagctgtcactgagtgcagcatggggggctgtggctggttgggacaggaagcagaggaaggggctgcatcggggtatggatatgaagaggccaggtcaaggccttgaccttgactccaggggccagtgggaagagctgtgggctggggattgaacaccccacctggcctcctgctttgcctcccccgccagctcctttctgacctttgtatgtccatccttgtctaaagagggctggagagcagtgggtttgggagtgtcccagggtcctgctcacatctccctgagaagggtgcctctctctggtggaaagtgcactgtagctgtgagatcttgaacacggcctcctcctctttacgacgtggtcagggacaatggtcatgccagccctgcagccccaagggctgctgtgaggaacttttggagtaaggtgcaccttctcctagcagtgaaacaaaacaatactgaccctacaccctccatgttgaccctgcagcgggagctgccccctcctgctgtcagggccacaccagctgcatggcccaggaggggtggaatttagaagctgtgca

SEQ ID NO: 65590 - DNA, 2990 bp, Homo sapiens
ctggtgctgaactcctgacctcaaggatccgcccaccttggcctcccaaagtgcttgtagattcctcaaggctagtcagggttaaggctgatatgtctgcgtttggccaccccggagctgccaggaagggagccttgcccactgccaaggctgctgcccaaggaccccttccccctacacccccattcccaccctgccgccgccatcgtttctgcagccttgctgaaattgctgtcttcacagaggccaagacggaccaagcagatggacccagagagccaccgcagagtgccaggtttgcatccgggaaggggtgtgtaggtaactctgagggccctggaggatgtggccttgtgtccttgctcagggaaggtggatgtgtgctcaggggcttcagagcctctctgctggggtgtggcctggtgttgtgacttaaccaaggaggcagctccatgctgtggatgagcgcaaacctgggaatagggcgacccgattgttgaccccgtcttagtgtggtctcctggccatgtgaccttggactgttcacctcccttcctctgagtgggcagcagagggttgcttaggctctgcagcctctttcagtctagaggcctgtggcctgggcccggtattgttcaccggggtgacttttgatggggtgtggctgggctgtggcgggctgccctgtgatgccgccgcccgcgccttggcaggaggaagcgcagctacaagcaggccgtgagtgagctggacgaggagcagcacctggaggatgaggagctgcagccccccaggagcaagaccccttcctcaccctgcccagccagcaaggtgagccaggcacctgccctctcctggagccctgacccccttcagtaccctgccccgcctgcccacttctgaccctggtcctcgtctgcaggtggtacggcccctccggacctttctgcacacagtgcagaggaaccagatgctcatgaccccgacctcagccccacgcagcgtcatgaagtcctttattaagcgcaacactcccctgcgcatggaccccaaggtgaggggcctgtgcccaggccgggctttgtgggagctgggcagtgtggctgaaggtccagtctgtcctgtaagatactgggagtagtgtgagcctgggcggaggcaagtgtggcctggcactgttaggggccggttgaagcctctgtggccaccggctgtcttgacctctgagggcactgtcctgcacttgaccttgtgggctctggactacagcctggaggcttggccggctcaatgtgagccctggggatctgtgtagttaaggtgagaggtacttgtggacacctccaccactggggtgagggttgggtgacaggagaggcggtgggggtgctgctggcaggagggcaggccccacgcaggcttgctggcacagctgggcatgtggcctgcccggcaggatgctccccggcctggcattaactcttgccttttcccttgtctcctccacagtgcagcttcgtcgtaagtaaagccttttcctgtcggtaacctcgccccacctagcactcacccgctgtagccccttccctgcgtagctgacagcacctgtagatgcactaacattgtaagcgggaggggagccttaggaagagagtgggacggtgaggggtgcactggctggaggcgcccagcagttctgggccccagcgtccttctctgccctccctgcccttgactctgctcttaggaggaagcaagggggtgtggcttttcaccagggctacagcttgatgtgttctccacagccaccttccctccctcctcccctgcaccaggccccgtcagggtctgtgggtctttgaagagaacagacaggttgtctgtggtccccagagctactgagatttattggttcacagacctgagcagtagccttgaggcagtggggtgatgggggagcgcaagtgtgggtctgaactgaggtggaagtgctgggtcttgctgtgctgggtgacagtagaacagtgggtggtagcgtctagaaacaagtcgcagaagctgttctcttctcagacacctcagagctgagccgagccaggcaggccctgagcaaggaccctcagatggggacatgcttagcctgcagccccagctccctgtgccatttgccaaggccacagacacctcattcctttagttcctgcaagccttctgaagggtcctctgcagccacacagggacacctgtgacagccgggagggcttctgcctccagttgagggcctcggcaggtgagaggggcttcccagcagctggccaggtgggccctgagctggcttctccgcatggaggcctgttcccctcttgttggagagggtgactgacagtataccttccagtggccttaccacctgtgccgattagagccctgcaggtctcacagggtgatagagaagaccaggaagtggtcccctttcctgctttggggatcccaggtccctgcacaaagcatctagtgggtggggacagtccatagttaggagaccagggggctacggagtcattttggactgcatcctgaacattctgctatgagtctctgggtcttgtttaaatctatggacaatgttgatattttctcagcattgcaatttagtagcaattgacctggttaggtttaggctgcaggttcccatctgccttctgtggactctggttccaatgttagtcccgattttgaagatggcagtgctgtttggacttttcccgggtgtgtgccagtcagcagtcagcctgggacttggcaggtggtctgttagtttagttctcagccttcggtgtggtaattaggatcagatcctagcatctgcagcttagagctgagcctgggcgttcgtcaataacctgcagcatcattttcccgatctcctctggggctcccttttctgtcctccagccaggaagctggggcttcagttaccttgttctgct

SEQ ID NO: 65591 - DNA, 1656 bp, Homo sapiens
gcatctgcaccacccccttactagaacattcaccatgattgggagagctgcctttctgctcctcacccttccaagctcatccttcattttctttttcaatgcacagtttatgtagttgtcattagcacataaatcctatttggagcctgacttttgtgttgcccaaaacttggcagggctcaatggagggcactgtggctcaggcccttgcgaggtagctgagtgctcctgggaggaaaggcgggagctgcgggccttggcttgggtgctgttggggccacgttggggatacctctgcctaagaagcattctgatgctgccacccacgtggctgcaggctgctggggactgtgggcagcttttggggctgggtggggggtcgtccttgctcatgtcccatctccctcgctccccgccaccccaggagaaggagcggcagcgcctggagaatctgcggcggaaggaggaggccgagcagctgcgcaggcagaaggtggaggaggacaagcggcggcggctggaggaggtgaagctgtaagtggcctggcttcctggactgtggcccatcccagccttggtggggctccccatgactatcctatgccccgcaggaagcgtgaggaacgcctccgcaaggtgctgcaggcccgcgagcgggtggagcagatgaaggaggagaagaagaagcagattgagcagaagtttgctcagatcgacgagaagactgagaaggtgggagcctgggctgtggaggcccaggcaattcaggacttgggccaagggttaggactggacccctcaggaaattgcagatttgtcactgtacccctgtacccatctcctgtctgccccatgggccctggagtccactcagctctgggtttccctggcagccctttgtgagtggggtctgacactcaggcaggaccggcttctggtgtcctctccctgggtggtgggaacaagccaggtgtgcaggggcaggtggggcctgtcacacacagttctgggctccactctgcaggattgaatgtgggtgctccaatgggcatgtgtgggtgggctctgcaggccaaggaggagcggctggcagaggagaaggccaagaaaaaggcggcggccaagaagatggaggaggtggaagcacgcaggaagcaggaagaggaggcacgtaggctcaggtggctgcagcaggtgcgagcacaggtgggcctcagggaggaggtgggcggggtgggcgctgtctcagcaccatggggccctactgggtgcaccccaccttgtggggttgacccagaccatcttgttgcttcatgctaagaaggaggtttcccagaagtctccagggcggggatggtgaccagaatctgcctctcctgtagcagcagtaatttgagggttaagtgcttgtacttggagccagactgcctatctcagctctgccatttattagctgtgtgactttctacaggctgcttgacctctctgcttccatgtcttcaagtagcagtgagggttaaatgtgttaatgtctgtaaaatgctcagtagtgtctgatgcctgctaagagttctatacaattgctgttatggtccaccccctgactgttctgcctataagagtaagggcccacctcttcccagccagtcttaggac

SEQ ID NO: 65592 - DNA, 1126 bp, Homo sapiens
gctaggccctgctgtgtgttgtgcgtatcaacccagcaaccccatgaagtgtaggaataactgcagtctccattttatagacgaggaaacaggccagagggtttaaatgcttgcccgttgtttcatagctagcgagtttggctccgaggttcctttctgctaaatctacagcagcagcagctgtcacaagatgccttttcaggctgctgctggtggttctggcagagccttgctcgggatgtcccacggcgccattcctgggttgtccgtggtggtggctgatatgaggggcacctgggcttcgggggagtagggctgctgtcctgcctctctggcctgggcctggccgcagcacctgaccttgctctctgtttcaggaggaggaagagcggcggcaccaagagctgctgcagaagaagaaggaagaggagcaggagcggctgcggaaggcggccgaggctaagcggctggcagagcagcgggagcaggagcggcgggagcaggagcggcgcgagcaggagcggcgcgagcaggagcggcgggagcaggagcggcgcgagcaggagcgacagctggcagagcaggagcgtcggcgggagcaggagcggctccaggccgagaggtgagggacctgctggcccgcctgcctgccttccatgtgtgtggaagagagacggtgtgaaccttgcctggacacagccccacctgcatgtgacggtttgcaggtgctttccttggcaccaaacccagaggcccacctgaatacactgcccattggctatgggagatccaaggagtgataggtgggcttgcttagggcttggcttggttctgcctccagctgcatgtgctgacctcttaggtgtctttttgtaactgtcaggagtgtggtgctcagaggatgagctgatatttctcagcagggccaccatgggcattttgggcaggaaagatctttgtgttacattgcaggatgtttggcatccttggcccctgtccccactaaatgcatctcccctggtgaggacgataactcagattaccccctaccgatattttcagactgttcccctgccttgggaaccgtggacccaggagccctgggattttccagctgtgcagatgc

SEQ ID NO: 65593 - DNA, 1337 bp, Homo sapiens
gtgaagagtcacagccagggggctgcactgagtcagggctgcttgatggggacaaagctgtccttggtcctctgggcagagtctgggaaggcgagaaggcgtagggtgtagctaatgtgcagggtgctgggcagagcagggggctttgagggtggcggtgtgatagtcatagtgtcggcagctttggtgggtacccgagctgcatgctttacacctgtttccttgtttagtcctcagttgaagcccatggtggcatgggagccatcagctccacttcacacagggggaaacaggtccagagaggttaaatgacatgttcaaagtcatgagccagtgtgttgtggaggtgactccagaactcatccacagcctcttgttcatgcttggagccagtgtctgccctgaaggttaggataaaaaggggtattgtggattatcccatttgattctcatgttgaccctggaggaaatgtgttatggtctccattgtataaaagtgttatgaggctcagagacccaagttacaaggaaaagtgggggccaaatgttgggctccagcttgtgttccctgcaccctcaggtgtgcacacttctagccccggggcaaaagcgcagctcttggctctaagctggttgcccattcagcaatcccactttctaaggtgtgtcctactggctgggcctggtttccccagcagggatgggaacagggcttgggctgggcctccacttcctgtcctaacaggctcttgctgggtcctcagggagctgcaggagcgggagaaggccctgcggctgcagaaggagcagctgcagagggaactggaggagaagaagaagaaggtgaggggagctgggttgcgggctcccctggggtctgccctgagctgtgggcgggtctggactcctgcagcaggggctgcctagggaggggagggaaagggaggagaatggagcggagggaaggggaggggagggaagggcacctgcacagctccctaacaccccattgccacctgggttccaggaagagcagcagcgtctggctgagcggcagctgcaggaggagcaagagaagaaagccaaggaggcagcaggggccagcaaggccctgaatgtgactgtggacgtgcaggtgccacctgggccccagtggagaggctctcaggtggaggggcccactctattctcttcccagtagctagaggcacaggctgtgttaggcccctaaggaaaaggacagatacacttggcccaattgtttttacttctttttatattctttgttattctaaaagtagaatttgttgaggtgggggataaaaaggaactaaact

SEQ ID NO: 65594 - DNA, 2077 bp, Homo sapiens
ctgaagagacttggacctaagtaagccacctggggcagaggcagagctagaatggggaagggtttaggcagaacaccaagctggagcctggggcttccagccagctcggggaggcaggaaagtccttgaggagtgcatgaggcacttgagcaggatctgacctggagtttacaggccccagcattaaaccagaatgtgggtgagcgtgactgcaatgtctcaggcctgagtgcaaggccagcttgagtgagcagggtaggtgctagaagtgggtgctgccagagtggatggggcccgtgggtaccatgggtgccttgcagtggttgctgagccggaagtcagggaggggtgcagacgccccagagggaagggcctggaatcccatagctggtaggcacactacagaaacttgtttttgtgagtttcacctcatctgaaccctacagtaactggcatgtgctttaagcctcttaactactagtgtcaagtcatttgggagatggcagtgagcaggagccagctcgcttgcaaagccatctaatcggaggtgactttgaacagcttacttaaatagtttcctcatccgtgaaaggggggtgaagacaagacccagctgaggagttctgttgagagtgacatgagtgagctcacggctggcccttagagccgcacctggtgctgagcaagtgctggtgcatgtctggcctcctgatcccctgggtcttcctcagccccgttgtcaggactgtgccttcccacatccactgcccagaggccccctcagcactgcaccagggcctgtggggtctgtgagaagcagctggccaaggtggtcaaggatggcatcctatgcttaagctctggaactgggcttgtcttcaaacacaggctctgccattattagctgtatgcctttgggcaaatctgctgaatgggagaatacagaacctgcctcccaggtggtggtcgggacaggttcaaggagtgcctggctcatgcgagctctcaaggactttgtaaggttaagctgccagaggaaggttggaaggatgtgacacaagggcgttctctgggtttgatggtggtacaggcaggggcagggctgaagagggtgacagagctctctgtagggaggttggagagggtgacagggctctgtggtgggcaagggatggggaggttcatggagagccccaaggcagtgtctggtctgtggtctcctgcaggcaccccgctcagccaggctatcattcaccagtactaccacccaccgaaccttctggagctctttggaaccattctcccactggacttggaggatatcttcaagaagagcaagccccgctatcacaagcgcaccagctctgctgtctggaactcaccgcccctgcagggcgccagggtccccagcagcctggcctacagcctgaagaagcactgaggctggcctgcggccttcttggcagcctcgcctcctgtccatgtctatctgtctgtctgtcggtctctgtcttggtctgttgccctccttcttggcatgccattgtggagggcttggccaggtgtatataaacgtcctctgtgctgggtgtttctgctgcaggtggcaggtggccccaggcctgtttggaggatgggctgggtgggtgggtggggaagaaatgggcccagccccacatggcctgcagacagtgctctgtaaatagttgttttaatttagctgaatgttagcattttagtctttggcattttagcgtttgggaggtagattaataaagtatattccttcaagcctgctgttgataccatgaagactgggcgcctcagtcccagccctgtagctgtgtgtcttgggccaccagtggcctgcaggacgaaggtactgttccatcacctgcggtgtgcctcaggatcaccaggtgcaggcccccaccctcggagatgctgctgcagtgagtggttccactgcctggataacccttgaggaacacgtcagttactgtcacgatggggcaggtggagctccttcctattttttggggtgctccctgtttgtaaaggggagtttgttcattgg

SEQ ID NO: 65595 - DNA, 1104 bp, Homo sapiens
ggcgtccgcgtcctgcggtgccctgggtaagtcggcggccctcccggagcagccgcccgagacgcgggagggcgaatgaaataaacgaaaatagacattttcccgaaggcgaaatagacatcctccttcggcgccggggcttggaggcgggcggcggtgggcgcgggttaacgtccccggggaaactgagacccccagcaggtccgggccgggggcggagaggaacgcgggagggcgccgggcccctgggcttttcgtaccaagctcgaccgagccgcccctacccacccccagctgcgaacccagccgttcagaacagagactgggcattgtccccacagggtctcccgaggaccttgtacccgcgcggcttccttgggctggctttggacgacgctttcgccttcctgctgcctaggatccgccgacatgaatcccatcgtagtggtccacggcggcggagccggtcccatctccaaggatcggaaggagcgagtgcaccagggcatggtcagagccgccaccgtgggctacggcatcctccgggagggcgggagcgccgtggatgccgtagagggagctgtcgtcgccctggaagacgatcccgagttcaacgcaggtaaatgtgcctttcagctagtaaataatgtgagtcaggtcaagctccttcttcagaataaatagaacctacatagtgttagggaatctaatgagctttggggtgaaactaagtatgtaaaaaagaaacaatatttaatttttctacctgtgctgaaaagagtcaaacgctaaaatatttgtagagatttatactgaggcaaatatgagtgaccaatggcctctgatacagctcttgggaaatcctgagaatgtgtgcttctggagagacataagatgtcaatcagtacatacaagacatacattggttccatctggagaggtgagactactgggggagggggagtggtttccaggtcatagttaagattcaaagattttctgatgaacaattgatttaaagttttgtccaaacacctggaatccacagaagggaatgtctggattatataaggacttgtggctgcagatagaattaatagaagg

SEQ ID NO: 65596 - DNA, 1050 bp, Homo sapiens
gcagcctgggcgacaaagtgagacttcatctcaaaaaaaaaaaaaaaaaaaaagcaggattttgggtcccagcctgtatctaccaagtcactttttcctttcctttctcctcttggtggcagcttcagagtctctgtgggcccaagcaccccaggaattcttatacacactaaagtttgagaagcactcttacttttatccccattttatgatggggacaaagagacacaaaataaaacttagcatcacagctagaaaacggtggtgttgggattggatgtactcttaaagctgaggtgtggaggagtgtccagcaatccacctgtaacttacacgtagaatgagaagcagcaggttctttctagaatgttggaattaaatgggtgccccatcaacatataacatgaaactttaagtggttttaaggtacattgttggttatggtgttcattctcattttcagcctgtcactttttttctgtttatttttggcagaaacttgggaaccgtgggtgctgttgccttggactgcaaagggaatgtagcctacgcaacctccacaggcggtatcgttaataaaatggtcggccgcgttggggactcaccgtgtctaggtaggaccaagggatgcctcctgccccttcccctcttctcccgccctcaggctttcctcactctctattccctgcccctctccgtttcttgctgcgttccctttctgcttttggtgcagctccaggatgtctgggagtgacaatggggttggaaggggttgttcggggtgctgccttgagagggtgtttgtatctggcgccactgtttttactagattgcatgcctttttggaacaacttggggagagaagtggagacagggatgctaacgttgcccccagtctaccctgtcgtgattctgtcttctctttagccacagtttcaggatctgcagacttacttgagtaagacttactcccgagacatgggctctgattagcaatctgagaaatctgagactgcagttgttagatctgagcagcatgaaagtgacata

SEQ ID NO: 65597 - DNA, 1011 bp, Homo sapiens
agagtcttgctctgtcacccaggctggagtgcagtggcacgatctcagctcactgcaacctccacctcccagattcaagcaattctcctgcctcagcctcccgagtagctgggattacaggcgcccgccaccatgcctgcctaatttttttgtacttttagtagagacagggtttcatcatgttggacaggctggtctcgaactcctgaacacaagtgatccacccacctcggccccccaaagtgctgggattacagcaccaccgcacccggcctttgtagctgtttcatgggaacaaggaagtggccccatcaaccttgtctggctaaaaaaaatgcaggtgtcctctcccttttgcataggtgtaggcgtgacccagagaggaatggggatgggcagaaggacagaggcagaaccaggcctaggaatgggggtgggagtatgggcctggaacacagtggaggttgggggaggtggtgggggtgcccattagtggctgcatccagaatgtaaatgccattaaacaaaaccagcctttccacctcaccccaccccacatccacacccccacaaagagctgagccacagccgtccatagcacatctcttctgagaagttaaaaatatgtaggaggaggcataggaattattctacccttttggaagatgagaaaataaggcctagaaaaattggagtttccccggtctcttgtccctctcaggttaaagtgaagtttaactcagccttccctattttcaaatcctccggctctcacccctaagctgctgctcctagatctagaggcagccccaagagggccccaggcgaaaagcaagaaagaccagcacacatggacagctctagctttcaaaattctgggatttttacaaaccactatttaaatgaagttggattttcagtgacagaggtaggggccagccatggactctgctgataggggaaaccagcctggggtgatttttttttttttaatcactgatcatctcaaga

SEQ ID NO: 65598 - DNA, 1035 bp, Homo sapiens
aacactgagattcaagaggtgggcagaggggctgtcaagcggacttgataaggagggacagagggaggaggcagtaaccgagggaggagggctatgtcagcttgggaggcttttcactgtgggtaacagcaaagttgtccaggtgattagatgaaagggttgatttttctcacagtctgggtgttcagcagcaaagctctgtgtcagtgtcaccgaggccctcttgcctttctcctagccttgggcattacatcctcacatgatgcgttcaaaggcaggagatagcaacagcgtggaacagacgttctcctcatgcctcttttattggtgggatgtggggtggtgatgatggagggatcgtccccagaagattcctgctaatctccccctagatcccactgggcagaaggacacatgcttgctttggaccaggggctgtgcctgtcttggtgaaatcaaaaaatctctttcctgtccttgaacaaacaggattcttccagccaaggggagggaaatgccttttgagtaaggagggaatagcgcttgccattagcacatttcataaggaagagtttttctgctgggttaattgatgcagggaggtcgagtgggatgggtgctgagaagtagcccctagatgtgacacttagtggactatgtgtggcccttgagagggctgtttccatagaacggctgggcttgattgcacattttggcaggggagggggtgcttaggaattactgggagaagtttaggagattaagggggactaccaggaagcctagtgttgaaggtaagaggagaggtggcaccatcactgggtgcaggaggcagacatagggagatcttttcagtttgggggagacttgatgtttataggctgagcaaaaggagctggtgagagagagggtaaagattttgaagcaagatgggataatggatccccacgtcctgaaggaggcatggaggtggcatcgagtgcccaggaggtggtggttgtcactggatcaagcaggaaggcttttctgagaaga

SEQ ID NO: 65599 - DNA, 1032 bp, Homo sapiens
attgtgtctaaaaatggaaaatcacatgttactgtttatcaaaaggaaataaacaccttggattaatcgggttcttgccactggatggtgagtccagaccttgccggcaacccaggtaaaaaggccactctgcatgttctgcaaacactcactttttttttctttttcttttttttttttgagatggagtcttgctttgttgtccaggctggagtgcaatgacacggtcttggctcactgcaacctctgcctcctgggttcaggtgattctcctgcctcagcctcttgaatagctgagattacaggcgcccgccaccatgcccggctaatttttcttttagtagagacagggtttcaccatgttggccaggctggtctcgaactccttacccaggatccccccgccttggcctcccaaagtgctgggattacaggcgtgagccaccgtgcccagcccactttcgttgttttacagtttccgaaggggaagtggtcagatcctgtgtgtccgctgaggcttacttgccatgcctggttatgtaatcgtggacaacctttgattgggctttgctggtggcagaaataaggacaggaaaaaacatgggagtcagggcgtgtcccccactcactctactctgacatggattggactgttgattgttttgtatttatgagcatttgctgaactctcacggaatatggagaattaaaagttggacagaaatgcttcagtaagccagcgtgaactgtacataggttcacacagggaaaaaaaggtcttggaggtggctccgaacactacatgtctcagccttttcatactccagccaatgcccagggagcacttggtggtctctgcttttgacttagctactgtcagcctctgcagtctcaagccggcctctgcagccacactcagctcttcccagtactcttttaacatactcttctctttccagcacctggctttcatgcaggcttttcttcctcatcctttgggtttcagctcagaggtcatttcctcctggaagc

SEQ ID NO: 65600 - DNA, 2275 bp, Homo sapiens
aggcagcattaaacttcccaaaatgaagctgccccaatttggcatctctactccggggtccgacttgcacgtcaatgccaaggggccacaggtttctggcgaactgaaggggccaggtgtggatgtgaacctgaaagggcctcggatttcagcaccgaatgtggactttaacttggaaggaccaaaagtgaaagggagccttggggccactggtgagatcaaaggccccactgtcggaggaggtcttccaggcattggtgttcaaggcctagaaggaaacctccagatgcctggaattaagtcctctggatgtgatgtgaacctgccaggcgtgaatgtgaaactcccaactgggcagatttctgggcctgaaatcaaaggtggtctgaaaggttcagaagtaggtttccatggggctgctcctgatatcagtgtgaaggggcctgcctttaatatggcatctcctgagtcagattttggcatcaacttgaagggcccaaaaatcaaaggaggtgcggatgtttcagggggtgtcagtgccccagacatcagccttggtgaagggcatttgagtgttaaaggttccgggggtgagtggaagggaccccaagtctcctctgctctcaacttggacacatctaagtttgctgggggccttcatttctcaggaccaaaggtggaaggaggtgtgaaaggaggtcagattggactccaggctcctgggctgagtgtgtctgggcctcaaggtcacttggaaagtggatctggaaaagtaacattccctaaaatgaagatccccaaatttaccttctctggccgtgagctggttggcagagaaatgggggtggatgttcacttccctaaagcagaggccagcatccaagctggtgctggagacggcgagtgggaagagtctgaagtcaaactgaaaaagtccaagatcaaaatgcccaagtttaatttttccaaacctaaagggaaaggtggtgtcactggctcaccagaagcatcaatttctgggtccaaaggtgacctgaaaagttcaaaggccagcctgggctctctggaaggagaggcagaggccgaagcctcttcaccgaaaggcaaattctccttatttaaaagtaagaagccacggcaccgctcaaattcattcagtgatgaaagagagttctctggaccttccaccccgacggggacgctggagtttgaaggtggggaagtgtctctggaaggtgggaaagttaaagggaaacacgggaagctgaaattcggtacctttggtggattggggtcaaagagcaaaggtcattatgaggtgactgggagcgatgatgagacaggcaagttacaggggagtggggtgtccctggcctctaagaagtcccgactgtcctcctcttctagcaatgacagtgggaataaggttggcatccagcttcccgaggtggagctgtcagtttccacaaagaaagagtagcaggcctttgtatgtgtgtacatatatatatatataacaaaacatcagccttgggtggtgtgttcctatataaactccaaagggaaacacaccgactgcctcagcaatcatgcaaagaccttgcctggcccggtggcaagcgctgaaaaaccgaccgcctgtaggctcctggaactatacagataggtaaagagttccaagttcgtccagcccatgtgcaaagtcaacagtatttgccttaagatttcatatatatatatttttttgcattgactgctgagagctcctgtttactaagcaagcttttgtgtttattatcctcatttttactgaacattgttagttttggggtaatggaaacccactttttcattgtaatgactttgggggcttttgttagtaagggtgggtggggtgatgggttgcagacggaggtcaggtcttcctctttcctgagactggatctgttcaaacagcaaacgcccacagatggcccagaggtggtggtagtcagggtgtgtgggtgtttttagggttctttagtgttgtttctttcacccaggggtggtggtcccagccagtttggtgctgacggtgagaggaaattagaatctgtttgcaaattgtccaacccaccccctcaacatgaggggcttccattttctgtgttttgtaagggaactgtttccttcatgccgccatgttcctgatattagttctgatttctttttaacaaatgttatcatgattaagaaaatttccagcactttaatggccaattaactgagaatgtaa

SEQ ID NO: 65601 - DNA, 1990 bp, Homo sapiens
atggatgtgtctctgccaaaagtggaaggtgacatgaaagttcctgacgtggatattaaaggccccaaagtggatattaatgccccagatgtggatgttcaaggcccagactggcacctgaagatgcctaaaataaaaatgcccaagatcagcatgcctggcttcaaaggagaaggtccagaagtggacgtgaacctgcccaaggctgaccttgacgtctcaggacccaaggtggacgttgatgttccagatgtgaatattgaaggtccagatgcgaaactgaagggccctaaattcaagatgccagagatgaacatcaaagctcctaaaatatcaatgcctgatttggacctcaatcttaaaggccctaaaatgaaaggagaggtggatgtttcacttgcaaatgtagaaggtgatttgaaaggacctgctcttgacataaaaggcccaaagatagatgtagatgctccagatattgacattcatggcccagatgccaaattaaaaggtccaaaactgaagatgcctgacatgcatgtaaacatgcccaagatctccatgccagaaattgacttgaatttgaaaggctcaaagcttaagggagatgttgatgtctctgggcccaagttggaaggtgacattaaagctcccagtttggatataaagggcccagaagtggacgtttccggtcctaagcttaatatcgaaggcaagtcaaagaaatctcgttttaagcttcccaaatttaatttttcgggctctaaagttcagacacctgaagtggatgtcaaaggtaaaaagccagatattgacataacaggtccaaaagttgatattaatgctcctgatgtcgaggtccaaggaaaagtgaaaggatccaagtttaaaatgcctttcctgagtatttcatctcccaaagtttctatgcctgacgtggagctaaatttgaaaagtcccaaagtcaaaggagacttagatattgcaggtcccaatttagaaggtgactttaaaggccccaaagtggatattaaggcaccagaagtcaatcttaatgcacctgatgtggatgttcatggtccagactggaatctgaaaatgcccaagatgaaaatgcccaaattcagtgtgtctggcttaaaagcagaagggccagatgtagctgtggatctaccaaaaggagacatcaacatagagggcccaagtatgaacattgagggcccagatctcaatgtggaaggtccggagggaggcttgaaaggtcccaaattcaagatgcctgacatgaatatcaaagctcccaagatctccatgcctgacattgacttaaacttgaaaggccccaaggtgaaaggtgatgtggatatttctcttcccaaacttgaaggggatctgaaagggccagaggttgatatcaaaggccctaaagtggacatcaatgccccagatgtggatgttcatggtccagactggcatctgaagatgcccaaagtgaaaatgcccaagttcagcatgcctggcttcaaaggagaaggccctgaagtcgatgttaccctccctaaagctgacattgacatttctggtcccaatgtagacgttgatgttccagacgtgaatattgaaggtccagatgcaaagctgaagggccccaagttcaagatgcctgagatgaacatcaaagcccccaagatctccatgcctgactttgacctgaacttgaagggacccaaaatgaagggtgatgtggttgtgtctttgcccaaagtggaaggtgatctaaaaggccctgaggtggacatcaagggccccaaagtggacattgacactcctgacattaacatcgaaggctcagagggtaaattcaagggacccaaatttaagataccagagatgcacctgaaggctcccaaaatatcgatgcctgacattgatttaaacctgaagggccccaaagtcaagggcgatgtggatgtttctctgcccaaaatggaag

SEQ ID NO: 65602 - DNA, 1090 bp, Homo sapiens
gtggatattaatgccccagatgtgggtgttcaaggcccagactggcacctgaagatgcccaaggtgaaaatgccaaagttcagcatgcctggcttcaaaggagagggcccagatggggatgtgaagctgcccaaggctgacattgatgtctcaggacccaaagtggacattgaaggccctgatgttaacattgaaggaccagagggaaagttgaaagggcctaagttcaagatgccagagatgaatatcaaagcccccaagatctccatgcctgatattgacttaaacctgaaaggacccaaagtgaagggtgatgtggatgtttcccttcctaaagtggaaggtgacctcaagggcccagaagttgacatcaagggcccaaaagtggacattgacgcacctgatgttgatgttcatggcccagactggcacctaaagatgcccaagataaaaatgcccaagatcagcatgcctggcttcaaaggagaaggtccagatgtggacgtgaacctgcccaaggctgacattgatgtctcaggaccgaaagtggatgttgaatgtcccgatgtgaatatcgaaggacctgaaggaaagtggaaaagtccaaagtttaagatgccagagatgcattttaagactccaaagatatccatgccagatattgacctgaatctcacaggtccaaaaataaaaggagatgtggatgttacaggccctaaggtagagggagatctgaaaggtcctgaagttgacctcaaaggccccaaagtggacattgatgtcccagatgttaatgttcagggtccagactggcacctgaagatgcccaagatgaaaatgcccaagttcagcatgcctggcttcaaagcagagggccctgaagtggatgtgaacctgcccaaggctgacgttgatgtctcaggccccaaagtggacgttgaaggccctgatgttaacattgaaggaccagagggaaagttgaaagggcccaagttcaagatgccagagatgaatatcaaagcccccaagatccccatgcctgactttgatttgcatctgaaaggtcccaaggtgaagggcgatgtggata

SEQ ID NO: 65603 - DNA, 1143 bp, Homo sapiens
agaagtggatgtgaacctgcccaaggctgatgtggacatctcaggacccaaggtgggtgttgaagttccagatgtgaatattgaaggacctgaaggaaagctgaagggccccaagttcaagatgccagagatgaatatcaaggcccccaagatctccatgcctgatgtggacttgcatatgaaaggtcctaaagtaaagggagaatatgatatgacagtgccaaagctggaaggggacctgaaaggcccaaaagtagatgtcagtgccccagatgttgaaatgcagggtcctgactggaacttgaagatgccaaagattaaaatgcccaaatttagcatgcccagcctcaaaggagaggggccagaatttgatgtgaacctgtccaaagcgaatgtggacatttctgcaccaaaagtagatactaatgctccagatctgagccttgaaggacctgaagggaagttgaaaggcccgaagtttaagatgcctgagatgcacttcagagctcctaagatgtctttgccagatgttgacctggatcttaaaggacccaaaatgaaaggaaatgtagatatctctgcaccaaagatagagggtgaaatgcaggttccagatgtggacatcagaggtcccaaggtagatattaaagcaccagatgtggaaggccaaggcctggactggagcctgaaaatacccaagatgaaaatgcccaagttcagcatgcccagcctcaaaggcgagggcccagaagtggatgtgaacttgcctaaggctgacgttgttgtctcaggacccaaggtggacatcgaagccccagatgtgagcctcgaaggtccagaagggaagctgaagggtcccaagtttaagatgcctgagatgcatttcaagacccccaagatctccatgcctgatgtggacttacacttgaaaggccccaaagtcaaaggggatgtggatgtgtctgtgcccaaggtagaaggtgaaatgaaagtgccagatgttgaaatcaaaggacccaaaatggacattgatgccccagatgtggaggttcaaggcccagactggcacctgaagatgcccaagatgaaaatgcccaagtttagcatgcctggcttcaaaggagagggccgagaagtggatgt

SEQ ID NO: 65604 - DNA, 1878 bp, Homo sapiens
gtcggaagatggagtggaaggagacctcggggagacccagagccgtaccatcacagtgaccagaagggtcacggcctacactgtggatgtgactggccgggaaggagccaaggacatagacatcagtagccctgaattcaagatcaagattccaagacatgaactgactgaaatctccaatgtggatgtggagacccagtctgggaagaccgtgatcagactgccctcgggctcgggggcagcctctccgacaggctctgctgtggatatccgagcaggggccatttctgcttcaggaccagagctccaaggtgctggccactcgaagctccaggtcaccatgcctgggataaaggtgggaggctcaggtgtcaatgtcaatgcaaagggcttggacttgggtggcagaggaggggtccaagttccagcagtggacatttcatcttctcttgggggtagggcagtagaggtacagggcccatctctggagagtggtgatcatggcaaaattaaatttcccaccatgaaagtgccgaaatttggtgtctcaacagggcgtgagggccagacaccaaaggcagggctgagggtttctgcacctgaagtctctgtggggcacaagggcggcaagccaggcttgactatccaagcccctcagctggaagtcagtgtgccctctgccaatattgagggccttgaggggaagctgaagggcccccaaatcactgggccatcacttgagggtgacctaggcctgaaaggtgccaagccacaggggcacattggggtggatgcctctgctccccaaattgggggtagcatcactggccccagtgtggaagttcaggcccctgacattgatgttcaggggcctgggagcaaactgaatgtgcccaagatgaaagtccccaagttctctgtatcaggtgcaaagggagaggaaactgggattgatgtgacactgcctacaggtgaagtgactgttcctggggtctctggggatgtcagcctgcctgagattgctactggtgggctggaaggaaagatgaaaggtactaaagtgaagactcctgaaatgattattcagaaacctaaaatctccatgcaggatgtggatctgagccttgggtctcctaaactgaaaggagatattaaggtttctgctcctggggtgcaaggtgatgttaaaggccctcaagtggcacttaaaggctccagagtggacatagagacaccaaacctagagggaaccttgacaggccctaggcttggcagtccttccgggaaaaccggaacctgtaggatctctatgtcagaagtagacttaaatgtggccgcacctaaagtgaaagggggtgtagatgtcacactccccagagtagaagggaaagtcaaagtccctgaagttgatgtcagaggccccaaagtggatgtcagtgccccagatgtcgaagcgcatggcccagaatggaacctgaaaatgcccaagatgaaaatgcccacgttcagcactccaggagccaaaggggaaggtccagatgttcatatgactctacccaaaggagatatcagtatttcagggcccaaggtcaatgtggaagccccagatgtcaacttggagggtctggggggaaaacttaaaggccccgatgttaagctgcctgatatgagtgtcaagacaccaaagatctccatgcctgatgtagatttgcacgtgaaaggtacaaaggtgaagggagagtatgatgtaactgtaccaaagctggaaggagaactcaaaggcccaaaagtggacattgatgccccagatgtggatgttcatggcccagactggcacttgaagatgcccaagatgaaaatgcccaaattcagtgtgcc

SEQ ID NO: 65605 - DNA, 1240 bp, Homo sapiens
gcaagcagcgccctccccagatcccggccttgggtggggcagacaggcagcttccaaactgtaatctaccccacagggcaagaccaagcgttctgctccaccccctctcctataggacgccaccctcagagttggtgtcttaatcccagtggttctgggtaaaggcccactcttccctgcttctgtgtccaggtgtggggactccccactggatcataggctgtccccagccccctttcacaaggattgcagagtccctcctggccagggagggaagagggaatctccctcgctgctggaagtgagagcttggagcttcagggcttccaagctcactgtagcatgggatggggctgtgcgtggctggggtagagagagatggagaaaggcgtcacagcagagtcagaaagcaaccagctggctgaggttggggtgtaagggctgccctggaagtcagcatgatgtgaggggccaggggaagggggtgatggggaggggagggctggaatgacaaggatggaaaaacttcctcctggtgggagttgtggctgggctggcgcctccctctcctaagggcagggagcagggaggaggccaggcaggtgcacacacacaaggggaggtgcaggctcaagggacacaggtgccaggtaaacaggcatagggacctgcaggacaactgtctattgtgagccggtgaaggctggctggggctgcaggctgccctgggctgtgtagagtggagaatggggctgagggtctccgtgtactaatggtgtgtatgtgtgtgtgtgtgcttgtgtgcctttctttgaaggtgcccaagttgcatgtgttttgcaacatgttcatctaattcttcctggtaattccacctccctaacctgcccctcctccctgcacactgcccagaatcagctaggtgggtttgtaaaagttgttaatgccagcttagactctgagatgtctgcgcacttctgctccggttagaatgtggcataatgttttttcctaaacaagcctggcagctgcatcctcgggggtccattcagagggccaggccctggaagggatgtcacccttgttcctttggaacaagggccttgggggtcagagactcctgggcttgcatttcaactctgtctcacacttgggcaagtcatcttatctcttgggcctgctttcacttctctgaaataaggatattaattcttttgacatagcatcatcatttgggagt

SEQ ID NO: 65606 - DNA, 1034 bp, Homo sapiens
ctccttgaggagccaacccctcggagctgaggacttgtggcagccagacatggtccagggccaggggtgggacacagggacctgttgagggagaaggtccagcgtcagcccagggtacggagttggctgggggtccccggagtcatcttagccctcaggaagtcctggggaaaggtggcggtgctgccaggctggattcttttgctcgacttggaattggctggtgggtcctggcagagccggtcaccctgagcctgaggagctggtttgaggggttggggcaaagccgtgggggcggaggggtgtgtggggctctggggtgtggtcaccaccttctttagaacttgggaactgcctggagacagacagagagacagaccgggagagctagtcctactccttatgggaacagtgtggctctctcccccaccattcccgaggccccaaagtttctctccccggagctgggctggcaccgtgctgtgcacgcttaggtttgaggaagggtgatggccgctggggaggatttagaatgtgctgcttgggcggtggcagtggcagggatggagggccttctgacttctcttcgtcccccatcgattcatccaggctggcatttccctgggctcaggccatccggtgggactcccaaggcttcctgagcacgagcaatttccagcgttcctgggtgtgcccgagggagtgtggggggcacgtgggtgggccacaagaggattccgaaggaatgaagccccttttcctccctgctggcctcagttcccaccagggctgtggctgagctgtcgctggcagtcttaggtaggtcactgatagcattgcaggtgtcgtcccactgtggctttaggtccttgtgaccaccatgtcacagcttgtctctgagtgagatgtgtgtcattgcctgtgagagagtatcccactggttgtgaatgaaggtcttccccttgtggcgtgcctggatgtgtcacctctgcctgcgttgtcatcgggcttggaggcagaggatggcagtggca

SEQ ID NO: 65607 - DNA, 1166 bp, Homo sapiens
gggaccgaaagaactccttaatactccttataaaacatggtgtgtaaaaacaaacaaaaaacaggccaggtgtggtggctcacgcttgtaatcccagcactttgggaggctgaggcaagcggatcatgaggtcaggagttcgagaccagcctggctagcatggtgaaactccgtctctactaaaaatacaaaaattagccaggcgtggtggcgcgtgcctataatcccagctacttgggaggctgaggcaggagaatcgtttgaacccaggaggcagaggttgcagtgagccaagatgagccaagatcgtgtcactgcactccagcctgggcgacagagctagactccatctcaaaacaaccaccaccaccaccaccacaacaacaaaacaacaaaaacacccaaaacatagtgtgtcgggggggtgctggcgggggagtagctgtgtaaattacctggtaggaaagataactccaattctctggaggcataggacctccaaggaattcaaaggacaaggtaaaggggtatcggagccgtttccgcctggactgagctttttgctgggattccatcttgccaaggtctctattgcttccaccaccaccacagttccccaaccccatattggacacacaataaatgtttgggtagctgcaagaaagacccacaagtagaggaattgctccctgggggctgagagccagaggaagttgtgacagcctgggatgcaggatgctatctattgtagaaaaggcaagggctttggagccagttatacctggagttcattcattcatttgaaacatgctcttgagtgattgctatgtgtcagtcagtgctctaggcatgaggggccagggtgcggtggctcacacctataatcccagcactttgggaggctgaggtgggaggattgctcaagcccaggagttcaagaccagcctgggcaacatagtgagaccctatctctaccaaaaaaaaaaaaaaaaattagctgagcatgatggtgtgtgtctgtagtcccagctacttgggagactaaggtgggaggatcacttgagcttgagaggttgaggctgcagtgagccatgaatgctccactgcactccatcctgggcgacagagtgagactgtctcaaaaaaaaacaagcaaaaaaccaaaa

SEQ ID NO: 65608 - DNA, 3750 bp, Homo sapiens
tgagctggaagtaacacaggtgtggggtggtgtctcataacttgaccacatgctggctttttatccccagctgagtccagattggcaggtggactacgagtcatacacatggcggaaactggatcctggcagcgaggagacccagacgctggttcgagagtacttttcctgggagggggccttccagcatgtgggcaaagccttcaatcagggcaagatcttcaagtgaacatctcttgccatcacctagctgcctgcacctgcccttcagggagatgggggtcattaaaggaaactgaacattgaaccctttcctgtcctgcctcctttgtgagtggtggcgtcttcaaggggagtagatatgttgaagcagggtactttctgtgttcgcagtacctcgatatgcaggagagaagacttcagaagaacagaaatagaggcctgtgttcacttgtgattttaattaccctgcctcctacggtgatgactgtcttctagctgggaaagagcggaagcagttggggcgggtagtgacatggggctttgtgactacctaattcttagggatcagattccaggcctttcccagtgaagggagagaatagctgctaataacaagagctaacgtgtataattcacagagcgcaaaggaactttacattatttcctgtaactgtcctgtgaggtaggtagctgacaatatgcaagggttgtagtttctttttctttttttttctttttttttttcagacaaggtctggctctgttgcccaggctggagtgtagtggtgcagtctcagctcaacctctgtctcccaggctcaagccatcctcccaccttagcctcctgagtagctgggactataggtgtgcaccaccacgcccggctaattttcgtggtgggtttttttttttttttttgtagaggtagggtttcgccacattgccgaggctgttctcaaactcctgacctccagcggtcgtcccgccttggtctcccaaagtggtgggattgcaggcatgcatcaccatgcctgccctagggctgtggttcaaatgcctcaaacctgcaggacaaggcacagactactcagaacagacactggcctggcccattggcccattcctggctgtgttatcagtctggtggtggtatccctgatttctaacgggaagcatagggatttacagatttcactaacttgactgtgatcacacattttaagtggtagaggcagagttttgaacccagtgggtgtcactttttttttttaatttaaaatttttttggtagaactgggtcaggaaaatgttttaaattttatttatttgagagctggggttcttgctatgttgctaaggctggagtgcagtggctggctgtacaaaggctcaatcgtgctatagtttttttttttctttgagacgggagtctcgctctgtcgcccaggatggagtacagtggtgcgatcttggctccactgcaagctccgcctcccgggttaacgccattttcctgcctcagcctcctgagtagctgggactacaggcacccgccaccgcgctaggctaattttttgtatttttagtagagacggggtttcaccgtggtctcgatctcctgacctcgtgatccgcccacctcggcctcccaaagcgctgggattacaggcgtgagccaccaatcgtgctacagttttgaagtcctggcctcaagtgatcctcccacctcagcccccttagtaggtgggattataggtgcatgccatcacgcctcacttgggtgtgacttttttttttttttttgagacagtttcactcttgttgcccaggctggagtgcaatggtgtgatctcggctcaccacaacctccacctcctgagttctggttcaagcagttctcctgcctcagcctcctgagtagctgggattacaggcacgtgcaccatgcccagctaatttttgtattttcagtagagacggggttttatcatgttggccaggctggtctcgaactcctgacctcatgatttgcccaccttggcctcccaaagtgtttggattacaggcgtgagccaccacgcccagtgggtgtcactttgaagcctgtgtccacaccctgctgcctcctagaaggtagagtagttgtaattgtcagctaatatcctgctcaggccaaaggttactattttttcccctttgagcttaatttttattaatatccttttcagattttcttgctcttctgtcttttccgaagatcatttaagatcttcctgtaaatttaacagctcaggtgaaactggaaacctctagattgagtcacattttgaggcatatgcagaaacggttgactgcctttggtccccagcttatgattttctgtgtggttttttcattctgtttcttagtccaggcacagaagagggctcttggcttggatggggaaaccaggtacatacaatgggctggtagttgggaggggatagggctgtcatctgcagctgagcactttgacctgcagttggagtgggcagaaaagagttgtggtttagaatccatatgggtggagatgggctgatgcttgctcagactgctccctggctgctcatcttgagctgggtccaaacttgataacctttcttctgagcctcctgagctcttgttagctaggatctgaaaatgctaggtgcagctggtgcattgacatgttcctgtagtcttggctacttgggtggggggatggctgaggccaggagttggaggccttagtagtgcttgccatgattgcaactgaaagtgctagatgcaggcttggggcgtgccttttagcttgttgctggggcctcactgaagctgtcagactcttcccaaattctgtttcaaatcacacctccttctgtggttgtgggaccttcaccaccttcctggtgtttgcttaccgtaacctcctgtggctgaagcctcaggcaggagggaccaagttggaagagtagtttaggttttagagggctgcttgaaaggctcaggagggaagcccaactgtgaagtgggtcgggggttctgggtgggccatgggcagcagcgggcctggcagcccacatggactaggtggtctgcgctggggcagagacccctacctcagccttcctctgcctgcaggaagagtgagtcatctgcacatcctgcctccagccctcgccacgcggtgcagagtaagggtggccaggttgttgtttgaagcagtgcttgcacttgggctagggccagtacccacaagcaggaggaggagcctcaagacgagagggttgtggccccaggaaggctgggccgttggcctctagatgggggtgggatgcaagggcttctctgctgtggtgggtaggggagaggttaacagtggaagtttctaacggcagatgtgaggcaggaaaggggaagcacatctggagttctttctgtcccccgccctgccccagggaggcctgagtcactgcagcaagggctcttgcccttcccatccccgctgggctctccatggcttgctggatccttccttttccttgcttttgctgtgggcagccaatcagagcctgcgcctgtggatgtctgtggttgctgggcagttttctcttggtgctagggagtctcatgccacccaaacaccacatagagctggcgacccgactccatggtccagcacatggcacagagactggggtgaggagcagaaagggaagggggtgtttg

SEQ ID NO: 65609 - DNA, 1090 bp, Homo sapiens
tagagataggttttcaccatgttggccaggatggtcttgatctcttgacctcgtgatccgcccgcctcggcctcccaaagtgttgggattacaggtgtgagccaccctgcctgtccttttttttccccccagacaggactcttcctctatcgcccaggctggagtgcagtggcgcgatctctgctcactgcaacctctgcctctcgggttcaagctattctcctgtctcagcctgccaccacgcccagctaatttttgtatttttagtagaaacggggtttcaccttgttggtcaggctgggcttgaactcctgacctgaggtgatccacctgccttggcctcccaaagtgctgggattacaggcgtgagccaccgcatctggccagtgtatatgtttataactggaaagaaagaaaacagagcaccaatcgtggagggagtgacctctgctatattgatgctggcattcttggctcagtatgccagattgcttttaagataacctgaacctaagggctttccagcatcggaaaaccttggaaaagactaaagcttgtttataggcagagatggactaaaggacatgggtgtaagatttggggtggaggccctttgagaatgttcactgcttacattcctgttacagcttgtgtaacctgaagaggcctgtatggtgggggggaagagacttgggtgagtcagtgacttagtgtggttcatggaaaacagcctggggagggcctgaacagggaaaaagaagtcctcactctgtctccacctgggggcagcagttagccatgcccttcctggggcaggtctcagagtcccactttgagttccaccctccacatgccttgcatacttatgcagaggagtgtcctaggcccctgttcaaaccccttgagcttacttccctcataaggtcatacacatctgccagcacaatgaccatttcctttatattagtaaattttaagtgaaagcacccttcacttctcttagcctggcaaccttcctccttattgattgacccctgtgctttcttcctcttagtacctttgtgttggatgaatttaagcgcaagtactc

SEQ ID NO: 65610 - DNA, 1045 bp, Homo sapiens
cgcctcctgggttgaagcaattctcctgcctcagcctcccgagtagctggggattgcaggtgcgtgccaccatgcctggctaatttttgtatttttagtagagatggggtttcaccatgttggtcaggctggtctcaaactcctgacctcaggcaatccgcctgccttggcctcccaaaatgctgggattacaggcgtgagccaccgcccctggctcccccaacatttttaatgtcataaaagtgatatcctaaaagaccaagactattaatgtccagattttaattctagttcttttaagacccagctaggtcaactgcagtggctcatactacttggcaggctgaggtgagagggtcacttgagtccagcaggttgaggctgcagtgagccatgatcgtgcccctgcacttgggtgactgagcaagaccctgtctcaaaacaaatagcttgaacagttcaggagggtgtgaaaaaattcccagccccagttttggtgtggttgaggttttaaggctcctcagatgaggtctcttatgcatttggaaaggaacctgggacctagggttaaaggacagatcctctgctttgctacagtgtaatcttggacaggtcattctacttggtctcatctgtaaagagaggggagggtcagggtaacagttgataactcatgggttataaggattgagtgaaattggaatactcatggcaatatttatgctatgaacaatagaaccaactaaacattcagtttaatattcaatgtttagtagatttatggcacaatcctgcattagaagattgtttggccattaaaatgtttgcaaagaattctgtttttgaggtagggtcttgctatgttgcttagtccggtgtccaactcctgatctcaggtggtccttctacctcagcctcttgagtagctgggactgctagtgcaaaaaattgttttgttttaggctgggcgcggtggctcacgcctgtgatcccagcactttgggaggctgaggcgggtggatcacgaggtcaggagattgaaacc

SEQ ID NO: 65611 - DNA, 1304 bp, Homo sapiens
attctcctgccttagcgtcccgagtagctgggactacagctgcccgccatcacgcccagctaatttttttatttttaggagagatgggggttcaccgtgttagccaggatggtctcgatctcctgacctcgtgatccgcccgcctcggagatcccagcagtttgggaggccgaggtgggcggatcacttgaggtcagagttcgagaacagcctggccaacagggcgaaaccccatctctactaaaagtacaaaaattagctgggtgtggtggcaggcacctgtagtcccagctactcagaaggctaaggcatgggaggctgaggcacgagaatcacttgaacccaggagatggaggctgcagtgagctgagatcacgccattgcaccccagcctgagcgatagagtgagactctgtctcaaaaaaaaaaaaaattgaaaaaaatgaagaaatgggaagtaatccagggaaggatgatgttgtatgaagctattgtctatagggtttgaaaagaaggtgagcactgggacttaggtagagcaaggactcttgctgtgaacagaactcttcagggcctttccactgactttgtttacacccttatgtcctggcaggttctagagccttctttccgccaggcctttcccaataccaaccgctggttcctcacctgcattaaccagccccagttccgggctgtcttgggcgaagtgaaactgtgtgagaagatggcccagtttgatggtgagtctgaggagactgggaggcatatggccaggatcagggtctggtttgctctgcatcaaccccttgatttcctgtcttgcttttgggttatggggacctgcagaatgtagggtgtcaatgtggtagctaatattatgtgcagtttcgtgtacactcataccctgactaatttgtattactatatagatttgcgatataaagtatttgttgctgagtgtgttgttgctggaggacacacagtgaactgatgagcagtctggggcctaagttccttacttgtcccattcgtcagtttcctctgttaccttgcttgctctgtgtggttttggaggggtgtggaaagaggcagaacattcgttcactttcctgccttcctctgcaccagctaaaaagtttgcagagacccaacctaaaaaggacacaccacggaaagagaagggttcacgggaagagaagcagaagccccaggctgagcggaaggaggagaaaaaggcggctgcccctgctcctgaggaggagatggatgaatgtgagcaggcgctggctgctgagcccaag

SEQ ID NO: 65612 - DNA, 4108 bp, Homo sapiens
cgctgtctacctccacgtctagactccgattggcccgctgcacctggggggcgggccagtcaagagctccaatgcgcaggcccgagctttttccgcgctggccagcaggccccacccacccagttctttttccaattcagcgccactggataccgaactgtcgtacgtatgtcttctgtttcgtcctcgctttccggctgctgtttctccacggctctcctctttccccctcccttctctcccgggcggcttactttgcggcagcgccgagaaccccaccccctttctttgcggaatcaccatggcggctggggtaagtttgctggctctggtggttcgggtcatcctatccaccgccatcctttgcccgagtggggccagtcggcgccagaggagttctgaggttgagtggggaactgattcgggggtctacagactgtactgctggagagtagggttcctagggcctggaggggaactgaggctggggctctcggaggccagaggtggaagggtctggggaagaggagaaaagagatgccgggtctgggccgtccgaagcctgagaaaggggttcggctctgttgccgctttgaggcgtggtatctgggcaggttgacgaacttctgtgtccgttttgtggagtaacacaggggacaggttgaagaggagggtctttgtaggcaggtccggctggcacggttaaaggtcgtctctcagggaggtttgggagcgagaggattctccggacagtgaagtcagaccaattggactccgctggccggcataatagagaagcccaacgccggggaactcgctgcgggacaggaccggagggatgatattcgcgacacggaaagaaaggctttttgagagagaggagttgatttaagaagacggcatgccatcccctatctctggctagtctgaggggaactagaaatctctcgatcgtcgtgcgtgccttagagacaggacgatgcttttgaagcggtgagcagctgagcagtagagtaggcaggcgctcggaaccatcaatgaatgaagcgagggctccgggaagggaggagagtatgtttgtaggcagatggagtctgatggagctagaagttctggatttcttggagatagatttgagaggaagagaatacttccagaggtgtccttagggaaggtcaaatctgtcaacaagctttatttagcagttggtgtgtagttctgttcttggtatttcggaggattctgattacatatgacaagtactaaaggacttggttcaccagaggaagtaaaagggtgagttgaatacattgggattattcaggaaagtcatcctggagagtggcattaaggactgggacccttctactcattaattttgtccctctctttctcccatagaccctgtacacgtatcctgaaaactggagggccttcaaggctctcatcgctgctcagtacagcggggctcaggtccgcgtgctctccgcaccaccccacttccattttggccaaaccaaccgcacccctgaatttctccgcaaatttcctgccggcaaggtgagttgggagatggggagcatccttcggttctgagaaaccaaggccctgcgattctgtcactctggtggtggcccccatctctaaaagggagcttcccatgttgttttattcaatttcggtgattttattttgagataaatacagatttacatgtagttgtgaaaaaaaatacagagctattctgtgactttataaaattcacgagtttactttgtgggaaagagaatgagttttgactaagcattttcagtgcaaatatatcagatatctgttatgagcagaattcttaccccaaggggtttatagagataggtgaagaaacatgctaagaatggaggagatgaagtgctgtgtgggtctgggtcacacactaatactttaactgatacagacattgatacaggagttgcttttggccttctgcttgtttgatccagagatttcatacaaatatcctgtaatattcaaatctattgggcttcctagttaacattgtgaattcagattgcaaaggaggccaagttcttgaagtatttatttatggttcttgagtatcaagagtttggatagtgagaatcatcagccttatataagtattttcaaagcagtttggctcctggtattggttaggaagaaattttgtgtgttttaccttatcttttcactgctttgtccccaggtcccagcatttgagggtgatgatggattctgtgtgtttgagagcaacgccattgcctactatggtaatttgcaggggtatatgggaatgggagaatttggaggtgagggtgtaggagaggataagtgtgagcgggggtggatatgaaggaattctccaggacctggactggtgttggcattcccccagagttctgaccttcgtgttctgcctctgcagtgagcaatgaggagctgcggggaagtactccagaggcagcagcccaggtggtgcagtgggtgagctttgctgattccgatatagtgcccccagccagtacctgggtgttccccaccttgggcatcatgcaccacaacaaacaggtgagccttggaactttgagagaagccaggggcaggggtggcatcagctcctgggtgttgggagtaagaaataaaataggttgaaaaaaagatgccaaggatatgtaggcaatgagaagacgtaatctctagggtacgagtttgaagcagtgggcagttgatggaggaagtgtctgtcatgagtgatcagaagagggattgctgctgtgaagagattataccaaatggtaagggggtggctggaccagaggacctctgaagttcattgtttgtaatacatttagaatgaccctaggatctgcctccattgaaagagagtgagggtgagctcagacttctaggtgaaaatagccctcttagttctattaatgggggaggtgagggaaagggattggtacccactgatgagttttatcatgttgaatcactaggccactgagaatgcaaaggaggaagtgaggcgaattctggggctgctggatgcttacttgaagacgaggacttttctggtgggcgaacgagtgacattggctgacatcacagttgtctgcaccctgttgtggctctataagcaggtgaagtttatggaaaatccatttggcagtgggtagatggggattagaaacaaagtgacgaggtatctaggttaccctgtattctgctgaggacttggaaaacagctagaggtgggtgcagtggctcatgcctgtaatccgagcacactggggggccgaggtaggcagatcacctgaggtcaggagtttgagaccagcctggccaacatggtaaaaccctgtctctactaaaaatacaaaaaattagccaggtgtggtggcgcacacctatagccccagctacttgggaggctgaggcacaagaatcacttgaatctgggaggtggaggttgcagtgagcagcgatcgccccactgcactccagcctgggtgagagtgagacttcgtgtcaaaacaaacaaaaaacagccaggaatcccaggactgagtaccatcacttgctttccattctcttaagaagctgggtaatgtcttgcctttagtttctgtttggcagctaagatgtttagtttgttgccatatttcctgggaagattggttattcttagttgtgaagacagaggtgatgatggtagcttcagcattaagatctttttggaggcaggccaggcactgtgtctaacacctataatcccagcactttgggaggcctaggcgggtggatcacttgaggtcaggagttcgagaccatcctggccagcatggcgaaaccctgtctctattaaaaatacgaaaattagccgggcgtggtggtaggagcctgtaatcccagctacttgggaggctgaggcaggagaatggcttgaacccaggaggtggaggtagcagtgagccaagatccagctactgtgctccagcctgggggacaagagcgagactccatctcaaaaaaaaaaaaaaagctctttaagctcttttggagacagata

SEQ ID NO: 65613 - DNA, 1010 bp, Homo sapiens
gagaatggatcaggacagacttggggctgagttggtctcaggacaaaggcagggattcagggagagaagggaggtcagaatgggcaccggggttgagaaaactgccagtgaggggattagaagcacctctgatctaaccggaattattgcttatttacccagggagtggcccccttctcagtaactacgccctgaccttgctggtgatctattttcttcagaccagggaccctcctgtgttgcccactgtgtcccagctcacccagaaagcaggtactcggcctagcctccaccctctccatcttgttagtttcctctctcttcttcatcacacttagatacaccaagcagctctgtgaatgagatctctctacccccaccctcaatctccttgcttccagactgactctcaccttatttactttcacaggagagggggaacaggtggaagtcgatggctgggactgcagtttccccagggatgcctcaagactggagcccagcataaatgtggagcccctcagtgagtttggggagcctggtagaggactagtaatgatgttcatcaacagtaggtaacatatatcacactaactgtgtgccaggcatggttctcacagaaagcctgtgagatacctaatattattactgccattttacagatgaagaaaccatgtttgggagcaattaagtgacttgcccaaggttacactggctagcaaggagcagcagcatctgggcaaggacatcatgtgggggcagggagagaggtttgacctcttgtttatagggatcagagaagcctagcttcctgggactctgctgagccccttggaagggaaaaagtcctgctaaggaaatggctctggtgcaggacctgtatcagttctggcctctaagtgacccccctttccccactcttcctcctcctccaggttccctgctagcccagttcttctcctgtgtatcttgttgggatcttcgtggctccctgctgtccctgcgggagg

SEQ ID NO: 65614 - DNA, 1082 bp, Homo sapiens
ttctagtgtaaaggtattctagtgtataaccacagtaccattatcaagttgaggaaatgttacattgacacagatgtaaacctttacagactttacagtccatactctaatttggtcagctgtcctgtcaatggactgttacagtttctctttcgtctgtaatagttcctctgtttttgtctttcacgacaatgacattttttgcagaggtagaccttttattttatagaattaaaaggttatctttaaaaaaaaaaagggttcctgtgaagattaaatgagttaatatgtataaagaccttagaatagagctgaataagctggaagtaatattatcttgagagatccctgcttagggaacagcagaaacatttcactcagttcatttctgtccacagccagtcccaaaggctccagaatctccatcgctggactcggccctggcttccccactggaccctcaagccctggcctgcaccccagcttcccctccagattcacaacctcctgcttctccccaggattctgaagccctggactttgaaaccccttcctcctccctggcgccccaaactccggactctgccttggcctccgagacccttgcttctccccagtctctgcctccagcttcaccactgctagaggacagggaagagggggacctggggaaggcctcggaactagcagagaccccaaaggaggagaaagcagagggggcagcaatgctggagctggtgggatccattctccggggctgtgtccctggggtgtatcgagtccaaactgtgccctctgcccggcgccctgtggtcaagttctgtcatcggccttcaggtctccacggtgatgtctccctcagtaaccggtacctttcttttttttgagacgacatttcactcgttgcccaggctggagtacagtggtgccatcttggctctctgcaacctctgcctcccaggttgaagtgattctcctgcctcagcctcccaagtagctgggattacaggcatgcgccaccacgcctggctaattttgtatttttagtagagacggggtttctccatgttggtcaggctggt

SEQ ID NO: 65615 - DNA, 1075 bp, Homo sapiens
gagatggaagtaacaaaggggaactgcgtgggaagaaaaggtgcgaaagttttctgtttttttccagtggcccaggcacccctgaaaccaaaaacacctcggggtaccaagacaccgatcaacagaaaccagctgtcccagaaccggggactggggggcattatggtgaaacgggcctatgagactgtgagttgacagaaaggggtgggccagattgagttgggtgggcttttgtctctcataggagtctgagagggtcccttccctcattgtgccatcctaccccttttccagatggcaggggcaggggttcctttctctgccaatggaaggcctctggcttcagggattcgttcaagctcacagccagcagccaagcgtcagaaactaaacccagctgatgcccccaatcctgtggtgtttgtggccacaaaggataccaggtaaggcgtctaccatgggaggggctgagagggacagtccaggctggtgagtgtggggagtaggagtatcagagcaagagctccaggaaagttgtggatgcagggtggggatgccagaaaagaatgggccagaaggcataattgcagtgtggggcttcacctggaggtcttaatgttctctaagccttttctgtttcccacttgctctttctggccagggccctacggaaggctctgacccatctggaaatgcggcgagctgctcgccgacccaacttgcccctgaaggtgaagccaacgctgattgcagtgcggccccctgtccctctacctgcaccctcacatcctgccagcaccaatgagcctattgtcctggaggactgagcacctgtggggaagggaggtgggctgagaggtagagggtggatgcccagggcacccaaacctcccttccctttcgtgtcgaagggagtgaggagtgaattaaggaagagagcaagtgagtgtgtgtccctggaggggttgggcgccctctggtgttaccacctcgagacttgtctcatgcctccatgcttgccgatggaggacagactgcaggaacttggcccatgtgggaacctagcctgttttgg

SEQ ID NO: 65616 - DNA, 1034 bp, Homo sapiens
gagtcttgctctgtcgcccaggctggagtgcagtggcgcaatctcagctcactgcaagctccgcctcccgggttcacaccactctcctgcctcagcctcccgaatagctgggactacaggcacccgccaccacgcctggctaattttttgtatttttagtagagacggggtttcaccgttttagccaggatgatctcgatctcctgacctcgtgatctgcccgcctccgcttcccaaagtgctgggattatgggtgtgagccaccgcgcccggccgggagtgggagtgttttaaggagcaggaagggagtggtgccaaaagtttcaggtcctcagttgctctccatcttccccatagtttcacgccatggataccttgcaaaggaacggctacgacctggctaaggccatgtcgaccctggtaccccagggaggcccggtgctgtgtcgggatgagatggaggaatggtcagcctcagaggccatgctatttgaggaggccctagagaagtatgggaaggacttcaatgatattcgccaggattttgtaagtggatggcactaggaggagaagtgggagagatgacaggtgagggaaccaggacctggggccagatgccagctcattcttcctccctctgccccccttagctaccctggaagtcacttgccagcatagtccagttttattacatgtggaaaaccacagaccggtatattcagcaggtattatctgggctggggagggtggaccataggctacctgctgacctctgcctttgaagttgatgacattctccctgctatgaggctctgatccttctctttctttttaccttcttacagaaaaggttgaaagctgctgaagcagacagcaaactgaaacaggtctacattcccacctagtaagtgtggtgggtaggggagaccagagtgttttccttcccttcccctaacttgtgccttcctcagtgattgggggtgggcaggaggtaggggcacactgagagtggaaattgattcttttccttgacc

SEQ ID NO: 65617 - DNA, 3112 bp, Homo sapiens
gagaggttagcaggaactttactattctgtctcttgggggcaaaggaaagggatttggaagtctatccttgaatgtaagtctttactcatattttcttgggctttttaatttaggtccctctgaaacttactgttatttgtctctttgtgcatttctgttcccagatgatcaatttccactgctacgttgttttgtttttgtttttttcctccccttagactgcaaatggaaatgtggaggcaaaggttgtctgtcttttccggcgcagggacatttctagtagcctcaacagcctggctgatagtaatgccagtgagtatcttcctccctttctttttctcctacccatgatctgaggcctgggcatgtccctgcaggtatttcccctggtagcatgcccaaggcagaggtgtgagtttgggggtgggaaatgcctggcctgaggagggaggcctgtttttacatgttggggttggaagcagggtggagagattgtgataaggaaagcgataatatggtttgtatatgagagtaagagagagatgataacatttagagtatgaggacgagctttagagaaacaatggttttctaaaggggggcagtttggggtacattgagacagtaggtgatgactgaaggtcaacgtgaagaggaagacattgtactgagaagcctgcgtaacagagaagcaggcttattttgtaatcacaaggtgatgagagtacctggaagttagaagatggctggaagttttcttgcgctttttaatttctcacctcgcccatttccccgcccgcccccctccattttacatctttcccttttcattttgccctatcttcattctctttaaggtctcatcttctttttttaaaaaacatattttccttagcttctttttcctttcctgctttggttttctttttccttccttttgttccacctttctaaattattttcctttttcagactgctctgggtgagaaggggttaaagaggagcccagcttaccaagttccttggccctttagggtttccagccccatctggcaggggctgaccttggccttgtccaatcagaaggggtgttgggggtgtggtcccccttgcctcagcacagggtttccggagcacacaagcgaggggtggagcctactgcacaaccccccccttctccctgaggttgggaacaatacaccaatgagcctggggctgaggttcttctgctccctcccactttggttggcgcctagccaggttaaccccttccgctaggtttcagggcaagctgcagctccttggggaggaaggtgttggcactggcttgagaggtgttgtccttggaaaccccaggaactattattagccaagtagaaaatgagggatagttagggctgcatgtgatgttttagagcaaagagtctcctgaaattgaaaagaactggtaaacacagtcttgtgtgatattttttcatcttgagttcctggacctcaggctggtttagcaagcaagagacaagtgtgatgttcttgctggcccgttgtggactttggtgtctgagtactggcagctgggtagcgatgtatttctagagcattcttcgtactctcagcagttcttctctaaaagcattactgatagagttgggagcatctatgatggggcatagagctaagaaggaaagctggtgggataagggtatagaaggcagacgcctgggaaatgtgagaaaaaaacagccaagataggaaatattttccctgagttagagtttccagggtggtgttttgctggatccatttctgacttggtttcttcctctttaatctcccaggggagtttgaagaggaatcaaagcagccaggggtgtctgagcagcagcgccatcaactgaagcaccgggaactttttctttctcggcaatttgaatcattaccagccacccacatacggtacaggacaactggggccagcatagcctgcgtgcacttacgtagaagatggagagaaggaggtggtattgagagatgctgtggggagggagagtggggctcaccggggttttccaatctctctcctatagggggaaatgcagtgtgaccctcttgaatgagacagatatcttgagccagtacctggaaaaggaggtgagaaagagatgttgagagaagagcgaggggaatgggtattgcccgcaaaagagagggggaaaggagcacaatgatgaggtacagggttgccagactgccggtcatggaaactcagatacacctccctccccgccgcctatgtggattgctgccttgcttaccttgtctctccccaattccaggactgctttttttactcactggtgtttgaccccgtgcagaagacacttctcgctgatcagggcgagattagagttggttgcaaataccaagctgagatcccagatcgcctagtagagggtaagcaacaggacaagactgtacggctaccaggttgtctaattccaaggggcactttaacattatagtctctgtgaatggcgtcacctggggttgtgcagtgcactgtctgcagggctctctgccatgaccctgacagaatgggcctgtaggaacctgaaaagggaaaatgggaacagttgggaagagaagtcggagagttgatagaatccaagcagaagaagagaaggaggaggtgctattgtgaatgaaaagacaccaactgttcccccctgccctctccctgttgatgccattgttcttttccccaggagaatctgataatcggaaccagcagaagatggagatgaaggtctgggacccagacaaccctctcacagaccggcagatcgaccagtttcttgtggtggcccggtgaggggtgggtggatagggaagatgggctgggggaggtgtggacattgttctgagtcccatggttcttagagatggactttatttctttcattgccatggatgttttccttctttctcctttggcttaatttcccagcccacttgggcttttgacttttctttcgcttttgacttctcaatttctcccttagagctgtgggaacctttgcaagagccctagattgtagcagctccattcgg

SEQ ID NO: 65618 - DNA, 1064 bp, Homo sapiens
gggcccgggttggtggccctccaggaggctgaggtgagggctgggctggggtcaagggagtgagggagaagagcaatagtcagtgggctcttgacattctgctaccactctgcagattcccgagcacttcggggccgtgcgagccattgctgaagggcttggctctgagctgctggtgggaaccacgaagaatgcattgctgaggggagacctggcccagggcttctcccctgtaatccaggttgggggttaagggctcaggggaggaagggacaaaggggtgtgagagaggggcaggagtgacagtcatgctgtgctgcagggccacactgatgagctctgggggctctgcacacacccctcccagaaccgcttcctcacctgcggccacgaccggcagctctgcctgtgggatggggagagccatgcactggcctggagcatcgacctcaaggtagagccctgtgcccctggatcccccatgccacacccaccaggacacctgtggccaccacgccttccccagcaccttgccttctgcctcccagaggtggccagtttgtactggtatggctgcactggctactcaaatattaatttttctgtactgactggtaaaagctgatgcttctagtaccacctgggcactccctgccgcccccagaacccctcagacttcctcttgatccagcacctaaatggttaatctccagcacagctattggcatcagttctgtggttaaatattttggtatcactccctgttcaggctccagtgatacccgggtatcccttccctctcttcccatcttctccttgggagtaagtggctttgaagttaggaggacaaggggttcactctggttccctcactagaaagacatcatcttgaattcaccttctcccctctcccaggagactggtctctgtgctgacttccacccgagtggggcagttgtggccgtaggactgaacacggggaggtgagagagagccaggactcccaggagggaaagcagggaggactgggaagggttcctggtactgggggagtgggcgagagt

SEQ ID NO: 65619 - DNA, 2017 bp, Homo sapiens
tccggcgcctgtttgtgctgcggcgctgtggcaccggacggccctgccaccccacccccgggagccgagagcggccccgggagagtccgagggcccgggggggtctggagactgcggccccgggcccacagcgccccctccaggccccttccccgcgcccgacagcgccccctcggggtggtggtacggcgcccttcgcgcgcgccccggggtgcttccccttcccctctccccggccgtggcccccgcggcttagacgcctcctccgccgccgccgctcggagcaacccgggggccggatggacggggccgcggggcccggtgagtacggggcggggcgggcggcgtgccccttcccggagcgcccggctcgtcgggttatgccagagctggacggctgtctggaggcgtccccgcgtgctcctccgccccaggggctccgagcatcctccacagttcctccggtcgccctccctagttgcttgggtcttgctgtcacttcgggcttccccagcgtcattctacgccccacgtaactccgggcccctcgatgtttccctgccccctgcgttactccgggcctcttctcgtggtatttcaggtctttttccttctgatccccactgccccctgagaccttcactgtgactctgctcaccactcacactctctcctgtcactctggatctcttttcttgtactctgggtcctcagtatgactccattcccgcaccccgttctctctcctggtgttcccccggctcagttactcagctttcgctggagacctgagcttgctgggggcgcgtggggagggctgcggtccctgccctcaccagtgcggcgcctctctctgtggctcccacgttcctcggcagtactccatatttcccccccggtactccatggtactcccagtctttgcggaggctgagacggcagcaggaagggagctttgccaggtttctcgcctgccctgccagaaggaggcccttgatcctttaccaccgtctcctcccctctggacgagcattcaagcctggggctgcctgaaaggggcagtcctaccggacacatgtaaagttgtggggagacagaatcccctctacgctttcttcaggtgatgggtacattctgagtacctcttgcccttttcccaggtgacggccctgctcgggaggccctccagtctctgagccagcggcttcgggtgcaggagcaggagatggaactggtaaaggcagccctggcagaagcccttcgcctgctgcggctgcaggtgcccccttcctccctgcagggctctggcacaccagctcctccgggggacaggtatgcatgtcatcacaccccatttttcctcctccttggggcctctggggcttcaggttaattcaacatctctccagcagtcttgcagcccccccaggactgccacccacgtgcaccccttccttggtgagccgaggcacccagacggagacagaggtggagctcaagtcatcccctggaccccctggcctgagcaatggacccccagcccctcagggggccagcgaagagcctagcgggacccaatctgaaggagggggcagcagcagcagtggtgctggctcccctggccccccggggatcctcaggcccttgcagcccccacagcgtgctgacacgtaggtgtcctgtggccctgtggcggaagctgggaggggtggtaggattgcagagtacagttggagggaatgaccttcactatgcccccaccaggccgcgaagaaattcttcctcctcctcatccccctcagagcggcctcggcagaagctctccaggaaggcaatctcctccgccaacctgttagtgcggtccgggagcacagagaggtgggtgaggcttcccctcaacccaccccgccccaggcgcaggctctcgactttccatatccctcacctcacatccctggttggggtggggggacctgattgcccaacaggaataaagaaacaaacacttctggggcgc

SEQ ID NO: 65620 - DNA, 1024 bp, Homo sapiens
tcatgtggtgggccttagatttcattcgtgtaataagtattgagcaacagctattgggtggcgtgactgactggatggatgaataaggtgaagatctgggcgccaggactggctttctcaggcaattccgtgatgagggggcgggtctcgaggtaggtaccacgtgcacctactcgagattctgcacctacccggggttttgactgccggccacgcgagtttggcacgccggatgtgacgtcaccacccggtggttcccggaacctggcggtgggaccggaaatcaagtctacaaggcgggggggtgcacagatgaccggaagcgtgccctggcggcgctgccagccccagctgggagctggtaggggagtgcgaggaaggcgggacgcagggcggagccgctgcaggggcggggcctgcggacaggagccggggtttggggcgggaacccctcgtcccctgcagaccccgcctgctcgggcgcgggcggcggcgcggccatgaagctgaagctgaagaacgtgtttctcgcctacttcctggtgtcgatcgccggcctcctctacgcgctggtacagctcggtgagcggggcggggcgggggtgcggcgggctggcccgagggcgcccgccgccgtgcatcccgccctggggatgaacccccggcaaacaccattcatccgctcggccctccggacagctctgcggcctcaggcgcactgccctctatagaacgcaccgcggctacccgccgcacctcggatgaaatccagactccttcccagagcctgcaaggccccgcatgatcctgctgccgtccgcctctcccaaccccatttccacccctctccctcgctctgctgcagccagactggcttgctgacagtttctcgaaaaccccacgctcattactctctcaagcacttaacttgttccctctgcttggggtgctttgcttccagcgtttcccgggctgcctctttctcatccttcaggtcttagctcaaatgtcacctcctcagaga

SEQ ID NO: 65621 - DNA, 3279 bp, Homo sapiens
aatttttgtatttttagtagagacggggtttcaccatgttgttcaggctgatctcgaactcctgacctcaggtgatcttcccgcctcggcctcccaaagtgttgggattacaggtgtgagccaccacacccggcctatgctgttcttttcttattgccagttcctggaggagcatttctgacttgtgccaaaattgaaaagttttcctttattgtctttcttccttcctaggcccctgtgggtgcagtaccctcaggatgtgactaccttcaatatagatgatcagtacttgcttggtgagaaatgaggatagttggtggtgggttggctttgggccaagcagcactgcggatgcccagggagggactagtgaagctggtggtgcagagggcaggcactttggtgttccctgttctgggaactaatccccctattcagagttgattctggcatattttaggggatgcgttgctggttcaccctgtatcagactctggagcccatggtgtccaggtctatctgcctggccaaggggaggtgagttaaggaagggcatggtggggaaagatggtggaagccaaaggaggcaaacaggacgggacccctgtgcactgagtgatccggtatcttacctcttttgtcactcacaggtgtggtatgacattcaaagctaccagaagcatcatggtccccagaccctgtacctgcctgtaactctaagcagtgtgagtaagcctggtctggctgccggttccatctccctgtaaatttccagaaggggagggaatgtgtgccttagggtccagtacctatgtgggcatacatgagtaagcaaaacatgctgtggggcccaaggttggacaagggggcaacttcatcctggcattgctcttgccctagatccctgtgttccagcgtggagggacaatcgtgcctcgatggatgcgagtgcggcggtcttcagaatgtatgaaggatgaccccatcactctctttgttgcacttagccctcaggtaagtgcataggcagcgagtctcctcagccatttgcctgccttcctaggactcagttctctggggttgtgcccctcactccctcttgggctcaggcgctcacctatcccacttcttgctcagggtacagctcaaggagagctctttctggatgatgggcacacgttcaactatcagactcgccaagagttcctgctgcgtcgattctcattctctggcaacacccttgtctccaggtaatgggtcacccactcttccttggctgcctttgctggggcctgatccttgtgggggctcccagttcactgtgctcttttctcacattctgaccttgctttgggtctcctccttccttctgttctgttatttttccccctgatggacatctgcttttaccatctccagctcagcagaccctgaaggacactttgagacaccaatctggattgagcgggtggtgataataggggctggaaagccagcagctgtggtactccagacaaaaggtgagtgaccaatctggcccctaggatgggggaaggaggggaagccggggcaggtttagggatgcccttgcctgtaggaacgttgttgttatgctatagcccattggtatgactatggcactcttttattcctcctccaggatctccagaaagccgcctgtccttccagcatgaccctgagacctctgtgttggtcctgcgcaagcctggcatcaatgtggcatctgattggagtattcacctgcgataacccaagggatgttctgggttagggggagggaaggggagcattagtgctgagagatattctttcttctgccttggagttcggccctccccagacttcacttatgctagtctaagacccagattctgccaacatttgggcaggatgagagggctgaccctgggctccaaattcctcttgtgatctcctcacctctcccactccattgataccaactctttcccttcattcccccaacatcctgttgctctaactggagcacattcacttacgaacaccaggaaaccacagggcccttgtcgccccttctctttcccttatttaggagccctgaactcccccagagtctatccattcatgcctcttgtatgttgatgccacttcttggaagaagatgagggcaatgagttagggctccttttccccttccctcccaccagattgctctcccacctttcatttcttcctccaggctttactcccctttttatgccccaccgatacactgggaccaccccttaccccggacaggatgaatggatcaaaggagtgaggttgctaaagaacatccttttccctctcattctacccttttcctctccccgattccttgtagagctgctgcaattcttagaggggcagttctacctcctctgtccctcggcagaaagacgtttccacacctcttaggggatgcgcattaaacttcttttgcccccttcttgtcccctttgaggggcacttaagatggagaaatcagttgtggtttcagtgaatcatggtcacctgtatttattgctaggagaagcctgagggtggggggagatgatcatgtgtgctcggggttggctggaagccctgggtggggggttgggggaggactaatggggagtcggggaatatttgtgggtattttttttacttcctcttggttcccagctgtgacacgttttgatcaaaggagaaacaataaagggataaaccataaataactggtggtagtctggattctagttctagcctgagccacagaccctagaagcctagagaccttacatttgctttcctttttttttcttttttgagactgagtctcactctgttgcccaggctggaatgcaatggcatgatctgggctcattgcaacctctgcctcccaggttcaagcagttctcgtgcctcaacctcccgagtcgctgggactacaggcatgcgccaccatgcccagctaatttttgtatttttattagagatggggtttcaccatgttggccaggctggtctggaactcctgacctcaggtgatccgcctgcctcggcctcccaaagtgctggaattaaaggagtgagccactgcgccctgggtctttttttttttttttttttttttgagacagagtgtcgccaggctggagtacagtgtgtgatcctggctcgttgcaacctctgcctcctgggttcaggcagttctcccacctcagcctccttaatagctgggattacgggcacctg

SEQ ID NO: 65622 - DNA, 1877 bp, Homo sapiens
cttggggttggaaaatgggagggcaggaggtgtctgacccctttgtggtcacctatacagaccctgtttgggaagatgatggactacctgcagggctctggggagaccccacagacagatgttcgctggatgtcagagactggcatcattgacgtcttcctgctgctggggccctccatctctgatgttttccggcaatatgctagtctcacaggtacatggttttccctgcctcattcttctgctcttttcttgtcgggtgattctatgtgttttcagagatcctgtgccccagcttgttttctaggtttatacccctcagcctgcctctagttcacaagcctccctcagtttctgggtgttgggcctgatcctcgttgtgacccccatccctcatgaacctgcaggaacccaggcgttgcccccactcttctccctcggctaccaccagagccgttggaactaccgggacgaggctgatgtgctggaagtggatcagggctttgatgatcacaacctgccctgtgatgtcatctggctagacattgaacatgctgatggcaagcggtatttcacctgggaccccagtcgcttccctcagccccgcaccatgcttgagcgcttggcttctaagaggcggaaggtaaggggttgcagtcacgcttggtcttctcagggtagggctgaagcatagtttagccttaaagagacctgaacacccctgttccttgcccccagctggtggccatcgtagacccccacatcaaggtggactccggctaccgagttcacgaggagctgcggaacctggggctgtatgttaaaacccgggatggctctgactatgagggctggtgctggccaggtaagcagacccagaattgagggagagttgattggccagcggggtagaatggtggctcttttgccccttaggggattgagagccacccttaacttctcccaggctcagctggttaccctgacttcactaatcccacgatgagggcctggtgggctaacatgttcagctatgacaattatgaggtagggaaggcctctccccatgacctgcgtctgtctgttccacctgcctccctgaatctctctcggcttgccaacccttctatggttgattgcctgcaacatatcagggggccttgatgatccggggagggccctgaaaaatgcatctttttagattcctaggagctctcttctctgacactgtttgtcttcttcctcccctctgtccttctgtccccattttctgcccacgttcccagggctcagctcccaacctctttgtctggaatgacatgaacgaaccatctgtgttcaatggtcctgaggtcaccatgctcaaggatgcccagcattatgggggctgggagcaccgggatgtgcataacatctatggcctttatgtggtaagggcctgagagaggagagttggtggaaagagggaaaacagcccagagactgagggcctagggaacttgcaccagatgacagctggcttttgctcctcactacccgtctcttctctcctcacccagcacatggcgactgctgatgggctgagacagcgctctgggggcatggaacgcccctttgtcctggccagggccttcttcgctggctcccagcgctttggtaaggtttagagaatggagctgtggcagaagggtgtgaaggccagatctcaggagccatggacctggacctgcctctctgaggaatgggagccacacactgcatctgtttcctctcagctatgcgctttgaaggaagtcagggtgtgggaggtccactccttgttcaaatgttcttgtgaactgcatcttcagcagggttctggggacccagagcggatg

SEQ ID NO: 65623 - DNA, 1380 bp, Homo sapiens
ccctccttccactagcccctcgtccctgccccctctggattggagcagacagctctcctaccttccaggcaaggatcaaaagacccagctgagggcgatggggcccagcctgaggaaacacccagggatggcgacaaggcaagttggagcgggtgggtggttggaggatagggctggctgggagggtggaggggagaggcccatgagaaacttgaacttagtctccccatcagggatgggatttagttgatgggagcggggaaagagagaactggtatgattggagagtggtcctcttttcttcttaacagccagaggagactcaggggaaggcagagaaagatgagccaggagcctgggaggagacattcaaaactcactctgacagcaagccgtatggtgaggggctcgggttccttgggctggggtgcagggctcctttccaagcagaagctctgaagcttgtttgtttttcttccaggccccatgtctgtgggtttggacttctctctgccaggcatggagcatgtctatgggatccctgagcatgcagacaacctgaggctgaaggtcactgagtgagtcctatggtgacatcaggaagatggaggtgggcaggaaggagtcaggcctttagggagatgggtgtgcatattggatactctaggcaagcatgggtcatttcttgtgtccagaatcacctttggtgatagaaaattttttgagaaaggacaagaggagcctttgcttatctctcacctgtgtctgtggagtggtgttagcatataacgcagcctggggccagttagcagcccaagtctgtctgtttgcctgcaggggtggggagccatatcgcctctacaatttggatgtgttccagtatgagctgtacaacccaatggccttgtatgggtctgtgcctgtgctcctggcacacaaccctcatcgcgacttgggcatcttctggctcaatgctgcagagacctgggttgatatatcttccaacactgccgggaaggtgagagcacaggcacggggaaaaaggagggagtgaagcttccaggccttgaggcaaataggtatactaggggcattagctatttggggactgggtttaagaaggggctgtgggcctggtgggcagcatttgagttccctaatcactcccaggtgacacgctcactcacattcttagggaaggcattgcctattctgggctgacggaatgcacttattatcagtgtgttacgtgctaggtactcttctgggtgctggggatatagtgttaactgaggttgaaaaggttctgggctgggtgtggtggctcatgcctgtaatcccagcactttgggaggctgaggtgggcggatcacctgaggt

SEQ ID NO: 65624 - DNA, 1839 bp, Homo sapiens
cacgcctgtaatcccagcactttgcgaggccgaggtgggtggatcacctgaggtcaggagtttgagaccagcctcaacatgaagaaaccccatctctactaaaaatacaaaattagccaggtgtggtggtgcatgcctgtaatcccagctatttggaggctgaggcaggagaattgcttgaacctgggagacggaggttgcggtgagccgagattgcgccattgcactccagcctgggcaacaagagtgaaactccgtctcaaaaaaaaaaaagaaaaaagtaataaatatgcttgggtctgtttctgggccctttggttctgtttattaacttgtctatccctgctctgttaccacactgcctatttctcttaacaggtagatttcccccggtcttctaaagtgtcattactcctcttggccctttgtacttccttatatttcttttgatatgtttcccaggctttctgtctctggtcgtgatgagaacagtgtggagttaaccatggctgagggaccctacaagatcatcttgacagcacggccattccgccttgacctactagaggaccgaagtcttttgcttagtgtcaatgcccgaggactcttggagtttgagcatcagagggcccctagggtctcgtgagtacaggggttgggactgcagggaacctagtgtgaaagagcataggggtgttgtgaggtctggcacggggaggagacggtggtgggacagccaggtagggcctgggggctgggagaagctctctgtcagggagggtaggaaccagacccgggtgcggttttttccatttcctgtacagaccaggaggcagtcacttttgtccctgagctgtaccctgggcatctctgggaggcctgcctgggtctgtgtctccttcttccccttctcacatcatcacatttcccagatttattttcttcgtttttatttatttattttttttggtttctttttccccccatctctggaagtttgtcgactgaaactcacttttatgtttctgtttttgtgttggttttgtgcctctttttccccttccctacccatctcctcctgccccagtttctcggataaggttaatctcacgcttggtagcatatgggataagatcaagaaccttttctctaggtaaatccatggccaccggtactgtatctgttcctctgcccttacccattcctcactctagcctttggggggaggtgccccagacccttccagcctttcactcaccccactttcccctgctgtgtgatgtctggtcctgttacctgttaccctggctgggagcccccagaagaaggaaggtgagatactgaaagtcaggtccttcgggaatgtagggagcttattgctttgccaggggatggagagatgctgcctattgctggggttcctgactctcagctgaggggcacctgaggttctgggcagagctacttgcccttgaaagcattttttggcagaatctcttgaagtccctatgtatgtctgtagaggcttggtatagtatgacccacatgcctttgcaaagccattgtgtcaggccaggaggctgaggcccagggagagcacttggggccagaatctctcagtagaggcaacagagccaggattggcattcataacccaggcccctgaatcattctgcctttctcttctgggatgttgacagaggctggtgttcaggcctgtgcctcctggtggcacttattcctcattttcctttctcatttctctccccatcctttgcaaacttatctgctcattgtgggttccctctccaagctttaacatttagtcccttcctccaa

SEQ ID NO: 65625 - DNA, 1871 bp, Homo sapiens
gagtgcagtggcacgatcttggctcactgtaagctccgcctcctgggttcacgccattctcctgcctcagcctcccgagtagctgggacttcaggtggccgccaccacgcccagctaattttttttgtatttttagtagagacagggtttcaccgtgttagccaggatggtcttgatctcctgacctcgtgatccgcccgccgcagcctcccaaagtgctgggattacaggagtgagccaccacgcccagcctactctgcctttcaaagggaaggtgtgagtgagccaacttctcaggcctgatccttaaccctgtgtccactctgccttgttttgtatttgatgtgactacatctttctcccctctttcctcaactatcttctagtgctatgacaggaagaagcttttccttttgaagggggccccttctgacctccatgctgattgctctgtctttgtccttttctccttaggtcttgggcgtctttggtactggcttttttaggggtctgcctggggattacccttgctgtggatagaagcaactttaagacctgtgaagagagttctttctgcaagtatgatatttctgggggagagggatggaatgtagggttgtagggtaatgtgggagatatctgtggcagatggagtgcctaaggacactgcaggtgatagactgacttagggacattgcaggtggcctttaccttacttcccaacccttcacttggcaggcgacagagaagcatacggccaggcctctctccataccgagccttgctggactctctacagcttggtcctgattccctcacggtccatctgatccatgaggtcaccaaggtcaggagagacaaggaagagtctggtgggggtggggcaatggctgtggggtaatttggaaagggggaaattgtggccaacatcttgtcccagcctaatctttggacttttactttatgaagaaatgtgatcttggcctttaggcaaagggctcaaaggaagaaaccccttaggagagaatgggttcaaagagcattccatggtgtatcccatttcctttctccagatccaaacctctgtccccgcaggtgttgctggtgctagagcttcaggggcttcaaaagaacatgactcggttcaggattgatgagctggagcctcggcgaccccgataccgtgtaccagatgttttggtggctgatccaccaatagcccggtaaatttttcctgagaaacatccatttctgtggcccctttctccttcctgatgaacctttttttggttgctgatattctttcccaaaataaggtagtagttaactagcatagcaccttgccatactcctcaacctttccccacctcttcttctgtttcacttttctctttatccctttatcctcattcattcattcagcaaacaattattgctttttcctccctgacaggcctgggctggatgctggttatataagcagaaataaacaaggccctgtttatttacagatctcgttctccaggaatacaatgtctacctgcttgcttgtttgcttgcttccttccttccttccttccttccttccttccttccttccttccttccttccttccttccttcctcctttccttttccttagatattcagaataggattactcagattcttgtgtcatgatactctgtcaccagtgttccatgcatccatccatgactttctcttaaatacataattcagaaaataacatagtggccgggcatggtggctcaacgcctgtaatcccagcactttgggaggtcgaggtgggcagatcacgaggtcaggagttggagaccagcttggccaacatggtgaaaccccatctctac

SEQ ID NO: 65626 - DNA, 1033 bp, Homo sapiens
ccaacaggtcatatctgaaagatgctttaggaatcctatctccattggcatctttccgaaccaattttacagactgtgcaaatagggccccagagggtatttaactcactgtacgtcttttttttttttttttgagagacagagtctcgctctgttgcccaggctggagtgcagtggcgagatctcggctcactgcaagctccgcctcctgggttcacgccattctcctgcctcagcctcccgagtagctgggactacaggcacccgccaccacgcctggctatttttttgtatttttagtagagacggggtttcactatgttggtgaggatgatctcgatctcttgacctcgtgatccacccgcctcggcctcccaaagtgctgggattacaggcgtgagccaccgcgcccggcctcaactcactgtacttctatttactgctgcttttggcaggtggacgtgggtcagtggccaagagtgcctgttgcagtcactcaggtcactcactgcaggacctgtgccgcatgccttgctatggagttttgtggtagcatttattctgcttggcctattaaaccacagtgcctagtgttttcttcatttttctgtctggcctgctgtggaacagttgtttcgtacattcctctggagctggaggagagtcctgtgatgagatcatagtacactctgtgatctcatttctggtaattttcttttagctttcaagcagatgctgaagctaatgctagataactagatacaatgtgtataatagaccctgtctttagttaccttattataggttgtcaaattttatttatttatttatttgtttgtttacttattgaaacagggtctcgctctgttgcctaggatggagtgcaggggtgcaatctcggcttactccagcttccacctcccgagttcaagcgattctcctgcctcatcctcccgagtcctgggattacagacgtgtgccaccgtgcccagctaatttttgtatttttagtagacaccccattgaccagtct

SEQ ID NO: 65627 - DNA, 1904 bp, Homo sapiens
tgtagggccacgcgtacattaatggacatctatgtgcagtgcctctcggctctcattggtagctgcccagatgcgtgtgtggatgccttgctggatacctctgttcagcattctccacactttgactgggttgtggcacatattggctcctcttttcctggcaccatcatttcccgggttctctcctgtggccttaaggacttttgtgtccatggtggggctggaggtggagctggcagtagtggtggaagctcttctcagaccccctctacagaccccttccctggatctcctgccattcctgcggagaaacgggtgcccaagattgcctcagttgtaggcatcctaggtcacctggcctcccgccacggagatagcatccgacgggagctcctgcgaatgttccatgatagcctggcagggggatctggaggccgcagtggggacccctcccttcaggccacggttccgttcctactgcagctggcagtcatgtcaccagctttgctgggcactgtctctggagagcttgtggattgcctcaagcccccagctgtgctgagccagctgcagcaacaccttcaaggattcccccgagaggagctggacaacatgttgaacctggctgtgcacctggtgagccaggcctctggggcaggtgcctaccgcttgctgcagttcctggtggacacagctatgcctgcttcggtcattaccacccagggcctggctgtgccagacaccgtgcgtgaggcttgtgaccggctaatccagctgctgctgctgcacctgcaaaaactggttcatcaccggggagggtctcctggggaaggggtgctaggcccgcccccacctccccgcttggtgccctttttagatgcgctcaaaaaccatgttggagagctgtgtggagagacgttacgattggaacggaagcgcttcctctggcagcaccagctcttgggcctgctgtctgtctatacccggcctagctgtggacctgaggccttgggccatctgctgagccgagcccgaagccctgaagagttgagtttggccacccagttatatgcagggctagtggtcagcctctctggcctcctgcccctggctttccgaagctgtctggctcgggtgcatgcagggacattacagcctcccttcacggcccggttcctgcgcaacttggcactgctagtagggtgggaacagcagggtggcgagggccctgcagccctaggggcgcactttggggaatctgcctcagcccatctgtctgacctggctcctctcctgctacatcctgaggaggaagtagctgaagctgctgcctctctcctggccatttgtccctttccttctgaagccttatccccctcccagctcctgggactggtaagggctggggtgcaccgcttctttgcctctctgaggctgcatggacccccaggtgtggcctcagcctgtcagcttctcacccgcctgtctcagacatccccagctgggctcaaggctgtcctgcagctgctggttgaaggagccttacatcgaggcaacacagaactgtttggtgggcaagtagatggggacaatgagactctctcagttgtttcagcttctttggcttctgcctccctgttggacactaaccggaggcacactgcagctgtgccaggtcctggagggatttggtcagttttccatgctggagtcatcggccgtggcttaaagccacccaagtttgtccagtcacgaaatcagcaggaagtgatctataacacccagagcctcctcagcctcctggttcactgctgcagtgccccagggggcactgaatgtggggaatgctggggggcacccatcttgagtccagaggcagccaaagcagtggcagtgaccttggt

SEQ ID NO: 65628 - DNA, 1042 bp, Homo sapiens
agaaaaggagggtcctgagaccccgcccagagccttccacccggcacccccaccactcccggccgcccaatctggctactacagctaaaaccacacttactagctcaccaccctccgaaaggcctcccgcaccgcggagctcctttatatagcccgaggacccgcccccgagttgcgattggcccgcggaaggccggggcggagccccgcggatccggcgctgagcggaagtacggaccgtgaactggagtggaatcgcgactatgggagctccggggggaaagatcaaccggccccgaacggtgactgtgtgggggccgcgactttgtttcctcaagcgttcctgagcccttttatctcgcacgagatgggatcagtgaggggccggggctgcctggtggaggggccccgggtcgcggcgagcccactccatctgattcgcatctttctccccggcaggagctgaagaagaagctgttcaaacgccggcgggtgttgaatcgggagcggcgtctgaggcaccgggtggtcggggctgtgatagaccaagggctgatcacgcggcaccacctcaagaagcgggcgtaagtactagaccctcttcctgttggtcgtccccaccgagtcttccttcctccctgcagagctccggagcagcttcacctctcagctcaccttgtgcactgacgcttatgcggggaatgtctgtcggctgttagttcctaagctctgatagcctctcacaatacctgtagcagacaacctttctttgggttttggattctgttaagaatctcaggaaagccggggatggtggctcatacctgtaatcccagcactttggggggctgaggtgggcggatcacctgaggtcgggagttcgagaccagcctgaccaacatggtgaaaccccgtttttgctaaaaatacaaaaattagccaggcgttgtggccggcacctgtagtcccagctacacgggaggctgaggcaggagaattgcttgaacctgggaggcggaggttgcagtgagccgagatcacg

SEQ ID NO: 65629 - DNA, 2477 bp, Homo sapiens
acgaccaacaggaagagggtctagtacttacgcccgcttcttgaggtggtgccgcgtgatcagcccttggtctatcacagccccgaccacccggtgcctcagacgccgctcccgattcaacacccgccggcgtttgaacagcttcttcttcagctcctgccggggagaaagatgcgaatcagatggagtgggctcgccgcgacccggggcccctccaccaggcagccccggcccctcactgatcccatctcgtgcgagataaaagggctcaggaacgcttgaggaaacaaagtcgcggcccccacacagtcaccgttcggggccggttgatctttccccccggagctcccatagtcgcgattccactccagttcacggtccgtacttccgctcagcgccggatccgcggggctccgccccggccttccgcgggccaatcgcaactcgggggcgggtcctcgggctatataaaggagctccgcggtgcgggaggcctttcggagggtggtgagctagtaagtgtggttttagctgtagtagccagattgggcggccgggagtggtgggggtgccgggtggaaggctctgggcggggtctcaggaccctccttttcttggcggggatcgggcttgtggtgccgctccccgtaatgtacggaggaagagggaaagggctctggccccctcggcgtcatgtcttcggtgctggcggcttcccatccgctggttctatcctcaaacgccgggacaccgggaatctcggagaaggacaaccgagatccagctggctcctccatcggggtgctcacactttctcatttgatttcaggtctgcggacgctgtataccctcctccacttcccgctgcagccaataaaggccgttcctaccatagtctgtgtccgcgttcttttttccgggactgcagagttcggggaagctgtacgccgcctttcgctacgcggaatttgcagatcttcccctggacctcaggcctctccggctggagtagggtggacgcttcacataagcttctctggtcgaacttacccgaatctccagatggccgcgctgcgtcgaatgctccacttgccgagcctgatgatggggacgtgccgcccctttgcgggtagggaggtgggggcagagtggagagggcaaggtgggggcagagtggggagggtaaggtgggttcctcgtgagtcaggagtgtagtccctgaaattgtgattctcaaaccctacggtgggccgtgcgtggtggctcacggctgtaatgctaacactttgccaggccgaggcgggcagatcgcttggcccaggagttcgagaccaacctagggcaacatagcgagaccctgtctacaaaaaaaattaaccgggcacgatggcgcctatagtcctagctactcaggaggctgaggtggaggcttcagtgagccatcattgtgctactgtactcaaccctgggtcacagagtgagaccctgtctcaaaaaaaaaaaagacgccagtgtgtatatacgacgtttttgcagtggcgacatagaccaagtgacaccctccaaccgtgcccacaggctcactggctgatagttgcctggcggaccgctgtctctgggatcggctgcatgcccagcctcgtttgggcactgtccccaccttcgactggttctttggatacgacgaagtccaggggctcctactgccattgctgcaggaggcacaggctgccagtcctctgcgagtgctggatgtgggctgtgggacttccagcctatgtacaggcctctacaccaaatctccacacccagtggatgtgctgggggtggacttttctcctgtggctgtggcccacatgaatagcctcctggagggtggcccaggccaaacacctctatgccctggacaccctgcctcaagcctccacttcatgcacgccgatgctcagaacctgggggctgtggcttcttcaggctctttccaactactgctggacaaaggcacatgggatgctgttgcccggggaggtctgcctagggcttaccagcttctatcagaatgcttgagggttctaaaccctcaggggaccctgattcagttctcagatgaggaccctgatgtgcgactgccctgcctggaacaagggtcctatggctggactgtgactgtgcaggagctaggcccgttcaggggcatcacctactttgcttacttgattcaaggctctcattaaagacattttagtagtcctgaccctagtatttctgtgggcaaggagagggctgaagaactgtctttgcaagctatctggctgcaaagtgagaatttgagtcctggcttccacatttactagctgggtgccatattgctgaatgtttctgttccccagtttactcatctgcagagtgagaataacttggagttacggagattacatacaatgatgtgcgcaatatttagcacaaaatgaatgctg

SEQ ID NO: 65630 - DNA, 1017 bp, Homo sapiens
gttgtatttaaacccatacctctctcttactcagcagttacccttttacttgttcatgtttttatttggtttattatgtagctatctggtgatgtggtatttatccagattcttttgtataatcttatccttgtctttcttaggttgtgagggagctgggagtctctcatccgcacttagtaaagcggagcctaagtggctgttcatttggtgctttaaatagtagttgtgctggttcaatctaagaagaagggggcccagctttagctcttttccttacttgggcacctcattcagttttgatgcccacaatactgagtatctcccttgccctttaggtcaggctgccagatgggacctcactgacccagacgttccgggcccgggaacagctggcagctgtgaggctctatgtggagctccaccgtggggaggaactaggtgggggccaggaccctgtgcaattgctcagtggcttccccagacgggccttctcagaagctgacatggagcggcctctgcaggagctgggtatggctgcaagactagaaaccaggactagaaactgggggagtagggaggcatgcctaggaaaaggagggatgcaaagagaaggggctttgtgaacatggtgcaaggccaggaattttgggagcaaaaaccaagtatccttgtggttcaagcctgttttcttccatcttcaggactcgtgccttctgctgttctcattgtggccaagaaatgtcccagctgagggcctttgtcccattgtccctctgtgaccccttcatctttgataaagcactgacatctccttcctaataaatagaccctgagttctgtacatgcctgactccttcctgaatggctgggagggacaaaactaaggcagaggaagaggctaaaacggaacagtagaccctcttcctcatctttagtttccaacaaagacacttgtttgtaatctctgggtctgattaactgctggggaagttgcggaggagaggtgctaaaagg

SEQ ID NO: 65631 - DNA, 1124 bp, Homo sapiens
cgagcctttagagactccccttggacatatcctgggacgggagcccacttcctcagagcaaggcggccttgaaggtcctgactgagggtccacggtgtgattattcaggagggtccgaggagaatctgaagggataataataccgattgtttgtttgtaggatctggttctgctgccggagaaggcaaacccgctttgagtgaagaggaaagacaggaacaaactaagaggtacagtaacaacaatctcacgtgtctgagggtcgtcttccatctctccccagtacacgtctggtcaaagaaccttgacctttccacatttcctctttcttggcattttcttttcctttaatctactttgggatatatgtcgcctaattttgtttattgtaaactttacaccttcccactctgtccatttctcttgaactgttttccctcggcaacacaggatgttggagctggtggcccagaagcagcgggagcgtgaagaaagagaggaacgggaggcattggaacgggaacggcagcgcaggagacaagggcaagagttgtcagcagcacgacagcggctacaggaagatgagatgcgccgggctgctgaggagaggcggagggaaaaggccgaggagttagcagccaggtctgggcaggggaaatgatggatagcagatgagaaagaaatcaagatttgctttgttgatgtctgacctaatttcttcttgtctacatttcagacaaagagttagagaaaagatcgagagggacaaagcagagagagccaagaaggtaggtgactgagaagacgccacgggtaatggagtgggcaggttagtaaatcttttccagcttcagagggaaagcatgggcttatatgatctgtttcacctgaggatgggtgagtacctgattgactgttttactttgccctttagtatggtggcagtgtgggctctcagccacccccagtggcaccagagccaggtcctgttccctcttctcccagccaggagcctcccaccaagcgggagtatgaccagtgtcgcatacaggtactgattctaattcttatcttcctcttgggacccctttgttccgtgttaaggtgcccagctcagagctttt

SEQ ID NO: 65632 - DNA, 1042 bp, Homo sapiens
ctctttggaggtgcagggcctgaaggccaggaggagtcaactccgcaatcagatgttacagaggatggtgagagccctgaagatccctcagggacaggtatggcgcagccaccacactctctccttcctgactccttggctttctccttcagtgtctgggtctgacccctgcattccccttttggctgcagagggtcagctgtccgaggaggagaaaccagatcagcagcccctgagcggagaagaggagctagagcctgaggccagtgatggtgaggggcatcctgcagcgtgacctgggtggggcccccggttaatctaatatcccatttgagattttgtttttccctttcctggcccaggttcaggctcctgggaagatgcagctttgctgacggaggccaacctgcctgctcctgctcctgcttctgcttctgcccctgtcctagagactctgggcagctctgaacctgctgggggtgctctccgacagcgccccacctgctctagttcctgaagaaaaggggcagactcctcacattccagcactttcccacctgactcctctcccctcgtttttccttcaataaactattttgtgtcagcttcttccttgactctgaaatgggttcagggccatttgaacaccctgtgtcccccatgcatctctcactttccgccattagaggggaggtcttcttgtccaggggaaggcctccagacctgggctattttaagcacagatgtttccattcataagcctaggaagtccaaggagggagaagctatcctggcccctagcaagctttcccactccctgcatgtgactttcatctcccccagaggagggggatggtgtagggcaggtctgcagagctgggagacatcattctggccccctctacacccctcccttcctcccttcctccctttctctgtccattgggaggcagaagacaggaaatgactgccatggatgtggtaggatttttaccaaaacagcattttgcggctcaggcccgtgctgttcgcagctgttttc

SEQ ID NO: 65633 - DNA, 1056 bp, Homo sapiens
ttaataatgtaagagaggacaggctgggccctggggacagcctcaccggcccataggccagagtcacagatggcccagttggcaacatgatggttcacttttggaaaagaaacgtgacacagcctttctgggaacagggtagccagtctgattcaggagagccaacaggatacccaagaactggacgtgagaggctctagccaccagaagggggcagcaccttcttgggatgacagattgaaaggcccgttaggctacccaagagggttgtggctgagtatttgggggcgttgcgggggctaagagggaggtggaatagagacagtacattttcaacaaaaaaatttttttaaagaaatgggggctacctttggcaggtgctgatgtatggacagccgtatcgtgttaccttagagcttgagctgccagagtcccctgtgaatcaagatttgggcatgttcttggtcaccatttcctgctacaccagaggtggccgaatcatctccacttcttcgcgttcggtaagtgttggtggcctgtctgagaaggtgtggaggaagatggcaggatcagaatgggtagggggctgggtgtggtggctcaggcctataatcccagcagtttgggaggccgaggcaggcagatcgcttgagcccaggagttcaagactggcctgggcaacatggcgaaacccatctctacaaaaaaagtttaaaaattagctgggcatggtggctcacggctgtagtcccagctactctagaggctgaggtgggaggatcgcttaaacctgggaggttgagtctgcagtgagccaagattgcaccactattctccctcctgggcaacagagcaagaccgtctcaaaaaaaaaaaaaaaaaaaaaaaaaaaagaatgtctgggtagggattcctcaggagaaaacacccttggctttgaggtcacagacacatcaggataaagaagggaatcaaggccgggcgcagtggctcatgcctgtaatcccaacactctgggaggccgaggcgggtagatcacctgaggtccagagttcg

SEQ ID NO: 65634 - DNA, 1077 bp, Homo sapiens
ggtgtctccatgttggtcaggctggtcttaaactcctgacctcaggtgatccgccctcctcggcctccaaaagtgctgggattacaggcgtgagccgctgctgcttggccctggaatttacatttttatcaagctccttaagtctttagaaacactgaagtatgcaactatttaagtatctctagattcccatctaagaacatctgttgtaatgagaggacatacattgaagtcataggaagagaatgaaataatcctggtatcttgaatctcctggccacatttgttctccatctttgtaacagagagaagggtgcctgttctgagagaagggaggagggcaggagggagccctagggggcaaagaaggtgtatggatggactagtaagactaacttagcagagtatcctcctccaatctcatttaggaccgactgtgattcctccaccacctcactctgctccttccctgttgccaatgtctcgctgactaagggtggacgtgatcgggtgagtatgggaactagagagaggtttcattagagctttgatgactcaaaataggaagacttgagaaaggcctagagagaaggaattgagtaataagagactggccgggcacggtggctcacgcctgtaatcccagtactttgggaggctgaggtgggcagatcacctgaggttgggagttcgagaccagcctgaccaacgcggagaaaccccgtctctactaaaaatacaaaattagctgggcgtggtggtgcatgcctgtaatcccagctacttgggaggctgaggcaggagaatcacttgaatccgggaggaggaggtttcggtgagccgagatcacgccattgcactccagcctgggcaacaagaatgaagctctgtcttaaaaaaaaaaaggagactaagaggaaggctttgaaggaaaagaaattaaaattaattgtgtgtattgatggatctttctgcagcaggtgttagaaatgttctttctcaacatagtccctgacttacggtaattcaacttaagaatttttcaacttactgtggtgcaaaagcgacatacattcc

SEQ ID NO: 65635 - DNA, 1027 bp, Homo sapiens
tactacaggtgagaggggccttctatcaaaatagaggactcctatgggaattgtaaggcccttggagttcattcagttcaatcccctcatttacagataaggaaaactggagccaggtgtgcttccagggcctctcaactttcacagcccaaggctagatttgggttgccagggctagggttctagttctacctctgattactgaattctggttaaaaaaaaaaaaaaaaaaaggaaaaatatccacttctatcattatgaggatcaattctattttggttggatcacccctctctcagggccaatgtagaattttgagccaactcaaccctttagtgcagaaccaacctggctttcagtagaggagctattaggaaagcagcagtttgctttttacattactgcctctcagtccctgaaagtcggctacacaatagagattatggaaacataagatgagtaggcgcataaacttgcttcccagagagtcttgcgtcttgactggccccttaggttccttctcattttacaaaccctgccaagtgccaaattctctcttttttgaggtggagtctctctctgttgcccaggctggagtgcagtggtgcagtgtctgctcactgcaacctcccaggttcaagcaattctcgtgcctcagcctcccaagtagctgggattacaggtgtgtgccaccacatctggctaatttttgtatttttagtagagatgggtttttttttgttttgttattgtttttgtttttgagatggagtcttgctctgtcgcccaggctggagtgcagtggtgccatgtcggctcactgcaagctccgcctcctgggctcacgccattctcctgcctcagcctcctgagtagctggtactacaggcacctgccaccatacccagctaatttttttttttttttttttttttttttagtagagatggggtttcaccttgttagccaggatggtctcaatctcctgaccttgtgatccacctgccttggcctcccaaagtgctgg

SEQ ID NO: 65636 - DNA, 1642 bp, Homo sapiens
agcctagctgcctgcatccctgcgcacacccccactgtcgctagttcactgcctgcccctcccccattgcaggcatcctgactctgggctagagacctccccaacagagctgaggccaaggccgactccccctctcaaatggcgtggtctgggcctatgacggcccctgcagtggagtctgtactggctgcgggggaccctgctcatttgaaaatctgacatcagctgggcagtcgcccccctcctcctttcctccctctactctgacacagcacttagcacctgaatcttcgtttctctcccagggaccctccattttccatatccaggaaaatgtgatgcgccacaggtatcagcgtctggatcgccacttcacgttttagccacaagtgactcagtggaagatccagagtcaacagaggctcgtcaggaagatgtctacagaaaaggtagaccaaaaggaggaagctggggaaaaagaggtgtgcggagaccagatcaaaggaccggacaaagaggaggtaggggcccttgtggggacagtcagcagaaatatactggaaataggtgggctggcgtgaagggggcggggggatggattggttttaagaatttcattcattttgaatagattacttcccacgcccgcagcagtgtgcaaagatgtacacaacactggccttgcctctgaaggactttatctggggtgattagacgtctacaaaatagaagactgccaaaagctagtctagataatgtgctgtggggactctgagggagagtgtatccagttagggtcagaggaggtccacaatgctaccacgctgggaacagggcactaatctgcctgcgcaacaacgcaagaggcccaggttgccgcaaactgcaacatgctctaggcgaatgcccccgccttagatgcctacaggtcctaggagctgtgggcgataaaaatcagcgccagctggatgaccgcctcactcggccgcttcgcgggtgaaatggcctgtggtgaaggtgtgcacggagggctgtgattgcagtctcaagggagagccgagcggaggctgcagtcagcgcatcccctggggcacatcttggggcctgcagggaggcaggcgtctttcccctttggtcacggtaaccggagggaaacctgccgcagagagagccagtggcgagcgcaaggagacagcgacctcgcagctcgggaaggctccgccccgtcccgccccgccccgccgtgctggaccccgccctgggctgaagccccgcctcccacggctacaaaagcggccggcggagaggggcgggacttccccgggagccggaagtcccgtctcacggttgccctggcagcgcgcgaggctggtgagtcggcagccctgtggcagccggcgggctggtttccatggttgcacgattaggtaggggctccgggcgctttgcccacccccgagctggaggggactggcgggaagcggcggttggctgcagggcgctccgccgggcgtggggtgtagccgtgtcggtgagcgagctctgctcgaggcggagaggagaaactcgggaagcaattgtggctactctaaggctactggtttcgagtcaggccgtgcgaccttaggcaagtcgcacattc

SEQ ID NO: 65637 - DNA, 1028 bp, Homo sapiens
aagtggcgatccagacgctgatacctgtggcgcatcacattttcctggatatggaaaatggagggtccctgggagagaaacgaagattcaggtgctaagtgctgtgtcagagtagagggaggaaaggaggaggggggcgactgcccagctgatgtcagattttcaaatgagcagggtcccccgcagccagtacagactccactgcaggggccgtcataggcccagaccacgccatttgagagggggagtcggccttggcctcagctctgttggggaggtctctagcccagagtcaggatgcctgcaatgggggaggggcaggcagtgaactagcgacagtgggggtgtgcgcagggatgcaggcagctaggctcccccactggccaggcagttggtatgctccaggatctgagcagctccttctagcatccttcatccttcaggtaccagccatccagacagtgcttgagctgcagaaactgagaccagacctctggcctggccctccccaggggcctcctttcgtatagtcactgcttctgcatcagatactttcagctgcaactccctactgggtggggcacccatttcaggcagaaggttttggtaccctccactgaccctacacccagggctgctactgccgcttgtggcttcaggtaagtaatggcctgtttttctcctgttggggctcactggagcagacaggggtgatgtgccctcctcatcagggttggttgaggtcttcagagctgggaacacacatggtttgaagggctgaaaagccttaaatcatttgtgtaaggtttaatgatctgtggcccaggccatgagggagtttggggagcacctcatcccaccctatttttttccatgaggaatacagggatgagacagtccactggaggaggaggaggaggataggaggggaacaaaatattggggtatgaccacagccttgtaaaggttggtgtggagtgagcatggaggggggcctccagctgagactgtgctctgagaggtccctc

SEQ ID NO: 65638 - DNA, 1019 bp, Homo sapiens
ttggttagggcaggggcagccattttgagaccagaagagggcggaagggaccatattgagaacgccggttgcctgggggccgccattttaagagaagccctgtacggtaaactccgtgacgtgggggctgccatgttggtacggccatcttggaatgggagtggctgtgggcgcagccatcttaggtataaaatcggctccagtcgcggtaactgaagccaagctccgcccctaccctcctaagagttcctctgctgtacgactgcactcccgcaccctcccctaaatcccccctcttcggcctgtttaccttttaacttggcttcgttgcacgtttgtgtgtgtgtgtttgctcttcgcagcctcttgagcgtcttttgtacttaattcttacactgtggacgctctctcgcgcccgccatcccccgacccctctgatctccgatccttgacgatgtctagcctgcattgattggcccttttccctgggtatggcagatctattgcttgatgatcctctccccccaagaattctaacacaggagctgtcctgaggctctggatgactttattcttcaaatggctttaccctcccagtagctccaggtgagactgagagcaagaacctggcccatccctctccattgtctgagcaggtcaccgagggaagcgggcaggacgcgctggcagagtctgacggggccctgctgtgggtggagcaaagggtgcctcatatctctggggtgcttggggtcggccacaaaggtggtaggaaatggggtcgacagataggtgagggtgggccttgtgcttcagataacctcacatggtcaggcaagggttagggatgggatgcaaggagcctaaggggctcacaacaattactgacctaaggaagggcccaggagagggaaaagggaggagttgtgagaagggacaggggagctcagaggagagcacagaagaacttcttctcccggaaggggttctccgaagtgggcacaggggtgatgagggga

SEQ ID NO: 65639 - DNA, 2037 bp, Homo sapiens
ctattttctacagtgtggagggctcgtgccctgctggtttttttgatacacaggtagagaatgaatagaagaggggagggtggtgggggggggtgggaggcagctcagtggggctgctgaaccttgggaagagtgtgagtgtgaacgtgtgtaaatgtgcgtgtgaaagggagcaccccttcccgacttctagaaacaaaattccttttggggcgctttccctgtgtgtccccagagaggcctctagccaggagccttcagttgggatagtttcatttgtgactttaccaataccctcccagttcttgatagacagctgtaggttgctgggttcaagaatatgggtgggatatggaatgctctttcaatgtctagcttcagttttcattcatcctcctgctcagcactgtcagccaagagcttactcagcagacaccacatactgcagcagttcctagtgagaaaatctgtgccactagaaaatgcttcacttccatttcctcacctgggcagttctctgtttaaaattgtgggctgatttggtcttcctctcctcctcccactgttactgccctgcagcccttgttcaggtgtacagacccttattctggcctctagtgtccttgtctgtcatgacacacccttccgcccaaatacctctgaccccaaggctggaatggggctggtaggagataagtttgcttactcatagtcatgtcctttctcttggcacctgcttccctgcggtgtcctcaaatggatttctgtgtggcagtggagtgattgcatgaatttttctgtaacacattaactttgtattattattaagggagtttgagaaagctttgcttataatgtcaaggcaaggaggtaaaaactggagcccaaagaaattcccttagggcaagattatgttataatagaaaattgaatttcctgaggcagtggctgccaccccttttcagatgtttagtcctgcaaatagcatctttcttgtagtctgtgacatggatggggatgctagggcccttaggggcaaggggactaaactaaatcaagttgagtttttttccagcaggggttaggggaggtactcgctgttgatatttgacactagaaagtaatcttttttacaaaactgtttttctaggtgggtggaaagtgaaactgccacatccttgttggtttagtccaagagatcatttgcaacaacagtagatgtccgggttttgtttctgtctttttattatgaaaaactatgttaagggggaaaatgtggattatggtaaccagaggaatccctagccttgttttccttagaagacttgtttagtgttttatcagacgtctgttgtagttgtagacaggaaagcttgtgagaaaaacaccacatggagcctgtaaatgtttttgcacaacctgtaaagcattcttggaagtggccagtaaaaaggggttttaccatttaaaaaaaaaatgtaactgtgtcattgtttacatctgtaactttttcctcccctgttctcattacaccattctggcgaaaatgtaggcaaagtagcttccagttttagaataaataaccatttggattgaattcaccctatctcctgtggctgcactgactggggcggagggtgtcactgggttatttattcattttttaatgcctctttctcaggtcgcatgggctccaaccaaggaggactctcctcttgcatggtggctgccgttccctccctattctaccatgccttcacttgggagccagccatgcagtcagttgacatgggtgggtagttattagtctatttagtgcttgcttaggccaagagtcgagccattgaagtataggaaaataaattataactcacgacctctgtatttggcctatgcaaaaactagttggatgcttgaagttaaatgtacattgtggagccaaataagtatattcatgaataattactgctagggggaaagcccactcattcaacagaagtttgatgggggttattttccagtgaatctggagaacga

SEQ ID NO: 65640 - DNA, 1050 bp, Homo sapiens
atgcccggccatctctgagtctctttttaaaatgttatttcttagcatcttatctgaccaacaccagaactttctcagttacttttagcctctggttacctgcttctgtcctgatgagaaactttaacccagttcactcctaatttattatagatcacttaagaacttgtaaatctacatagccctttgcctgggtctgttacaatttagggaaaacttagagtagaaaaagttaatgtcattatttagatgcgagtgggtataaacgtagcacatttttgtgcagtaatagatgaggcatagaaagtcatatgcttcttgtagagttttcataatgagttcttacccatctatgcacttttcaggcccacaagcttctctcttactcttatagccaacttctctttgcctgaaaaatgcgactatatggatgaggtgacatatggggagctggagaaggaggaagctcagcccattgtcactaagtacaaggaggaggcaaggaagcttctgcccccctccgagaagcggacaaatcgccgaaacaaccgaaacaagcgtaaccggcagaaccgaagccggggccaaggctatggtgagtcttggggacctgccagccccctacttcagtccattctttgtgcttagtacagcaagatgtgcaagggaaggccaaggaaaccaagtcaggtcattaacaatacggaagtgccttcttcatggagcttatttcttcctgtgttctttatccctgcctttttcttgtgctttttccataattcttcaacaacaacaaaaatcctcttttttaaaaaagagttacttttcacaaaagtatttgtttctttgaaaagcaatgcttgggctttctcatctatctagttttcattttaacatatgggttcccagtgtcactgttcctgtcttatctgaaggatttgtgcagtgaaatcaaattctcatcttcagttttcttgcttctgtgtcatttcgattaacaagaaagcgaatgctttattcagtgttttttgtggggggaagaacttaacc

SEQ ID NO: 65641 - DNA, 1876 bp, Homo sapiens
ggctttaacttgcaatataacttgtgttttgtttttttttttcacttcctctcaaactaatcagatgaagggtctcgaggagccagagatggaccccaaaagccgagaccttttagttcagcaagcctcccagtgccttagtaagctggtccagattgcttcccggacaaagaggaactttattcttgatcaggtattaatctgataaaattgcctagagtcaaggtgggatgtgtatataaagagagactgaattaaggagcagagtcagcttacctaattatgaccatctggttgtgtgttatggttgcaatgttttttgaactcagaggtacccctaattagtgtttttacttgaaaatatatggacccaggctataaaacatgtaataaagacaatggaaagagttggaactcatttgaattcctggctccaccacattctggtttgtgatcttggataagtcccttatcctttctgaacctcagtttccctgatgagcaaaacaggataatacctgtcatgtagtttgaaaagttaaagaagatcatgtgtattgaccctttatctcgtgtctaagttgtcaaagatactgagtcttttttttttttttttttttttttgagaccgagtctcgctctgtcgcccaggctggagtgcagtggcgctatctcggctcactgcaagctcagcctcgtaggttcatgctattttcctgcctcagcctcccgagtagctgggactacaggtgcccgccaccatgcctggctaattttttgtatttttagtagagacagggtttcatcgtgttagccaggatgctcttgatctcctgacctcatgatctacctgcctcagcctcccaaagtgctgggataacaggattataggcgtgagctgtcacgcccggccttttttttttttttttttttttttttttgagatggaatcttgctcagccgccacccaggctggagtacagtggcgtgatctcagcccactgcaaccaccatctcctgggttcaagcgattcttccgtctcagcctcccaaatagctgggattacagcacccaccatcatgccgagttaatttttgtattttagtatagatgaggtttcaccatgttggccaggctggtcttgaactcctgacctgagatgatctgcccacctcggcctcccaaagtgctaggattacaggcgtgagccaccgtgcccagctgatactgattcttttggttaaatctgagtgataattttcttcctaaacatcagttattcctcctgttcttagtgtaatgtgtacaattctggccaacggcggaagctattgctgttcaagaccttctctcggaaagtggtggtggttgtccctaatgaggaagattggaagaagaggctggagttgaggaaggaagtagagggagatgatgtgcctgaatctataatgctggagatgaaaggtgggtgtcttagtccattttctgctgctataacagaataccatagacttcataatttgtaagtaatagaggtttatttccctcattctggaggctaggaagtccaagagcatagcattagcatctggtgaggtccttcttgctgcatcattccatgtcaggagggcaaaaggcaagagggcacatgtgagagaacttgcttttataacaaagccactttcacaataatggcattaatctattcatgaggatggaatcctcatgaccaaatcacattaaaagtcccaccctctcaatactgctcattggggattaagtattcaacacttgtactttggtgggacataactcaaaccatagcagtgggctaaaattgtacaagttaaagagatcttatccctggtcagtgca

SEQ ID NO: 65642 - DNA, 1661 bp, Homo sapiens
gcctcccgaggagctgggattacaggcatgcgccaccacacctggctaattttgtattcttagtagagatggggtttctccatgttggtcgggctggtcttgaactcccgacctcaggtgatccgcccgtcttggcctcccaaagtgctgggattacaggcatgagctaccgcacctggctggggaagaaatatttttttaaaaagaccgttcatttattcattaagctactacctatgtatactggacttctgtccaatcaggcttttattagtgcaggtaggtaaaagcactgtgctttaacaagaaccttagtttcagtaaccaagaaattgatccctgtggctttaagttcagtgattgttattctgatgttgagttgaggtaaatgtcgttttcagtttgtataaaaatcttgtccttcgaactcagagtttgctactcagttggtcacaatatctaatagttccctttctgacttggccaggtaacccagaatctcccaatgaaagaaggctgcacagaggtctctctccttcgagttgggtggtctgttgatttttcccgtccacagcttggtaaagttatttctttaagttcctcattagtgtttactaccatattgcttactctatgggaagtccggttgtaggtaactaatttgttgactgttctaggtgaagatgaattctcttacggtttcgatggacgaggactcaaggcagaaaatggacaatttgaggaatttggccagacttttggggagaatgatgttattggctgctttgctgtaagtgctcctgaaagttgtgggttataacaaggagcggatagagggcactgggaattcacttgtgcttcccatcaactgctggcttttatgcatgtgatgtgtgtggctcgcttagttactttgtgcagcagtctgtgtgaaaaaagaataaattgtaaagtttaatcaacccaaagcctcgtcagccaataagtgctcttgtcccttgtcattgtagaattttgagactgaagaagtagaactttccttctccaagaatggagaagacctaggtgtggcattctggatcagcaaggattccctggcagaccgggcccttctaccccatgtcctctgcaaaaattgtgttgtagaattaaacttcggtcagaaggaggagcccttcttcccaccaccagaagagtttgtgttcattcatgctgtgcctgttgaggagcgtgtacgcactgcagtccctcccaagaccatagaggaatgtgaggtatgccaaacagtatacgaacactgaggttgtatgctttgcagaggtgggtgcgtatgctctccagggtctcagagcgttaccaaacaggaatgggaggatgttcttaaattggttttgataaacatgaccctcatttatttttcattatatttctggttctgttttttgcaggtgattctgatggtgggactacccggatctggaaagacccagtgggcactgaaatatgcaaaagaaaaccctgagaaaagatacaatgtcctgggagctgagactgtgctcaatcaaatgagggtaagttgctgttggggatttgtcggatacagtatttggagactcttataacctatctttaatggagaattagtctcaagtgtctgagaa

SEQ ID NO: 65643 - DNA, 1774 bp, Homo sapiens
gggcctctgttgctgggtagaagttgaggcgttgaggaaaaaggagggcccggattacagtatttcttcgttctggggagcccttttgcttcctagccagaaaaacaattgctactaggcttacatgttgcaacacattctctaatgactttttttttgtcgttactgctgcaagcacagacagtagggaaaagaggctagcgacccctaaaacgccacagcaaatggaagtcagacggaagtaagggtggtgggaggggcatggcatcggggagctccgggcggctgcgcagaactccccggctggaagtactgaaagaccggcgcgcacacgcttccgtgctacgaggcacttgagctgcagccagccttgcccgtcttggactccactgcggctgcgcgataaaagcaccggcggcgattggcccgggggcgccagagggcgggaggaagcgggaggaactccgtcgtcctccgcgcgcgcctgcccgcggctggggaaccaagggcctggaggggaaacagctccctgctgcgttgttttgggctccgtgagccgaaagggggaggggagacgaaggagaagcaaacactgcgcagcgggaccgtgcgcggcctccgctcctgcgtgcgtgcgctcgctcgcgcgggctcagtgctggcgcgtgaggcggaggcgggcggcggcggcggcgcctgcgcggtcggactcggtcgacggttcgcaggggaggaggcggcgggaggcggaggaggcggcggcggcgatggaggtgaagcggctgaaagtgaccgagctgcggtcggagctgcagcggcggggcctggactcgcgcggcctcaaggtggatctggcgcagcggctgcaggaggcgctggacgccgagatgctcgaggacgaggccggcggcggcggggccgggcccggcggggcctgcaaggcggagcctcggcctgtggccgcgtcgggcggcggcccgggcggggacgaggaggaggacgaagaggaggaggaggaggacgaggaggcgctgcttgaggacgaggacgaggagccaccccctgctcaagccttgggtcaggccgcgcagccgccgccggagcccccggaggcggcagccatggaggccgcggccgagccagatgcttccgagaagccggcggaggccacggccgggtcaggcggggtaaatggtggcgaagagcagggcctcggcaagagggaggaagacgaacccgaggagcggagcggggacgagacgccgggatccgaggtgccgggtgacaaggccgccgaggaacagggtgaggagctggcagccgagcccggctccaacctgccggctgcgcccctgatctagcaccccgccctgcaccgcagggtccgagtccttgttctcgcttgcctcaaagtgccatttgatggaactcctttcattctctacccacctttctgaggggttaggccgcctctcgtggccctactctttgcaggaggaaggttcctgcctaacttggttccttggtgatagtggatggcagtgagtgattttgcatgcgaactacttgtgagctacctgtggaacagtctcccacggtgcttgttatatttttcttagctgagaaagtgctaagcaattggggattacacggagaactaggcccacagttagagggtcaggtctttgggctacctgacctaactttttcgccgtaaaaatgttaagcaaaaatcgaagtccgtcaaagtccgttccattaaaagcatgttacc

SEQ ID NO: 65644 - DNA, 1098 bp, Homo sapiens
ataaaataaataaataaataaataaataaaaattagcagccgggacagagattgttttttttcaattccaaatgttattaattaatgagatttactattgcatagaatggttgcgatatattcagatcttggagagattttaaaatgggagcatgttaacattctctcctgccacaaggtatgattatggtcttaactgactctaactgtttctaattgcttctccatcatcttccaagatgccaacgtccggcggtacctccagctgacacagtcagaactcagcagctaccatagaaaagagaagcagctctacctgggcatgtttggttaacaaagaagaaagatgctcctccagttgaacttaggtggaccattaaacatgcatgaaggagaaatctgagcctcagcaagagaaattaaccctatacctctgacccaggtggatttttgtttctagttctgcacaaacttcactacttagacagtctgagtctttttctgtctatccatctgtttatttctatacctttcaatacatgttattgttgcagatatttggcttgagaaatataatcagaaaacatacatcagttgtgggtggaattaatcatatctctggtatagatttttcatgacagtgttgttagatgtacttatatacagaggcgacagcttgcagaggacgacatagtaaggataggcagaaagaattgtcttcctttattttttcagaagcccaaaccaaagtgggaaatatggccgggcgctctagctcatgcctgtaatcccagcacattgggaggctgaggccagcggatcacctgaggtcaggagttcaagaccagcctgaccaacagggtaaaaccctgtctctactaaaaatacaaaaattagcctggcaagatgacacacgcctgtggtctcaggtactggaaactagacaattataaatgagccaggctgggcatggtggctcacgcctgtaatcccagcactttggaaggcagaggtagacagatagatagcttgagtccaggagttcaagaccagcctggggaacacagtgaaaccctgtctctataaaagatgcaaaga

SEQ ID NO: 65645 - DNA, 1025 bp, Homo sapiens
gttcaagtgattctcgtgtctgagccacccaagcagctgggattacaggcatgtgccaccacgcccggctaatttttttgtatttcctttttagtagagacatggttttgccatgttggccagggtgctcttgaactcctggcctcaagtgatccacccactcgggctcccaaagtgctgggattacaggtgtgagccactatgcctggccaaaagtaaccattttgtttaattttttctttttcttttaattttaagttccaggatccatgtgcaggatatgcaggtttgttacatagggaaacgtgtgcctcggtggtttgctgcacctatcaacacatcacctcggtattaagtccagcatgtattagctatttttcctcatgttctcccaccccccgccacagcccctgttaaattaatttcttattctccttaatattccatacacattcagattccttctcccctacaaaaatatttgctattttgtccttgctatttctcatacttagatcattcatacactatatttattttttcattaaactattttaaaacctttggagtaaagcatttaagtatttatttaataaacccttcagacctcatgctaaagaaaacacctaagtgaacattttaaattttaataggtgcttatctatagtatcctcatttctcttaaaaaaaaaaaaaaaaaaaaaaaaaaaaaaaaagaccatcctggctaacacggtgaaactccgtctctactaaaaatacaaaaaaaaaaaattagctgggcttggtagcgtgtgcctgtagtcccagctactcgggaggctgaggcaggagaatggcgtgaactcaggaggtggagcttgcagtgagccgagatcacgccactgcactccagcctgggtgacagagagagactccatctcaaaaaaaagaaaagattatcacatcttctaaaaacatacatactagccgggtacggtggctcatgcctgtaatcccaacacattgggagtctgaggcgggtg

SEQ ID NO: 65646 - DNA, 1376 bp, Homo sapiens
aacctagaagccggaggttgcggtgatctgagattgcgccactgcactccagcctgcggcagtgagactgtctcaaaaaaaaaaaaaagaaacatacataatagagcagaataaaaacaaacctgtcctttacctgtcatctcatattttgcaagggctgaggtcctcacagagaagagaaataggctgggcgctgtggctcatgcttgtaatcccagcactttgggaggctggatcacctgaggtcaggagtttgagaccagcctggtcaacatggtgaaaccccatctctactaaaaatagaaaaaaataaccaggtgtggtggtgtgcactctgtaaccccagctactcaggaggctgagacaggagaatcgcttgaaacgcaggaggcggaggttgcagtaagcagagattgcatgccactgcactccagcctgggcaacaagagtgaaactccatctcaaaaaacaaaacaaaaaaaaaatgaggaagggcatttcttgcttagtgccttttaaacacctgatagaactctctggaagctgtgttggacatgggtgcaagttgcagtatggtgcagtcctggctcagtaggaggttccatcaaccaggagcccctttgttattctgtttctgttttttcatggtggataatgtctatgatgttgtgggtactacataggtgagactatatagcacagcctctacctttataagtggtggcaataagcatgtgattaactgtcatacaaccacagagcaaacagatttcagggaaaaaaaaacacactttagtcctttatcaataacgccccctttctcaatgggctagactcctctttgttcttccctatacctttaaagaatacaactatcagcttacaagaaaaacttttcctaagtccaaggacaggagaggcgcagtggctcacccctgcaattccagcaatttgggaggccaaggtgggtggatcacctgaggtcaggagttcgagaccagcctgactgacataatgaaaccccatcgctactaaaaaaaatacaaaattagccaggtgtagtggcacgtgcctgtaatcccagctactcaggaggctgaggcaggagaattgtttgagcccaggaggtggaggatgcagtgagccaaggtcatgccattacacgccagcctggtcaaccagagcaaaaccgtctcaatcaatcaatcaatcaatcaagtccaaggacagaacaaacaaaagtaaaataccttattcctcttctaagcttcttaaattgctaggccttggtttattgacaaaatattgtcatgattgcatgttttatttgctttacaatggtttcgtggtcttattttatttcaaacacttgatgt

SEQ ID NO: 65647 - DNA, 2022 bp, Homo sapiens
cattttttttctaggttggactcttcacagaaattgggcccatgtcttgcttcatctctcgacatgtaagtctgggcacactgggtggggctgaggaagacagatactcattcatcaccatctattgaagcatccatttaaagtgctaacctagatctcactttcctttcagtccatcccttcagagatggagtttgatcctaactccaacccaccatgttacaagacaatggatgaggtgagtggacagaaagaagtcagggagacaaggagagaatcagccatcctgagggagaatattggcctggggatggctgagtacagatggtccccgaattaccatggcttgattcatgattttatgactttacgatggtgtgaaagtgatgtgcattcaatatgcccccgggcttacagtgaagtgattgtgatgtaacttctcataaactgaggagcatctgtacactgttccctcctctcctcaggatattgtgattcagcaggacgatgagatccgcttaaagattgtggggacccgtgtggacaagaatgacattgtgagtcttttccccacctctctacctataccaggttgagctgagaactgtcgatttcttttttcttttttttttttttttgagacggagtcttgctctgtcacccaggctggagtgcagtggcgcgatctcggctcactgcaagctctgcctcccgggttcatgccattctcctgcctcagcctcccgagtagctgggactacaggcgcccgccaccacacctggctaattttttatatttttagtacagacagggtttcaccatgttagccaggatggtctcgatctcctgacctaatgatccacccgactcggcctcccaaagtgctgggattacaggtgtgagccaccgcgcctggccgagagctgtcgatttcttaccacccacagtttcagggggttctgtgctcttctgccaggaagaagggatggatgggcagaaggcctggggctgcagggtggaggttggttctgtgctcatcttggcttcactttctttttaccatctttcttgcagtttgctattggctccctgatggacgattacttgggtgagtgcctgatcataggtgctggggttattgcctggagaagggatgtgtgggggtggggagtaatataggattcaatgcccaaatcagagagacagaagaaactttcatgctgtctgcttgaaagatccaggacatttgccttgggatgaggagtacatggttgtggctaccctaaattccggttctaactgatatgctttttctggtttcgcagggcttgtaagctgagcctggtggcctcctacccttggtcctactctaggaagtgtgattgtcacacttatcatgttgtccagaggtccagtctggctgctgttgtggaggcaaggaaggcaactcatcccagaaggcatctggtgcttcttgtagcttaactactgcctcctcatttttcagtatgtgttctaagtataaaaagtccttggttctcatggaagtgttatcttctttttttttttttagcaggaacaataactctttaaagaggctgtggagttggctgcttactagcccctctttttcttagactgatgcctctactagcctcagccacccaggggaactgactaacccatttgtccaggtttaaaggtgacctcactgaagtcaaggctctgatgttgggtctttggcttccagcaaatgataccatcattagtggcattctgggtcctgatctagttccagagtgtttgctcttctcctgcccttaaaagtaaccaagagcatagctgggaaagaagggagaggagacagcagacagggagagatgaataagaggctagtaatgacacagactgtaggatctcaacacagcctttcctaagttgggtatataaacaatagtatatcactatactaaactgaactgaagatgtaaaagggctcacaatctagttagggtgacaaa

SEQ ID NO: 65648 - DNA, 1001 bp, Homo sapiens
tgtctagcttcaccgttcttgacccactggccagtctgtttccttctctgagcctcactttcctcatctgggtactcagagctccttgtttagaaactccagagcacgagcagcaaggctggtgtggagggtgttggatcacactcctgggctctccgggaggctgggcagcttttccagtcttcattctccactcccagctccactggggccatgtcagagcgagaagagcggcggtttgtggagatccctcgggagtctgtccggctcatggcggagagcacgggcctggagctgagcgatgaggtggcggcgctgctcgcagaggacgtgtgctatcgtctgagagaggccacgcaggtacactcccctcaccccctgatacctccaactttccttgtttctgcctttttactaacctccaccctcgctgatttattcaagtgtacactgggtgcctgctccatacaacagagacagtccatgcctttacagaactctacttgtagctgtctgggcttccagcagacaaagcgcttgccaggcatcttcccatgtgctcctcacaacagccctgttgggcaggcagagcgggtagatactcacattctgcatgtgagaaactgaggtgttgacagaagatgtgacacccggggggtgtttttgtacaggagcagagacggaatctaggcttctgatccctaagcgtggtctcctgtttgccttctctccagtctggcccacttcatttggggtttcccatgccccctgcttcacatcctttgactctggcttttgttccctccctcccagaatagctctcagttcatgaagcacaccaaacgccggaagctgacggttgaggacttcaacagggccctcagatggagcagcgtggaggtgagtggggtgcaggctacagagggctcaggtggcatgaggccacttccatgtccagttcagggctggcgatgtggtgagacattaagaccaaacgctgc

SEQ ID NO: 65649 - DNA, 1042 bp, Homo sapiens
ttggagtaaaactgcagagcagttccagggggtgtccatggaattttctgggcttcagaacagctgtgaggtcaaagagacagttgtgagaaagcgtgatagtttatatccgaggcacacctgtgcccagtgccctgtgagttgagagcaactgatggggataaaaggaaattataggaccccgctgcagagggaaggtagtcagccccagccaggcttccctccctctcccattacctaattgtagtgttcaaggagatgatggagttgcagagagacctggtgccaaatcgaaggatacaggcagacaccaagaccaggaagacggctatagctgagatggccagtgcaatgcgcagccctatagcacctctgaaagggagagaacaagccttgtggtggaggtgaggctcatcctacctcagcccctggccctcagggttaggcagtcacctgtgggagtcctcgatgcagctgctgtagatccagaagagcaaaagcaggaggcagtagagggccaagaggccagaggccccagctacaaagtagcacagggatggtgctgagggacgggataaggccagggaggagccattcagggtggccacaccatacaggggacatctaccactgaaggagccctgtggagagaagctgctgagtcctagatttcaggttaatgtctctagatacagtctcttggtagggtgttagtgataacttaggaatggtcctgcattccaggaagttatttgtgcaccgtcaattcctatttctgggacagggatattgatggagagggcctgctggggaatcacaccggcagtggccagaaggatcagaaaataggcaatgaatatagaatgcaatgagcttcagagaagcctcacaagttatggtctctgtgcagaaaccttagagtaaacccaggccttgtatatccttcaacaaataactatctgtgaggtgctttttttttttttttttgctggagtgcagtggcgccatctcggctcactgcacgctctgccttctgggttca

SEQ ID NO: 65650 - DNA, 1105 bp, Homo sapiens
tgggtttactctaaggtttctgcacagagaccataacttgtgaggcttctctgaagctcattgcattctatattcattgcctattttctgatccttctggccactgccggtgtgattccccagcaggccctctccatcaatatccctgtcccagaaataggaattgacggtgcacaaataacttcctggaatgcaggaccattcctaagttatcactaacaccctaccaagagactgtatctagagacattaacctgaaatctaggactcagcagcttctctccacagggctccttcagtggtagatgtcccctgtatggtgtggccaccctgaatggctcctccctggccttatcccgtccctcagcaccatccctgtgctactttgtagctggggcctctggcctcttggccctctactgcctcctgcttttgctcttctggatctacagcagctgcatcgaggactcccacaggtgactgcctaaccctgagggccaggggctgaggtaggatgagcctcacctccaccacaaggcttgttctctccctttcagaggtgctatagggctgcgcattgcactggccatctcagctatagccgtcttcctggtcttggtgtctgcctgtatccttcgatttggcaccaggtctctctgcaactccatcatctccttgaacactacaattaggtaatgggagagggagggaagcctggctggggctgactaccttccctctgcagcggggtcctataatttccttttatccccatcagttgctctcaactcacagggcactgggcacaggtgtgcctcggatataaactatcacgctttctcacaactgtctctttgacctcacagctgttctgaagcccagaaaattccatggacaccccctggaactgctctgcagttttactccaacctacacaatgctgaagtgagacccaaggataggaggaaaaactgacataaatatctgtagctgtgtgggtgctcaccagtgtattgtgagcttggcctaccagtgagaggagctgaaggggttgtcagcttaaaattcagcagttcagagtggtgtgtgggtgggaaggactgga

SEQ ID NO: 65651 - DNA, 2421 bp, Homo sapiens
cagctggcatttacgagtcagagttcttacagagctgcctgttcttccactccaggtgccttcaggacaacaactgggactacaccagatctgcccaggccttcactcatctcaaggtaaggtctggaaatacagtggcaaaaagactaggatctctgggcctccaggaggtcaggttagctgagtggggttgctgagtggcgagggtaggcctacctctactgaccttcatttttctccaggccaagggcgagatcccagaagtggcattcatgaagtgatcgtagtcatgcctcagaagcagtcccccctgtaaatagtccttggatattaccgtctggttgtcgtctgtcatctcctcctgtctggcccgaggccgccccgtgactgtgaccgagggagggagggctgcctgatccctctcctcgcctgccttctggaagacttcagaagattgagcctcactggtgccaggaagccaaagcttactttgtagaactgacactaaactacccgaaggacttaggtgctttgtgtacttaaccccaggacctccttactttttaatataaagagtgatgttgtatttcgtgttctgcactttttaatataaagagtgatgttgtatttcgtgttctgcgtgctggattggttgtctcctcccagccctgagcgaggggggcgggccctctagcgggggcgcccagggagggcggaaggcggctctgcggcaggaagccccaccccggaagtcggctggccatggcggcgccttggaggcgatggcccacggggctgctagccgtgctgcggcccctgctcacctgccggcccctgcaaggcacgacgctgcaacgggatgtgctgctctttgagcatgatcggggccgcttcttcaccatcctcgggctgttctgcgcgggccagggcgtcttctgggcttccatggctgtggcagccgtgtcccggcccccggttccggtgcagcctctggatgcggaggtcccaaatcgtggccccttcgacctgcgctccgcgctctggcgctacggtctggccgtcggctgcggcgccatcggtaagacgtgggctggcttcccactgtgacaacgtggggtggcgggacacgaccttccctatacaggcagggagagtcagggactccctatccgagagtggcgggcgggctttaccccacagaaatgtgaaacactggccgggcgcggcggctcaaatgctgggaggccggaggcgggcggatcactaggtcaggacatccagaccatcctggctaacaccgtcaaaccctgtgtctactaaaaatacaaaaaattagctgggcgtggtagcaagcgcctgtagtcccagctactcgggaggctgaggcaggagaatcaattgaacctgggaggcggaggttgcagtgagccgagatgacgccactgcactccagcctaagcgaccgagcgagactcccctctcaaaaaaaaaaattgggaaacagtgatgtctccgagcgccgtgccctgtcatagcctaggctgagggctgcccttcactctgcgaccttgagcaaggtccttaaagctctccatcttcccattaaaatggaaacggacatctattaaggttgttgggaggaataacaagattactgggtataacaggagctcagtactgcactccagcctggccggcagagtgagactcagtctcaaaaaaaaaagcgctcagtaaatactactttcatcccacaaatttcttattcagagggcactggaaaggtcggtacttagatgcccagtgaaaacccctcaccccaatctctgccctgcctgcaggagccctcgtactcggtgctggtcttctcttctctctccggtctgtgcgctcagtggtgcttcgagctggagggcagcaggtgaccctcaccactcatgccccctttggcttgggggcccatttcacagttcctttgaagcaggtatcttgcatggcccaccggggtgaagtccctgccatgctacctctgaaagtcaaaggccgacgcttctatttcctcttggacaaaactggacacttccctaacacaaaactctttgacaatactgtgggtgcctaccggagcttgtgaagaaatgacctcaagtcactcacctctccaagaggaggataaaaactgaaccttggggagccaggtgtgttggttcacacctgttgtaatcccagcactttgggagggtgaggcaggagcactgctcgagcccaggctgggcaacatagcgagaccttgtctctatttacaaaaaaaaaaacaaaaaaaaacgccaatcttagaatggagtaacaaccagggtcacacaaggaggtcaagattcattaacaacaaataaaggagcagtcatccctagggcagctgcc

SEQ ID NO: 65652 - DNA, 2543 bp, Homo sapiens
ctggtttgcaactctaatcctaacactttgggaggccaaggcaggaggatcacttaaggctaggagtttgcacgcctctagtccaagctgccccagggggctgaggtgggaggattgcttgagctcaggagttcaaggctgcagtgagttatgattgtgccgttgcattctagcctgagcaacctgtctcaaaaaaatttttttaatttaaaaaataaattagtcgagcatgatgtcacatgcctgtagtcctagctacccaggagtctgaggtgggaggatctcttgagtccaggagtttgaggctgcagtgaactatgatcatgccacggcactgaacttgggtgacagagtgagaccctgtcccaaaaaaaaaaaaaaaagaaaaaattttaaaagattagaaaagatctcagagctaagcgtagggactgggggtatggggagccagctggctgtcttcaccagggtctcctccctttgttccttccaccctttgcagttgaagtctgagcgggaattggacaagataaaggggctgaagctagaagagctctggctcgatggaaactccctgtgtgacaccttccgagaccagtccacctacatcaggtcagttgtagcctgtgtctcccctcctggggaccttcaccccctgggaggctgagctaatgcatcctgaccagggcccgtctgcggagatgtgcagccctgagctggaaccacctgtcctttgagaggatcgcgtgctccccactttggtctgtctgtgtcttccagctttgtcctgagatgttctctcttctcttctgacttgactatctgtttgctgggtctgtggcctttctctttcttcctgaacacaaccttttctagaatctccctaccctgttgttccaggaaaggcatctcccctttctactctaaccagagggtatcttgtacataccctatagatggggttgccttgtgccaagagcctggtgtccatgggttgaggaagccctccctacctgggacttcctactgagatgggccttccctcctttgtactgtgatggcccctcttgcccttgcgccaagagggacccttttctcaggatccacttgcccagggctgttgctgtccatgctgaggttgaggcctcctaggggctggtggcatgcaatctgtctctcttgcccagtgctatgagctgggctctccctgaagaagaaacctgggttccccaagatgtgaccagagctggggccccgccagcaggcgagggaatcccaaggcaggtgctgggcgtggaggccacgggggcataggctaccaaggagacagagaactgaccccctcgggggcgctgcctctccctcactcacacactgcacgtcaccctgtttggccccggtggatggctggttagccagagacgggtaagattcctcagggaaggaacaacctaagacaggcacagtcgcagaggggccatcaggagagaacttgggggcaacagaggtggggcatggaccctcacccccacaatcctacaggggcctgaaccctcacaccttctgagggaggtctcctgcccccatggctgctttgcttcccacgcccagttcagatcgggacccaggtagcagacagagacctggccaacagcaagtgcccactcaccacagcaaggatttgtttctcatttctaccttggaccacagggatggggcagctgaaagaaagggctgtgtcagggtgtctttctcccttttctccctcatttttctagatgcttttttgccttgtagttctttctctttttctttgctttctctttcctttttctgtctgtctcctatacctccccatctctcccttgcccctgccccatcttgcctttttctctttttcctccttttcctttcttattcctttgcctctcctcttcctgagccccacctgctcatctccctgccccaacatcctgtgccatccctgtggtgtgtttgggtcttggccaaagccagacctggcagaactgatggatacctggtgaggcagcggagcccctgggctcccaccccattccctcctcccggggctgcacaggtgagtaggtggaaggtaaggggggcagggaggggaaagaggtcctgggcttaaagcctgggcttggagtactgctccttgacactcagggtcaggcagagagaaaagagacagccttcaaggcagtccatgtctgggtgccccgggtcaggtggggagtgggggccatttttccctgagcacaggctgggagggagtggagggatgagcaggatgggatgggctgtccctcgggtttggtatatttgctcctagagcagcccaggaggcacggtggctctgaagcatcactcacttctgtcccgttcttgacagcgccattcgcgaacgatttcccaagttactacgcctggtaagtccataattttttcattctaacaagcacagcatctctcactcacaaggattcctggataggtttctttttctttttctttttcttttt

SEQ ID NO: 65653 - DNA, 1179 bp, Homo sapiens
agccttacttatcattcccttcttttctctttctctcatttctagattccttatggcagaaagtatgacaaggcatggctcctgagcatgattcagagcaagtgcagtgtgcccttcacccctattgaggtaagacaaggcctgagtggctggctggccaggcaccagggatggtgaaggggcaagctggactcccagcgtaatgcccctccccaagggctctggactcccagtgtaatgctcctgtttcctcttgtagtttcactatgagaatacacgggcccagttcttcgttgaagacgccagtactgcctctgcattgaaggctgtcaactataagattttggatcgggagaaccgaagggtgtgtttaaagggcctggcttggctggaggtggaggttggtgctcagagcagggactgggtcttgttcttgcggcttaggcttccctagagttttctgtgccctctgtgtcttccctccagatatctatcatcatcaactcttctgctccaccccacactatactgaatgaactgaagccagaacaagtagaacagctaaaggtgaggcaggctcaaattagatgtttccaacccagtcttactacttctcacacccccaccccccacacacaaacccagtgaccactaaacccttctttttcctctagctgatcatgagcaaacgatacgatggctcccaacaagcccttgacctcaaaggcctccgttcagacccaggtatggttgacagcagtagttctcagataggtggtgataaggtgggatctgtcagggagggaaagtttgaggatgttttactgctaatgctggcatgggcaaaccctctcagtcttccctttccttcccttctgcttcctgaagatttggtggcccagaacattgacgttgtcctgaatcgcagaagctgtatggcagctaccctgaggatcattgaagagaacatccctgaggtaaggcctttggcccagtattaggcatgaggaagcagggtgtgttagataggaagtggctggagggcagattcgtctctgatccacttgctggtggtgcctcctctaaactcttctctcctcacagctattgtccttgaacttgagcaacaacaggctgtacaggctggatgacatgtctagcattgttcagaaggcaccc

SEQ ID NO: 65654 - DNA, 1035 bp, Homo sapiens
taattagtcaacgttcgagctcacattctaattctcaacttcgtgatttgttaatccatcttataggcgaagaaagcgaggtatagacaaggagccgagctgaaacactggctagattccggtaggggtctgagccatcactcccacctggaggcgcggtctccattcctctgaagccctttgtgcggcccccttcctcactgagttctgggctgcggcggcagcactgtgctctagcactaactctgaagctgccagggcagcgtcagcggacagatgaaaaggtgcggggacatgctggctgccagccggggttccgcaagttcaggtcttgggcggggcgtggagggccaggccccgcccctcgaacgacggccttaagtgtgcgcacgcgcagggggccgcgctttctccgggcggcggcaccgcccacagcctgggacgtcagcggcgcgcgacgtgctttgctgtataaatgcggtggcgcccggcgtagggacacttcggtcctgagcgcttgggagttaggttgtttgccggcgtagcggccagcgcctgagcccgcccttgatcttcgctgtggcatggcggacgaggggaagtcgtacagcggtaagtgctggtcttcgggtcgggaactggctatctggggcgcgggtgggcggcgccggcctaggcctcagcccccggggcgtgaggccgctaggggcccggcgtccgcggggagcggcgcgcggggggccgggcactcgaggtggacacccgagttgttgactcctggattcctgctggcatcctggtgttgggggacctgcggctcggagcggatggctcgggggtagggtgacgggattcctttgaactttgtgggtggttgatgcctgtcagttaggtttggcggcctgactcttcctttaatgtgagtgagtgccctgctcgtgggctgccctgatgccctattttttactgcgtccagtcggtcttgaactctcgggcctgggctttggcttaatattcgagacttacacatcaact

SEQ ID NO: 65655 - DNA, 1094 bp, Homo sapiens
caaggacaaggacacatcctctgacccagtgaggctcccctgccctgatggttgggggaggtgggctggggtaggtgcctaatgatcacgctggggaagggaggattaaggactctggaacggactcttatctcctattctttacagctcctggaactgagagtgggccctggggtgtgtaggatgcgccaagacccagcacacccccatgtggttgccacaggtgggaaagagaatgctttgaagatatgggacctgcagggctctgaggaacctgtgttcagggccaagaacgtgagtgacaagagtgtgaaggagctgttcctgaagtcgagggaggctgaggccactgacgatgcattagagactagatggacttagggggcgaaggagggctgaaaacaggggcacatcgagccccccatagccctgtcctccatctgcccaccccaccaggtgcggaatgactggctggacttgcgggttcccatctgggaccaggacatacagtttctcccaggatcacagaagcttgtcacctgcacagggtaccaccaggtaaggtgtcacctcacacctgccttctcctgggataaagcagcctcctggagaaatggcccccacggtttgacacaactgctcttctcaccattctgagttcagaggagcaagcgcttccccgtctgttccaaccctgtccctgagcccatgaccttcctctactgtattctagggtggagtttcctgaactatgcctgttttcctcccacctggaagagaggaaaggagagtggatccccttcactgtgggaattatagggtgcaggtgtcagaggacattgggctgggtgttaagagaactgggttctggtcctgatgcagcctctctgatttgctttgggacccaggcctgagcctcccatctctggcctcagctcctcagctttacaggaagggcccgaatggggaatctttatggtttgtctcatttgaggtcttgagacacgggcggggctgggtcactgtatttgtcctattttctttgcttctgcacattgaagtctgatcttggtcatatgcctctgctcaaaaca

SEQ ID NO: 65656 - DNA, 1322 bp, Homo sapiens
cctggtttcattttcgtaaagcaaaacaagcatggaagctttactgtttcggctcttcaaacttccagcaactacactgcgctgcatcggactcgacgcccgctggtgacgcacacgctgcgccggaagtgtgaactgtctgcctccaggctttgtcatggcggctgctgctgcacgctggaaccatgtgtgggtcggcaccgagactgggatcttgaaaggtgggtggcaggctcgggcgtcgggaagtgcaggggtgcactcgcgcccctggcgtgactgacgccttcgtctctcaggggtaaatcttcagcgaaaacaggcggcgaacttcacggccggaggacagccgcggcgcgaggaggcagtgagcgccctgtgttggggcaccggcggcgagacccaggtgagtggcccctggtcgggccggagctgggggcctggggcgcagcagcctcgctctcctcgccatcttgcccttctttgccgcagatgctggtgggctgcgcggacaggacggtgaagcacttcagcaccgaggatggcatattccagggtcagagacactgcccgggcggggagggcatgttccgtggcctcgcccaggccgacgggtaagaccaatcccctcgctaaactcagggccgaagggagagcgttgatgctccctgaggatactggaatgatggcgacaggcaaactcttagtgacacggctttgaatgggtgacagggacctgggtttctgccttatgtagttcatacctgtaacacacatttattgaacacctactgaattccaggcactgggagaagtacaggggctgccggtaaaatttctgccttcaaaaagttctcatcctctaaggtttttcacctgactccattataatcctctaagtaaccatgggcaagtcatttaatagttttgtgtgtgtgtgtgtttgttttttgttttttttttttttggagacggagttttcgctcttgttgcccaggctggagtgcagtggcgcgatctcggctcactgcaacctccgcctcccgggttcaagcgatactcctgcctcagcctcccaagtacctgggattacaggcgtctgccaccacgcgcggctatttttgtatctttagtagagacggggtttcaccgtattggctaggctggtctcgaactcctgacctcaggtgatccacctgcctcggactcccaaagtgctgggattacaggcgtgagccactgtgcctgcttgtcatttaatagttttaagcaaggctgggtgtggtggctcatgcctgtcatcccagcactttggaaggccg

SEQ ID NO: 65657 - DNA, 3938 bp, Homo sapiens
ggcaactggcgcggaatcgacacgacggcgatcgaggcttcaggaggctgtagctccatggaggcggatcctgcacacaggtttggggtgtgtgggcaaggggcagctcagaacagggttagagggtaggcagtcgtgaccgtcagtccaggatcgccgtgaggcagtgatctcaccgctcctgccacatgcactgggtgagaaaaccaagccgcaatgcggtcggtgagccagcacgctcccgtaggacgcatgcgcgcctttttcgcgccgcaagttcaggtggcgctttgtctacgccctccttccctggaactctctacccacaactccccggggtcgcatgcggtcaacgtatgcgcgtgcgctcgccgtagccccgcccccaaatcccgtgggcctctgcggcatggtatttaatcgtctccccggggagattcgttctcatttttctactgctcgtggtaagtggcttcgtggtctttatagctgttactcttttgtactttgtctttttcttttattttcttttgagcgattgtgcgaacatagcatagcacgcactatgccttctgtgttgtagctgcctggccagggcgactggcggataaggtcttgtgcgtggcctcgaggcttaaaagtagcagtggggctttgtgaaggacaaaatggcgatggcgggccgtgtaggtcccccttcctatgatgaggaccttttcacagacctgtactgagctccgtgaggataaataactctgaggagatgggccctgcaagcctcttgcttagccgtctgttcagaaaatagcgttttcgaaatgccctgagttgacctaatgtcttattgggctcctgtctgcaggatttacgcgcacgttggaaccgaagagagctctgttgttgcagtaagttcttacggccatttcttaatctctgctctttcgttgagtgtgtggaagttgctacggggatgattttacgaactgaactctctctttctgatggattagtggagaaaacagaaaattctgagtagcactgtactgtacgcaacaaatgtcagggccctattgatttgtctgaggtgttagtgaagggtgttattttttcagatgttcagcccacaagagcttactggtgaaggaatgggacaagacccatctttatgcaaagccagcgttacagtaatgttccaggtaggtgtacatggtttatgctcttacagaggagaccttgtagataaccactccatgatgaacacaaaatgacaagcatatggctgaactttcaagtgatgtcatcttactactgagaagtgagagagaggtcttaaggggtctttgaatgactatttttaggtacataaaatgctttcctctgttgtctacagcatctcataatctatcctggggaattcagctgcctcccagggtgaatacaggtaattatccaaattggtgtatgtcatctttgtaaatgttcaagaaaacaagtggccggcggaacaatgttttttggcgccttccatcttgttcctcttgaaatgattttctggggagggagatcgcaacccggtactacagttcttgtaagggtgtgctgttaccctcatccatatatcgatcacgttactgtcagatgatttgaattgataagctgatgttctgtgaggtacaaaagttaatagcatgttagagttctgatggcagttgttgtttatgaataagcttcattccatcctaataccttaaaataactaatttgctttcctttccaggtattcctgatgacagtctgcctctatcttacagtaagttgtttttcgaattctatgggcctattatctaatagataacttagccattttgatatttgttaccaaagcctgcttaacccataaagttttctggttcctcttgttctctgtagtgatgtttctagatagatgcccactgatatatgccccttttttctcagatagatgcccactgatctgcccagggtcagacgaatgcttgtcagttgtagctttccaggattctgctccaatgaggaggaaacatcctgccttacccctgttttagcctgggaaccagtaattgtgaactcaccagggttaacatgaagagggcatgagagcttattccataaggaattgtctgagacatttggttaccttttcttagtttgtccattagcaaccgtaactaaaatagttttggctgtttgggataattagctaattgaatgattttttgattcaggagcagcttgttgctatataccattgaaaagccttcagagctgagaggttagttgatattttttgttccttacagcttatgccaccaagtaggcagtttctatgatgaatcaaactagctcactatgaccgacagtgaaaatacatgaacacctgagaaactggagaacgcagggagtggggggtaaccatgtctgaggaatctttcacccacagctttgtttttctctaggtactactaaccaataacctgcttggctcaaaggtgagtaatttcacggtattcaatgcactcagtatatagggtaggaaaaagtgcctttttaggcctgtgtttgtgatgacttacatggaatctcgttcggctgatgacttgctgttgagactctgaaatctgattttctgagaatgatgggtgggaacaacataatgcgggatatgagaagcactactgacttggtcttcctcctttcagggccagcaccttctctctaaagcccaagaggagtttgaggtaaatggctttgcaatagttaccatcaatggctgctatataaaattttctgtgatttttgtgtgtgatagcactgtggtctgggtgaatgtacacagacataactggcttaacccaaagtctttgatctcctgaaccaccagtgatgaattgctgctcaccagtgatgagttgaataccgccccagtctgatcaatgtgtgactgaaaggtattttctgagctgtgagcctgccttccagtgacatgttctaaaaattgcaagttatttgaggaggctttacagccaataggaagttcttgggctaagtagtgtttcctataaaatgtgccctgaaacttctttctgccaagcaatagatacaattgagagattgtaaaatgtgacatagaatgaaagtctctcaagactacatttttctttcttgattttgcaggaaaactaggtgtctgtgttcactccaggctgaagttacaggtgagtaaacctaaatgtaaggtggactatgctaaaaattcccaatgaagaaactttcacatgtcttactctctgtcctagtcccagagcctgtaaaggtgaacccactgggactggctgggggagaagaggaagatttgttccagaaggaactgtctgagggatgataaagatttctatacagagaaagggagtaatcatcacttgttgaaaacattggttttattttttccaggtctgagcaaataaggtgtataaaaaatggtaggtatctgtttaaatatttaactgattttataatagcaaccttttgctcctaggttacatagtgttaaatattgtgttcatttgtattttccaatccaataagaacttttttttttacctctgcaggaatctgtcttggaggacatcagaaggtgaattttccaagttcttggacaacctagctgttgaaaagctttctgggtttggggggtatttcagatgtaccttaaagtgttagcagacacagattaagacactgggagccaatgaaacagcagttgagggtttgctgtgtatcacatttctgtattttatcacccccttcctgcaacattatttatctggaatctacctgcccttttgttttttagatacaagggcttggttttgttacccaggctggtttcaaggccatag

SEQ ID NO: 65658 - DNA, 1027 bp, Homo sapiens
cacaatcgctcaaaagaaaataaaagaaaaagacaaagtacaaaagagtaacagctataaagaccacgaagccacttaccacgagcagtagaaaaatgagaacgaatctccccggggagacgattaaataccatgccgcagaggcccacgggatttgggggcggggctacggcgagcgcacgcgcatacgttgaccgcatgcgaccccggggagttgtgggtagagagttccagggaaggagggcgtagacaaagcgccacctgaacttgcggcgcgaaaaaggcgcgcatgcgtcctacgggagcgtgctggctcaccgaccgcattgcggcttggttttctcacccagtgcatgtggcaggagcggtgagatcactgcctcacggcgatcctggactgacggtcacgactgcctaccctctaaccctgttctgagctgccccttgcccacacaccccaaacctgtgtgcaggatccgcctccatggagctacagcctcctgaagcctcgatcgccgtcgtgtcgattccgcgccagttgcctggctcacattcggaggctggtgtccagggtctcagcgcgggggacgactcaggtactggatcccgggctaagctcgggaggaggtcccctttggtggggccatttcgggaaagtatgtcaggacgtaagtgcttcactgaagacaggatctgattttttcctaactggttccctatgtcctgccttctggtgcgttttctttagatcttggactactacgggccaacattagctaacatttatggagcaccgttttaagcacactatatgaatcgattaatccaccaaaatcccaagagctaggtaggatgacaacccccattttattgatggggaaccctaaagagctccggcggtgctgcctgctgcaactcctgcctgatcaatatggttgcagtcagctatagactgttttactgagaccggacaacattagttcagtcgtttgtggtaaacatctacgtgtacaagcacactttataa

SEQ ID NO: 65659 - DNA, 1134 bp, Homo sapiens
tctgtgcctccgcgcagtttcggctactgcatctgctcagcagcaggcgcggcctctgggaaggggcagcggagccccgccccggcccgccccttaaggtggaacctcggggactgccccagccgtgggcggctcagggtagtaaagtcaggaacacgcctccgacagtacttcctgcatggtccaatttctcatctccaacctgtctaaccctaaagttcttttcaacctgattctgggaaggcctggcacggagccacctttaagtggactaggcctgtgatcctgccccaaatcccgaggcccctccagtgtcctttaggccttaccgcccccaaacgcccctcttcttccattccggcaggctagtgactaccccaacaccatcctccatttgcccctggttcacggctccggccgccgtctggttttcccaactttgcatggctacttgcactctcagaggcagccagtcacaacttctgccttttcccccaccaaggcttgccctctcaggcctctgggacttggcgctagacctctgctagacctctgcttccgtgcacggcttactcccactcgtttttcaagactcatcttgaattcatttcaagaaattcctcatgcagcaactatttattgtgtactcactacaatactttgctttgttaactttattgaatttaacactaatccagccttcttcacagtactttaaaatgaatggtttgggcaggaaggttgaggtagacaccccccttcttatcctaccccacccccagctgctagcacctggatgtttggcagctaggaatcagacatccagaagagactgatagggctgtaatgaacataacagagctaggtctcagaggcatccaccttttttgtggaatagaccagaagatgccatggccagactcttacccaccttgcaggaactcccacagttatccccaaactcccccaaggtcctgtctccctatcacttcactatgttaggccttggaggcagctggtactgcagaggctttgaagaagcctagaattccctccacagggtccttggattgaagtggggcagagacagggttcacagcagggaactaccggacatcaacaccgtggggtgcc

SEQ ID NO: 65660 - DNA, 5710 bp, Homo sapiens
cccagaggcctgagagggcaagccttggtgggggaaaaggcagaagttgtgactggctgcctctgagagtgcaagtagccatgcaaagttgggaaaaccagacggcggccggagccgtgaaccaggggcaaatggaggatggtgttggggtagtcactagcctgccggaatggaagaagaggggcgtttgggggcggtaaggcctaaaggacactggaggggcctcgggatttggggcaggatcacaggcctagtccacttaaaggtggctccgtgccaggccttcccagaatcaggttgaaaagaactttagggttagacaggttggagatgagaaattggaccatgcaggaagtactgtcggaggcgtgttcctgactttactaccctgagccgcccacggctggggcagtccccgaggttccaccttaaggggcgggccggggcggggctccgctgccccttcccagaggccgcgcctgctgctgagcagatgcagtagccgaaactgcgcggaggcacagaggccggggagagcgttctgggtccgagggtccaggtaggggttgagccaccatctgaccgcaagctgcgtcgtgtcgccggttctgcaggcaccatgagccaggacaccgaggtggatatgaaggaggtggagctgaatgagttagagcccgagaagcagccgatgaacgcggcgtctggggcggccatgtccctggcgggagccgagaagaatggtctggtgaagatcaaggtggcggaagacgaggcggaggcggcagccgcggctaagttcacgggcctgtccaaggaggagctgctgaaggtggcaggcagccccggctgggtacgcacccgctgggcactgctgctgctcttctggctcggctggctcggcatgcttgctggtgccgtggtcataatcgtgcgagcgccgcgttgtcgcgagctaccggcgcagaagtggtggcacacgggcgccctctaccgcatcggcgaccttcaggccttccagggccacggcgcgggcaacctggcgggtgagtgcagcgcgcccccgtcccgggtacctccggttgaatctggtggcttgcaccgaccccctcccctgtccccagacggatctagatggttcttccctccatcccgtaccgacgactgttcccccttcccccaccccctccccggcacattgtccttccctcctttctttgaagaaagccgacccgcccctcactccgtcacgagggtgggtgactcagcgtcctccttccccgcggcgccagaagccagttgcaaccggtttctgaagtaatgtgcaggactccttacatcagctcctctgagtctcgtgattcagccttgcctccctctctccccctttgccccctccccgtcccacccttaggcgctgggagaagggagggtggggaggtcaggggcctctcagaggggcctcacttgttaacccagcccccatttcaggtctgaaggggcgtctcgattacctgagctctctgaaggtgaagggccttgtgctgggtccaattcacaagaaccagaaggatgatgtcgctcagactgacttgctgcagatcgaccccaattttggctccaaggaagattttgacagtctcttgcaatcggctaaaaaaaagagtgggtatcctggggttcccaaggaaacagctagaaaggacttggccagaggaaaagtaggctagaacttttgtctggtttcctgctaactggctctgagttttcctagggcaggtagaggggagatttgttagtcttcagcctaaaatggatttgtccagtcgtctgggggctttctacttggctgtggaatcttgagcaggtcatttaacttctgggcttcagtgcccttatttgcaaaatatagatatttactaaaccagtggttttaaacttgtaaaacagtaggtttttttggggggggggaatcccaaatattgttttacgactcgatatagacacatgtttaaaaaggttcactttgggagtggggaacacaggggccacttctctgcactataaactttctgccttccaatatctttttttttttttgagatggagtctcactcttgtcacccaggctgcagtgcagtggaacgatctcagcttactgcagcctcctcccccagggttcaagcgattctcgtgcctcagcctcctgagtagctggtactacagccgtgtgccaccacacccagataatttttttatttttagtagagacaattttcaacatgttgaccggtctggttttgaactcgcctggcctgccttcccatatcttaaggcccttccttgctcacatctgtttcaatggaatgaattttgcccgggttcaaattcaagcttttgtaccaagtaatacataggaaacactcagtgacttgcatttgtgatttccttattttcccttaactcatagactgtctcatgattgcgtcttcctccgttgttttaggcatccgtgtcattctggaccttactcccaactaccggggtgagaactcgtggttctccactcaggttgacactgtggccaccaaggtgaaggtgagtgttggagctgatggctggtggaagtcagatgctggggctgggacagtcctttcacagcaagccctgtagacccagcctgactccagctgagggtccctttgctccttaggaccaaggaggaatgcctcctcctatagccaaaggataggccaatagcacacctgtttttcttgttccttttctgacctcttatttttcttatttccttgactctgaggatgagacagtgccaggaagggaccttctcagaagtcagtctggaagtttgatttttctttcttttgggagaggaagccctttctctgtgagaatcctgtcctgactggtttcccagttcttgtttgatgtgtttggaatagagcccagtctgaaattataagcactggggtactcctatgtgtctgggactctatgccaagtattttatagatgttttctaattctctgtataaccatacaaggtatataatttgccataggttcaaatgtgtacccagcaggctaggagtagggctttgaatgtcacctagctcctgatgtctgggtcctaggacactgacctgttcagaatgggtagaacaaaaatggaagcagatactgacactgctggtagctgtgattctaagatagaattctggactcccagcatttgggtaggaccccgggatcatccagtttaggccttgccagttactaggggaccctttaaaagttgctgatgagggaatgtttttggatggtttggcatgaggggcggtaccctcagatggaaatggagaccagaggagagagtacatggcccagagaaagggaagaaaaggagaatgggggtgaagttccacagtgtgtgcaggactgccaggattccattcagcagcactggcctcttttcaaatctaaactgccctggggctatgctttgaatttcaatctttcatccttggccttgctctgagcagttattgtactcacaccttccccaggcctcaggaaactgggagaggggggatcttgactgacattttagatcctgtctgctgctcactgattatgactgtggacgcgtctccctgcttctctgggtctgtttcttcatctctaaaataggtatgctaacattccaatgctaagtgttaaacgaagttatgtttatggacataccttttctctggggccttttctgtggctttcaaagttgaagctgtgtgatttgccagaggcaagaatgagaagtaaaatgctgtagcactaagaaaatgagtggaagggtagagctggaggggtccaaaggctaagcctttgtagtgcaggtggggaagacccaggcaaggcacaggactctccccagctcccggggaagtgtgtggtgggtgaggtttagtgtgggctggaattttctgagccttttcctgagaactgatgtctgtcctttattcttctgccccctataggatgctctggagttttggctgcaagctggcgtggatgggttccaggttcgggacatagagaatctgaaggtgagttccctttccacattagggacaaagcttgggcgagaacagagggactcagctagagcctcataatattctctggtccttgattctgcttttttctttctaggatgcatcctcattcttggctgagtggcaaaatatcaccaagggcttcagtgaagacaggtgggtgcaggagccattctgctgactcagctccaatgtgggaacccctcagtggagtgctaggcctaagaaggggggattcctagtctagagcattttctttacctttattctttctttagctttttttttttttttttttttttttttttttttttgagatggagttccgctctttttgcccaggctggggtgcgatggcgtgatcttggctcactgcaacctctgcctcctgggttcaagcgattctcctgcctcagcatcccaagtagctgggattacagacgcgggccaccacacctggctaattttgtatttttagtagagacggggtttctccatgttggtcaagccagtctcgaactcctgacctcaagtgatccacccgcctcagcctcccaaagtgttgggattacaggcgtgagccactgcgcctggccccattctttcttgtgctaaccttgaactcctccctcccctctgcaggctcttgattgcggggactaactcctccgaccttcagcagatcctgagcctactcgaatccaacaaagacttgctgttgactagctcatacctgtctgattctggttctactggggagcatacaaaatccctagtcacacagtatttgaatgccactggcaatcgctggtgcagctggagtgtgagtaccatgctggtgggaaagggggcagatgggagaagaaagggttgttgggagacagaggcagaggtgggttatggggctcactggagtgtctctccctgtagttgtctcaggcaaggctcctgacttccttcttgccggctcaacttctccgactctaccagctgatgctcttcaccctgccagggacccctgttttcagctacggggatgagattggcctggatgcagctgcccttcctggacaggtactgcttgctgtctttctgtcacagggaggttgtttatccatcttacaatgatgattctggggatggcggcacatagacgtgagccttggggtgaaaacgcgtttgattcttagtcagtagctgagtggctatgtggctttgggcaaattattttacctttctgaattttggtcatcccttgtgttactgcatttcttgaagggtggttagtattaaatgagggcatgtttttaatggtaatgcctggtacctggcagatgtttgctatggtagccaccattcatttattcattcctttattctttggacagtgggtactgtgctaggctctgtgccctcaggagctcatagtttagtgagggagccagataaataagtggagaagtacatggcagtggctgggcacggtggctcatgcctgtaatcctagcactttgggagtccaaggtgggtggatcactggaggtaaggagttcgaaaccagcctagccaacagggtgaaa

SEQ ID NO: 65661 - DNA, 2658 bp, Homo sapiens
agagattgcagtaagccaagatcgtgccattgcactccagcctgaacagagcgagactccgtctcaaaaaaaaaaaaaaaaaaaagttagccagacatgagttggggaggttatatattgatgaggatgtgaatgggaagagggatacgggacagtgggcccagggctttttttttgagacagggtctcactctgttgcccaggctggagtacagtggtggagtcatggctcactgcaagctcaaactcctgggttcaagtgatcctccctcctcagcctccccagtatctgggactatagggatgtaacactacacccagctaatttttaaaaattttgtagtagagatgagggctcattatgttgctgaggctggtttcaaatgcctgggctcaagcaatcctcttggccttgacctcccagactgctggaattacagatgtgagccaccatgcctgaccccaggcctttttaaagtcctattttctctgcttttcagcctatggaggctccagtcatgctgtgggatgagtccagcttccctgacatcccaggggctgtaagtgccaacatgactgtgaaggtaagagttctagatgggtagaaactgaccggtggagggtgggctgggcttgtagaagtctgtacccaggggagcccctcacacgcttctgctatgtttttatcattcttagggccagagtgaagaccctggctccctcctttccttgttccggcggctgagtgaccagcggagtaaggagcgctccctactgcatggggacttccacgcgttctccgctgggcctggactcttctcctatatccgccactgggaccagaatgagcgttttctggtagtgcttaactttggggatgtgggcctctcggctggactgcaggcctccgacctgcctgccagcgccagcctgccagccaaggctgacctcctgctcagcacccagccaggccgtgaggagggctcccctcttgagctggaacgcctgaaactggagcctcacgaagggctgctgctccgcttcccctacgcggcctgacttcagcctgacatggacccactacccttctcctttccttcccaggccctttggcttctgatttttctcttttttaaaaacaaacaaacaaactgttgcagattatgagtgaacccccaaatagggtgttttctgccttcaaataaaagtcacccctgcatggtgaagtcttccctctgcttctctcatagcaggaatttctctccttcctcccctcccatgcgtctcctccaactccttcattatttatgtagggtcccagggccagaggagagggggcctcccaaagtcaacagcatggaggtgtcagggctgggaaagcacccatgcctcacccatgctgggccacggggctctctggacatcttgggtcttgccgactcttaacttcatccccttcagcaaagggctctagccaaacatagttagttttcctgtttttgcagacttggcctttcacggagagtaggggtgggatggtctggtttttaaaaggtatttctaaaggatactagaggtcatgcattcaagaatttgttgaacactcagcacataccagaaactgtccctgttctggggtcacagcagggaacacagtacaaaaattcctgcctccttggggctcataccctttggggagcaaagaaaaaagacacagctgttgtagtgcagaggatatggtgacagtgtttttatggaggaaaaagtaaagcaggaaaggtgtttcagggtagagggggccaaaggaggcctcaccacggaggtgacctgtgagtaaaggcctaataagtgagggagttcacctggtgagtatctggggaaggggcttcctgggactgaggggtgggagcctggctgatatgaatgaggaaaggagtaagggatgaagtctcatcggcaaggagtgggcagatcatgacagttgtaataaggtggtcacgtagggtgcagagagtttggcagcctacgtggttggagggcatggtccccacaagtctgttttcacttcaataccagctgcaagttcaggggtccccatgaccaccttcaggtaggtaatagactagagtgactcagaactcaggaaggtattgggattatggttttattacagcaaaagcatacccagagccagccaaaagatgagaggcctggggcggggtctgggagggagctaaataagaagcttcctgctatcttgcaatggagtcctggtacttcttcccggccatgacggagatataaccagagaagctcacttgatccttgggtgtgccgagtttcccctggtgtttaatcacatagtgccctgtggctgacctttaatcttcagcccctgtgagagctttgggctaaggcctttagttgtctccatttcccccagaggttgcctgttccaaagctcagatcgtaaatcacatttatcactgacactcctgttggtcaggacattccatgggtctagagggcacttaccagtagccgagggtaaaggccagacttccaagtaagaattcttcactacacatagagtctgagggagtggaatgggagttgttggagggttttgagcagagtgacatggtctcgcttggaatt

SEQ ID NO: 65662 - DNA, 1023 bp, Homo sapiens
aagtgctgggattacaggcgtgagccacgtgcctggctggtcctgcgtttattgtgcaagcagatctgcagtatttgctgttgggatcctgttgcagtactagtgatctgcgcaggcctcatggcccttggagttagttcggctctcttagttttcttacagaaaagaatgctggctgggtgcggtggctcgtgcctgtaatcccagcactttgggaggccgaggcagttggatcacctgaggtcaggaggtcgagaacagcctgaccaatatggcaaaaccccgtctctactgaaaatacaaaaattagccgggcatggtggtgggcgcctgtaatcccagctactcgggaggctgagaaaggagaattgcttgaacctgggaggcggaggttgcagtgagcaagatcacaccactgcactccagcctgggcaaaagagcaagactcagtctcggaaaaaaaaaaacaaaacaaaaaacgcgggtcactggtgcaggcttcacttcccatgggctgtgtcctggagtgggcctgggcctctgagggtttcctggtgtaggggagagatcaagacattaaaagacccaaattaaggcccaggatcctgaggctgtcagcacagttcctgagaagacactcagcctgctgggccttggcttccctctgcctagggtttcccttctctctcagcaaccacccccacacccgccccaccttctggctgttgcctgctctgggcctcttcctgaggctccccacccttccctgtccatgtcctttcccagggtcccagctccagccctccccctttcctccttcctctgcctcctggactcccctcttaacacagtttttatcttagtgctattatggatggagcctcattatggttatgtgcttatttaattttcatcttttcccccgtcctaaccactagaccaccagggagattttcacttaagaaaagtatagtaaggccaactggtggctcatgcttgtaatcctagcactttgggaggctg

SEQ ID NO: 65663 - DNA, 1032 bp, Homo sapiens
gggtgatgctatctggtctgaagctctgcaagggcaagaattacatccctagcatcttccaataaggtctatcagaaatgtccagtggcccaaccaaagcccatgtcctctcttttcaggtgatgactttcccctgaggaagccctgtagcgtgcctggaggaaggggctctccaaccccagccccacctagccaccatgaacacttcagccccacctgctgtcagccccaacatcaccgtcctggcaccaggaaagggtccctggcaagtggccttcattgggatcaccacgggcctcctgtcgctagccacagtgacaggcaacctgctggtactcatctctttcaaggtcaacacggagctcaagacagtcaataactacttcctgctgagcctggcctgtgctgacctcatcatcggtaccttctccatgaacctctataccacgtacctgctcatgggccactgggctctgggcacgctggcttgtgacctctggctggccctggactatgtggccagcaatgcctccgtcatgaatctgctgctcatcagctttgaccgctacttctccgtgactcggcccctgagctaccgtgccaagcgcacaccccgccgggcagctctgatgatcggcctggcctggctggtttcctttgtgctctgggccccagccatcctcttctggcagtacctggtaggggagcggacagtgctagctgggcagtgctacatccagttcctctcccagcccatcatcacctttggcacagccatggctgccttctacctccctgtcacagtcatgtgcacgctctactggcgcatctaccgggagacagagaaccgagcacgggagctggcagcccttcagggctccgagacgccaggcaaagggggtggcagcagcagcagctcagagaggtctcagccaggggctgagggctcaccagagactcctccaggccgctgctgtcgctgctgccgggcccccaggctgctgcaggcctacagctggaaggaagaagagg

SEQ ID NO: 65664 - DNA, 1058 bp, Homo sapiens
actgggactacaggtgtgcatgaccacacctggctaattttggattttgtatatagacaggagctcactatgttgcccaggctggtctctaactcctggcctcaagtgatctgcctgtcttggcctcccaaaatactggaattacagatgtgagtcaccacatccagcctcttttttatttttatttaaaaaaaattatatcatttttaattggcaaatcataattatattacatatatgaaaacaatgtggtgttttgatatatgtatgcaatgtgaagtgattaaatcaagctaattaacatcacttcatttacttgacattttttgtggtgatacttttgaaagtcacccttctagttatggtgaaataaacaatacatcattattcttgactgtagccatcatgctgtgaaacagatctcaaaacgtattccacccatctagctgaaactttgtaccctttgatcagtaactccccattcctttccccagccccttccccccgagcttttggtaaccatcattctactctctacttctgtgaattggacttttttttaaagataccatatataaatgagatcatgctgataaccctcttgattccttcctccctctcctactccacaatcacttgatcttcaagattctagctttttgatatttcttgaatctggattcttctatttccaatactactgccttagtgtaggcctcatcatcttgcacttagattaataatgacaactgatatttattgagggtgttctaggtactgggcactgttctaagctctttccatgttttaactttaatcttcacaataaccttattatgtaggtgctaatatcatgctattttacagataaagaacctgaggcccagatgaggctgctgcagcaacctcttgacaggtctactggacttcggcctcatcccttcctagccattctttccctgataacctgaagggctaaaacgccactcaaatcaggtgcctgtcttgcctaaagtgctcactggcttctccttgccctttcggtaaagataatgccc

SEQ ID NO: 65665 - DNA, 1113 bp, Homo sapiens
gcttcctttctcagcattacctgacctttgttattcaggtctcaacttaaacataactttctcttggaagactttcctaaacctataggtttttatttcatactaaatggttctcaaacatgaccacatggtgcaatcacttgaagacctttaaaaacttttagaaacctaaatttccctcttagaccttctcatatgattgttttagggtatactctgggcatggaggcttttctcaatttcccagatatttctaatttgcaatgacaggctgagcatcactgacctagcagaacattttaacatattatatataaatgcttgtttaaactttggtctccctgtgacttaaagcattataatagcaggatgccttctactttggaattcattactcaaaatgtgtaggtgtcagacatttaataaagaagcaattagtatttgctgaaagaatgaagactaaggacctacatgtgactgaaggctggaagcatgattattacttgtgttattctaaacacccaggtcacatactcatgagacgagaacagagcctcttacctcagtcacgatggtggatgagaaggagattctgtcatacacccagccatccacacagggctccatgtctgcgtcacttgtgttggggaaggtcccattcaggtgaaggagctgccactgaggatgaacaaagcgacgacacttctctggcctcatgtttgagtccagtgggatggagattctcaagagtgcatcttggctgagggccccagtgtcattgtcagagacagtgtcattgtccaggatgtggacccagcagcgatggccaggtatgaatgcagtgaagttctccagcataaaatgaaggtatgtagcaacagcaaagattgagagaaaaacagtctgaaggatctggaatctccacaggtcaccagcgtgacccaggaggtcctgaaaggccattgaggttgaacagttgatcctcaagtagaggcaaaatgactgtatccagagaggttcaaagagggaaaatgttttctttccctaagtcacactaaatgtgttttgatcctgaccccactctcttcttgacgactgtgcttcccctctgca

SEQ ID NO: 65666 - DNA, 1121 bp, Homo sapiens
aggttcttacatggctgttgatgcaaaagaatacatatttttttcagtgaatgattagcttaagatccatcaggctgttcacttttattattattttttttgagatccaatttcttcttccctggtcagtgtggtggttaagagcctgggctcctggagtcaggccaacgtgggctggacctggtctctgccttttgccggctgtctgacctcaggagagttagtccagctccctacactttggtaaagtacgaatgataatactcatcttggaggattaccttgtgaattaaataagagcatgtttattcttagcacactgaatacattgtagtagtaaaaatagtcatgattatcctcattttttttttttaaattatcctcctctttttttttttttttttttttgcttggctcatccattgcctggtcccctggcctctgtgggccacagccacttgaatgggaagacactgactaacaccacctataggaatcactcttactctcttcatactgctgataaccagctgtgcttactacaccaaccctcatgtttgttaggcggttcctatacctgtctacagtgggatattagttacctttgaatgggtatcctcttatttttttcttcgatcagttgggttattcatgttcaacaactatttatatatgaatgttaaaggtgatcaacttagaaattgagtaggtggtacatagctaactaggtaaagaaagggcaatattgccaatgtttgtgaagattgcagtctgttggtcatggtctggcttcaacttccctgagagttgataagagctttcttctggggaatcagtgggcagggccatgagaagaacttcattagtgcctgaatattgtcaggttaaaaaggtgatgcagtgaaagaaagcaggagaccaggggatggtggcacttactacatctatctcttggggataacagccttcaaaacatttgtgtcttgtttttcttttcttaaaacaattttattttaggccgggcacagtggctcgcacctgtaatcccagcactttgggagactaaggcgggcagaccacttgcggtcaggagtttgagaccagcctggccaacatggtga

SEQ ID NO: 65667 - DNA, 1589 bp, Homo sapiens
tgagttatagcaaaattaagtagattgaatcaagtccatgcaaaagcaataaaacagttttaattttttaattttttaaaaattaaaactttaataaaacagtttttaattttttgctaggttcttttaaaaaatgatgtaacttacatggaagtcttcacaggacttttttctttcctggaactattgaaatgtaatttaggatgatttgatcttccatctcaagttgtcaacatggctgtgtcattctggcttacatatgttttatttaacaaaattctagtcaagggataagggcataatgaagacaagcttcagttatgaaagtacaaactatttgtgtgattaatttttaaaaatgacattaagaagcccattgtaaaataatatttgcagtcaaatggtttttcttgctgtaagtcctgttgtagctatgtttagggtagtggttctcatctaccttggagtgcataagacttacctagcaggcttgtttaaaaagttcagattcctagctttgtacccagggattgcctcaggtggtatgggctgtggtcctggagtcatcacttttataaatagtggttcagagaccacagagagagactgcttcatcgaatgggaagtaccaaggagaaagtacaattcagtattgtctggaggcaagtggacactttgtacctgaggtttagaataggtggtctcttgccagtacaatccccaggcgttttctgtgttcagaagtagtaagaatgcctttaattcagaggattatctaagctctttaaagctgtttttctccattgtcatagtgccttctctgaaaaatgaatgtacaggtatcctattttctaatgtaattaggattttttaaaagcaatttttgatagtttttcttttaaaaagtaaaattcagcactgtgacttgaacccccaaatctttcacatacaggtgaaacattaagccacaaataaaaataatgaacaagaaagaagacaagatcctaattcctgtcattagtgacctaagtaccccatatcagaaactttgcaaaacagatctagggacagaagggctttgaaagacatttttctttggggcaaatttcgtgtgccagaactacagtttaaatgtttttatgagcaagggaaggtagcattgattcccatagctttctaattagatacatgctgtcatggatgtaagccttaaaggagttaatactaatcttgtacatacacaaattttcctcaggtttttttattttaaaaaatgatttgttaaaagtactgtctgctagacccttgcctttgagtggctttgaaacttaatatagtttttaaaaagtgcaatgggatgagattatgctattagtatattaaaagcatgtttctgttttactccaatttgtaagatcatttaatggaataaagatcacaacaccatgttatctgtgttttctttctctgtgtttttaatatgggaggttctgtgaaatagtttggcttggcaaagtgaataagacttctgacgggatagtggcaatgtggtttgagttagctttctctgtcctacaaaacgacactga

SEQ ID NO: 65668 - DNA, 1081 bp, Homo sapiens
agataatttaacttttgttatgggagggaggtaagagtgtaaattttatatacatgaaggtaagatctgagtgtaaactttacatacatgaagtatgaatggaaggtagaaaaaaagtcccttttcgcatgtaatctctttatcaaagaattttcttttgacactttaccactgaagtatttttgtaagtcctaaattcgcagcatattgtttcatatttatatgccatcttgcaaatagttcttgctattttattcactgctgttacactttagaaaaattccagcttgtttacttgcatttatcagtgatgccaaccaagctttgactgttaacttgaaagcttgcttctgaaatgttggtgcattttcaggtgacctcttatctctctgaaagttcatacctattagcaggctctgtaaatattgacatacttagcttttaatacattctataagtaaatttatagatttcagaataacttaaaaaatttaatggtaagaaggggtgatgtgtcgaaaactcatactaaagtattaggtcactttaaaaaaagtgataatgtatgatttaatgaaatcttaagattcagttactatttaaattcaccatttctgttttggtcttataaagagaccttggtttaattatccagaggaagtcctcttcaccattttttttttttcttagttctgcttctggaaagtgttttataaagttttctcagtgagggttcttaagagttttctttggcctcttttctctcaacagtaaattgatgattttatatcagctttttcaataaaagatgcattatcattactggctataaatcatcctggggagatttataaccaggttaaaaataatatcttttacttctctcaccttttacttgtggttcagatgctcagactgtgcctgtttgcgtcgtgtctgttgctctgccgctttccatgcaggcatttttaattttacacaatcctaacaatatatggaactcattcctatgaatatataaaaggaggcttccaaaattttctattaaaatatttcaggataaattaagtgttgataattt

SEQ ID NO: 65669 - DNA, 2825 bp, Homo sapiens
ccagcccaaaaatagccctttaatgcaaaaacattccaacttagacatactgattgtgttcccctttggcaacttttttttttttttttttttttgagacagatttttacgcttttgcccaggctggagtgaagtggtgtgatcttggctcactgcaacctctgcccactgggttcaagtgattctcttgcctcagcctcccaagagtagctgggattataggtgcctgacaccatgcccagttaatttctgtatttttttttttttttttagtagagacagtgttttgccatgttagctaggctggtcttgaactcctgacctcaggtgatccacccacctcggcctcccaaagtgctaggattataggcatgagctattgcgcctggtcggcaacttctaattacatgctcttcagacataatttttatgtgattctcacttctcaccccctctagattaatttacttcattgaaaagcaagaactttgaaaaaattatgaacttaacgaaaaatgttcggttttgagtcctactggattaggaaagggatggtatcttttttatttaaaaatcttccaaaagccagtggcttggttatttatttattgggttgcttatttatttatttataaaattttttttggagacgaggtcttgctttgtcacccaggctggtatcttagctcattgtaacttaaaactcctgggctcaagtgatcctcccacctcagcctcccaagcagccggtgttacaggcgagtgccaccacacctgactaacccagtagctcttggacattgacatggtcacaagttttgtagatctttgagatgatacatttgtttttctgagtaacatgaacaggtgagttgggttagcagcttgtgaagccacaggagctgcctatcctaccctagccacagagcagatgttcccctggctctcttgggagttagctgctgccacagcctctctgtatccctgcattttcattcaactgctttctgtaacatgccgatgatggagacaggtttttgaaagtttaaggacttactttcttgttgctgtgttgtattttattaacttatatgttgaataaatggacttttgcaggcttcttctcatatcggtaattccactcaggccactgtgagggatgcagttgttggaagaccatccatggataaaaaagctcaatagcatcttaacgtgaagatcaaacaagaacacaacaagcccctactgatttctgggtttctgccacggccacaggttcatatccagaggaatggcagatctgagacgatccaggaagagctaaaacatggccctgtaataaatgagcagacctctcctgtggtttcaaattattaaacacacttccatttctcttggaagcatttcttttccttgctgttatagatgcaagcctgtgtctattttcatattactctgctttgtgcactttatggaggaggaagctagaggaaaaatggaaatgcagcttttaagttctttatgtgccacttagtgccttttaagattgattccatggttttgcacacacgatggggaggggatggaggataacctcatgaaaggtgccgttttcgggtgaaacttgacatttcttttatactttactcttttgagaaggattctttttttttttttttttttttttgagttggagtctcgctctgtcaccaggcttgagtgcagtggtgtgatcttggctcactgcaacctctgcctgccgggttcaagcagttctcctgcctcagcctcccaagtagctgggactacaggtgtacgccaccatacccagctaatttttttgtatttttagtagagatggggtttcaccatgttggccaggatggtcttggtctcttgaccttgtgatccgcctgcccgccttggcctcccaaagtgctgggattacaggcgtgagccaccgtgcccggccaagaaggattccttttttaaaagtttacagaacttggagaaacttcagaactaaagactaactgaaaatgatgtcattacactcaaaaaaaatttacaatagggaatcctgttgccacatagtgtggaaaaatcatgtcatatttaaatataccatactctgaaatgtgaggtttttacccagtaggctgacagttttgttgcaacttgctctattttttttttttttttggtccctatagcttctttctagaaaaagaggcaaacgtgccttgaaaagccagagtggctcataataaaaggaatgcgctagatacttcaagaaaaaagctaagtttaaatgaaccatgtgacctctgataagtcacttgaacttgtgccttggtcaggttcactgtaggtttacatatgtatgtatgttttacacaactcttgtaattgtcatttgaggggttttgtttttgagagttctgcataagaacagaactttattaaggattagagggaagatacaaatattactgcgtttaattgatgtctaatttcatgtggcttagcagcaattaataacctgatttaaggtctttattcagaatgttaatttgcattctctgccgtgtctaatgttcttaataatgaagctaaaattaacccattttatttagtgaattatctatttaattttactttggctagtctggtagctttaagatagctttgccttagcaaggatcaaagtcctacccaaatataaaaaatatctagaagtatctaagagttctttttttctatttaccttgattaggagataaaagttttatctgttagttgcttttccttttggaattattgtg

SEQ ID NO: 65670 - DNA, 1008 bp, Homo sapiens
ctcagccttctgagtagctgggattacaggtgcctgccatcacgcccggctaattttttttgtgttagtagagacggagtttcaccatgtttaccaggctgatttcaaactcctgacctcaagtgatctgcccgccctggcctccgaaagtgctgggattacaggcgtgagccaccgcacccgtcccagtgtcactgctctttccaattgatattatcaccctggttttttaagtgtgcttttcagaggaagtgaaactagactttattggtcttagtcatcttttaaaagttaacttattaatacattgttaacatcttaaaacattctaatcctttcattatcttttcatgttttatttggcacttgtttttgaagagatcttttaacatattgtttctttgttctttttaggtttgtgggggagagaaaccttatttgtctccagacattctagaggagaagcactgtgaattcaaacaacttgctctggaccattttaagaagaccaagaagatgggtgggaaggatttcagctttcgttaccagcaggagctggaggaggaaatcaaggaattatatgagaacttctgcaagcacaatggtagcaagaacgtcttcagcaccttccgaacccctgcagtgctgttcacgggcattgtagctttgtacatagcctcaggcctcactggcttcataggtcttgaggttgtagcccagttgttcaactgtatggttggactactgttaatagcactcctcacctggggctacatcaggtattctggtcaatatcgtgagctgggcggagctattgattttggtgccgcatatgtgttggagcaggtaagtggtgctgctgaagagcctgagggttgataatgggcagatatttgtgcttctgttgtaaaatatctcagtttggaagaatttcatagtgaagacatgagacagtggccactccgttggctgttgttttctgatagactgtatgttttattatccttt

SEQ ID NO: 65671 - DNA, 1028 bp, Homo sapiens
cactttttttttttttttcttgagatggagtttcactcttgtttcccagcctggagtgcaatggtgcaatcttggctcactgcaacctcctcctcctgggttcaagagattctcctgcctcagcctcctgagtagctaggattacaggcacctgccaccacgcctggctagtttttctatttttagtagagacggggtttcaccatgttggtcaggctggtctcgaactcctgaccttaggcaatccacctgcctcggcctcccaaagtgctaggattataggcgtgagccaccgtgcccggcttctctctcacttttaacaaccaatgttaaaagcactagactgggaagactgcattgtgtgttcaccttggttgaataaggctgtttggcttatttttcccttctttgtcgtcctgtgaacagatattgctggtgaattcaaagagcagttacaggcactgataccgtatgtattaaacccatctaagttaatggaaaaggagatcaatggctcaaaggtcacctgtcggggactactggagtattttaaggtaaatatgggttttagttattaaaatgtttgatttttggtaaagctgatctcactcgtaaatcaacttgaatttaaatattttgaaacttaaaaattttctgggggagatggtgagaggcattttcagagaccttggtgtccttccaggagtgggccattgggtggcagtatcggtctaagaaccaaatggatgttctttgcactctcttagaggagcaattagctgtgactaaaggaagattgttcctcaaggaagatggtgtggacaggaggtggttaggaagttgctgtgagtaggaggagacggcacctagatgtgacacgactacctcaaggcggatggtcactctgcccacaggtagtggtgaggccagcgtgcatggggagctggatgggaatcctagcctctgtaggcttgtgctgcttgagaacatttttagttaactaaaaatgctaacatgcactcaaaggt

SEQ ID NO: 65672 - DNA, 1054 bp, Homo sapiens
tagctagaatagctgctgagtttttttttttttgttttgttttgttttttgagacaaagtcttgtctacactctgttgcccaggctggagtgcagtggtgcgatctcagctcactgccacctccgcctcccgggctcaagcgattcttgtgccacatcctcccgagtagctgggattacaggagtgcgctaccatgcctgggtaatttttgtgtttttagtagaaacggggtttcaccatgttggccaggctggtcttgaactcctggcctcaagcaatctgcccaccttggcctcccaaggtgctgggattacaggtgcgggccaccacgctaggcctagaatagctgctttttgagaatacttttcatcagatgcaagatgactgtgttgtcagcataaagaaaattgttatcttcctacttactgtcacagggagacctaatacagtaactactgagttgtttagttggaaattaacacaggaggctttgtagggcacagtcttctttgacaccactaaagattgagtttgtttctgttatgagatagttcttgtctattctaattttaaaactattattttggtgtagccttcatagaaacatgagtagcatatagggtctgtacagcttgttaaagtgacaagtgtagcatctggatcctgctgctacttgtgtgaggtattttttgaaacactccatctttcagtgtgatggaaattgaaaccatacaaaaaggttttttggatatgtaatacattcacatgtttaaaattttaaaaaggattaaaaagtactcagtgaaaagtctctcttccatttttgtagtctttcagagtttctttagtatatgaaagcaaatgtgaatgtgtacagaatggcctgttatgtatacttttatactttttcactgcaaggttataaagtatttttcccatgctttcttgaaattttagtttcatttttcatattatagtctggttggtggagtattaaagagttcttatttgatgtgggctcctacctgctttttttcagtgtatagctgggaac

SEQ ID NO: 65673 - DNA, 1025 bp, Homo sapiens
gcttggcaagcagtggacctagaaccttttacctgaaaagcagtttcaagggagttttcagagctgagtagggagagaaagttaagtgtgtatgtgtatgtctctaggtaatatattgtttaggattataatgctccattattggttgtacttttcccaacctgaactcagatttgttcatcactgatagggaatgtgtccagtggaattcttaaatggaggtgttaggagagggtgaattagagtgactcctagtgattatccagtataaacacacacacatggcattcttccatagtttcagttttagtattccaatgcattgctttaaagttcattttcatttttatcattcagggagtaggcagagttttttaaagttcagtaaccctggcttttgaaatttgtgtcacttttggttgtattaatttcctgtggctgcctttaaccaattaccacaaactaggtggcttaagacaacggaaatttattcccccgcaagtcagggagccagaagtccaaaatgatggttggttccgcccggagactctgaaggagaacctgtcccacactctctcctagcatctggaagttgccagcagtccttggcattctttgacttgtacctttagttgcctccaggttctttgttgtcacatgaccgccttctttgtgtgttctgtctttttcttgtgagcacaccagtctttggatttagggcccaccttaatccagtatgacctcctttcagctaattacatttgcaagactgtttccaaataagattttctgaagttccaggtggacatgcattttgttggggagggggatgctgttcaactcactatacatatatgtagattatgaatggtttaatcactaaatattaagcgtgtcaagtttcatatataacatttataaaatagggaacaaattctgtatgagcaatctttagtctcataattatgtactatttggtttcctcatcaagatagagctatataaaatgcactggtaagtcttaa

SEQ ID NO: 65674 - DNA, 1030 bp, Homo sapiens
aaacttctaagacattacagaatagataaatctggccgggtgtggtggctcacacctgtaatcccagcactttgggaggccaaggccacaggattgcttgaggcctagagttcaagaccagcctgggcaacagagcaagaccttgtctatataaaaaaattaaaaaataagccaggagtagtggcatgtgcttgtagtcccggctacttgggaggctgaggtgaaaggatcacttgagcccaggaattctaggctacagtgagctatgatcatgccactgcactctagccttagtgacggagcaaggcccaatctctttaaaaaaaaaaaaaaaaaaaaaaggtaaatccttctactttaccccctttgtagaagctggcattatgcaaagatgtattgcagttgttctcttgaaaatgtgtttatgcatgttaaaatatgttccgctcttttcttaaatagacactgatgtttttggttagagattggagtttcccttatgaatatagctatggactccaaggaggaatggcatttttggataagcgtttacaggtaagtgggactataatcttctgatgaattatctcaaagtagtgatagctttctcatttgcttttggctattgtgtttaaagcaattattgaaaatgatattgaatacattaactatatatgaatcttaacacaagctaatatttattcttgacaagattaaagaacctgtatatacagtacacaggaactgtagaagaaaactctgggccagtgcccaagctttgattataatttccattttacattttaaaccaagttctatatgtgtctttagaaatcatactcagaattttagttatgttattcttcaaaatttttacttattttgggatagatataaacaggcctaacctgttcccccaaaccaaaacacaggaatcctttgtctgtcactactaattggttagatcctccttcatccccacaaaccatctcttgtgtaatactcattttaatgaaactcttatgcacct

SEQ ID NO: 65675 - DNA, 1975 bp, Homo sapiens
gtgggcctactctacactctggttttcagtttttattggagtcacaggtgggaatgcatcaaacaaaagatataggctctggaatgtacgggaaagagagtttccataatggaagcccaaagacatttctaccgttaaaatacataatctgccgaccctaaaacattcacataaagaggcaggagggaatactatcccgcagctccacgattagccgcagtcgtgggcggggattggggcttggatacgccttttgcgtctggtccccaagggacgctccccaaccctcggcgcgcgaggcgccgcgtgaggccggctttgcccctccttccctgcaagagcgcagaggagcggttcttgcgcctgcgccctgcgccgctgcgcgctttggcacccgcttggggccctttgtgcgcatgcgcgctcgcgctcccgccctctagctgcgctcggctgagtcagtcagtctgtcggagtctgtcctcggagcaggcggagtaaagggacttgagcgagccagttgccggattattctatttcccctccctctctcccgccccgtatctcttttcacccttctcccaccctcgctcgcgtagccatggcggagccgtcggcggccactcagtcccattccatctcctcgtcgtccttcggagccgagccgtccgcgcccggcggcggcgggagcccaggagcctgccccgccctggggacgaagagctgcagctcctcctgtgcgggtaaggcgcgcggggagcccccgccctgggaaagagggcgagcgggagcctgggggctggggggattaggaggcgaggcgggaggaggacgaattaccctcgactactgacggcttcagccccccggggacgagcgtttggaaaatgggcaaaggggaaggggaacgtaaggttgtgcaggcggtgaggaaatagcggggtgtgaggaaaacaggttgggggcggggagatagtccagtgggcgttaacgccaagactgggcaggtggggaaaaataccagctcgtgggataaaatggagagttgctcgatgcatatggtgaacctgggtgatttagtgaggattagagagattgaaaggatacgggcaggtgggtggtgggagaaacaatttgttactatttttgaggggatggtggtgaaagggttgcattgcaggtttgcagacaggtgttgacataatcaagcattcatgatagtcctccaaaatatttttggctgcccatgggaaggatgaggaagtttaatggaagcattgtagcctgttttttttgtttgtttgttttgtttttactgttttcggctagactccatgaatgccggatttttctgaggctccgaggtagaaggaggcgtgatgagaatagctcagggaagatttgggagggagctgctaatggtccaagatggatccgtggctgcatctgcaacagcctgctcttccctggcgctgcgtgggggtggggacacgcaatcagtcgcttatattctagaaaatagagtcatgctaagctatcaacatgttttgatttcatgttttctgtgggctactattgatcgaagtataacaaaggggggtgtttattgcagaaagggggagggggagaacattcagacaaagcaagggctggttgagtccccttctcccatctctgtgaaagactaagaacgaagctgcagacctcctttagtttgcattgtatacgcgtctgcctgctggtaagagctgcctggcaagctccccttatgcagaaatctgcagtgcagatgccttcttaaggggggaaaaaaaaaccaccatgggcaggtggtagttctcaaaggaacggagtctttgaagggaaaaaaaatgccttttgtcaaaggcagggccgtaaattcgggagagtagagataattttgctctctatttagttatgttaaaggattttgatcatttttttttaatgcttc

SEQ ID NO: 65676 - DNA, 1043 bp, Homo sapiens
ttgttgttatgaaagttggctgagtctggtggctcacacctgtaatcccagcactttgggaggctgaggtgggtggcttgcttgagctcacgagtttgagaccagcctggacaatagtggtgaaaccccatctctacaaaaagacaaaaaagcaagaattagctgagcatggtgatgtgcgcctgtggtcccagccacttaggagactgaggtaggaggatggcttgagctgggggcagaggttgcagtgagctgagattgtgccattgcactccagcctgggtgactgagccagaacttgtcttaaaaaaaagaaaagaaaaggaaaaaagaaaatcatgatgccaaaataaaactacattttatatgtttgttcatggaaattagctcaaagcaaaaacagcttgggcaattttttgaaaaaggttttgctttaaatatttctttcctcactcatgaaacttagttgttctgtgtactttttatggcttcattttcacactttgttctaccatattaatcaaatgtgaatatgtaatttgtgttttgagttaacccttaaataaaaaggaatgtggcccccgtccaacactgacatcatctgagtgttacattcgtgtcagattatcagtggcagtgtaatgtgttaaaacacagacttgagctccaggaatgcctagatttcaatcctggccctgtctcttaataattatgtgatcttgtgcaagtcctgagcctcagtttccttaacttgaaaattgggataatagtatctatcttggagttggtatgaaaattaaacacaatttggctgggcacggtggcccacgcctgtaatcacagcactttgggaggccaaggcgggtggatcatctgaggtcaagagttcgagaccagcctggccaacatggtgaaaccctgcctctattaaagatacaaaaaattagctgggtgtaatcctgtaatcccagctactcaggaggctgaggcaggagaatcacttgaacccaggaggtggaggttgcagtgagccaagatagcgc

SEQ ID NO: 65677 - DNA, 1112 bp, Homo sapiens
ctgggactacaggtgcccaccaccacgcctggctaattttttgtgtttttagtagagacagggtttcaccatgttagccaggatggtcttgatctcctgacctcatgatccgccagccttggcttcccaaagtgctgggattacaggcgtgagccaccacgcccggccaagaagtttttttttaatgctgtttttgtttattgtcaaattcacaagtaatggaaccactctgatcaaattaaacaaccaatctacatacatttagtaggtgcacccttaccctaaattgtcatttctaaggggttgttcattaagtggctggtaagaacctcagtgtttttattcttggtgttttaaagatgggctgaaaataaaaaccaatattactgcttttatcaaattatcctgtgaggaaataatatatttatcctgatataggagttacctgtctagtcctgtgcatgtttcaagccttgtaaaatgaagtttggtcatgaaggaattggtgacgtctggttgaagggaaaagggaaagttgagctttccaattttgtttgagtcaagagtatattttgcagaaagacacttctctttacccataatcctagaatttaccatttttgtaattctgaacagaattacaaaggcttcattaagtaagtaggttttctaatataaatgtgcatatttgttgtgtgcacttagcttatagtttgtgttaactttattgttgatgatgaatttagcctcctaaagtatacaaacttgtgaaaaattcatcaattttgtagtataactttttctcttaatttagctaatactctttgtattgttctaattttggtatatgtgctgctgaagtaagcactcatagtaaaactttttagacaaaaattagcaggtcgatattttgttcttataattgacttattcagaagttgcccagaaaactgacttaaccttctattctgttcatttatgacagctactagttgtagagttattttggatcatagggtatggtgttgatgttttgaaagaagtgtgtgtgttaaataagtttagctgtaatcagtattgcttgtgattgcatcattgaagtcttctgggca

SEQ ID NO: 65678 - DNA, 1045 bp, Homo sapiens
tcagccccctgagtaggtgggattgcaggcttgtgccaccatgcccagctaatttttgtatttttagtagagatggggtttcaccatgttggtcaggctggtcccgaactcctgacctcaagtgaactgcccccgcctcggcctcccacagtgctgggattacagatgtgagccaccacacccagtctcaaagaactattcttacctgttttctccaatcaactgatttattatctcctgtaaccatatcatcataacttaaccagagggaacggtgagctttttgacctgttcctcattggtagctcgcccttcaagatatatggaaggacattctggaaaaccttttgttatgaaaattgtgtcctgttatttgaacatatttcagtggagggcattgtctttattttacgtatgagatagaagtacttgattttcacgatatcttacatttgtgtactgctttatgatttaagttgtgcccatatgttaccttaattcaacaactgagcatacatgaaggctctttgccaggtgctgtggaagacagaaaggtaaataaaatatagatcattcctctagaggccatattctatagaggaaagacttgtattatgtttatctgtgaggtagacaggtagcgatataacccccttcttacagatggggactcaggcacagagagtttaatgcccacgctttaagatttgaagcaacatgtagtaaaagtggctcagttacccttttgaattcagtgatcagtttaatttaaaagtcttaatttctggctccacggttcttaagccaggtgcctttttatttcactgctctacagaaactttctagtcaagttcaccagatattttccacattgttaaattcagtggtcacttcatcctcctcttaacatgctttcacaacagcttttgacataattgattattctctccttgaaatgcttttttaatttgtcttctgtgacaccacatactcactctcactggcttttcatcctctgtctccataaaattcaccattttaaggt

SEQ ID NO: 65679 - DNA, 1001 bp, Homo sapiens
tccagcctgggcgggcgacagagctgagactccttctcaaaaaaaaaaaaaagaattccttctgtgttcccaaccatggcatttcatttagtccctcagtgatcttttacttctccagtctttaacatccaggcagatggtctcaagacctgtcttctctcttgtcagcagtcctctcattcccatcctcactgccttagtgcgagcccttatctcttgccaagattatgcagtagcttttcagttccgtccatgctctaccctgctgccagagttctttctaaaacacgtgatattgtcacacccttacttaaaaaccttcagtgattccttattacacaaaggatataatccagattacatggcatttaaagccatttggaatctggccaattgttccttctccccagaatgcctttcccttccttgttcacctcatgaacttaaatctttaaaaccaagcttaccacctcttctgaaacattcttaatttaccatagtggctgtctctgctgcattcccacaactcatacagttttactggtgcatatttgattttcagctacttgtgggcactgtattaccagtactaacacaggtcctggacttcgctacttaatgaaaatggtttcattaatggcatttgaggattaagatcattctggggttcagttccctgtgacacaaatacagaatatgaatacaatgtggttttgtaagttagaaacctcatggaatattgtaccagccattaccagttatctgtgttctgcatctgcataacaatttgcatgttgaaattttccattaggagggagtggtgttaggtgaaggtgaaaaggcaaacagctggcatgctcataggctcttctttggcattgggcttgaagtatttggtttttcaggtttgttgggatttaaacgcatcattggcagagatttaatgttgatagtaaatgcatgtagaaatggatccatctggaaacatagagataggaaaa

SEQ ID NO: 65680 - DNA, 1350 bp, Homo sapiens
gggattacaggcgtgcactgccacgcctggctaatttttgtatttttagtagagacggggtttcaccatgttggccaggctggtttcgaactcctgacctcaggtgatccacctgcctcagcttcccaaagtgctggtattacagatgtgagccaccatgcccagcctagaggagtataattttagaagatagatttctcatgtagtcctgtcttccccatggattaattgtgatttttaaaaaaatatttagggtcaactttgcatatttgccaattagatattttcaaatgcttatattagtgacttacctcctcaaaatgcatccaggaatggttaaaagcaaatattaattagtattcagatacttattttccccttcccacacagagtagcagagcagcagcatctgttcttgaggttgtgcttaatgtaaaatgctaggggttcctcttttctttttttgaaggtgagaatgtttgactaaaaaaaaaaaaatgaatggattaacttttagaaatgcatcttgaaaataaaataaggttttgctaccaggtgagtgaaaacaataattggaaataaagatttgagttttcctccttgttaaacccaatgaaattatgatgcttggctcttcctccccatcaaaaagaaagttaaagttaaaattcctgtgtgaggttgtcatattctcatgctgtatattttctttcagattcctttgtttcttcctcttcctctcagcctgtatctctattttcgacctcacaaggcaagtctgtaatttttttgtgtgcattggtaaaagaaaaatgttgagaaagaggctgtaactggggatacgaggcacaagtcttctattgccccaaatcccctaaaataaaaactaattacaagctgattctttctatttagcagtttccagtgggtttcgtgtaatggttaataaagtaaaatgaggctgggtggaccctgtaacatagcataaacttcaggagtagttttgagtatttctttaaaattaaaaacttgcccaccagaatttggagcagatagaattgtggctcagaggccaggtgcagttgctcacacctgtaatctcagcactttgggaggcaaaggcgggcagatcacttgaactcatgagtttgagaccagtctgggcaacatggtgaaaccctgtgtctacagaaaatatccgggcataggtggtgcatgcctgtagtcccagctactcaggaggctgaggtgggaggattgcttgagcccaggggctggaggttgcagtgagcgatgatcgtgccactgcactccccgctgggtgagagagcaagaccctgtgtcaccatc

SEQ ID NO: 65681 - DNA, 2002 bp, Homo sapiens
caagacagcatacacttattcttcctttttgcctacaaaaaaaattttttgaccaatgtagattgagaatagtcttattgtagaaaggtaattaagaatgccctatccgactgtgcgcggtggctcacacctgtaatcctagcactttaggaggctgaggcaggcggatcacctgacgtcaggagttcgagaccagcctagccaacatggcaaaatcccgtctctactaaaaatacaaaaattagccaggtgtggtggcaggcacctgtaatcccagctactcgggaggctgaggcaggagaatcacttgaacccgggggacagaggttgcagtgagccgagatcacgctattcattgcactccagcttgggcgaaagagcaaaactccgtctcaaaaacaaaacaaaagaatgccctatcctcgaatgggtttcatttaacctatattagtagcattttctcctgcaacaaacaaataaacaaaacacatgatggaaaagtagcccagtggggccctacgtcattggcagtctagaggttagcctgttcagttgtttgaaggaacaccttggcagatgattagttgttttctagggtagccaagactggtagcttccagtctgccttagtaaaaataagggaagaggaagctgttgatacatagttggttaactgtattaaaaccctgaatggagatgagggctctgggaacagtccacttccacacaggcctttgaaagtgactgctgccacctgcatgcactttgagtccgtcactgacactaacccaactaatttctttggcttcatataccttagctatctagccttagggaaattgtgtctatttttatataccccaatcatattaagcaatatgtagtaataataggacttaaaaaaaaaatagagacaaggtctcactagattgcccaggctgaactcctgagcacaagcggtcctcctaccttggcttcccaaagtgctgggattacaggcatgagccaccatacctggcctaaataggacatgttaagatttaagtgactttttttttatcctgaaatacatatttatcattattgggtttcaggtagatgcatgtataaaaaatgtcattgattcagactgagttaaaggcagttaaagtttttaaaagtaaattttgtgatatttactaagttgtactgctttgagaatacagctacataagctaggaagttaaacttctgatatgaatagatttctagttagaatgtcagtggaataatcagttccttcttcaataagttgtacccctgagtagtccttgtccttgcagtcttttgcttatggtttcctttttccatcaagcaacaattatatttcagcctaatccctgagagtttcaaaatagtggattacattttaatgatgttttcctgtacttcataaaacatacaaagatattgacagaagtatagatgtagtatgtggctaatttttattgaacttttactatgcccagtaaacttcacatgaatcatctcatttaatcttcataagcagttctatgaagggaagggactagctcttttaccaattgaaatgacttgaaaatggtgaaatcacttgctcaaggtaacacagcaagtaagtgatagagggaggatgccaaagccgtggtcataactgctgtacctataataaagatgatcaaataaactagctgtattttagggtttagacttctttttagagatggcattttgaagttaatattaaaatcatgacagcagaagaggcagataccattgttttgaccatattatcactattagtgatataatttagtatcatctggggtatatgctccctccaacaaaatcaaaatcaaactgaaattttgttttacttttcaaaacccttgagagtggaagctagaaaatactgtttctttagaaaacattggaagaaaagtaggtgaaaatgagattggaaagaggatccatccaccatgcc

SEQ ID NO: 65682 - DNA, 1017 bp, Homo sapiens
aactcctggactcaagcaatcttcccgcctcagcctcctgagtagctgggactacaggcgggcaccactgtgcccagtcttagacattgtagtttttttgtttttttttttatcatgttactttaaactccccatcttgctctgaaagataaaatactctaggcataaaagagagaaatttcttcctcaattcccataccagattttctagtcagatgtgtttttttccttattccaataaaaatgcagaattactgtactttagaattagtatatggaagtgtttaaagtaggcacgggaagaccgctcctgctgtatgccttggtactcttaagttgtgcaagcccatctatgtgaggagaagccgtgacagtggctcctcctgtgggatttttatgggactagagctctgaagtatggcccttatctttctgctctccaacacataccaaatgtattaaggctgtggttctgaaaccagtttcgttgcctgggaaacttgtaatacagattcctgagctctgtcctccttaggaagttctgaggcagtaaatcagagataaagcccatgaagaactagtagttgctcttaagtttgagagggattgtgaaaaattgtgccaaaggctgtctttgtgctcggttattaaattgttcagctggttgtacattgaactaaaatatgctttgaccctgctggtggtaaagatcatttgtgaaacattttgttgaggaaaatttactggctgggtgtggtggctcacatctgtaatcccagcacttgtgggaggccgaggcgggtggatcacttgaggtcgggaatttgagacaagcctggctgacatggcaaaaccccatctccgctaaaaatacaaaaattagctgggtatggtggtgcacgcttctagtcccagctactcaggaggctggggcatgagaatcacttgaaccggggaggtggaggttgcagtgagctgacatcaggccactgcactccagcctggtcgacagagtga

SEQ ID NO: 65683 - DNA, 1050 bp, Homo sapiens
ctcctgggctcaagcagtcctcccacttcagcctcccaagtagtcaggaccacaggtgtatgccaccatgactggctaattgtttaatttttttgtagagatggggtcgcactgtgttgcccaggctggtctcgaactcctgggctcaagctgtctccctgccttggcttctcaaagtgctaggattacaggcatgagccaccacactcagctgattccctttttagtaaatctactagatctatgactttatttgttaataattagagtagcaccatgtttttaagtgattagaactcttgaaaatgaatatccacactaaattccattatagcaaagaactaatttagaaaatgttcataatgagagttttgatggcgatttgttttgagtagtgttgaaaggctcttagagtgcatgtgaagggatgaatcttttgagaaaagaaagatagtagacattttctgagacataaaataatccagatttattccaccagacagctttacagtgtatagtattttaagagctaactgccttcagattcactggacttttctgtccttttgccaggtactgacttgggcaacagcagtgactacaagtgccatactgaccaattggaagagtctttgcttatcggagctgttctaaaaggcttattagtttttggtcttcattctatttaatgttttcatgcctttataaactttttacttccagcccaatttttcccattgtcttggtacaggtcagctgtgtccaagtttgttagggtttcagctagccaaaaatggtattttcatttgctgaaattctaaacaaaataattaaagttaaagcacagatgatgatgctaccttatttttctacatgtgggaaagcttgattgatagtaatgattagcgcctgcatctcacaatcactgagaaatgaatgcagcactgagctctgtttgccctctaagcttgtccccagaaaaaacaagatataccctaaatagtaagttataatatttttattagggaacattattagagttttttttta

SEQ ID NO: 65684 - DNA, 1148 bp, Homo sapiens
ggatctcagcatgttgcccaggctgatcttgacctcttggactcaagcaattttccctcctgtgcctcccaaagttctaagatacaggcatgagccaccacacccagcctagagaatccttaatgtttgaagtctgtcaggctatcatggtgctcagcagaggatgtgttagtattctgagaataggacttctaactttagttttacctgagattattctacacctaacttgaaacttttggagtattaaaggttcaaagaagttaagagaaaagcaaagcttgataaactgaccagtttgtgtcctgctaaagcatagacagttttaccatgctcttcccagtgacatgaatattctttggttagcattcaatttggttgctttcttttttgtttaatcaggcactgtcaccactgtattattgtcatcattttgcttattgattttgcttattgtctgccttcccctctgtgttgtaagctccataaaggcaagaaattttttctgttttattcactgctttaagcccagtttctaaaacagtgtctgacacgtggtaggcactcaataaatacctgttgaattattactaattcattttgtagactttcatctgtaagatgacagatctgaatcatctgaaatctccatctccataaaacatataagctggctgggtgcagtggctcatgcctgtaatcctagtactttgtgaggctgaggcgagcagattgcttgagctcaggagttcgagaccagcctgcgcaacgtggtgaaaccagctctctactaaaaatacaaaaaattagccaggtgcggtggtgcacgcctgtaatcccagctacttcggaggctgagtcaggaaaatcgcttcaatctggggggcggaggttgcagtgagccgagattgcaccactgcactccagcctgggcaacagaactagactctgtctaaaaaaaacacacaaaaaacacacaaaaaaacatataagctgaacctcccctgtggggtggagtcagtttgactcacctcagagttgtttgaagagagaggttcccaaacagttttaccataaccttagttcactgaatgttttgtggtagaaacactgactagtaagttcagtaacaatgcatggctcagatt

SEQ ID NO: 65685 - DNA, 2078 bp, Homo sapiens
aaaaaagattttggagggggtccacctttttcagtaccctttagtttagaacatcacagctatttatttgtacatgggacagattctccctgtggatagaatagaataattctagtctcatttttcagattcaggaagggcccattgcatctcctaaaaatcaaaaaagtctggccactagtttttttccttttcagattgtgagactaacagatttatagaggcagtctgtgctctgaattgttcagcttacagattgaagtctatcaaccctttatagtatcaggttatttgttttgtataaattattttgcttttgttgattagctctatcaaagaataaaaaacctcccaagatttctcaatcttaccgcccttctttatgctttctctgtacaatggaaaagtagaccaaaagtatttgtcatgaaaattttttatcatttgcagtttgtggcatgatatggcttttctgtttcactgttggcagttttatgcatgtcctgtaggataacttgatcgttttgttacatatttatgtgtgtatatatacatcctgtgtgtgtatatatatatttatgtaatttaaaaaataaaaagcatgctgcttggcttggctagctaatgtgtaattgtacctggtaaacaatttttttctttgaaattctgatcatagagggattgagctctctttgctctgatgagccatcttcagaaattatgacttcttcctttctttcatcttctgaaatacataacactggccttacaatactacatggagaaaaaagccatgtgttagggagccagcctattttagccaaagaaggaaaagaccacttggatcttctagatatgaaaaagatggaaaagcctcaggggaccagcaacaacgtatcagactcttcagtttctcttgcagcaggagttcattgtgaccgtccttctattccagccagtttcccagagcatcctgcttttctctcaaagaaaattggtcaagtggaagagcaaatagataaagagaccaagaacccaaatggggtatcaagtagggaggctaaaactgcattggatgctgatgacagattcactttgctgacagcccagaaaccacctactgagtactctaaggtagaaggcatttatacatattctttgtctccatccaaagtttcaggagatgatgttattgaaaaggattcccctgaatcaccatttgaagtaattattgacaaagcagcatttgacaaagaatttaaagactcatataaggagagcacagatgattttggtagctggtctgtgcacactgataaagaatcatccgaagacatttcagagactaatgacaagctttttccactgagaaataaagaggcaggacgttacccaatgtctgcattgctcagtaggcagttttcacacacaaatgcagcactggaagaggtgtccagatgcgtgaatgatatgcataactttactaacgaaatactgacttgggatctggttccccaagtgaaacaacagaccgataaatcttctgactgcatcacaaaaactacaggacttgacatgagtgaatataattcagaaattccagttgtaaatcttaaaactagcactcatcagaaaactcctgtatgttctattgatgggagcactcccatcactaaatcaacaggtgattgggcagaagcatctctccagcaagaaaatgctattactggaaaacctgtacctgactctttgaattccacaaaagaattcagtatcaaaggtgtgcaaggcaatatgcagaaacaggatgacacacttgcagaattacctggatctccacctgagaaatgtgactctttgggttctggagtggccacagtgaaagtggttttacctgatgaccacctgaaagatgaaatggactggcagagctctgcattgggagaaatcacagaagctgatagttctggtgagtctgatgacacagtaatagaggacatcacagcagatacatcatttgaaaataacaaaattcaggctgaaaaacctgtttccattccaagtgctgttgtaaaaac

SEQ ID NO: 65686 - DNA, 1024 bp, Homo sapiens
gttttccctacccaaggtactccagtagcatctcttgacttagaacaagaacagctcacaattaaggctcttaaagaattaggtgaaagacaggttgagaagtcaacttctgcacagcgtgacgcagaattgccttctgaagaagtactgaagcaaactttcacatttgctccagaatcttggccacagagatcatatgacatcctagaacgtaatgtcaagaatggatctgatcttgggatttcccagaagcccatcactatcagagaaactactagggtagatgctgtttccagccttagcaagactgaattggtaaaaaagcatgtcctagcaagacttctgacagacttctcaggtaaccatttatattagaatactgcatgtggttaattctgtgattgattacttatcagcgtgccatttatgttagtctgatttatacctacaaaattatggctaaaatacaaaaacaatatgctgtatgatgggaaaggcagattcttctcctgtctttttttaaatgattgcttgatttggtttccttaatatcaatatttcccaaagcagtagaccactttgtaacattaatcttcccctaaatattttttctatgctcgctgggtacggtggctcacgcctataatcccagcactttgggaggccgagacgggcggatcacaaggtcaggagattgagaccatcctggctaacacggtgaaaccccgtctctactaaaaatacagaaaaattagctggacgtggtggcgggcgcctgtagtcccagctgcttgggaggctgaggcaggagaatggcgtaaacccgggaggcagagcttgcagtgagatgagatcgcgccagtacactccagcctgggtgacagagcaagactctgtctcaaaaaaaaaaaaaaaaagaaaattttttttctatgctccagttatatttcaaggtacttcttttcttataggttgcccctaaggtgatattaggtgagaatctaatatcatcaggttcttactt

SEQ ID NO: 65687 - DNA, 1022 bp, Homo sapiens
atagctcttatactctagcatttgaagctcactgaatttggattaaagagtactaggttctaattcttgctgtgctgtgtctagaagtatgactttgaacaagtaacttacataacctttcgggggcctcagttttaatatctgtaaagtgaggatgtaaagtgaagtagatggtcttcaattatcatttaaataatatgattctctggctctggtacattctagatttcttcctcagttgtcataattcttacaggtagtaacttttgggcaataaggcatataggaattatgctacaagaactccagtgtctaattctggcaaattcctgttttagcatgaccttagatgactagtctaattggttcagcatcttcctttgttaatgtgatgatcattattttgccctgctttgtatgttgcagtaaataaagtgctgtgtaaatgctaattattagtgattatcaactgaattatttaatctagcgtgagagatgtaaagggctatggaagttcaggatatttgtcactgaccaaagtctatgattagtgtatgtttttagattgtaattaaagaagaccggtatagttagaccaagaagtttaaaggcctttcttgcagctttcaaaagtgaaaaccttttaaaattgtcttatttatgaataaatctttaaaaatataatccatttcattgcagtgaaataaataaataaaaacataaaccatttcagtaaaatgcatcagtgtctagttttatttatttatctttttttttttttttttaattttttgagacagagtctcactctgttgcccaggctggagtgcagtggcgcgatctcggctcactgcaacctccacctccagggttcaagcgactctcctgcctcagccttccgagtagctgggattacaggcgtgtgccaccacgcccagctaattttttgtatttttactagagatggggtttcaccatgttggccaggctggtctctcaaactcctggcttcaagtgatccg

SEQ ID NO: 65688 - DNA, 1022 bp, Homo sapiens
acccggctgttaaggaaatttaacagtaatttaggaaattaaacattgataaacagtacttttgtcaattatatagtacacatttaaattttgtcagttgtaccaatgatgtctttatagctgtgtttaccccttttccagagtccagtctaggatcacactttgtgcctcatcctgtctccttactctcctttaatctgagaattaagattaaaagaagtaagttcctcagcctttctctttcacaccactgacatttttgaagactataggccagttgttttgtagaatatttctcaatctgggttggtctggtgttttctgattagatgcaggttacatgttttgggcgggaataccatagaagtgatgttgtgtctttctcagtgcatgcactatgtctggaggcatatggtatctgtttgttctactactgatgacgtcggccctctaagccttctgtgttgaaactgttccttgtagttatatgaattctaacatgtatatgcttgaactctgactataggaattctcctacttacaggaattcactcttaagtaggcagtattctattaagttcttctgttcaatctcttagttcatcaagtgagcctgagttccctcccaattctttctctcctttgcagcatcactatctgggactctcgggttcccatcaggagtcataataccttctctttctcctagtaagttgcatcccttagccagactctttgaaccagtgattacttcttatatacaatcagcatatttttagtgttttattgaatcaagttaaggttctttggctctaggaaggttagtcttcaaagaaatggtttcagaagagagctgtatagctgaatgtggggaagaactaggtaccctcaagacaacttgaatcacacccagttcattttatcgcaaataagtcttttccgctaaccttatttgaattactgcatgtcatttacactgtcttagcctctttattccttaaactctaggaggtagatttcat

SEQ ID NO: 65689 - DNA, 1017 bp, Homo sapiens
ccatagctgaaataagctcttaaatttttataatcctatcctgaaacctaatcggtgtagcagaagaacgttttgcctcgtgagttatcacccctgacataatttgattttcatttataagattctcttagaaccaagtacagtggcacacacctgtagtctggctactcaggaagtgaaggcaggaggatcacttgagccaagagttccaggccagcctgggcaacatagtgagaccccatctctttaaaaaaacaaaaccagattatcttaaagtggggcatacctgtatttgtgtgctaatgtgaggctccacaggtatgcaagacatagtagctgtggatgtttcttataacttatattcccttttcttttgtcagtgcacgatctgattttctggagagatgtgaagaagactgggtttgtctttggcaccacgctgatcatgctgctttccctggcagctttcagtgtcatcagtgtggtttcttacctcatcctggctcttctctctgtcaccatcagcttcaggatctacaagtccgtcatccaagctgtacagaagtcagaagaaggccatccattcaagtgagttgaagtcttaaaagcaacattctacattttagtggaagggttcactgaagctgataggtctaaaactcagacctgactaaaaatcaagaattatggggcctaatgcagctgattggtggcatgaagcatcccctagagaccttgaaatcaccttaagaagtggccaagttagaagccaagaactttttgacaaattagaggctcatacttgaagttcaaagagggagtccttcaaagaagactctaaattctttttttttttttttgagacggatattgctcttgttgcccaggctggagtacagtggcgcgatctcagcttatcgcaacctctgcctcccaggtgaaagcgattctcctgcctcagcctcctgagtagctgggattacaggcatgcgccactatgcccagctaattttgtat

SEQ ID NO: 65690 - DNA, 1034 bp, Homo sapiens
acatcaacagggccctgaaactcattattcgtctctttctggtagaagatctggttgactccttgaaggttagttgtttctgcagctcttggtggtaaaacagaaaaagcagggactgggttataatttggaggaaaaacagtacataggattttatcagacaaaaatgaacgtatgcttagctcagtcattctataatgggataggtgtcactagagaaaggtatagccttctgctggggaacaaatatcagaagagaggtgatataattggaagcagtgcagtttcagtctttggacctcagaaaactacagacttcactcacataccttcaaatgtataacacaagtagggaaccttcatttggaaattgtccatgtcacacatcactaaatttatgcagacttaattagctggaggagaatgacatcagttaatgtgaattttgccttacggttattcctgcttaacttttgatatggccttcacagctggctgtcttcatgtggctgatgacctatgttggtgctgtttttaacggaatcacccttctaattcttggtaaggtggcaaggagaatgtgcccatgctctttgaagtagtttgtaagaataagagtgaagagaaagcccagcatggctctactcattcttcattgcccagtcttgacccatagagacctgggagtagaggcactggaggaaccggagtttgtggtcacaggtttatgaaatggtctcagttataaattaagaaatatcaaaacagctggaagtaaaggacagttgtctagatttggtttacgtatggggatcttatttacagaaaccattttggtaatttggaaattgttatttgtggtacaaagaaggtagcctgtatacctgaagaggttttttttgttttgttttaacactaccttaaattagctgtcttaattgggagtgctaaccaggatttctcattttgaggaatgcctgtgttttcctgtattttttgaggaaaaatgtatatgttactctgagtcttaagat

SEQ ID NO: 65691 - DNA, 1061 bp, Homo sapiens
aggccgaggtgggtggatcacgaggtcaggaggtcgagaccatcctggctaacacggtgaaaccccgtctctactaaaaatataaaaaattagccaggcgtggtggcgggcgcccgtagtcccagctactcgggaggctgaggcaggagaatggcgtgaacccgggaggtggagcttgcagtgagccaagatagcgccactgcactccaccctgggcgagagcgaggctccgtctcaaaaaaaaaaaaaacttttaaaaactgggtgttttcattttctacactggtcagtcgtgtttaaaaaatggttaaactagacaaaagagccgtgccttcaggaaaattggtgatctgtatgttaccacaactgaatttattttccttccttaaagacccagattgatcactatgttggcatcgcccgagatcagaccaagtcaattgttgaaaagtaagtacatttagagaccacatcatcatgaggtatgcttccttccccccaattatctttagtcccttgtacaaaatgcagatgccaaggaaagtaattttcattttgataaaaaccttagttaatagtttcattttactaaaaattattatagctgcttctataaaaaggaaaaaaaatcctttatatctttttctggccctgccttctggacctttgtaggccaggcattttgactcacatctgtaatgccagtgctttgggaggccgagacaggaggattgcttgatcccaggagttcaagaccagcctgggcaacatagctaggccttgtctctactaagaataaaaaattagctgtgcatggtaacacgtgcctttagtcccagctactggagaggctgagacaagaggatcaatgggaaaaaaaagatcagtggaattttttggagacagggtcttgctttgtcacccaggctgaagtgcagtctcgacctcctgggctcaggtgatcctcccacctcagcttctccagtagcaaggaccataggctactctgcctttttgaactggcttttaaatgttcttcattacaggctgggcacggtggc

SEQ ID NO: 65692 - DNA, 1846 bp, Homo sapiens
acttgtactatgaaggaaaatactcagtgtcagcttgagcctgcattccaagctttttttttaatttggtgttttctcccatcctttccctttaaccctcagtatcaagcacaaaaattgatggactgataaaagaactatcttagaactcagaagaagaaagaatcaaattcataggataagtcaataccttaatggtggtagagcctttacctgtagcttgaaaggggaaagattggaggtaagagagaaaatgaaagaacacctctgggtccttctgtccagttttcagcactagtcttactcagctatccattatagttttgcccttaagaagtcatgattaacttatgaaaaaattatttggggacaggagtgtgataccttccttggtttttttttgcagccctcaaatcctatcttcctgccccacaatgtgagcagctacccctgatactccttttctttaatgatttaactatcaacttgataaataacttataggtgatagtgataattcctgattccaagaatgccatctgataaaaaagaatagaaatggaaagtgggactgagagggagtcagcaggcatgctgcggtggcggtcactccctctgccactatccccagggaaggaaaggctccgccatttgggaaagtggtttctacgtcactggacaccggttctgagcattagtttgagaactcgttcccgaatgtgctttcctccctctcccctgcccacctcaagtttaataaataaggttgtacttttcttactataaaataaatgtctgtaactgctgtgcactgctgtaaacttgttagagaaaaaaataacctgcatgtgggctcctcagttattgagtttttgtgatcctatctcagtctgggggggaacattctcaagaggtgaaatacagaaagcctttttttcttgatcttttcccgagattcaaatctccgattcccatttgggggcaagtttttttcttcaccttcaatatgagaattcagcgaacttgaaagaaaaatcatctgtgagttccttcaggttctcactcatagtcatgatccttcagagggaatatgcactggcgagtttaaagtaagggctatgatatttgatggtcccaaagtacggcagctgcaaaaagtagtggaaggaaattgtctacgtgtcttggaaaaattagttaggaatttggatgggtaaaaggtacccttgccttactccatcttattttcttagccccctttgagtgttttaactggtttcatgtcctagtaggaagtgcattctccatcctcatcctctgccctcccaggaagtcagtgattgtctttttgggcttcccctccaaaggaccttctgcagtggaagtgccacatccagttcttttcttttgttgctgctgtgtttagataattgaagagatctttgtgccacacaggatttttttttttttttaagaaaaacctatagatgaaaaattactaatgaaactgtgtgtacgtgtctgtgcgtgcaacataaaaatacagtagcacctaaggagcttgaatcttggttcctgtaaaatttcaaattgatgtggtattaataaaaaaaaaaaaaacacaaacaatgactgtggcatcattctgctaactttattctttatacacagtttgggtaaagtaagaaccaaacactgcttccactccccctatcctcactccactttggggactttaaaaagtgactaatagttggtactcgtaaggattcccaagactgcagaatttagttgtacagcataactgtgcatttgatctctgaaagaaaataagagaccctctaag

SEQ ID NO: 65693 - DNA, 1072 bp, Homo sapiens
gcgctactaccacgaccactggcggctggagtacctgatggacttcaaccctgcccggcacggcatggtgtgcatggtgtgcggcagctccctggccaccctcaagctcagcaccatcaagcgccacatccgccaaaagcacccctactccttgcattggagtccccgggagaaggaagtcatcagcaacagctgggatgcacacctggggctgggggcctgcggagaggccgagggcctgggggtccagggggctgaggaggaggaggaggaggaagaagaggaggaggaggagggggccggtgtcccagcttgcccgcccaagggcccaggtaatgcaaatgcagattctgtacaggcaggggcctgggtggccagtggggcacagtgggccagctgctctgccaaggagctggtgttcttgagcaaggcactgctcctcctctgggtggggtctgtttattgcccttattatacaaaggtgggggaaggacagtggggtgagagggtctccgatgtccatgacagcttgtacattctgtggtttttgaagtatcaaggagagaagttgggtgacaggcagtggaaaggcttggagcagggaggcctggctggggtgggtgagggaaggggagggtgctggagaggtgtggctgacggtgaaggccagggacagggctagattccagtctgggggaggtgtgggtggtgcttgaaatgctagcagaggagggtttagggagttaggatttcaggagagaggaagagaagggcaaaggttaggcctggggcccaagtgagtgagaggcttgtgggagacctggctgtagtgggtatgctcccgtggggccagcgtctcagttccttccctccaaccctttcaggcaaagccccagctggtgggggctgccggcgccagcggcgagggggcccagtggcaccccgggctcggcgtctgcgcctctcagcctcccggagggccgggggcagcagggggctgggggcccggcgcctggagaggaggctgaaggagtccctgcagaactggttccgggccgagtgtctcatggac

SEQ ID NO: 65694 - DNA, 1436 bp, Homo sapiens
cgacctccaggagaattttaagggctctccgagcataacgcttccctgcccaccaccccgcttcattcccattcccgggccttccacttgcaggagccacaggtgtcaagttctggagagaagggatgaatgggactgcatacaacagctagtttggaaaagcagtgcagtgctagaacgagattagctttgggaggggatgggaggaacaatctcagaacactcgctctcccctcccccttcaccgatttctagtcctcaggagcttgcaaaccgtaagaaaacaaagagccatctttgtgggagacttaatatgcatgaaaatgcaaatatatttccattctcccaccccgcttttcttaggcgggatagtacccaaaagaggttgagagcagcaatgccattcattgaacttcagccgaacagaatgatgtctgcctgcactgcctgtcatcctttttggaactggaagggttataaaattcatgagggaaataaaggtcacctcccttctcggagcatttagtccaaaagataggttgttttcctacttctgctaatatttgttgagtgttcattgggcattgtcagaggctgtctcagttaatcctctcaaccctgcaagggtggccttatccccactgttagggcaggaatagacaggtgaattcattcaaccaatattcactggacgtctactttaggctgtttaggctagtgtttttaggctgggaagtagtagtaaacagagcaaccgaaaccctgctcttgaagaacatatatataccaatggctaaagacagagaaataggttcatgtatagtatgttgggtggcaataaatggttcagagatcactaaagcaggaaaaggagaaagaggaggaatgggtatttaattgaatatatcgagtggttcagaaagggttttctaataaggtgaattttgagcacagacccgaaggaagtgaggatgccaaccttgcagatatctgcaggaagagcatttcaggccgaatagcaagtgcaaaggtccggcagcacaagcttctggaaagatttcggtggagagaggaagaaagattgaattcaaggtttttggcctgagcaactggaggaagagccttcccattttccgagatggggaaggctgcggtgctcttgggagactgggagtgaaagtttgaatatgattacgtttgagatgcctatttatgacatattcaggtggagaggtcaactaagcagtcagatacatgggcctagatttcctggaagtatctagctagtggcgtaaacagaaattgccagcaggcagacagtgggaagagaaggaagtagagaagtgtctaaggactgagtcctgggaaactccagtgatggcaggttggagaccgagtcagtccctcatcacacattactaaatgccactgcatgc

SEQ ID NO: 65695 - DNA, 3118 bp, Homo sapiens
aaagtgtagaagtcagatttggatgaaatctattgtcagggattggggttctggaaagcttcgcagggatgatgttgcccagcccaattagggtggtctggacagatgtgcaaaggctggagacctgcaagaatgcagcctgttgggaaagtatgtgtagttagtcctaaggtccaagactagatcaagaggaagtatagacgcgagagtcgtgggatcccgggcacatcggctgtgttgagtgtggcgtgtgcctcatgggctccaggggaaggaagaagaacactttggccagaaatgctctcctcccccatcccactcaaaccactgagtctggagacgtgctaagtgttgttggttgtgggcacctttagtgataacaccctccccctctcccctcgcagtgacccaacaggagaagaccccaccgcctagacccagcccgctagaggcaggcagtgatggctgtgaggagccgaagcagcaggtgtcttgggagcaggagttcctggtgggcagcagcccaggaggcagcgggcgggcactgtgcatggtgtgtggcgctgagatccgggcaccctcggccgacacagctcgctcgcacatcttggagcagcaccctcacaccttggacctgagcccttctgagaagagcaatatcctggaggcctggagtgaaggggtggccctcttgcaagacgtgagagctgagcagccgtccccacccaactcaggtagttggtcctggggctggcgaagggagaagtcggacttgttggggcactagaagctcattgtgctcttgctccctgcagactcgggccaggatgcccacccagacccagacgccaacccagacgctgccagaatgccagccgaaatcgtcgttctccttgactctgaggataacccatccctccctaaaaggagccggcccaggggactccgccccctcgagcttcctggttagtcaacagagaagccagtgagccccggtggaggtgggggtttggggacagggtgaaatacaggccctgtgttctgggcaggtatcttcaggagccctggggtggcagggttcggggatggcctctttaaaagggtatgaggtcttttctttttgcagctgtccctgccacagagccaggaaataagaagccccgtggtcagagatggaaggaacccccaggggaagagccagtcagaaagaaaagaggcagacctatgaccaaaaacctggaccctgacccaggtgaaggggaggcccgggggaggcgtgggctctggccgcagtgctctgaggaaatccgcatcagtgaggatggagcagggcctgggcgcagggcgcctgcagctcctgaggctttttcactcacagttccatcccgtcctcccttccagagcccccatcgccagactcgcccacggagactttcgcagcaccagccgaggtccgacacttcactgacggcagcttccccgccggcttcgtcttgcagctcttctcccacacccagctcaggggcccagacagcaaggactcacccaaagacagggaagtggcagaaggaggccttccccgggcggagagcccctctccaggtgagccctcctgagagggaagcacagtagggacctcgcaggcagcgctcctgggccaggcctcagagaggctgctctatggcagagcccacagtaggggtgggtggggtgggtggggtgggtggtgctcaggtttcctggtacacggggccggggcaggggatctgaatgatgaggaaggctggcctgaaagctgagcttttctttttctgtttgtttgttttttgagacggaatcttgctctgttgcccaggctggcatgtagtagcacaagcccggctcactacaacctctgcctcccaggttcaagcaattctcctgcctcaccctccctagtagctgggattacaggcgtgcgccaccatacccggctaatttttgtatttttagtagagacagggttttcccatgttggccaggttggtctcaaactcttgacctcaggtgatccaactgccttggcctcgcaaagtacaccacgcctggcctatttttttattttttattttttgagacaagagtcttgctctgtcgcccaggctggagtgcagtggcgcgatctcggttcagtgcatcctctgcttcccaggttcaagcgattctcctgcctcaccctcctgagtagctgggattacaggcgtgtgccaccatgcccagctaatttttgtatttttagtagagacagggtttcgccatgttggccaggctggtctcgaactcctgacctcaggtgatccacctgcctcagcctcccaaactgctaggattacaggcgtgagccaccgcacctgaccaggtgggcttttcttagtgtttccttgtttcctggaattggtcactgggtccgggtaggccagtgtttcccagaagcctgatactgatttccacacatgcagtttgttctagctagagcctgaggggtgcccaccttaccctggtggagctgaggcccagatggggccactcagcaattcagttaggtgtccagagaatagataagatgagcagtggacagacacctccaggggacaccagctcagtaaattgcctcataacagcagtaagtgcttgtgttgtttgggctcctactgagtttaagaagcttacatacaaggcaagtcgtggtggctcacgcctgtaatcccagcactttggcaggctgaggcgggcagatcacctgaggtcgggagtttgagaccaacctggccgatatggcgaaacctcatctctactaaaaatataaaaattagccaggtgtggtggcaggcgcctgtaatcccagctacttgggaggctgaggcaggagaattgcttgaacctgggaggtggaagttgcagtgagccgagattgcgccactgcactccagcctgggcaacagagtgaaactctgtctccaaaaaaaaaaaaaaaaaagaagcttacatacagtttatttggcccttacaaaaataacttgtatagaagggcagatgtccattcctttttccaaaagggaaaaccatttctcaaagaaat

SEQ ID NO: 65696 - DNA, 1158 bp, Homo sapiens
aggttcacgcgactctcccgcctcagcctcctgagtagctgggattagaggggtgcaccactatgcctgcctaatttctttgtattttagtaaaggggttctccatgttagccaggctggtctcaaactcctgacctcaagtgatctgctcaccctggcctcccaaagtgctgggattacaggcatgagccatcatgcccagccctaatgtaacgtaacctttgcacacgtccctgttgcgtgctcgttttttatggctgcacgcagccacggcagtcctcagtcctctttcctctgcctcgaggcccagctttgcccattatgagtgccttctccatactggtaaggtggacacctggtcttggtgatgtaggtgttgacactcaggagataaagagcctggtggaagttcgccaggggtcttttctgtcccccacgtagtccctcatgagctccttggtgggcacagctatgccttagactgcttctgggtgttcccaccccatcacctctgccccactcaggcagaacccgttaggctaggatgcccagtaagtttgagataaaatggagttggctgcaggtaggagttacaggaagaggcacgagcaccaggcgtccctgtgccaaaatacacacaggaggaaggctgcctggcttcagctggcttgtccctagggaggctgtgcgcctcattttctagctggcagcagtcctcgatcacccaggagtggagctccctgccatccttgggcttcccctcatgccaggcactgggctgtggacataatgaaagccctggaaatgtgggtacagtttgcggagcttccagggggcatcctcgtggtggggtgtctggggggctctgactgctctctgctctcatccctgcccagctccccctccggggctccgcgggacactggatctccaggttatccgcgtgcggatggaggagcccccagcggtcagcctcctgcaagactggtccaggcacccccagggcaccaagcgtgtgggagcaggtgacacctcagactggcccacagttctgtcagaatccagcaccactgtggcagggaagccggaaaaagggaatggagtgtaaattcttgctttcctggggagggagggagggatgaggcagcgtcccccagt

SEQ ID NO: 65697 - DNA, 1038 bp, Homo sapiens
ctgtgtttttctattttgttaccccctggccctctgtcacctgggcagttaggaactaaagagaagttctaggcagagtttttctctgcagggttgacccttttattacttgtggattatttgcttctgggggtgaaataggggttgagagggagggatggttgatttccatttcatcactgggtttggcagctggttctgcatgggacaggggtctttggagacagaggagcatgttctgtgtctcgcagtctttctctcccttgcctaccggctgtttctctctccttactgggaattgctttctctgggccctcttgaggttgcttattccacccattttcctctcacaacctttgttttagcaggtaaaccctgcttaaccagagaactttcccagactgttgatcgtgagctggtaggaggaggccaagtgactgactggcaccctcaggcatttggggagtggcgatggagtgcctactctcagtgaggctggtggggggcattgtgttcagcagagcagagtaacagactgcctcagtgtggtttctttgtgctgcttactacatgtaaatgtattattgccatggtatttttcctgtgatgtgtgtgttgatttcctttcttccttacatgcctagcatactgctgagcatatagtaggaattccaccgtagtgtgcatccactgattccatgatagcagcaatcagtgaccatttgggaatgtaagtaagctctttgctctttgataactttgcccagagcagtagctgcatacattgtcatcctgttaggattattaattacccatcctatttctactctttatggacttagattctccttagccccttcataccttctactgttgttctcagggtagccagtcactgtatcgatttaatattaagtctcattccagtaaaagcagggactttggaaaaccttggatgcacctattccagacagattcctgtattcttttttttttttttttttgagatagagtctcgttctgtcgccaggctggagt

SEQ ID NO: 65698 - DNA, 1003 bp, Homo sapiens
cgtttcaccatgttgtccaggatggtctcagtctcctgtcctcgtgatccggcctcccaaagtgctgggattacaggtgtgagccactgcgccgggcctgattcctgtattctttaaaacgggaaaaaagacaagcagcagctcctcaggtcacaaggccaggtatatcaaacactggcctccgagaatagatcatgccaccaagtgaaagaaacctcttcttggtcctgttgtgattttagataaagtagtcatggaagcttggtcattactatagtcttaatgttattttttttaaaaaggggatttagttgggctgatttcctcccctaaaggtcctctgtcaccttatttaaatttaaaactggttttaccagaaaataggtaaacaaacaccactggttgtctccagtctcttttcttgctcttcctctccctcttctttaaaaatgtggctgatgagaacctgtttccaggagccctttaatcactctgaaacacacagacactgaaaatgttgaagcataaaaataaaccttgcgttacagggagattgcctgtgtgctgtccacttcgcttataacagtgaaagtaggagattaaaaaaaaaaaaaagttaagccctgtctttaagatggtttttgtgacacctgattccagatgtgctttttcacagccatagacttcctgcttttgcagaaggagggttctaatctggggctcgtagcttgggggattcttagtttgtgagctgagctttttgttcacttcttttccaaatgactctgctggcctgaagcttggcagttgtgaaagcaatcagcaagatgactgtttgtcttccagccagcagcagcagtcacaggcaagcctggagaaaggtccagcttccagagttcacctgctagagttttccataacacctgggggagaggctactccatctgggacctgccccacctctgggcctcagaaactatgagagagggattgagagaaaact

SEQ ID NO: 65699 - DNA, 1972 bp, Homo sapiens
aggggagtttagaagtactggtgaagaaaacaaagttacaagatcctataaggaacagctgaactactccaaacactctcactggacccccattgttgattctggataaaaatatatatatatataaaactctttttttttttgacacagagtcttgctctgtcgcccaggctggagtgtagcgatgcgatctcggctcactgcaacctccgcctcccgggtcaagcgattctcctgcctcagcctcctgggagtagctgggactacaggcgcccaccaccatgctggctaatttttgtatttttagtagagacggggttttgccatattggccaagctggtctcgatctcctgacctcaggtgatctgctggataaatattttttttttgcttttggtgtaacttaggtagattggatcggctagctagcatctcagtccacactctgagctgtgcagcagtgtgccctggtgctaattctcactctgtcctttgattctggccagggggtccttggtggtgctgccttctggtcaggaatgtgggtgaatgtcagaccaaatagtgtcactttcggcttggccctagagatcaggaaggaagtgttgttagagcaagggctttgggagtccttggagttcgtaacctttgaatctgaaaagtaactgtacctagtaaattagaataatttctctctggtcaggcaccatggctcatgcctgtagtcctagcactttgggaagccaaggcaggaggattgcttgaggccaggagttcaagaccagcctgatcaataaagtgagactccatctctacaaaaaaatttttttaaatttagctgggcatggtggcacatgcctgtggttgcagctacacagaaggctgaggcaggaggatggcttgagctggggaggtcgagactgcattgagctgtgtttgtgccactgcacttcagcctgggtgacagagcaagacactatctcagaaaaaaaaaattacttttctccaatttatggacttcggaaagtagctaaacagatggatataagacagttgttgaaactcggcctgctgcagattaaaataaagtttgcacaaggataacttaatctttcagaccaaccaaagtttgggctggagatttttctcagcataaatgtcctaagcagagttggtgcctatgaggtaggaaaagattgagactttgcttgcctaagaggtttgcagggttcgagcttttgggagtcagaacttctcagactagattgtttcccctttggacagaacaacccaattctcagtgggcatttgatcaggactaacccaggccttcatgaactctttcccattgagcacttagccacctggctggcatttctcttctcccaggagcttccatgaggttcctacttatgtattatgtcgacttgaatgaatattttatgtctagagtgcagccaagcctcagactttgtggcccattatcgacaaatggggtagggggtgggcgccacctttggccccgtgatagcttctctgctaaatggactccccccagcagcactttgaagcccattaatggattggaatgaagtaacctcagcagatggaaagggtgaggagggtggtcatcttccttccctgagactgcctgatgaggctttcctacagtaaccaggacaagcccctattccctctgcttggttaagctgtggactggagctactaggcctctgctttgagaggaagtatagaaaggatttgattctcttttagccatggtggggccgccagtttccccactttcccatcaaagcaaaaattgagaaggatgtggaaagggtgggtggagtttaaagctggcccttcctccttcagtggaagttcagcaaaatgacaaaccagataggtggctaaatttccttctcttgatgggagattccagtatttgtacgttttgtgcttgtagct

SEQ ID NO: 65700 - DNA, 1010 bp, Homo sapiens
gaagtcaccctcttcccactgctggagagccaggctatccccaggttaaccctgaaagtgctaactcctgagcagaatgttactgccacccgcccccttcctttttgttataggccattgaaggtcattgctcgtctttttttttgagacagtcttgctctggtcacccaggctggagtgcagtggcaggatctcagctcactgcaacctccacctactgggttcaagcgattctcatgcctcagtcttccaaataaccaggattacaggtgcgcacctccatgcctggccactttttgtatttttagtagagatagggtttcaccatgttggccaggctggtcttgaactcctggactcaagtgatccgcctgccgtggcctctcaaagtactgggattacaggagtgagccaccgcgcccggcatcattgcttatcttttagactgagatagtacagctgattctaaacagcacccagagagaatctggcctcttgatttccagttgtgtctcagaggaggaggcatcccagttcctcctcttgccctctagacatctcctcctctgataagtataaataggctagatccctttatcttcatatctgtttttgtctggaatgtttcaagtttctcaagctaggtgtggtggctcatatctgtaatcccagcacttcgggaggccacggcaggaggatcacttgagcccaggagttcaagaccagcctgagcaacatagtgagacctcatttctacaaaaaaaaaattttttttttgagacggagtcttgctctgttgcccaggctggagtgcagtggtgcgatctcagctcactgcaacctccgcctcccggattcaagtgattctcctgtctcagcctcttgaatagctgagattacaggtgtacgccactgtaccccgctaatttttgtatttttagtagagatggggtttcaccatgttggtcaggctggccttgaactcatgacctcgtgatctgcctcagcct

SEQ ID NO: 65701 - DNA, 1144 bp, Homo sapiens
accccatctcaagataaataaggtttgtcagtccctgtggtggttctttccgcagatgtctgtctttgggttggcacttatttccccctacttgcagttattccttacatttctcattagaaaatggcaaaaagggcaaaagtaaattcatttcctttttacaccaaatcattaattttaggcttataaaactaaatgaacagaagatttggtaggagaggaggggagatggacactgatactggtggctaggtgatcctgagggacaactggtgcctggcagaaagagaggagggctgtgttcagtgactggctcccagccacctttttggcctttttctttttaacatgaggaaggcggagcagaccaggggcttctctgtagaaccagtcaagctggttttgggcagccttggcctattttcttgtgtgctctttgggaagttggcaatacaaaggtctgcctcctttggggctgtgttcgttgaggcgaaagtttggaagacaactatctgtcaacaacccccttctccccaaacactgaatgggtctctgagctggtccttcactccagggaggaggctttctctccaccctatgctgaacctgaaggcagctttgctttatacacctttcactgaaagctctaagacattaactccttttttggactcccttcccaattcacaacttggtgaaagaccctcagcctagccaggaggaagggactgggtctgcctttggctcctcatttatgggtctgggaggggatcaggactccttactgctatgatctggctgctaaattcagtgacatcccaggccttttttcgtccacgcaatgggactgtctgtccaggcctgctgggaaagaaaagagagaaaaaatagtttttgctctttggcagcttacagggacttcagccataggaaacaacctgtaggaaaggtgggagcttccggtcaccatgtgtgctgacacttcctgcaatagcactaggaagtctttctcagggagcaaggccagccaggtaggattatttcccagtctcccagctaagcaggaaatgccaaaatatgaacgtttagtaattagtgagtgtaactacctgctgacagagctccagcctagaccttgtccttg

SEQ ID NO: 65702 - DNA, 1892 bp, Homo sapiens
tgcctgcctatatttctgggttgcaaatgatggcggtggatgtgcagcctcatccgtggctagaaggccaaatccaaagtcaccagagcttgagttttttgagagttgagatctgtgtgtcaaaggggaagccctagggtggttctctgcagcaccaagagcagggattcataccatcatgttcctttcttttttcttttctcgtcttttctttcttcctttctttttgttctcatgagttctcactgtgttgcccaggctggtcttgaatatttggcctcaagtgatcctcccgcattggcctccccaagtgctgggattacacactcagccatgttcctttcttcaagtacggtattgaccctttggccacaggagaacgtgcccagtttttcttaaagaccacgtgggaactcagcagcccatgattgtaggttcctttttccctcatagagtggccttcaagggcaggttcttgttatctgcgtttcagagacccaaagggacacaggcatttctgctcctgggaatttgcggactttgaatcttgagctcagattttggtctctgttggttgcttgtttatcttcatctcttgtcatttctggagcctgcatgccttctcagagcagcaggtaagttgcttagttttttcacattgaagctgtggctgggggaaggtaacagtgtcccctcagaactcatggagatgccaggcatagtggaggctgaggcaggagggtcacttgaggctggaggattgcttgaggccagcctgggcaacatggtgagagctcatctctaaaaaatttttttaaaaataactcatcaggggctatttctttcattgtattttcctcttccttttgaacccctctgctgacttgtttcactttctttttttctgtttggtttctttgaactccctttcttcattatcatgtcctcattcccgtccatcttaggtttttcatttccttgttccactctccctaacctgtttctgtgccctgtttatggcatggctcaggatatgaattttgatctccgtctgagatctccttcaggtatagaatcccagaccacctggtccttttgttctctcattcctctgatttctgtacatttaaggattcactgctttagaaaactttttttttttttcttgtttctggagccacctctctcagtaaagccaggcttggcaacttattagggacagcattctggtttccctggtgacagggtttaagctgattctaggctgttgcctctaacccatcaggaatgccataagtatagaccctgtcttgggagagatctggagagatacttgagaattttggacactgtaatattgaatttggttctaattgtgatctagagaccctcagactctttcaggtgatgcacgaagtcaaaattctgttcatagtaacgttaacacagtgttgctttttcactctcattccctcaccagtatacagtggcattttccagaggctaaatgatgtgtggtaacatcacattcttctggctaatgaaatgtgtaattctgtattcttgtgttttctataatttttaaggtagtactttaaggtaaaaatatggaagttttcattgatggactcagtttgttcttagtacttctgtgctcttactaggtttcttcagttataactgctatcatctttttgtacacttcattactgtctaataaatccttattttgaaatcccagcattttcctggaacctttgagaaaatataagaagtaagtactacttgtaaaacttgcttgtaaaaacttttgggaaaactcctaattttaaaaattttattgacaacttattttagcactttattctaaaatagaaaaaaatttatattat

SEQ ID NO: 65703 - DNA, 1032 bp, Homo sapiens
ctaggtttgactatcctgctttgtggcacccatgaaatgttgggattctagaactctttctttgtaagcaccccactccccaccaaaaaaaaccccactaaacataagaagcttttgtctgtggatcttaactgtgtatattttgtctctaggaagcaaactcagattctctcttacaaccgtctgtgtgccacttgcacacacacaggcacagagctacttgcttgtagccttgactgccagcagccctgaacaccgtagctggtggtgccaggccttgtgtgtgtttaggacttgccagttcagtcctgggagctgaactctggacatcctgctgtgtgtctctttatcccatcgctggtgtaatttatgccactacttcctgtttgcatttgctcagtctctcctttggtttgcttctctctgctgaagccggtccccatagctgtgcacatggctagctatggggactaggcatctagatattctagacatctgcagttgtttcttagtgggaatggttgctttatgtctctctacagaattttagttgaacttgagtgtatgatttaatttacttgcttgtctaacttcggcaagggtgccttttattttaagatgccagcatggggtgagagtaaaggggtgaactattgccctcccccacccccccaccccccacccccccactttttttttgagacagggtttctctctgccacccaggctggagtgcagtggcgcaatctcagctcactgcaacctctgcctcctgggttcaagtgattcttgtgtctcagcctgctgattaactgggactacaggcgcctgccaccatacctggttaattttgtatatttagtagacacagggtttcaccatgtgggccaggctggtcttgaactcctgacctcaagtgatctgcctgcctttgcctcccaaagtgctgggattacaggtgtgaaccactgtgcccccccgccccacaccaccaccactttttttttgaaacaggatcttgttctgtcaccc

SEQ ID NO: 65704 - DNA, 1005 bp, Homo sapiens
gcaaatgttttgcgttttttgtagagacagggtttccccatgttgcctttgctggtcttgaactcctgggctcaagtgatccgcctgcctcagcctcctgaagtgctgggataccaggtgtgagctaccacagttggccaaggtatagttttatgagctgagctatagaactggttgaatgggaattagggaaaacagacaaccaataattgggaagtaaaggaaaaatatataagtgtgcctccttggtcacagctagccttgtgacattggggttttggatatagaacttcaggaatcccttccacctccttcccaagagaatttcttctgttggtgttgtaaggggctttttccaacttcatttccattaccaagagtcttgagtggctttattttcaacttgggttttttaagcgcttctcatgtcacctttgtttgtgtactgggcctgtctcaagtttccagagggagatgaaagacaagaaaagctaaatgactggttcttcagtgagtttcccagagtggcttcttctcattccagcactgcctaactctcaccatggctgacgccgtgggcaggcatccgcattcatggaaagccaggtcctagctggaagtgacacagggatcttcagatctctcttagcccactgttcctctgaaaaaaaaacaaaagccatagacagtaaattgggggaataggctgaccataacttcagttcgtggatttgggtcccacactggattgtgtgatttgtgcttatctcctactagattgttaccttctttgaaggctggactgtatcttatccttctctgtatcacttcggacacccagaaactgttggagtactttgcacatggtcacctcttaatgaattatttgtgaaacaaaaatttttttaaattgtaacatgaggctgggtgtggttgcttaggcctgtaatccccgcactttgggaggtagaagtgggcagattgcttgagtccaggagtttgaga

SEQ ID NO: 65705 - DNA, 1059 bp, Homo sapiens
gaggaaatcgtctggcttcctggagtggggaccagagccagagagccaagccctcctggctttgctgagttctgtccttgcccctgacaccaacgtgtctgcctgcgttgttgctcctggttacagtgggctcagtcttgcctcttttttgatgggtgggcagaggaacactagtgttgggaatattgtccagcgttggagagatcatgtggtctgtcagaaggctggagttatttatagtgggagaaaagcccaggagcatggcacgggaagaactgatttcacaccagctcagcgcctgatgatggtgaggacccagattttcctttgagcatctcagagcagatcagtcgcttttcctgattgacccatgaactgtgagactagggaccatgttttccgaggccactgtgagtgagggaagagtgagaaggatgaccattttcttcttccttgattctggtctttgtgatgtgtggtatgaaagtgtcatctgacttttgaatctccttttattgaactggtgaagaaggcaccagctgtgtggggtggtggaaataaggacctgttaaactggtctgcctgtatctgcctccctgctcccccctcaccccacccacccccaccctgggcagggaggctgaaactgctgcttgctaggctttgccaactcagtttctcttcatggattacctgctcgcggcaggcaggcaggcagctccccacctggaagcctgcagactcgccgagctgagagaatcatgctgcaggtgggggcaagtgctaggaactaggtgtgccacttaccttaacaggagctgtgcctagtccgggctgctcaaactaaggctgcagagccctggggcctgttggaaatagactgtgcctttccctgcgccttgtggccacatttttatggtatgtggagagtctgggaggggccgggagcttgtaaattgtgagtaaatgaagtctagggagggagatgatccttcttgagggcaccctgagttcagggttgtcatgtttctgaggtgtgctactgcttagtaccctgat

SEQ ID NO: 65706 - DNA, 1039 bp, Homo sapiens
gagttgtgaaggaggccgttcagcaagcaatgaagtgctagtgcaggaaggcccgagctgggaaatgtccggagagaccctgtgaagtgatgcagggatcaggaaagcttcctggtggaagcaatgtctgagctgaggctcaccacaaagaggaatgggagtgactgctagagggaaagtgttccaggcagtggaaagctgtggccaagacctgggggggtctgagaggccattgtacatttgaagacaggtggctggaacccagagtgagactctaggaagggaagagagttagtctggagctgcaggcagggaaggggagacagccagctcataatacagtgtgggcaaaaatccagaaaccatgtggatctaatttgatatcaattttacatgtatatgtgtatatacctacacacacatacataaaatcagttatgtttgtgtgtgtgtatatgcatatttgtgtgtgtgtgtacgtgcgtgcatacagaaagttgtttttttaaggcatgctttaaatacgaagccatcacttccttttcccagtcctgggtgccttttgagatgagtgttggtgctccccccaccgccatgtgccatcttctggagtaagagggagtgctttcactgtgtgcaggtgtggctaaagagtattcactgtgtgcaggtgtgggtgaagagtattcaccgtgtgcaggtgtggctgaagagtattcaccgtgtgcaggtgtggctgaagagtattcaccgtgtgcaggtgtggctgaagagtattcaccgtgtgcaggtgtgggtgaagagtattcaccgtgtgcaggtgtggctgaagagtattcactgtgtgcaggtgtggctgaagagtattcactgtgtgcaggtgtgggtgaagagtattcactgtgtgcaggtgtgggtgaagagtattcactgtgtgcacgtgtggctgaagagtattcactgtgtgcaggtgtgggtgaagagtattcactgtgtgcaggtgtgggtgaagagtattcactgtgtgcaggtgtgggtg

SEQ ID NO: 65707 - DNA, 1486 bp, Homo sapiens
ggcactgtgaggcttcttcaggcccaggagtcaggcccactttcccttttctcttgagggaatgactcagagaacactcctgccaccggaggttctgcaggcttttgagaggcagccagtggaggctgatggtagcagttggtgagaaagaggaagtatgtagtggccattcctccggccactcctgacaaatatttctgtcactaaacagcacctctctgtggcagccttgggctgtgttctggaaagggaggagctttcctctccctgtgggagggcctgtcatctgtggcttctgctttgcccttggccacagactagattgcacaacacagccaatgagagtccctcttccctcacaagtgcttggagtgcagaccttaacttacagggttgtagaagtgaccgtgttccacactgcagggtccaggtcacagccggcaaagcacatgaaaattgacctaaggttagaatgtgattatcctactgggaaaggtttactgggacagcatttcacttctgactccataggctgtcgtctcctgccagggagtgagttttgtttccatgcttgtccagtctttactgctttcccagaggccataaacctgccttttcccagaggccataaacctgcccacctcctgctatgttctagttctgataggagtaccattcagagttcttggcaggggaccaacccgcttctaccgtggttggtttcccctccttttcccagcttgtttgatgtgcacgttctccaaaattcttatgcagctggttggctctgtagtgcccagagattggagctcctgcaacgggaaccccgccgcttccctccctggttttaggggcagggcttgaaaataaagaatcataatctcccttcctcctcctcctcctctcccccacttctccctgcccccacccccacccccacccccaccctgccaggcaaactggagtgaccagctcagagcgggactcagtccacctccctgctctgcatgtcagcagtgatctggaggagattccggggcgcatgagtatgtgaactctggagcacgttactgtcccgggctggcactctgtggcaggtgtgtgcactcattctgctgttactggagaccagtctccttaggggtgatggtgacccagctagatgtctgccaggtctgtccaaggccaccctgttctctaatagcttgggaaatggaaagcacttctaaatacccctgctcttcagaagagctggctgggtggtttggggagtttcttctttgaatctcttagagtacaatatcccttttttcccgaaagccaggttctttagttcctaagctccattctcttgttgctaacttactaccttcagttttcttaggttgggtgcatcttccctggcctcaacaagacagtggctgaaaggtcaagagagtggtagctgctcctttgagagaaaggggatgttggagtgggagcacag

SEQ ID NO: 65708 - DNA, 1021 bp, Homo sapiens
cggctcgctgcaacctccacaccccagattaaagcgattcttctgcctcagcctcccgagtagctgagactgcaggcatgcgccaccacgcccagctaatttttgtatttttaataagagacagagcttcaccatgttggccaggctggtcttgaactcccgaactcaggtgatccgcctgcctcggcctcccgagggactgggattacaggcatgagctactgtgcccagcctgaagattggttatttaggggctgtgacaaatggttttgcagaggagcactggaaagcctgtaacttcacagagccaggggtcagcttttgtgccatagccttatagcttctgtggcctgtagtgcctgaggccaggggatcaggtgctgaccacctttccctcttccttcctgtgtcttgcggccagcgactgttattgtcaggttgaccctctggttagagaggatgactttggcctggtgtccagactccctgctgccttatcccctctgccctggaactgcacctaaaaacaattactttcctcctgattccaacataagtggtcacagaaagttctgttttggcattttgatttctgattgggagtttaggcatctgagaattgaatgcttgctttatacaaatatacccttaagacatctcctcttttttcagccctacatgctttgcttgggtattaattgaacttggggctttttagggaccttatgttgcctaccttcctagtttcccctccactccacccccaaaaaacccaaagaacattggaaaaattgagcagtgcctcaaggtcacttgatcataagtggtatttggcatagttaactggtttggtgtttggtgagagatttctgctttatatttgagcaaaaaatttcttggcgggaggcctctatgctgtgttgccaatgcttgccctgtgcgcagggtttgccccctcccctcccttgacaggttgttctaatccccttgtctataaacaagtgcagcagaacttgtcggc

SEQ ID NO: 65709 - DNA, 1045 bp, Homo sapiens
tacctgggactacaggtgcccaccaccacgcctggctgatttttgtatttttagtagagatggggtttcatcatgttggccagtctggtctcgaacgcctgacttcaagtgatccgcccgcctcagcctcccagagtgctgggattacaggcgtgagccactgcacccagcccagactcttttcataggatgctgaaaggatgaattaagtataaaaagtgccttttggccagatgcagtggctcatgcctatcacttgagaggagcttgggcaacatggtgaaaccccatctctacaaaaaatacaaaaattagttgggcatggtggtgggcacctgtagtcccagctactcagaaggctgaggtgggaggatcacctgagcctggggaggtcgaggctgtagtgagccaagatcgcgccactgcactccagcatggtgacagagaccctgtctcaaaaaaaaagtgctttttaataaggtacacgtaatggaaaatggctgtcatctggtttgccatactctgctcctaggtagaaagtacaaacagcaagggccccttggagcaaaattgtcattgccgccagtgaataaacagcagtggttggctttgaggggcaccttcagcctaaagccataagctgacatatactcagtctcactgagaagctcgggctttccactgttcacctaactgctgacaaatgaatcctccattgatctggcaagctggccaggatacctgcccaggccatggccacttagtaacaggatccggttctcagtgcagggttgagactgcagcagcagtggcaagcccagtaaggcaggtatgaagcacagcccccgcatcggttgcctagtagggaagacagttgtaaagagcatttgcccctgttatgtcagggtactgttgcaggttgtcttttctcctctagctggaagttgttctacccagtcttccttaattagctcttcttttgtgtaaggcagcacccatttaaaattcttttcctccagcctcattcctcatctccatttgggtt

SEQ ID NO: 65710 - DNA, 1992 bp, Homo sapiens
gcttttgggcaaaatctaggattaaatatgattttttcattgatagaatgctctatcagtgataaaggctcttaatctagaaaacatacacctcatagggggctttacagagtccccaaactccctgaaattatgctcaaaatattttgtgtctaagtggaatgtgcatgtttccaaggttaagcactgcttttttaggaagtaggaggtccgtccgccactgtcagcttgctggtttctgcttaccctcctccccacttcgttcttgagggggtggtttgctggtctttggcagggccgccactctgggtcagcacatctgagtcacacatgttcctccccagccctattggaggctttgttaaagtcatctgcccctacccaggtcccacctgccacaggtgagctagggttttatgacagccgtggctgcagtgagtctcctcgacctctcgccagctgttacccagcaaagcaccttggggagggtggggctgcccacttccggggagggggggagggggaggggagaaggaagttgatctaaacccgcctctttctctgtctcccttcctgccctattcccctcctgccccttccctcccaccttgcttctggtgtgctgtcctggaattgcacgcgcttcctgaccaccaggctctggcccttgagaagccagcggggctttgtccctgttgctctccttgccaaacccagtctctctgctagtggtggtttcggttgcgacaccgtccaggttcccaggcaggaaccgctcggcctggctgcttagctacttttcactgaggaggtggtggaaggtgtcgcctgctctggctgagtaagggtggctggctgagccggcagcccccgccctaggcctggctcttcccggcctctgtactttgccctcgctgcctgacaggttctgctgtgggctctgctgaatggaagtcgctggtagtccttttccctttctccagtcgggtatgttgtccccctttttactctaggattgcctcctcctctttctttcctctcatctcaaacataggatctttagagagttgctaaggggcgccctgcctgagtccagcatagtaatattcatgggaagggtgtccagatgtggaagaggcattgactaggaaaggaagagggggcacataccagaagggtctcccctgagaacaagcagcttgacaagtgggcgaggaggggctggtgggaggcagaggcctgaggcctcagagaggatgctcccgtgctacagtgagggggagcctaggatctggggccattgcccaggactggtgcccaagggacacttttctcccccaactctatagtgcctggcttactctgcttctggccagggaatatcacccctcctggtttggctccttctcagccctcgggaagccaaaggacacttgaagccagccctgaatgcagagccccaaagcatgagcttctccatgggacaactgttggtaggagcctccagcattagggcaggggccctgcctacctgagtcagcgccaggcctctcggggtggaggctgtcttccgggcaagcctgacaacacacctaggccgagtctgagatcccaggcggaaggggcctgacaggcccagtggatgcaaaactatctttttattttctcctccatgtcctgccttctctcttcctctcagtagcagaccccaaagctgtttcagccctacttctgaatcaggcctgcttagtaactacttggtttgccttttggttccaaataactgccttgcagggtgaccccttattctttctaaaggctacttgagagccatagggtctactcttgacagacctcctccatcctttagggcctgtctagagtatgatataggccagagctttgggagtgcctggtgtgccacgtcttactataagcagggaggatggtggtagaggggagagcgtggcttttgccaggtcctattgagtt

SEQ ID NO: 65711 - DNA, 1163 bp, Homo sapiens
acacgtcttcacatagatgtatgttttttgtctagaccataccctttttgtacaggttgaacatccgtaatccaaaagccaaaatgctccaaaatctaaactttttgagtgccagcatgatgccacaagtggaaaattctacacgtaaccccatatgacaggttataagcaaaattcaatcactttatttcatgcacaaaattattttaaaatgtcatgaaattaccttcaggccatgtatataatgtacacatgaaaaataaatgtttagacttgggtcccatccctgagatatctgattatgtatatgcaaatattccaaaatccaaaacaatttaaaatctgccacgtttctggtcctaagcattttggataaaggatattcaacccgtattatgtttatatgcctcttcagtgctggtagttgtagcttctgcttcctcatcccctcatttgagccgggtggcagagcagggcagactgctgccttgctcagacctaatcgttcagttctttcattgtacaagtattcattgagcagcaaacataagccagtctctctaagtgctgggatgtatcagtgaataaagaatatatgcctgctttcatgtgcttccatttttactgggggagatggcaaataaatgtaaagtgataaataacaaaggttcagtggggcattcgtagttcagcggcagaaatttcgtctcctacgcgggagactcgggttcgacttcggccatgcagtccttccatgcaggaagggctactacgtttctacccaacaaagttattatggctgggcgcagtggctcacgcctgtaattccagcactttgggaggccaaggcgggcggatcacctgagatcaggagtttgagaccagcctgaccaacatggagaaaccctatctctattgaaaatacaaaattagccaggcgtggtggcgcatgactgtaatcccagctactcgggaggctgaggtgggagaattgcttgaacccgggaggtggaggttgcggtgagctgagatcgcaccattgcactccagcctgggcaacaagagtaaagctctgtctcaaaaaaataaataaataaaaaataaaggttcatgtaagttttgggtggcgatgagggcgttgaagcagttatgaccatgtagct

SEQ ID NO: 65712 - DNA, 3021 bp, Homo sapiens
ttgaattagggcttcccctacccccaacaaaaacaacaacaaaaactagttctgttctttgtgcaagtgatgaggcctgaaattacaaaaagccccacctccagttctctggcccccgcagaggggaaggagttcatttctgtcatctttctttatggaaatacatggtttggagcccctggttttgtttcacaaagagagcgtgagtgtgtggaggtggatttgattaaaattggcatcagctatatataggagtggcttcttctgtcaccaccctagaggcccaggaaggaaaggcctatcccctagaacagagccctctgactactgtaaatcagaaaatgatggggtccccctctggtgctctaccacccctttacacagaccaagctggggtgtgtactgtcactgaaccaaggcagcagctcggattctgaatattcacgcacacgggctcacactccctccagtagaggcacccagccaaaacctgcctgctgttttggggctggatttggtagacgcagcagagggcatggctggctcatcctgatgccatcccgggtagcacgtccccacagccagccctcctccagcttccccaacttcccagccacagggaaggccgtgcatgagctagacaaccaccctattttcttttccctgcccggttttggttttttgggaaaaacaaatcctggcagggactgtttggagagacctgatgggagcaagttgggcaggcatgacccctggtattttatcttccagctattccgcgaagtaagaataatgaaggttttgaatcatcccaacataggtgagcacaagttgttatttctttcttcttccccaacagcaaggcactgctttccagcatgtcatcttctccccgaggtgcactgccttctggagtctgcagtcttcaaggatacccctggggaagctcagctcaaaatccatctccccttctggcacactgggctgtctttagcagtttggctggcatgagaggaacttgttcttgggagtgggggatcatgaaaggaggggagactttcgttcctaggatgctcctggacatgttggagagcagtatgtggcccctgttgcttcttgacttaaggcttggccttttctcttgtagttaaattatttgaagtgattgagactgagaaaacgctctaccttgtcatggagtacgctagtggcggtaggtgtggaactgcctcttcctgttgtgcccccacttcttccacctccagccagctctgactgagatccctgcctggtctcttacaggagaggtatttgattacctagtggctcatggcaggatgaaagaaaaagaggctcgagccaaattccgccaggtaggtgtgactccctccataggagctaggcctgacctctgcttttggggtttgacatgtaaggataagctgcctgtctgtaagtggcccttggagggtactttgggctctgcttatccgtgtggcaggttagcactaagtcacagggtcactgctctgtcagcccctgtggcccaccctcaggcacccctgggttaacccttcttccttcctttcagatagtgtctgctgtgcagtactgtcaccagaagtttattgtccatagagacttaaaggtaaggcatgcacttctccttgtgcctttgagtgggagccaggttgttgcctcttggttctccatgataaaaccatcaataaccatcaggccctgagtgttccaggaaactccagcctttctttttttctttctttctttctttttttttttttgagatgaccagaaagcccctagggctgcctctgatagaggccttgtggctggacctcgggttccattctagcccttgagcaggggccctctgccatttcacctcttggcacatcaccttttagtgctgccaagcaaggcaggcacactccaggctttctcagtctttcaggcaacctggtagctgacccagggaagagtgctgaaagttccacagctgtatcccagctgctttgcaggcaggcacacacataccatctccatcaccaagatactcaagtttgaggacacctgtgggtctcttggctgctgagtcctcacagacatgatttgattaacctgggcctgatgctgaagctttgcacagctcacagggtctctgggccttcagatcccatctctcccatggctgcccacgtgaggagtggcctgcattgccttcctcctgcccagcctattcacgctgattgaagccctgccctgaaattggtggagaaagttctgagactgaagatgactttccgtttgttctcccattcccctcagctccttcctgcccagggccttagtctggtccacttggttccctgatgttttccatcttacctcccaggcagaaaacctgctcttggatgctgatatgaacatcaagattgcagactttggcttcagcaatgaattcacctttgggaacaagctggacaccttctgtggcagtcccccttatgctgccccagaactcttccagggcaaaaaatatgatggacccgaggtggatgtgtggagcctaggagttatcctctatacactggtcagcggatccctgccttttgatggacagaacctcaaggtggagtgaagtgcaagctttttattgcttctcatttcctctcggcctctggtcttagccctgacctcctgcctttgccacctgtctacatttgtcccaagccaaagcttcagagaagggcttgctgaggtagcagcagtcaaaggccttctgcacctgggaatgaataacctcagttcctttctcgaaagatgggataaactgtgtgtgtgttcatcccccaaggcactccggattgcaggcctcggactggtcaagttagagggtacgagggtatttgacttcacttgcctctctggtgaggtgtcttgtccccaggctgtctgccttcttccatatttcatttatgtctgctttgccaggcttaagct

SEQ ID NO: 65713 - DNA, 1014 bp, Homo sapiens
ggctgtgccgggctgtgaggttaagcttgcctaggagttgaggccagtcttaactgtatgtccccctgtgcagagctgatggtgtccatgggttatacacgggaagagatccaggactcgctggtgggccagagatacaacgaggtgatggccacctatctgctcctgggctacaagagctccgaggtgtgtgctccccgccccattctctgacctggccagcctcactgtctgtagcacctatgcttctaacacctgttgagggcagaagctcatctctgagtaggtgtgctctctgctcaccaattttaagcctcagctttggtgtctaaggtcctctggcccattcactgatctccatgagtgaattaatagaaagctggtagggtcggtgtgggactgggtcagagtttcaatacgggtgagttgatctaggttagtctgcattgattagatgtgtctaggtcatcggctagcactactacattgatctagatatctttgtgtctctttttgtatctggaagtgtacatttctgggtgtgtgtgtgtgtctctgtgtgtgtctgatcggaagtttgagtctgttgcttttttttttttttttttttttgagacggaatttcgctcttgttgcccaggctggagtgcaatggcaggatcttggctcactgcaacctccgcctcccgggttcaagcgattctcctgcctcagcctcccaagtagctgggattacaggcatgtgccaccatacccggctattgagtctgttgcttctgtctagtgctttatgtttgggtgtgtgtatctgtgtgtgtgtgtgtgtgtgtgtgtgtgtgtatgtgtccgtcttcccgtctgtggatctggagactttgtgattgttcttctgcccatttgggttttgttcatcatctgagtatccccacatgaactcccagcctccctgccctgctctccctctggtggtgggatccttaagaggcacctggtgacacttggtataggcccata

SEQ ID NO: 65714 - DNA, 1038 bp, Homo sapiens
tggcctcttccctaacctaactccgatgtgccaaaggtttcctgtgttggacccagggtggggatctcttcacggggtttctcacacctgagcccccagccaccacagaggtgcagcttgaagtgcatccagccaactggctggcctcctgggatgctccgcatccccatcctgccattcctctccctgccttggagtagcagctcaggaagcagcaggggctttgagagaacaggctcgcctgcccttcctctacgtttcactccactctgctggaggagccaaagccactgccccatccgagccccagaatgcaagtgtgaggcctgcagagagtgtgggcaggtctgaaagcctgggactctagtctcgctgagcggctcttccgaaaatgggatgacccttgaacctgtaaagccacctcccccacctgcttatccacataccgtcttgttggttttttttttatttctttttttattttgtcttttttttgtttgtttttttagaaatctgtctttcaggtttgccagaaggtaggcgttgagcccgctgtgtgtgtgtgtgtgtgtgtgtgtctgtgtcctgtgtcctgcctccatcactaactccccttttctggctcttactctcctccatctgcttaaccaagtctgtgtggccctcctctctctgccatcttaaagggatgaagactgcctctgattgggcatcagcacaaggcctgccctccgtgcccccagtacaaacaggcagggctaagaggccacattggcccactcagggcaaatggctttaaaaatgagggccttccttgggcccacagttaacgcctgtcctcaagtaaggggagactgtctcagggaagcctccctttaagattgtctcctctcacccaccccaccccacccccactccctctcaccccaggttttggtcacaagtgttgggatcctttcctgccctttcccttgtcatgtgcatgcgctatgaggaagctccagggttacaagtgcatctgggatggtatcttgtttg

SEQ ID NO: 65715 - DNA, 1346 bp, Homo sapiens
cacagccactccccctcctcccccagagcagaggctccttctccccggcacagatctgggaatgtggggagggacaagccccatgtgctgggctccctgctggaaaggaatggttgagccgccagtgtgaggtgctgcagagccctgttggcttgccaggtgatgggcagagggccctgggcttgggtcctgcccacccactggtggcacctccccagacccactctcatctgggtctgtggcggcggaaggagcgagagatcccagcactaaactctccctcgctctgttttttgaggaacctgaatgaacctgaaagcaaagaccgagtggagacgctcaggtgagagggctggagccagcactggccctgcccgggccaccgggcttgccacagcctcctgctcctctcttccttctgccacttggctcttcctcccgtggttctgccctgtccctaccctctggggcctccctttcctcagagagtttccccttcccaaacccaattgcaggagttacgggcccttctcctcaggtctggtatattctggaagtcggagttctgggtcgggtggttggggctacagattcctacccctggactatcccacctccctgtgctcggaggcttctttctggagagagagtctgtgctcgtgctgttgagggcactggtgtcttccctgaccccaccccgcctaccccaaggctggcttctcctccccttcgctgtcctgagagatgggggttggaggactgccaccctccgcccccgcaggccaggggccacgcctggctgctcctgctccctcccgctctcctctctgggctcaggggctgtctgccagggtggctctcctggggtggggtgcctcagcccccccgtgacgcccgcctctgccctctccacagacctcacgtggtgggcagtggcggcaacgacaaagaaaaggaagaatttcgggaggccaagccccgctccctccgcttcacgtggagtatgaagaccacgagctccatggagcccaacgagatgatgcgggagatccgcaaggtgctggacgcgaacagctgccagagcgagctgcatgagaagtacatgctgctgtgcatgcacggcacgccgggccacgaggacttcgtgcagtgggagatggaggtgtgcaaactgccgcggctctctctcaacggggttcgatttaagcggatatcgggcacctccatggccttcaaaaacattgcctccaaaatagccaacgagctgaagctttaacaggctgccaggagcgggggcggcgggggcgggccagctggacgggctgccggccgctgcgccgccccac

SEQ ID NO: 65716 - DNA, 1352 bp, Homo sapiens
gagaatcgcttgaacccgggaggcagaggttttggtgagctgagattgcgccattgcactccaacctgggtaacaagaataaaactccttctcaaaaaaaaaaaaaaaaaaatatatatatatatatatatataaaaaataaaaatataaactggtctgcagaaaggggagaaccccagcggctcccctactgagtagttgtttaggaggaacaagccagatggtggatggcagaaagctttgccggggcagtggtgctggtgtctgtgcagaagtagggtcctgtgaggggcatagtggcctgcctgagatgggagtctgatattcctccacttcctggccttcccaggtacagagcatgaagcagacgaacagcagcctgcgccaagccctggagggcggtattgatccactacgccccccggaggtatggctgctctttaagttagggtgcaaaggggggtttctctctggaggcagagcagaaagagtactgcttggggagcagggcttccatttgcatggttttgagtctaaaggatatgttgttccttgctttccaggccaacaccaagttcaactcccgctggaccacagatgagcagcttttggctgttcaaggtgggttaaactgtggtgagaagagaggaccccaggaatctatctccccaccctccaaggagtgggggggcagaggggaagggtcagggaagtaactagttcgaaggggtattgacgctgctgcccttttgacccttgcagccatccgtaggtatggcaaagactttggggctattgcagaggtgattgggaacaagactctgacccaggtgaagactttctttgtgagctaccggcgccgcttcaatctggaggaggtgctgcaggaatgggaggctgagcaggatggggcccctggagccccagtccccatggaggaggctaggagaggggctccattgccagccccagccctagaggaagatgatgaggtgagaagggggtgagagaaacccctcagagaggagaggcgaggcgaggtgaggcgccgccttggtccttagactgggctgagggcgggaagagcctggcttctcactctttcctctcccctcaggtccagattacatcggtctccacgtccgtgccccgatcagtgccccctgcgccaccaccccctccacctcccacctcgctgtcccagccacccccgctgctgaggccacctttgcccacggctcccactctgctccgacagccacccccactgcagcagggccgcttcctccagccccggctggcccccaaccagcccccaccgcctctcatccgccccgctctggctgcccccc

SEQ ID NO: 65717 - DNA, 1796 bp, Homo sapiens
agtgcaagcctggtgagccgcaggacaggctgtgaagtggggtgggggtggaggcccggggcttggcctgcagccccacctggggcgcccttgattggctcccctggaagggcaggctggcaggggtgggtggccccccagcatggtttgctttcctgccctgccttcctgtctgggtctctgcccctccttcccttctgggcctcaacctccctggctccactcctctgctgccctctggccatgggtctaggcttgtgccaccaggctgatctgagtgtcttccctcctgctcctcggcctttcagagagccccgcacgctacagcaacaaggagctgaaggggatgctggtgtggtcacccaaccactgtgtgtcagatgccaagcgtgagtggggcacagccctgggaggtgggggcttgggttcatcccagctccaagctagctcttctcagaagggggctggaagctgaggtgttcgtgggtccaacccttgccctggggctcgtgttcagggacctggccgttgtggggtggtccctttctggacaggcctgggttaggagctataacccccttcaccaagaccctgcccctgctgcccctgcagttgacaagtacattgcgatggccaaggagaagcatggctacaacattgagcaggtgagccttggcccccagggacttgggaatggggtggaacggtgccggggcagctcaggctcagctgccccttgccccgggccaggcgctgggcatgcttctgtggcataagcacgatgtggagaagtcgctggccgacctggccaacttcaccccattccctgacgagtggacagtagaggacaaggtgctgtttgaacaggcctttggcttccatggcaaatgcttccagcggatccagcagatggtaaagcccttccacccccactccccggcgctcctctgcccctcctttctgaagagcttacctggggcccagagtcttgagtggtccccagcttctggcgttgcctcctccagctgcctgacaagttgattcccagcctggtgaaatactactactcttggaagaagacccgcagccgaactagtgtgatggacagacaggcccggcggctggggggccgcaaggacaaagaagacaggtgggggcaggagcaagcactgggcatgggggtaggtagagctcctggcagctgcctcattccctccctggcccctgtgtcagcagtgatgagctcgaagagggtcgaggaggcgtgagtgagggagagcccgatcctgcagatcccaagagagaggtgagctcccagagcctctgggccctgcctgcctgtcctcttgcctctctctggctctgcaccacctacctgcctctcctttcactggcagcctctaccctctcggcccctgaatgcacgcccaggccctgggaaaaaggaggtccaggtgtctcagtaccgccaccatcccttgcgaacccggcgtcgcccacccaagggcatgtacctgagccctgaaggcctcacggcagtgtcaggaagcccggaccttgccaacctcacgctccgaggtcttgactctcagctcatctccctcaagcgccaggtggggccctgggaaatgaacgggctatgcaaaggtggcattcggcacctgggaactgaagtctagggggagctgaggtgtaagcgagatggttcaggggccgagccccatcctctgggactctgagtaatgtggtgttctttttgggccttctcttaaaaactggtctgcaggctgggtgcg

SEQ ID NO: 65718 - DNA, 1034 bp, Homo sapiens
gctgagaggcgcagagcccggggggcgcagattgcgctccagcgcccagccgctgaacggcgtgggcaggtgggcggtggggttccagggcgccccgaggacagggggccccgacttcaggggaaccccaaccctgaggggcgtacatagtaatcacgccccagccgcaccggaccttgcgctcatcccttgcgtcccccacttctgcacaaacttttctgacgccctggctcgtgggggtcgtggagagcgctggggctaccaggtgggctcccaccccgccggaccctagccacgctgacctcctgcctctcctaacctcagtggcgacctctccaggccgggccgggctcggcactcggagcgagtgcggcaaccactgtcgctctccgaaggctcctgcgccccccggggcagctgggcggggtaatgccctcagtgatggagaagccgagcgcgggctctgggatcctgtcccgtagccgggccaagacggtgcccaacggcggacagccccactcggaggatgacagcagcgaggaggagcactcgcacggtgagcccggtggcctagggttaaaggcgcgccggcctggggggagcggagtggggcgggagggggaagagttgcagaccacgagcctgttacactgatggctcctgcctctcctggattggagcctctgcgttgcttctcccacaaacccaggctgccggcacagccaatctggaacctgggcccctagctgctgtggaggcgtcctgccggcccctgccctgccctcaccccctcagggaccgaggcatccctcccttgcatagagtgggtccctcataccttgccaccttgcaggggactgaggtctggctggagcagggactggagagacacctccacacagagctgtgaggctcctgtggtgggaaggagccttgggttccttgcagggctgtggtccaggtctaggggctgccctccaaccccgctcccctcccccggaacaaagcaccctgcttggcctgggctctaaaac

SEQ ID NO: 65719 - DNA, 2046 bp, Homo sapiens
ccgcgctcccgcctcctcctggtcggagaccctcggccagcctagcgggcgctccacctgcgcgccggctcaccgctgccctgcgccggttctgcgccggcgcggtacgagggcgcgcggttgggcggggggggggggggaagctgcgaggcgcatgcgcgttgcagggccgtccgctctgctgccgccgctgttgcagccaccgccgttgccgcctccctgccggcaagtgtgtgaagaagaagctgagcgttgtcgccgccgctatgggggtgagtgaggcagagagaggagatgggaggtccaggggcgctcctcgctaccctcgccccctttgttcttaaacccccctctcacgtgaccccgaccccctccagcctcacgtgacccctgacccccacatgacccgactcccccattctaagggtccctacgctaggcctagcccgggaatcctctggagagcccctggtccggggccccaccccctcggcgcccccagcgtcacgcccgccccttcctgcttcgcggacccgttactggcctccccaccaccgtcccccgcggggaccctggggttagcttcccgctcccccagggtcactcatcacctggctgtcaccagcttcgtcgcttttcacatccgaggtcaaccctggcttggagggaattgaggcccagaggaaagaaggcgcctagccaaggtcatattgtcgggggcgtcagaccccaccttgggcctcccgaatcccagtccactgcccttcccgttactcgagtctcagcgaagccggttcccctacactctttcgaaacctctccaccaggttcctgctgctcctgataaacacagccttcctttcccatagactcctgccttcgacgcctcctggttgcaatgaaatggttcttacgaccgcttgggttgttaggggttttggtagtgcaggtgttttttgcaaggggagggctgtgcaggtgtgcggggaagatgcggggaggcgggggcggcggcccagccgcggatggatattgaccacttgttccgtgccggcagcctggaggtgcattttagtttactttcccgggatatagggtagggcagaagttatttgcaagtttctgtgcgttcaccttactaagtctcaattacagcagtatcagtcaccctcctaaaaagataacgcttttcctagtattggctgtattctttttttttttttttttttttttttttgatatggagttttgctcttgtcgccgaagctggagtgcaatggcgcgatctcggctcactgcatcctccttcttctgggttcaagcggttctcctgcctcagcctccccagcagctgggattacaggcgcccgctactatgcccggctcatttttgtatttttagtagagacagggtttcaccacgttggccaggctggtctcgaactcctgacctcgtgattcacccgcctaggcctcccaaagtgctgggattacaggcgtgagccaccacacaggcctatattagtatttacatggaatttccatcaccttaagggaaccctgactttggagcccgaggtacctcacttccagccccgtcttcgctgctggtggtataatagtgtgccagtgagttggcctttatgtgtttgaatttcctcacctctgtaattgggatgctaatacctcccccttagggtagtagtgaagattaagtgagataatggatgtagattgctaaggaggtgtctcctaagtagtggctgttatttttgtctgtatcctcagccttaactttactgatctaaaatggatttgtgctatttttaacccattgggtttgtccctactgttgttaacctagtttttttttttcccgtcactccactatttatcgactgaacaaatcaacttattagacaaaaatagttgtctaatccgtgtcaaaacagtcatcgtgttttaacaaatagttttgggtattacgtacttcatatgtagaaaaccaagtctagagaccttaggcatatttaacctaaattttgg

SEQ ID NO: 65720 - DNA, 1058 bp, Homo sapiens
tcacgccctgctaatttttgtatttttagtaaagacggagtttcgccatgttggccaggctggtcccgaactcctgacctcaggtgatccacctgcctcaacctcccgaagtgctgagattgtaggcgtgagccactgcgcccggcctggaaagtcttttgacatactttagatatcccatattgtgatatctcatagtgttttcgtttttgtttttgagacagagtctcgcccaggctggagtacaatggcatgatcttggctcactgcaacctctgcctccctggtacaagcaattctcctgcctcagccgccggagtagctgggattacaggcaccccccaccacgcccggctaattttttgtatttttattaaagatggggtttcactatgttggccaggctagtctcgaactcctgacctcatgatccgcccgcctcggcctcccaaagtgctgggattacaggcgtgagccactgtgcccggcctcatagtgttttcatattccgtattcccattgacttccagaaatgtggaatagctccaaaacaggcattgccagccaagtctgggctcctctggtgccttgaattttgtgtggttcctgtggttgtgatcttactttcatgtactttaatggagaattcgtacctgcaggtgggctttggacattttatagttaagataggtgcagtgctgtgtttgggcagctgtgatggctaagtgggtgataaagaaaggaagatgcttcaggggcagggagttctgaattcataaggctgagtgtggtgtgccagtcagtagaggtgatgggattccagtgcgtacatcctctgggggttgtgtcaaaggtcactgaaaggtattgatacgggagctctttaaaggcttagagtttgctgactctagtcctttcagaatgtagtgctctctagggaatgtgatttcacagatcagtcaaggagtttaactgttttttacttaaatttcatttagaaacagataccttaacacttaggcatttgtgggtttagaaaaacagtgttgggctgaagc

SEQ ID NO: 65721 - DNA, 2195 bp, Homo sapiens
ggtggggccgggcagtgaagctcatcctccacagtggctgcctcctcatttggctcctggggcctgcagtggaggttctcgcacctctgcagcccctagattcctggcaacctcccctcccctgacacatacacacttggacaaatggaatgtttatgtccacctttatgaaagttctggagtcctgggtctggggtttgctggtccccaaagaggaacacactgggtgtaagatctgggtgtagagggcggcttcagagagactcacgcttgcgcagttggaattgctgttaacggagactgggaagatcttttgtgccaagatgcagggaaatgaagaaagctctttccagctgtttttatggattcatggagtgggctcatgttgggaccagctgactctgggaggaagactgcctctccatcgctgtcagagagcctgaaaggaccaacaatgaggtgttcttgggacccgccatggggatgattgcttctctaggctcctggatgttgctgcattctaagcttaacctcctggtctcatggcagtgacttgagcttttgattcatagaagaaagccagaggttctgcttgttcttgtctgccagccctcgtcgttctttctcctctgcctctcacctctaccccaaatacctctgttcttagtctcaaggggagaataacatcagggagcccctcatcttccccagaaggacttctcgttcctcatgtagttaactccattgattttcctatcttggtgctgatagctctctaagggtagggcacacctccccacagccaccctccctcttcagagagcccccagccagcagcaggcccctctgcctgcactcctcaggcttgcccctcgctgcctcagtgaggcactagtgccactgccgtggcccagccgggccatagctcaggctgcagcagaaatgcctctcagtggccaacagttgcttttctctctggtgtcaccctgtggcaacaggctggagcaggggaaggagaaagccttcctcttctctcataggatagaaaggcaggctcagaactaatgctcatcctgatctctaggccttgttcctcttccagggaagaaaagccaaatccttatcaaggaaaaagcacctaacagctccctttggatatccctgagctctgctgtggggagtatcataaaggttctagccttcgtgaagttgttctcgtggaggtctgttggtccctctgacctcagcatctgctcacatcccaccctctgcccaactctggcagtctctcctggcagatctccccagagtggtccttgcttctcacctggattcctgcttgtgcaggagcctgtgtacacagggcctccctcacccagcctggcccctctgctgagcactttgcgctgctcttgatgggcagcagtgggactgggaactccttagagagggccttgcagctttacactggaataagtctgcctctgcctctgcctcaccctgctggctcctggtgggtttcatcccaggcagagttgacattgctggaggggtttggtggactcctaagaatcatgaaaccacaggagcatgtttaggaagagatttgtctctggtccctgtctctgaaaggacacagatgctaaatatttattgtcttagatcatggattcctgatacctctcactcaaggggaccaaaagggacccccccgtgttcatcccttgtaaggtgagttcagtctacgttgtctctttccagtcactggatacgtggcaccaactggtcaatgggtgcttggtgccataccctgctcaccctagtctctgcaggccatgtcctgaagggttcctcaggaggtcgggactagggtgggagaggcactatctgagacctgcaatcactcttgttggtcttgagcccattcatttccaaaacatccatctttctccacttcccccaggtcttggttttgagaaacagcaggcatggctgagtgcggtggcttacacctgtaatcccagcactttgggaggctgaggcaggcgggtcacctgaggtcaggagttcaagaccagcctggtcaacatggcaaaagcccatctctactaaaaaatacaaaaatcagccaggcgtggttgtggcctgtaatcccagctactcgggaggctgaggcaggagactcgcttgaaccc

SEQ ID NO: 65722 - DNA, 1112 bp, Homo sapiens
ggtttcaccatgctggcaagactggtgtcaaactcctgacctcagatgatctacccgccccggcctcccaaagtgctgggattagaggcgtgagccaacgcgcccagcccgtacttttttttttttagtacagacggcctcccaaaagttctgagattacgggcgtgagccaccacgcccagcctgaatagagagagatttaacagtatgaatgaagggaggagtcaagaacagtttaggcttctcgcgtacatgattgggtggccccagatgtcattcacaagtataagccttggaggcggaacataactcgaagaagagcccttttgtgctccgcccatagcgtaggaaggtgtcaattggctgtttcgaggaacgcgccaaaaactgccaagggctgtgggaggtgtgttcttgcgtcatttccgagagacttccgcgccgcagtttccctgcttccccagctccagaacttccggccagcgcagccattttggcttcctgaccttgggctacggctgaccgttttttgtggtgtactccgtgccatcatgtccgtcctgacgccgctgctgctgcggggcttgacaggctcggcccggcggctcccagtgccgcgcgccaagatccattcgttgccgccggaggggaagcttgggatcatggtgaggaacgggcctggaagagcgcgggaggcgccgtgggctgaccccttctgcctagctgacctcaggtggtcctgagaatgcctcgcgccccgcagcgtagcggggagcagcagtgccggtttgggcatgtctggagggcgcgaacgacggggacagtgcccgggcgacagtcggggctgtcggcgttaggtctttccccacagccccaggatctcgggtctggtcctgtcaggccctccctctcctgtcgcctcctcgctgcgccgcctcctgccgacttctttagccgctctgagcccattttctcgttggttcactgggggatgcctgacgctgtcagcgacgaaaatggttgttactgctatttattttattttattttattttacttatttattttgagacgggttctcgctctgtcgccaggctggagtgcagtggcgc

SEQ ID NO: 65723 - DNA, 1123 bp, Homo sapiens
ccactcccggctaattttttgtatttttagtagagacggggtttcaccatgttggtcaggctggtctctaactcctgaccttgtgatccgcccgccttggcctcccaaattgctgggattacaggtgtgagccaccatgcccggcccagaccagctttaaaacaggtttcaataaatcctgcttcctgtcccttcctttaccatctggtggtgcatttctccctgaaccctaaccccagctgtctctccttcctctcactcttccccctccttataactgaccctttacctcaagggttagcgtagctttggacctgctctgtctgctccgtggagcgtggattcctttaacgtgaggatgcggggcctcccacttgcctctgagtcctggctccctgagcggggctttctgctgcctgggaactgcaaggacttagagagcctaggggaatactgactccgaggtgccttctttcttgtgctctgtgtaggaattggccgttgggcttacctcctgcttcgtgaccttcctcctgccagcgggctggatcctgtcacacctggagacctacaggaggccagagtgaaggggtccgttctgtccctcacactgtgacctgaccagccccaccggcccatcctggtcatgttactgcatttgtggccggcctcccctggatcatgtcattcaattccagtcacctcttctgcaatcatgacctcttgatgtctccatggtgacctccttgggggtcactgaccctgcttggtggggtcccccttgtaacaataaaatctatttaaactttacttcagaaattcattgtgccttccctcctgcctgggctcatgcctccactggcactgggtggaggtgtggagaagagcgcccggctggctgccctgtggtaggttttgtgtgcctcagctggactcctcgtgtgcttctgtacctttaaatggtgcctggcttcctgggaagacaaagcctgttgtcattgtgcagcttttctggctcatcccctccagctcccttgtttgtgcaaagcccaatgggcgtgtatgtgtctgtgtgtgtgtgtgtgtgtgtgtgtgtgtgtgtgtgtgtgtgtcccactggggc

SEQ ID NO: 65724 - DNA, 1030 bp, Homo sapiens
cgacccccggccgggagggagcacgggcgaggcgggccaaggcccgcggcccttctccatcgtgtgcgcccggggcggggcctgggtcgctccgccctctgcccaacccctcggctcctggctccaggggccccgagccctctcgcccctgtccttgcagtcaggcagagaggcctacgccagggccgagccccccggcctgctccagcggcggcccgcgccgtgagggcctcgagtttcgctgggctacggagcacaaaggtccgggcgggccattcgggatgtcgtaggcggccctgggatgtgaggggcctgcgggatctgtccctgaggcctgcgactttttctggtagagccgcctcttctggccttgcagcccctttccgcctgcctagacattgttagtctccttaggagatgggcctttcaaaaatggtcccactctgtcttttcccgcctatgagttgggccctggggaccgcgtaggtcattgggtggcagggacagttcttttgcagagtagtgcgaaaagggtaggtaggtcgacgcccagccaagaatttgggatggcgagccccaaaagggttgacctttaaagtcattcagcccacgcacctcattctcaccgaacacttgagggaacgagaagtgggaaaacggccccggaagggacttgttcaagatgacattaagagagagccaggactaaaattcaggtgtcctagctcctcaccgatagctgctcacagtggggtccatagggtggacctgcccagctggctgataatcctagagcacgtactggtatgcctctaagaaaggcgagggtactcgccccattttacagttgaggaaaggtctctgccatgtggtagccaaggagaggtattgtgctgaagagctcagcctggaattagacaaacctgggtttgaccgcaggtcttttgctagttgtgaccttgagcagattgcttcacctgtctgcagttgttttgttaattgtaaaatgggcaccattaacaatatccac

SEQ ID NO: 65725 - DNA, 1047 bp, Homo sapiens
ggagaattgcttgcatctgggacatctgtaacatacctgcttccagattctaagcctgtcttcctgaccctgggctgctcttgtccctggcccagctgcctgcagtggagatggccaggaccccctgtaatctttggcttttttccttttcccaggtgttaactgtctggcctatgatgaagccatcatggctcagcaggaccgaattcagcaagaggtgaggggctgcagtgggcgagggaggcagtggccagcagccccattgtggaaatgcataggctgggcatgaggcctattgtctgtctctactttggaagctccctcctccctaggctatgctaggtactggtgcttttctgggggtcgctgtgccaccgggtgaccagcccagctcttttgtagttattctgtctgttaggcatgggtcactccatctccctgctaggacatgacagatccctgcctcctccagattgctgtgcagaaccctctggtgtcagagcggctggagctctcggtcctatacaaggagtatgctgaagatgacaacatctatcaacagaagatcaaggtgggagcctggccagagcgggtgggaagcaccctgggggtggggcaggagggtgcctgcttcagacttgcttcctgctgggtctgtcacctgagggagtagggtgttggaggacacttttcgttgctggttcttgaagtgcgtaggctgaggcctcaaaaacacattgattcaatgcttgaacctgggaggtggaggttgtagggagccaagatcacaccattgcactccagcctgggtgataagagcaaaacttcatctcagaaaaaaaaaaaaaaaggtggggggcaggcacggtggctcacgcctgtaatcccagcgctttgggaggccgaggtgggtggatcccctgaggtcaggagttcgagaccagtctggctgatatggtgaaaccccatctctactaaaaatacaaaaattagccgggtgtggtggcaggcacctgtaatcgcagctactcgcagggctgaggcagg

SEQ ID NO: 65726 - DNA, 1026 bp, Homo sapiens
ggcgcggtggcttacacttgtaatcccagcactttggcaggctgaggcgggcggatcacgaggtcaggagatcgagaccacggtgaaaccccgtctctactaaaaatacaaaaaaattagccaggcgtggtggtgggcacctgtagtcccagctactcggagaggctgaggcaggagaatggtgtgaacccgggaggcggaggttgcagtgagccgagatcgcgctactgcactccagcctgggcgacagagtgagactccgtctcaaaaaaaaaaaaaaagcatcttcccatagggcgattgtgagattgagggaggtgcaggctgggcaggagctgatgatctcggtgcccatacgggggctgaccaggctggtgctcagtggggtaggagggttgccagagggctgtttcccacagcttgcctcctggatctttgtggagaggcaggcagcagtggggtcaaggggccacagatttcctcaaagggccctgctgcatcactcaaacggaggcaaacttcaccacccactttctaggtctgtgagctgggaggatgacatgtgaaatggggccaggcatggtggctcaagcctggaatcctagcactttgggaggctgaggccagaggatcgcttgagcccaggagttcaagaccaacccaggcaacatagtgagaccttgtctctccaaatcaaaaaattactgggtgtggtagcacatgtctatagtcccagctactcaagaggctgcggttggaggatcacttgagcccaagaagttgagccatgattgtaccactgcactccagcctgggtgacagtgagacctgtctcttaaaaaaataaaaaaataaataaataaataaataaataaatgtgacaatgggtgtgtggaaacagtatctggtaggctcagtgtaggtgtttagtaaatgtttctcttcccctggaagatgacagatgcttagagtcctctactggtaggggaggcctctgtggccaggtaggtaacccaggtgattgaa

SEQ ID NO: 65727 - DNA, 1115 bp, Homo sapiens
aattgtgagggttgaaggagatgttacgggcggttgtaagcagcgggttacaaagctgctcctctccccatacagggggtgagcttcattcattcattcctcttatgtcagtgtcctccagtgggaccccccatgccaaggcctgccgctcatgctagaccaccctggtaaagtggacaggacaggctgggccccaggttcttcccacggagtcatcaaacatttggatgtccagagcatgctgtctaaaaggcctctctgtgcccccagcacccgcattctgtatgctgtgcctgagcccaccttttctccctgggcagagacagctgtggcagcagagcccaagcagagagagctcctctctctctaaatgggctcttgtgaggatcaattaggatgacgtttattcgccctgtgccaaatccctggcacagagagtgtgctcacaatggccatggtggctgctacagtagcagtggtgatttgggttctttgtggtcctggtgtgctactcatttaacgtttattgagaacggactgtggtccaggcgctgttctaggtactgaagatagagccatgcagacaaagtcctgccctcacaaaacttacagttcagggtggaaagacatgataagccaaagagggctctgggacatgtggggtatcagaaggcggtgagtgctgtggagaaaaatgaaaaggggatcggggccgggcgtggtggctcacgcctgtaatcccagcacactgggaggctgaggcaggtggatcacctgaggtcaggagttcgagaccagcatgactaacatggtgaaacctcgtctctactaaaaatacaaaattagccgggtgtggtggcgcatccctgtaatcccagctacttaggctgaggcagcagaatctcttgaacctgggaagtggaggttgcggtgagccgagattgtgccactgcactccagcctgagtgaccagagcaaaactccacctcaaaaaaaaaaaagaggggattgggagtgggagcatttgccattttaaacagggcttggtgaaggccttgctgatgaggtggtatttgagtaatgaacagaaaaagaccggggagcgagtcacaggc

SEQ ID NO: 65728 - DNA, 1053 bp, Homo sapiens
gttgttgtacagtcctgtaggccccgcagaactttagtgacccatgcaactagtttgtccttaagtgcccagcttcctgccgtcttttgggaggactctgggcagtgggccgctcccattgccacattcagcagcctgtttcagggacccagggtggcaggtggctgctgggagctcagttgccacctttggagtgtgacctttgctgggggacatttccttggccagcccccgttctggcctgatgttaacctgtcggggtggggctgtctccgcaggacctccacaaaaagtactcgtacatccgcaagaccaggcctgacggcaactgtttctatcgggctttcggattctcccacttggaggcactgctggatgacagcaaggagttgcagcggtgagaagggtgggcactgggcaccgaggcaggtgggtgtctacctcctccccgggcgagtaggatgtgtctcgagtagggtgtctccctccttcccgggcgatgggctggactctggccttgccaggcggggcagtgctgtctcggccctggcgtctgggctggtcgaggagcccatgctgggcccgcctttccatcccacccccaggttcaaggctgtgtctgccaagagcaaggaagacctggtgtcccagggcttcactgaattcacaattgaggatttccacaacacggtgagccctggtgcctgtcttgggctgggccatgggggaggggttcacctggtgaggaccacccatctcctccccgtcatcttgccctttctccctccgtggctgcagttcatggacctgattgagcaggtggagaagcagacctctgtcgccgacctgctggcctccttcaatgaccagagcacctccgactaccttgtggtctacctgcggctgctcacctcgggctacctgcagcgcgagagcaagttcttcgagcacttcatcgagggtggacggactgtcaaggagttctgccagcaggtgccgtccccctcccctttactctcggccgggggagtgcagtgggcccacagggcctgg

SEQ ID NO: 65729 - DNA, 1022 bp, Homo sapiens
cctccattcttgccaagcactgccttaagcacattacaaagttagtttaactcaatccttccaacagcccaatgagctctgaggtgggtgctattatcccattttccagatggagcaactgagacccagagaggttaaatgatatgtgaggggtcacacatctgtggctggcagagccaggatgtgaactcacgttgcccagctccacagcccagccacggcaccccattcggaacactcacttcccagcactgggagctccagcctggacgcccgctctgggccctgccttcttgctccatctcagcctcgccctgggctacagctgcctttctccctgcagaggagaggagcaggtggaagggatccaggcctgagccgttctcagcgttcccctaacctctctgcccacccatccctgggacgctctgggaaattgcctggtgccagctctgagtaaagttgcagaatgaggtttaattgtgcccccagggcacgagatcaaacagcaaaagaaaggggtgtgagctacctggcatccctggaactgtgccgagactgaggtgatgaaggagaaggtggccttggtttgtccatctgtaaaatggggaatgatggtcctctcttgatgcccgcctgtgagcaccaggcagctggtgcctgaggagctcctggcgtgggcgatcagagctgccaaagatgggccctgtcctcccggccagcacgcggcgttttcctctgtgggagggtcgctgtcccggtattccagataagagggtggacgccagagaggggaaggggcaggatctcacagccgatgaggggtgagcccgggctggacccaggcctgcctgaggccgcgcctctcctgcgcggtgccctggcgaggttgggctgctggagcgtttcctccatgcctcccgctgcgccccggttgtttatctgcgcccgggtccccagggtcgctcgcgaggccctgcagccgccctcggataaacaagcccatgcggggccgtaattaa

SEQ ID NO: 65730 - DNA, 1075 bp, Homo sapiens
gatcaggtctaaccagctgcccctgggtgggtggggagacagacgccagagagggtgggaacgcaggcctgggcaaaggcaagactgtgtcacccggggggtggttgttccacctgtcagctggtcagcccccagccccagcaggactgaggcggttggtggccaggcttctctcatgggcccctccttcccttgggagcttcctctgctccccaccagtgacatcacctcccctgcccccatcccttccagacactcagggctgcctctcccggctccctcccttctcagcgatcattcccagcagagaatatgctttttgcggtgatttagaccttcctttactccagctgtcattcacctgttacacacatcccaagttcaggaaggagatgtgaactgtgtcctgaaagacagccctgtggagacaccagcctcagccagggtagggagggctgtgtgacgagcagctcatgggcatgggtccgagaggggggtgggggcgaggccagctgcgcagggtgggctgggaagggcctccaggagagagactgggccttctggatggtgcagagtctgtggcaggtggaagcaaatgggggctggacccccgggacagtgaggaaggggatgccattgggagcgagaggtagggcctgatccaaagagagggtggcagccccaagacatcagggagccaggggacggggtccctgtgactgcccgaggtaggggatgcaggaggctctgagattggtgtctcagagacctctactggggatccccccaccccgtcactgtgcctcttctgccggccgccagatgcctgtttcaggggccccaagctctgcagccccctcatctcccctcccgttcctctgcccgtgtgagctgctttatggcctcagcctcccccacagcgcaaaggctcttgaggcccagcgcccacatcccagcacccggctcaaccaaccccagcaggtggccactccccacctcactgggaactcaagcagctcctcgcccttccccttgggttgtctctgtcccccaacagatgccaataaagctaagg

SEQ ID NO: 65731 - DNA, 1066 bp, Homo sapiens
ggagggcttgggggggggtcctcccctgtatgccaggcctgacgagggggcacctgtagctgccacctgggtgggcgaagagcaggtcaggccttttcccaggcagctgcctcatgccttttggaaggggcagcagatgcccaggcctgggagatgccacgaggacactgaagagggggtggtggaggagccggcagctgccgggtgcagcgggcacggccctgtaattgggcagcctgttcccagataaggcccatgacactgaacagcttcccgctccacgccggctgcaaccgctcatttcctgctccctggccagcgatgccaattacctcgcctcctgcttgccagcggcagcttctagggtggccagacgattcctctgtcatcggccagggcctggatcctctctgacgggtgggagggcgtgaagagggcagccggcaagggggggtaggaccagtgataggggagcttccatcttcactctggcctgggccacacccaggcacagctggaggtgggggtgagtgacacatggacccaggctaccgtgggagggctccatttccccctctgcccctaccttcaaaacaggggctcactgtctactggatgggctgaggagtgcctgatgctctttggatggagtgaggatgggcacccaatttgcactgggggaaactgaggctcacatggaaatttgaccagtgctgaaaggacggaacagcccctggtccttctcttcctcttctgtgtttcccccagaggacagacttggggagcagtaggaggggcagcctgtctaaagggggcaaaggctggctccagattcctcttgccgagcggggaaaggggagaagcaggtgagaggtgccgccctgtgaagagggtcttgcgggtcctggctccactgaaggtggatgcgtgtagccaccgacatgggaggcgttgcgggcttatcccaagaggctcgcagcccagcaggctgccctgctccctgtagtgggggtgggaagagatgtccccccagggttggaggctggacagggaagcgtgggcccac

SEQ ID NO: 65732 - DNA, 1051 bp, Homo sapiens
acatgcggcctgcagcctagtctgtctccacaaatgcccatcagtacctgggtcctgaggcaaggctgatgggtctttaaaaaccaagaagcttggggggaaaatccgaggacggggcacagctggggagggacagagggcagggcagccccgtgacaggggcccccaattcccagacattgcttctggaagcacagcccctgagagatggtgctggcctccctgaccccctggatgcaaacatttccagctggccgcctggggtacctgttgggcaaatgaatcactgggtccctgtggctggtgcctttccaggtagctcctcctggaggctcagacccagttctgaagacctcagctgcagaacagtttctccatcatcagggagaaggggttcaggcctacccgaggctggactgaggtggagggcactgggctgaggcctgtggggtctggggtctgtggacccccctaccctgccctatctccctccctcccatctactccccacagctcaagggcctagcgacagctcccatccgtcactcagccctatttttaggaggtgataacccagctgtgaaaattctctccgtgctgatcccttccacatgaagaagtcttagccccaagccgatgagtaagtgtggcagcttgggaaggcaagggatggaggcaggaagaggcttgcaggaggaccggggggctgctcacgcagtaggagggacgggagcccagagcctgggtcccaccttagctagctctgccaacaacaacatgctcatcgcagtgttgtcctggatcaaacctccggctcctgaaaacatggaggaccaacctctttctgagctgtgtgttcttaggcgatttcgtctctctctgtgcctcagcttcctcctctggaaaatggagataatgatagtatctgtccaataaggctgttgtgaggatgactaagttctctggccgagaacttagagaagcaactatgtctccagaccccagtgccagcacagggcccggcacagatgagacatcatccgtccatcca

SEQ ID NO: 65733 - DNA, 1034 bp, Homo sapiens
agccagccttcctcctgcctccgggcctttgcacagcggttctgcgactggggtgctttttccggcccctgcagccccacttctgtctgagactcctattcatgctccagggactcacatcatgtgttcagggaagacagagagggggagaagggcatgaagaaggaaggttctcgtgctcacagtacagagatgtagacacacccagatcacccaagcagctgtggagctggacgtgagccctcatccgctcctccaactagcccgtgacttccacaggcggtgctaggggtggcggctggggatggagctgggaggggaggtagcaggcagcccgctagcccttccctgtcctggcaggagctgtcactgcctctctccttgatggcggggtatgaagagaagccttttgacgcagggagatgacccctccccggcctccacctacacagcagccacgtggccaccctgaacagctgccacagtgaccgacaccccctggatgtgtttgtcctcccacagcaaagcacaattaacatccccactggtaaatgatatggggccatatttcacctggacccaaatgtgggccacagaggcattaaaataaatgacggcacggttcagtgaggtctccgattcttggatctggcagaagtgcacctgtgcagcgcccccactgctctcctgggcccctgccccagttccatgccctctgtgcagggaaatcaacctgctcctgtcacttcggatgtgggaacagggtccgccacccagacctcaccccaaccctgccacccctgccacccctgccacggctgtagccctgaccacaggccggttgtccccagcccgaggagactccggggtgcgtctgcctcccaagaaagccaggttctctgggaaccagactgggcagggtccagttggccacacctctccacagttgccaccccttgctggagctctgggcttggaggcaagcacgcagtccccaagaaatgggcgcagctggtaccagcatcctgcagctt

SEQ ID NO: 65734 - DNA, 1106 bp, Homo sapiens
gattcttacagaaggggaacagtacagtgaagggccaggctggagccagctcagggcattagtgggcagtagtgggagacacggctggtgggctgggcagggcccttggagactactgtaggagcactgcctctatcctgagagctatgggacgctctcaggataaagccgagaagctatgggaagggtctgaggtgaacacaccagtgggatgaacctgcctcctttttgggttcttaatttcaaaagcagagctcagtggtttctctctttatcgggaggcagcggccacagctgactggagcctctgggctcccaggacacggcaatcatcctctcaaaatgccaaggcccgctgcccctgccccacccccatcggtataaaacaatttctgcgccccggccagggaggcggatgacctcactggactttttccatctctcgctttcatggagaaattacaatttataattggatgaaatcacgcgggtggtaatagcaataagggctcgtgctagagccggccgccctcccgccgcgtgcagggactctgtcctcatcttccctcctgcgtaagccccaccgtaccccttccagggcctgtgccccacctgtagtattcaccaggcactggccattcagaatcgatgtcccgtggggcttgctggctctgaaacctccttcttcctagggcagcttgtcccaagaaaactccccctgccaccctgtccaccccatcagactcagcctgcacaccacctggctggcacacacccttcccaaatgccttccctgccaggctgtgagccccgtgggcagccaccccccatctgggtgctgggcttattaaaacatgaaccctaatatccctgtttttatttgtaacggcctctgacaacaagcatttctcaaatcagccaccttaggccctacaaagaaaagtgcccagatgcagctgagcccatctggatctgatttcaaaccagagtgagcactctcagatgtgtaataaaagcccttttccaaagaggggttcctgcagggggaatacagacaccagggcgccgcggcccttccacatgccgcactaatgagaggtgctggg

SEQ ID NO: 65735 - DNA, 1043 bp, Homo sapiens
cgaccccctcctcagctctctgcctggctttgttcggacagggctgggctgggctcagagggagggtttcccagatccccaggggaaggaggagacccggtgcctgtgtagagggagggagaagaggcacacggcaggtgtgggctttgggctttgggagagtcaggttgggcccctcctagctgctgccatcttcccaggtgctgtcccctcccctgccagcgtcacccagagccaggaaggtgcaatgcccctgctcttggctccggacctgcatcctggccctgtgtcagggaggcccctggccgccgcatgcaccatgttagcgtggagcaagccccagcctatttagagaagatggaggctgtggcgggaggccgtggggagggggaaggagaaaagggaagaaaaggagcttttgatgcacatcatgtctgtggaattgagtatgactaattaatagattttatttttagtaatctcttaagcattccatacattgggccccacgcctgagctgagcttacaagaggcctcattcgcaaaatgcaaatgattcccggcctgctggtgccttctctctctccttccttgccttttctttcctttccttttttttttttaggggagatttaaaggaaaattgccatgtaatagaaaagagattccaatcactacatctaattaccacgaagggtaaaccacttaaccaaagaagcgtcatgggctttttttatctttaactttaaacctgccttaaatgccacaaaacgtactcatcagtgctggggccgctgaggttattctggctacttagaggctgtgagggtcagcccagccgcggacgttcccttggaaatgtcagctgtgcacgggagcccgggagaatttagacaggctggggttggcatcccaggccttgtgtcctcacgcatgtctgaggtgtaggggaggctgggtgtcctgaaacatctcctatcttgtggtatgagaccagctgggaggagctgggccaagaggggatggggtttcagaacggacct

SEQ ID NO: 65736 - DNA, 1070 bp, Homo sapiens
actttgggctttatagctgcatgttctgtctctgctcctggcctttgcctgggcacttacctctgtcaggagcaccctctcctccatttccttggctgactccgaccgtcctccaggtcccagctgagaaaccctcccctccaggaacttccccagacctgggtttgctgtcgctcccatgtagtctgtaacagtcattcattcgtttcattaattcctgcagcaggtgctggggctgcaagggggaacaagggagatgtacccgggcagctggggtgccctagggtcctacaagtcacccgtcatgaccggatcccaggggaaaacctgtctgagagtcagggactggggacaggggccctggggcagtctgctctgggaatggctcagcttgctgcactgggaagggaggctggggcgggtggcagggccatgcccatggggtctgggtccagatgtctttctctgcctgctctacctgtgtccagtgcttccggagcacaggggagctgccttttaggaggagatcaagggagagaacgcgagccacacttcacacggccgcagccccgggcatctggctcggcctcctgccctctcacattgcgtgtgcctccctatgcaaggcagccagcaggagagctccagcctgggatccccagcagtctcctctcttggctccctctgtccctgtcccccatcttttgaggcatagcctggcctatcctgtgcccctggcttcctgccagtcttctttccagtttcccaagctgaggtggacgcaaccttcctttctgcattcaaagggcacgaagtgattaagacccagtccttgctccctgtgtagcggggcagcaggggcatagcgtgggggctccgtgcatctgtgcaggaatccaaggcgctgggggctgctcagggacggcttcctgtgggaggtcttcctggggaggtctagttccccacagggcgctctggctggggctcatgggtgtgcatttccctccagctcactgaccctcagcctggtctcttcatgaggcctcatggggccaggactcggggcagtg

SEQ ID NO: 65737 - DNA, 1035 bp, Homo sapiens
gaaaccccaaggcctaaagaggcaggggctggccgggtgcggtggctcatgcctgtaatcccagcactttaggaggtggaggcgggcggatcacgaggtcaggagatcaagaccatcctggctaacacggtgaaaccccgtatctactaaaaatacaaaaaattagccgggcgtggtggcgggcgcctgtaatcccagctactcgggaggctgaggcaggagaatagcatgaacctgggaggcgaagcttgcagtgagccgagatcacgccactgcactctagcctgggtgacagagcgagactcagtctcaaaaaaagaaaaaaaaaagaggcaggggcttgcccaacatagtggaggaaccagatcttagccagttctgtctggtaagcagccactgccctggcctctgggacctccaaagctggccaaccaagcatgccagcgccctccaccccacccctgaaggccttcaggggtcttctctggcagcttaggcctcagcagatggcagccaggccctgacagggccacttcagtcacctggcttctctggggacatcccctgtcctagcccacctcacgccccactgcacaggccgtttccatgtgaccacacatctttcccaatggaaggcagagcaggcatggaccgccttgctggcagtggggagtgaggggcccaggctgcctgccctgtgccctcatggtcaggaagcccatccaagagactctggcagtcaggagagggccgtcccctcggccatgccaggtccagcaggtgactcgattccctaccacgaatatgggaaggaggtgccttcagcctgttcaggatagagggaccattcccccgttcccagccccaccaagggctgggtgcagggcaggtgctggctgatgggatgcccggttcagcgggtctcagcagccctcccagagcagcagctatggcaacaagaactagagctggcatctcctgggcgctcactctgtgccagacactgtactgagcatcctacacaagcagtctcct

SEQ ID NO: 65738 - DNA, 1004 bp, Homo sapiens
ggtgtggtggtgcatgcctgtagtccagctacttgggaggctgaagtgggaggactgcttgagcctgggaggtcgaggctgcagtgagctgtgactgtgccattgcactgcagcctgggcaacagagtgagatgctgtctcaaaaaacaaataaaaataagaaaatcagattctgtttccctactgatctcctggcatttgaaattcaggactggtttccactcttacattattgggctatgagatgtgattgggatgtgtgtgatggtgtgtgtgtgaggtcaggagtttggcctgtgtgtgtgatgtgtgcggtgcgtgtgtttgtgatgtagcatgtttgtgtctgtgcttgtgtgatgcgtggggtgtgtgtgatagagtgtgtgtgtgaggtcaggagtttggcctatgtgtgtggggtgtgcgtatgcatttgtatgatgtgtgtgatgcgtgtgtgtgcgtgatgtgtgtgtgtctgtgcttgtgtgatgcatggggtgtgggtgatggagggtgtgtgtggtgtgatgtgtgtttgtatgggatgtggtgggagtgaggtgggaggttgggcagaagcatagaagtggggatgcctggctggcgggtggcagggcttgaagttgcagggacggaacaaacccccacaccctcaggcacagtgcaggcctccctgggccctgtccccgtgggctgccagctgaggccacttgcttgggtagcacccgggagagtctcaggttcctgccatctgtgtcggccacggctcctgcccacaggagcatggcgcatccgtcttaatgaaattgggctgccatgtgcaggagataagccagggagcccccgcaggccccctcttctggaggaggaggttctcagagccggtgcctgcctctccagccttgcctatgacctcagtcctgtgtctggggagagcgccggtctcagggtatccactagggggtgctgtggctgccagggtgtttatgtctcctttt

SEQ ID NO: 65739 - DNA, 1219 bp, Homo sapiens
gctcccaagaaagagaagtctccgctgccatcccacagcctttgggtcactggagcatgtatcagtgccactccgcccaccttcttcctgtgaggggtgactagggctgtgctctgtttgtcatttggatgctttggaaatctgtggcaaatgaattgacttttccatggaaggagcatgtggcacattctggagtggcttcgtgagctccatgtggagaccggaagagtggcagagccctcgttcgtcacatgggggccagcgtggagtgcagcctgggctctttgcccctgcttattttttctttgctggctccttagggaaggtgtgagaaattaaataaatgaaccggttttctctcttctgatctgtaaagtcacctatttatttgttggtaactacatgaaagaatgagtgttgtctttaaagcttgggattaaatgggcacatcatagagaagctgtgtgttcctttcccctcaggtcaatgagctgaaggagaaaggcaacaaggccctgagcgtgggtaacatcgatgatgccttacagtgctactccgaagctattaagctggatccccacaaccacgtgctgtacagcaaccgttctgctgcctatgccaagaaaggagactaccagaaggcttatgaggatggctgcaagactgtcgacctaaagcctgactggggcaaggtcagctgtgggcagtggagggagagaggcccttcagacccttccagaaatgccttttggtggcctgaggtttacctgtcctgatacactgatagttacctacccacctccctgtttgagtatcctcctcagaaatggcatttttcatcaaatctaaggtagccattagttgtaatacaggctttatttttggtactaagaaggaagaggccagggctgggcgcggtgacgcacgcctgtgatcccaacactttgggaggctgaggtgggcggatcacttgaggtcaggagttcaagaccagcctggccaacatggtgaaaccctgtctgtactaaaaatgcaaaaaaatttagccaggcatggtggcatgtgcttgtagtcccatctactcaggagactaaggcaggaggatcacctgagcctggcaagcggaggttgcagtgagctgaaatcgtgccactgcatccagcccaggtgacacggcaagaccctgtctcaaaaaaaaaggaagaggcccggtacagtg

SEQ ID NO: 65740 - DNA, 1100 bp, Homo sapiens
agttcgctgcaacttccacctcctgggttcaagcgattctcctgcctcagcctcctgagtagctgggattacaggtgtacgccaccacgcccagctaatttttgtatgtttagtagtagcggtgggtttcaccatgttggctaggctggtctcaaactcctgacctcaagtggtctgcccgcctcggcctcccaaagtgctgggattacaggtgtgagccaccgtgctccgctatctgtgacttcattttatttgtttttgttgactctattttagatagtgttttgacggtttgagtatttctcaattgtaactcatgagtggtgcaaaatctagccatcttttgatgggtgaggagcttctaaacacaagaatctgactttagtagtaagtgggagttaaaagactaattgtggggaggagtaattacaatttttctttatttttttaaatcaatactaggaaactacaagatccccggatcatgaccactctcagcgtcctccttggggtcgatctgggcagtatggatgaggaggaagagattgcaacacctccaccaccaccccctcccaaaaaggagaccaagccagagccaatggaagaagatcttccagagaataagaagcaggtcttgtttttttctctcctcactgtcacctatctataaacaactagaaatctttatgttgaatggggacatctgttgaccttgattgaccatgattattatggtttttttagagacggagtcttgctgtgtttcccaggttggtcttgaacttctggcctcaagcgatgctcctgcttcagctaggattacagtcacgagccactgtgcccacctaaaactattttgagtgctttagtatgcgctaagcttatggctattattcattagaatggccagcatgttaaaaaatcagcttcaggccaggcacggtggctcatgcctataatcccagcacttttggaggccaaggtgggcagatcacctgaggtcaggagttcaagaccagtctggccaacatggtgaaacctcatcttcactaaaaacacaaaaattagccaggtgtcatggtgggcgcctgtagtcccag

SEQ ID NO: 65741 - DNA, 1120 bp, Homo sapiens
gggtgtctcagctggaaaaaggccctccagtgtgggcggtagtgagctttgctgaagactcgtgccactcagccgcttctcatcctctcaccaccccctctgctatggttccctgacaactaagaccctgaggcaaccacaagactgacaccagatctgctgcagcctcagaataaagcctggtccaaaactctgctgtcctcaccggttgcttcaagtcgaagggatttcctctcccctaaagaagcgctctgcttcctgacaaagatctaggagagtaggtggaaaagggggagtttcagagcaagcaaagatgaagttagttttcattctaacggctgatactttattgtctatagctgactgatgaagaggccttcaggagaacttgatagaattctattcatgttagttgcatttcagaacttgtgacagatcatagattcttgctttgtcacctgagttagatttgctcagcactcacttctaaacctcatctaggcactgaaagaaaaagagctggggaacgatgcctacaagaagaaagactttgacacagccttgaagcattacgacaaagccaaggagctggaccccactaacatgacttacattaccaatcaagcaggtgaggcccagaaacaaggggcaagggaattgttgggtgtctctgagggaggaagcaaagactgactgttccttcttaaccatcctgcctggcagcggtatactttgaaaagggcgactacaataagtgccgggagctttgtgagaaggccattgaagtggggagagaaaaccgagaagactatcgacagattgccaagtaggctcaaccttccagaataccttgagtagcgcggagggtttgctgtccaagacttaagtttctctgcatggggaggagggctgctggccatagaatctgctgtgttaagaaagggctggcaagaaggtcaccagagacaagacaaaaggtgttgaaggcagtgatgcgggcctttctagctgcaggtgtgtttttctgcaggagctgactttatctctctgtcctaagcagtccttgtccctctttctttatcagagcatatgctcgaattggcaactcctacttcaaaga

SEQ ID NO: 65742 - DNA, 1050 bp, Homo sapiens
ttcataacatcagcctcttgcagagtccaggcagtttgtcttgtgtgggatgatccatcatctggagttgtctttcctgatgttgtcccctctgtttggtgctgggtgaggcattagagttggaagtccacatgcttgagttgcctgtactgagcttgtccaagggaatgagcctaatttctttctgttgcttcattctaggactgtgaggaatgtatccagctggagccgaccttcagtaagtgcctttctgctgcctgtcccctgtctctagccaaaagattagagaaggaaagggcaagccctttgtctacctgtgtgtccttgggacctgtaggatttaggatccaacatcagcaggtgtgaacagtgttggtgtgcaggtgaagaggtgcaaggagcagccttgggcgctgcggttggataacgcgccacctttcctgtttgtagtcaagggttatacacggaaagccgctgcgctggaagcgatgaaggactacaccaaagccatggatgtgtaccagaaggcgctagacctggactccagctgtaaggtggggctgcttctggcctccaggggccccccctgcctctttctctgttggggcttttccatgttcagtccctgatttcttccctgtcacctccatttctctctgtttctctcttacttgttctctctccccttgtcagttacctctgttatcttggacctgctgaagcagtgagctgggtggtcctaacacgcttcacctttgtctcttctggactgcaggaggcggcagacggctaccagcgctgtatgatggcgcagtacaaccggcacgacagccccgaagatgtgaagcgacgagccatggccgaccctgaggtgcagcagatcatgagtgacccagccatgcgccttatcctggaacagatgcagaaggacccccaggcactcagcgagtacgtagagtcagagaggcggccttgctggaaatggagaacaaaagcaggcagatgagtgcacgcggctggggggtggtatgctcagtctgcgaggaagag

SEQ ID NO: 65743 - DNA, 1023 bp, Homo sapiens
gagtaggactggcaagttctgcgaagtggagcaggcctctgcagctcggcgccccgggcctcgccaggacccctccctgccggggccttctgtagagggggttgaattggggcttgctctgagagcaagtaagactttaaaggttgtctcatttcaagtaactgcgtcttcctctgtagacacttaaagaatcctgtaatagcacagaagatccagaagctgatggatgtgggtctgattgcaattcggtgatgacttgttcatccccccttcccttcgccctcatgtggaaagaggagctgggaccgcggcgagcagcacggagcggaagggagagcaggggagagaaggcctcatctctctatatttatacataaccccggggaagacacagagactcgtacctgcgctgtttgtgccgccgctgcctctgggccctcccagcacacgcatggtctcttcaccgctgccctcgagttccatgtctctttcccctgcccctagttgctgtctcggctgctctcccatagttggttttttttttatttggggcagtgggcatgttatggggaggggagggggttcttccagcctcaggtcccagctgtctcacgttgtttattctgcgtccccttctccaataaaacaagccagttgggcgtggttatatgttgctttggccttgagtgattttttttttttttttaaaccaggagtttgtcttgcaggggctgctcctggaacctgatcttgctcttctctttggggcgggcttaggaggagtcccaagctgtggcttggcacagctccatggctttgccaagaaggttgccagatggcgctgttgctcagcagctggaagggaatctgaaggcttccccaccccaagtagtaccaatgagaggttcagataagctttgggtgctgttaattctccacgttatagtggagatccagagaacaggattctaatgtgagatgctgagacctctgtggggagagggcagctatgctgttagctgc

SEQ ID NO: 65744 - DNA, 1072 bp, Homo sapiens
aagacctctggatggtagggatgcccgggcgtcctggataccctgcgggactcggggctcctgcggggaagatggcacgttttactgcccaaggagtggtcaggggggtggagaagcgctgcggataccctcaggaggtctgcgacagagggggctagctgcgcagcccaggagtggtagtggcccccctggatgacaggcctggccgtatcctcccccagagctgccccgttcagaccatggatcctgaggtgaccttgctgctgcagtgccctggcgggggcctgccccaggagcagatacaggccgagctgagccccgcccatgaccgtcgcccactgccaggtggggacgaggccatcactgccatctgggagacccggctaaaggcccaaccctggctcttcgacgcccccaagttccgcctgcactcagccaccctggcgcctattggctctcgggggccacagctgctcctgcgcctgggccttacttcctaccgagacttcctgggcaccaactggtccagctcagctgcctggctgcgacagcagggtgccaccgactggggtgacacgcaggcctatctggcggacccactgggggtgggcgctgcactagccacagccgatgacttccttgtcttcctgcgccgctcccggcaggtggctgaggcccctgggctggtggacgtacctggtgggcaccctgagcctcaggtgagattccaggctgggcacaaagacccagacagctcaagggagctgcagctctccaccctcccaatcctcccagctttggtttcctcattccttaaagggaaaattggcctggtatttctctggaagtttgctcagggcagtccacctgcctccccactgacccctgccccagtcctgtgagaaactagaaaacacgggaggaaagattgggcacaggaagaagatgccctactccacccctgccccctgtgtatctcctttgaagctggacctctggttgtctgtcagggaaaggacaccagactcaggatcactaactctcttacactgtgccacatcagaccctcaag

SEQ ID NO: 65745 - DNA, 1050 bp, Homo sapiens
ccacaacctccgcctcccgggttcaagcgattctcctgcctcagcctcccgagtagctgggattacgggcatgcaccaccacgcccggctaattttgtatttttaggagagacagggtttctccatgttagtcaggctggtcttgaactcccgacctcaggtgatccgccctcctcggcctcccaaaatgctggattacaggcgtgagccaccgcgcctgtccaggaatcagttttttccaacaagtttttggactccactttgagaaatcctgacctgcactatgcctgaaacactccaaagggggtgctgatctggagacagatctgtcctgggacctgtttcagccctgtcagctcctggtggctgagttgaagggtgtggcccagaaggcagggcagagctagcttctgggttccttcagcccctgcaaggtttgggactctgtccacaggtccagacccagtacttattatgaactgttgggggtgcatcctggtgccagcactgaggaagttaaacgagctttcttctccaagtccaaagaggtacccgtacccctgaggtggggagggggagcaggaactttgagccagtgggggtgtgcttcaaattcccaggagtagaccagcatctctggcgggtgccacattttttcagccctcatagggagtggcaggtgctcaatggtaggggaaaggctgtgggcaggagccaggggtcctgtctgatgggctgggcttggttttcttgacctgcctgcctgctcttgagaaacctggaccagggcatatggtgaatgcagggggctggcaggtggggagggcttgaacacaggaggaagcaggagtccatgctctctggccttctgaggagtgggcaggcctgagtgagggtcactgaccaggcagggcctctgggtatgactggagccctggtgggtggatgtcatcagcatgggtcctggggagggacaggcaaagggagataaggggagtcctgccccaccccagctgcacccagaccgggaccctgggaacccaagcctgc

SEQ ID NO: 65746 - DNA, 1047 bp, Homo sapiens
gcgcccgcatcgccctagcccggcggcgcggggggcggcgacagccagagccccatggcgcgggcccgggcgcggcgggcgggggccgggcgcggggggcgactcctccgcggccccctcccgagccctgggtgcaggcagcgcagcgcagcgcagcggaggcggccggaggagccgggcgggcgggcggccggtggcggcgggcagcggcggcggggacggcgggggcggcggggggctgggcccgggctggcgggcaggcggctcatgtgacccagacacgcgctccccaccggcccgtggggcgggggcggggcggcggggtgggggggcgaggccgtcggcggggcccgcctcctccacacaccccctcccgcctcccgccgcggcaggggaaaggggacgcaccgcccaggaggctgggctccccagtcgccgccgccactacccggagggcggggcgctgccccttggcgaggccggggccgggggcgtcgggccttaaggagggagccggacacgagctctgcgaatcactttattgcgcgcgtttcggggagcgggccgtccagggaaggaagcaaagcgggaacgcactgcaggccccatccaggtgagcccctcaggggccggcgccccggggcacgatctcggggccttgggttggctcggatggtggcggctgccgctgccctagccgttgtcgctcctgctgaaggatgcctctgttggccctggaggagagggcacctgggtggttgggatagggatcccgaagtgtggttcctggacagggagcagggagcagaatagagcagggacagacctggcccgtgcccgggcttcgttgtagaaggctgtgatgatccgatccttttcatccatgaagttaaggtgcatctgcttcaccttcctgcaatgggtcacaattaaccctgggaatccaattcctgctgtccctgaagtcctgcccccttccaccccactctaggggcctcacagctttttacccttacacagggttaggaacctcagtctaacccttcc

SEQ ID NO: 65747 - DNA, 1093 bp, Homo sapiens
tcccgaggagtgtcaggaggggatgacctttgcaaaaggttcatccttcgccctgcagcctccagtgcccagggccgagtggtgtggcaggatgctcaggttgtgatcttagtgggcccgaggcacacatgagtccagggctggggctgcgctccagccagcatgaacagatcacttcctccctcctcaggtgccggaagctgcgaaggtgacacatggcttttcagactcagcagggtgacttgcctcagaggctatatcccagtgggggaacaaagaggagcctggtaaaaaacagccaagcccccaagacctcagcccaggcagaagctgctctaggacctgggcctctcagagggctcttctgccatcccttgtctccctgaggccatcatcaaacaggacagagttggaagaggagactgggaggcagcaagaggggtcacataccagctcaggggagaatggagtactgtctcagtttctaaccactctgtgcaagtaagcatcttacaactggctcttcctcccctcactaagaagacccaaacctctgcataatgggatttgggctttggtacaagaactgtgacccccaaccctgataaaagagatggaaggagctgtccctgcctgtgtcactgtttgtcactgtccaggctggctggtttgggcatgaatgtctgcatcactaaatccagagcttgtcttgctccctcattgtgcagatggaggaaatgaggactaaggccccacagcagatcccaggcagggccagaattatgtattcatcactttcaagttattgccacgcatgggagtcagggatagcccagtcaatacagactgcctgccctcctgctcttcaccagggttcttttctagaaggagacagccttctgtggccagagagcttggggtaggacccagatctactgagtgaccttgcttgtcactacccctgcctctctgagcagcagtttccacatgtgcacatagagggaacagaagattgctgtggttggcgtcctcgggccccagagaagtttgagactatctttacgtaatagaaaagaacacttgttcttcctgc

SEQ ID NO: 65748 - DNA, 1145 bp, Homo sapiens
ctcccgaggacccgggctcctcggagccacccagtggggatgtgtgggtgcctcggggccggccccctgcagcggccgcagaggtgttggtgtgctggaccgggggcagctgggtgtggcgtgagtggggccgcccagtcggggcaactgcagtgcagccagatagggtctggactttgcgtaaagggacaggcgggaactgaagagcggaggtggggactgggagggagggaaggtatgggggtgagcaaaggggcgggtccctggctgctgtggcctcccctgaccccctccccccgctgctggggtcctcggccaagcccccttctcactggactggtaagtgtggccccggagcccgggggagagggcggtgacccgggacaaaggggatcccccggggcaaggaagatacagtggcggtggaaccctcctgttacctacccgtgttccatactctccctgccctcccccacgttcagtcggtcggtcggggtctgtgcccacagagacatgaggctgagctggttccgggtcctgacagtactgtccatctgcctgagcgccgtggccacggccacgggggccgagggcaaaaggaagctgcagatcggggtcaagaagcgggtggaccactgtcccatcaaatcgcgcaaaggggatgtcctgcacatgcactacacggtgagtgggttgggcgggccttttgggagtgggtggggcttccgaggaccagagagtgcttgggagtctggttctccataagccaggtaggtgaccttgggcaagtcccctctcgcctctaagccagtttccatggttctgccttgcccttgcctactgcccaggtgggcaccagcaggcagtgacagtgtactgtgagctgcccaaggctctgtcctcttaaagaactatgaccagctgggcgcagtggctcacccctgtaatcccagcactttgggaggccgaggcgggtggatcacctgaggtcaggaatttgagaccagtttggcctcatgatgaaactttctctgctaaaaatacaaaattagccaggcgtggtggcgggcgcctataatcccagctacttgggaggctgaggtggaagaattgcttgaacccgggaggcagaggctgcagggagg

SEQ ID NO: 65749 - DNA, 1015 bp, Homo sapiens
gtcaaactctgtcccatcttccagcttcccctgtggaaccatgagaaggccagtgaggaagaggggaccacccctgacaccccctccctcagctgctttccccatcaagctgcccccccacgcccacccacagccctggtggtcagtcctttttgttttttgagatggagtctctgttgccatggctggagtgcagcggcgtgatctcgcctccctgcagcctctgcctcccgggttcaagcaattcttccacctcagcctcccaagtagctgggattataggcgcccgccaccacgcctggctaattttgtatttttagcagagaaagtttcatcatgaggccaaactggtctcaaattcctgacctcaggtgatccacccgcctcggcctcccaaagtgctgggattacaggggtgagccactgcgcccagctggtcatagttctttaagaggacagagccttgggcagctcacagtacactgtcactgcctgctggtgcccacctgggcagtaggcaagggcaaggcagaaccatggaaactggcttagaggcgagaggggacttgcccaaggtcacctacctggcttatggagaaccagactcccaagcactctctggtcctcggaagccccacccactcccaaaaggcccgcccaacccactcaccgtgtagtgcatgtgcaggacatcccctttgcgcgatttgatgggacagtggtccacccgcttcttgaccccgatctgcagcttccttttgccctcggcccccgtggccgtggccacggcgctcaggcagatggacagtactgtcaggacccggaaccagctcagcctcatgtctctgtgggcacagaccccgaccgaccgactgaacgtgggggagggcagggagagtatggaacacgggtaggtaacaggagggttccaccgccactgtatcttccttgccccgggggatcccctttgtcccgggtcaccgccctctcccccgggctccggggccacacttac

SEQ ID NO: 65750 - DNA, 1601 bp, Homo sapiens
aagcatgggctctttgtttcctctttgccaggcctgggtccttcccagtgacccctcagccttcacttcctcctcactcccggggagctgtgacaggtgtttgggggaggggaggggggtatgataagctgggacagctgcacccaccggtgctctggtgagatggggggcccggatgttggggagacacatctgctgggttcccagcccaaggtccccaaccctggctgtctggccttgtctgtcaccccccgtgcccactggcagggacaggaagctcccccccccaccccgctttgggcagtttgccttggcacgggcctgatctgttttcctccccagagcagctgctgttctgtctgctgggcagagggctgggttcctccgaggtaggcaggggcctcaacccagagcccctctcacaccctctctccaactcaggcttatgtctctccctcctcccccacccccaccccaggaagaggagatcccagaactggagattgacgtggatgagctcctggacatggagagtgacgatgcccgggctgccagggtcaaggtgagggggctggggggcgatgggttgcctgaggcactgccccgggaaagtgaggctgtggagccaggccctcaagccccagctcctgcctcaacagaatggggccaatgcctagctgtgaggttgttgtggcatctcctgtgcctcagggtggccccagtctcttggaagtgggtataggcgagctccaggcccccactcctgaggactcacttatccttcctcccccatcctctgctaggagctgctggttgactgttacaaacccacagaggtaagagatttcctggggggctggcgggggtggcagggtgaggggagcccggctcctgtcatcttggggtctggtctccttaatgtttaccctcccaccccatccaggccttcatttctggcctgctggacaagatccggggcatgcagaagctgagcacaccccagaagaagtgacggtccccgacccaggagaacggtggctcccacaggacaatcgctgccccccaacctcgtagcaacagcaataccgggggaccctgcggccaggcctggtgccatgagcagggctcctcgtgcccctggcccaggggtctcttcccctgccccctcagttttccacttttggggttttttattgttattaaactgatgggactttttgtgtttttatattgactctgcggcgcgggccctttaataaagctaggatacgcctttggtgcagctaacaggctcggctggtctcttttaggggggcacactgctctttgacttctgccagctcagcttctccccaggtgaccacaggccttcctaagggccacgtagccatgacgatagcccagtgctggctcccagaccaggagttgaaagtggctggggagctgtgggggtggggggagcagtattgctgttggcaggcaggaacactcctttctctctgggcaagggccaccatgtcattgagcctagacccccaaggctccacagtcgggaaaggagaaggtggtggggtatgctggagctgaggtctctgagtctc

SEQ ID NO: 65751 - DNA, 1301 bp, Homo sapiens
ctaaggcgcaaagagctgggcagtgcgggggccgcgacttataataataaaggcggtaattgcggctgaccctaggagcgtgcgtcgggaccgccgcccagtcggctccgcagagagggcgccgtgccggggctcctgcacccccgccctgcggctcctcggtccttcacatagccctggcccacctccaataagccgacggcgcatcccattccctccctctattttattttctgcatctttaaatggtctcattcattcgtgtattgtctgtctcccacttctagattgtgagtgccacggggctgaggcctgcgccgacctggtctgctggtgctaccaggcttgaacagtcttcaaatccactgctattaggcaaattacctggctcccgctgaactccagcacctagaactatgtcacactcgtagtaggccgctgcattggttgaacaaatgattttgaaagaatgaatgtcttcctctgtgcctgcatttcctcagaaggctgtaacaaagattaaataggaaaattcgtggaaagttcaattactacaccacagaggttaattaagtcgcactgctagataaaacgggagacgagactttgaacccaggctgtgtggctcaaaccccctgacacgaagtctctactcaacctcctcactaccctgtagacaccacccaataaggctgcgcagctcccgggggatgtttctgtggaaggcaggctcaccttgtgccaccccaaacagggtcttggatctgagaggcaatgtttctgctccagcccctcaaagacactctttggatgttgtggggggaagccctctgcagcgggtggggttcagagatggattgggattggccccggggtcacacagctggggctgcatccaaactccaacccaggatgttgggctcctcctttgccctatagtcagagagaagagaccaagagaagacagaggctgggcattgtgaaggcaatgggctcacagggctcagttcagggaagggtagagtgagctgacccctccccttcccgtgcccctcctccggcctcagcctcccttcagccagtctgggtgccgaggaagggctgaccctcgctcttgcggattaggtaggatccaccctctccaccgggagccctatccgtggcctggcctcctgccctaagcctggcctgataggaggatcactttaccccagtccaaattccccaccacaccccaccaggccaggccagctccctctgaacccaagcattgtttgtaccttgagggtgcacacagatta

SEQ ID NO: 65752 - DNA, 1010 bp, Homo sapiens
ggctggcctgaagggaaaagtttcttcttttcattccactgtgataaacccaaataaggaagtgggaacagggagagggccctgggggtggggtggggggtgctgacggaggcttggggcaggagagcaggggacctgggctgcctttgaggtccagacccctggggagaggtgggagggaaacactaggggcagtacccatagactccccgctctgcacaccattcgggggcctcaggcccagggtagggttgggaatccggagaagtgctggggctgggtgtcagcacactgaagtggggaggcccatgcatccccaaattttgggggccttctgttcccagatgaacgcccatcttttgtaagcaaagcctgccatgggtggggctggtgcaatccccattctccagaagaggaaactgaggtctggaaagcagagagttatcccaggccccacaatggggtgtggctgaggccaggagccgggagcctggcagaagtctccgctccctgcttcccaggtcacaggacgctgcaaccacactgcctgcaagcaggtcctggctccagtgatctcgggcaggctacgaagtgtccctgtaactcagtgtcctcatctgtaaaatgggagtgacaacagcacatgcctcttaggctggttaggaggcctttgtgtgctcgaagatgctaggtgcatagaactgtacctggtgcgcagtaggggcggtgtgcgtatatgagatgtattgataataatagtattgtccaccagacactgagatgcattttgggggtggcacccaacatgaggtggggtccttttctgtctggaagaacctggaataggagggttctacctgtagccacttgttcactctggccctggccgagtctaagccctggaggacagcccctctggctgctggtcctgagtcacacagggtggccctggtagtgtgccagggaccgggcccttcttagaaaatggggctggcatgcacttccctgcc

SEQ ID NO: 65753 - DNA, 1050 bp, Homo sapiens
acacggggaggcggtgagtgggggacacaggggctgcccagccacaacccaggtccacaactgcctctggtacacagtaggtcacagagcagcctagaacacagcaggtgttcggtaagtgacggccgactcacagaataagacagtgactcccccttcgtccccttggtgccagcccaccttggctgtgtcatcctgcacggccatgaagttcaagaacactgtgttcactgggtctggcccagacaccaccgtcatcagcttctcctccagccgggcatcgggacccccaaagcccagaacttcccggatcttggggtcctgagtaggtgacagcgaagggtgaagagggggctcccgcacagcctcgctgtggtcttcactcccaggctcatcactcaccttgggcaggcgggcgtaccggcctgtccgtgtgtccctgatggaactgatgtccagtgtgtccacctcctggggggaaccagatgccaggctgagtatgagaggctgcagggcaatagccaggagcttccaagctctctacccaggccagggaatggccagcccctggctatagccccagcctcagctcctgccctgagcacttcctgtctgggcagcagtgggagaggtcagcctgcagccgggccccacccccacgggcagggcaggggtctgggacaggggtccttggcctgagcgagctgcaccagcgcccaccctcaccatgttggggcccgtccagtacaagaagaagccattggggtccacacgcagggtcaccaggttccgactggaggtctcctgaggacagcacagggcagcaggggtcaggaagtgagggctgtggtgcaggcctggcccctggggccctcccatcatgcaccccagagttcctgcccatgagctaagacgaaacctcatccagtccacaggtcctgtgtggctgcctgtggccctcagaacaaagccaaggtcctaggtgtgacatttagtgtcacacctacctcaaagcctcttcccagcctcacctccctctggccctaggat

SEQ ID NO: 65754 - DNA, 1045 bp, Homo sapiens
caaaaattagccaggcatggtggtgggcaactgtaatcccagctactcgggaggctgaggcaggagaatcgcttgaaccagggaggcggaggttgcagtgaaccgaggttgtgccactgcactccagcctgggtgacagagcgaggttccgtctcaaaaaaaaaaaaaaaagagattggattggaggcagggagggctggagtcttccacacaggaggtggtgtgagctgtgccagggctgaggtgggtggagggagtgaggagagggagggattgttgaggcagtggggagctatagtgagtctcagggatgactccccccagctcacgctggtgggatggacaggtggtgggtatccatctgagagatggagagccctctgcaaatccagcatgtcctggttccaggtggggccggggtggtgaggagctgggctggtgggcggcctcggtgacagagcctcgccgccccagcggggcagctggctgggacctcgtcggtggagatgtaccgccaggcactactatggggctgccgctgcgtggagctggacgtgtggaagggacggccgcctgaggaggaacccttcattacccacggcttcaccatgaccacagaggtgcctctgcgcgacgtgctggaggccattgccgagactgccttcaagacctcgccctaccccgtcatcctctccttcgagaaccatgtggactcgtgagtgagcccctggcatgaaaccccatggaccgggggacagtcttccagcttcagtgctgttggactgctcagggacctccaaccctgcgaacggccactgacatgtcccgtagacctcagcttcctctctgggggagggatctctgacctctgacctcggttccgcagggcaaagcaacaggcaaagatggctgagtactgccgctccatctttggagacgcgctactcatcgagcctctggacaagtacccggtacgggagctcggagcgaggggggtggcatgggggccagggtgctgcggacccggtccagggccctgactcgt

SEQ ID NO: 65755 - DNA, 1129 bp, Homo sapiens
agggtgccagcttgttgcgctcaacttccagaccctcggtgagccctggccccctccatcttgaccccgaccctcagtcttactgacttctgacccacgatcctgctggtcttgcctgaatggacctctgaccctgtctcatcccagatcccaggggaacccagctcccgactcaccccgcctcctgcccttggctgataccagacccctcccctgtctgatctgtcctggatccggaccctgatgccatttgagcccgcccctgaccctggaccttggatgccatctgacctgatgatctcccattccccacatggcaccgtcctgcctgatccctgcccctgctcgacgtgcccgtggcaccccagatgtggcgatgcagctcaacgcgggcgtttttgagtacaacgggcgcagcgggtacctgctcaagccggagttcatgcggcggccggacaagtccttcgaccccttcactgaggtcatcgtggatggcatcgtggccaatgccttgcgggtcaaggtggggcttgcgggcggctcaggccaggggtgtcctgggggcaggactctcagcatccgcctcaccctccttggcccacccccaggtgatctcagggcagttcctgtccgacaggaaggtgggcatctacgtggaggtggacatgtttggcctccctgttgatacgcggcgcaagtaccgcacccggacctctcaggggaactcgttcaaccccgtgtgggacgaagagcccttcgacttccccaaggtgagcctggcccctgcacccgcccaggcacaggcagatccagcccagaccgccccgactctcaggtgggagaacaggaaccaggcacaccgttggcgactggggatcagaaagtggggggtgccatgggtcccccaggacctgcctgtccgagcgtcagtctccctgccctccttagggtaagagaccagggtgagaaggtgagatgggggttggggggtgtcagctagacgtcttgtgtcccctgcgaggagtggacacagcctaccctgtctccgaggcaggagctgaggtcacaaccccaagctcatatccgctcttcagcaccccgcacggccctgcatggacgcggcctctgc

SEQ ID NO: 65756 - DNA, 1044 bp, Homo sapiens
tcatgactcactcccgtttctaaactggcaatgaccagaactgtctgtgggggccctggaggggcctggctgcctgtcatcttgcctcagggtcctgatggctgcagtcatccattaggccaggacatggaagtggggtcagccatcagcttagtggcaatggtgactgatggtcagtaggtcagctcgtctgaaggtctgctttgttaagctttgatggctgtggttagctgtggcctggtagccacagtggcccagggtcagccctgtggctcagctccagtctggcccacaggtggtgctgcccacgctggcttcacttcgcattgcagcctttgaggaggggggtaaattcgtagggcaccggatcctgcctgtctctgccatccgctccggtgaggccttggtgggctctgggcagcacagcgggcagtgggtagggcccccacctggcccagcaacccaacgttgccttcctgaccacccaggataccactacgtctgcctgcggaacgaggccaaccaaccgctgtgcctgccggccctgctcatctacaccgaagcctcggactacattcctgacgaccaccagggtgagctgggggtgggcggggcctgcctggccagggagtgtgagggacaagggccacccccagggcctgggagtggccgagctggatggccccgactgagtagggaactgagtagggaacagatctgaggacaagctctggaattcctcattgagaccagaggtggcgggtgggggtggcctgggggctctgtctctgagaccttggccttctgcctccccccagactatgcggaggccctgatcaaccccattaagcacgtcagcctgatggaccagagggcccggcagctggccgccctcattggggagagtgaggtgagccggggcagggcagggctcaggctcactgtgacccagggggccgctggacatgactgctgtggccacatgaggagggggcttctggtctctctagcgcagtaggcttggcagccctgggattttgagga

SEQ ID NO: 65757 - DNA, 1062 bp, Homo sapiens
agcggccgctgccctgacccgacgggtatcagccggctctccccctccacccaggacgacatgaacgaccgaggccagggagtcctctccttgggcctctgcatccccccatccttggctctggggtaggcccagggaggagacacccccaacccctatccggtctgtcctggagaaaagagactgcccttccatgcccctgagtgaggggcctggggcccaggctgcctgtgttccccaagggcaagggtctctctgttgaggaggaggggcctgtcagccacaacttctttcctcctgagcgccccatctccctctctgcaccctgcaattcccacccctccgtatttatttccctggtcccgccgacagtccctccttgtctgtctccgggattcaggcctccctccctgacatggagagtaacctgtctggcctggtgcctgctgccgggctggtgcctgcgctgccacctgctgtgaccctggggctgacagctgcctacaccaccctgtatgccctgctcttcttctccgtctatgcccagctctggctggtgcttctgtatgggcacaagcgtctcagctatcagacggtgttcctggccctctgtctgctctgggccgccttgcgtaccaccctcttctccttctacttccgagatactccccgcgccaaccgcctggggcccttgcccttctggcttctctactgctgccccgtctgcctgcagttcttcaccttgacgcttatgaacctctactttgcccaggtaaccaactgtggtcccgggtggggggcgggaggtggcaagcctcaaggacccacaggagtgaagggcatctctgctcctaggtggtgttcaaggccaaggtgaagcgtcggccggagatgagccgaggcttgtaagtactcgggacactggtgggctcagcctccaggtcaggggcaggtgacagtcccatgtagatcccttcccacctctcagggctgagacaaaggcaacccagggaatgtctgtggaagatcttggaaaagttaaagcacctggcgcagatggct

SEQ ID NO: 65758 - DNA, 1092 bp, Homo sapiens
cggcctggggcaggatctggctctggctgcgggtcctgactcgggtcagggttgggcctccgatccagcccgctccggggcagggttcaatcccgcatttgccgaagtccctggggctggccggggtggaagacggggagggctctatgtctgggaaggggctctgaagaccacgtgggggcgctcgaaggggcctggggccaccctcctctctgggtcaaaggtcatcgcaccggcaggggagaacttcctcctccttggctctccccacttacttcctgataacctggtagaggtctcccgcgggcggggagggggaggcgtagcaactttaggcaacttcccaaaggtgtgcgcaggttgggggcgggacgcggcgccccgggaggtggcggcctctgcgacagcgggagtataagagtggacctgcaggctggtcgcgaggaggtggagcggcgcccgccgtgtgcctgggaccggcatgctggggcaggagggcagccgcgtgtcaggtgtgaaaagctctggaggtgttttcatgagtccgtgcctgtgcgtgtggatgtggggagacctagtgagagtgtgtgtgatcatgagccttgactgagttcgtggatggggtgtgcgctccaggagaagtgtgtgagcacaagtgtgagcaggagtgagcacgggtttgggaaggccggtgcaagtgtgaaagccctcagcagagagcgagcctgcgtgggcttgtggggctcctgagcaccccggtgagtggagtgtgtgaactcggtgtgagcacgtccactggccttgggtctgctctccaatgcagaatacccagatgagggcagggtctcagaggtccccccaacatctggagaaaactgggaagtatcctgctcctggctagggattccaggtggggttgaaggttgcctgggggctacggttaccctgctccctggcctgggtgggagtaggggctttctaagcctcccccaggttcccaagggggagacctgctgtcagttactggccctgaagactctgtttccatggcaacagctaggagggggcagtgttcctgggcagtccttcctt

SEQ ID NO: 65759 - DNA, 1068 bp, Homo sapiens
gggcgaggtgacagtgactatcaggtcaagggtggaagtagttgccaggggcaggaggcggattctggaccttggaggaggtaaagcccaccagaatgtgtcggtggcttggatgtggggtgtgagaggaaccagagattctgcctaggtttcttcttgggcaagtgaacacgtggagtccacgtaggctgtgttcggtccgagatgccttctagacatgcaggatgtcaaggaggcagctggagagatgggtctggagctcacagcaagtccaggctagaggtagaaacgtgagagccccacggctggggaagattgccatgggattggagatgagctccaaggacagccctggcagtctggatggaagagcttgggaagatgctcagaaaccacaaagtggctggtgcggtgggaggaaaaccagagtgtatgctgtcctagaagcaaaagaagaaagtgtttcagtgtttctaggagcaggaagtgatcaacagccttagatcctccttttaggccaagtaacatgaggactaagaattgaccactggatttagcaatgcagaggtccttgtggcccttgatgtcggcagatgagggcagtgtggtccagagatgaggcttggggctgagatgcagccccgctgcctggtccagctcctccctcatccaggcagggctcccccgcccagcagccactcccctccctgcctgctcatggccccctgctctccctttcctccccatacccccagacctgtgcttgcccggggagagtcagggctctcctgtcagctgggtcccctcccagccccgggaggccgccactggagccctgcctcttcctggcagggagcatcgagtacagctgtccggcctccaacgagtgtgagatcaccaagcggagacgcaaggcctgccaggcctgccgcttcaccaagtgcctgcgggtgggcatgctcaaggagggtgagcgctgggcaggggctgggcgagggctgggggagtcggggacccgggccaggtgggggtgaggcctgggagttctggtgagtggactcggggagg

SEQ ID NO: 65760 - DNA, 1164 bp, Homo sapiens
ttctcctggctatccaatagcatcgagaggagcatccccggaagtgaggcagcggaggacgacctttttccggttccggcctggcgagagtttgtgcggcgacatgaaactgcttacccacaatctgctgagctcgcatgtgcggggggtggggtcccgtggcttccccctgcgcctccaggtacccgccggcggcagtcttcccttttcgggcgggatggtgggccggggtccagtgcttgcctaaactcctccgccctgcaggccaccgaggtccgtatctgccctgtggaattcaaccccaacttcgtggcgcgtatgatacctaaagtggagtggtcggcgttcctggaggcggccgataacgtgaggatccttaccccgccccagcatatcccggggaatgcggggcgggcacacctcagccgggctgaggcgggagttcgggatgcccggagataattttggcctcttgcccacagttgcgtctgatccaggtgccgaaagggccggttgagggatatgaggagaatgaggagtttctgaggaccatgcaccacctgctgctggaggtgagaagcggcccatcacttgcttcccgggccacctgcctcccgcactgaggctgccagtgctcagctctgtccctccctgcccgcaggtggaagtgatagagggcaccctgcagtgcccggaatctggacgtatgttccccatcagccgcgggatccccaacatgctgctgagtgaagaggaaactgagagttgattgtgccaggcgccagtttttcttgttatgactgtgtatttttgttgatctataccctgtttccgaattctgccgtgtgtatccccaacccttgacccaatgacaccaaacacagtgtttttgagctcggtattatatatttttttctcattaaaggtttaaaaccaaaagcggtttctctttgcagcaaatatacattaaaatagagtctctgtacagtcaagggctctgggccctggcttgccccatgtccctgcgcctccctggccaaacccaaaaataaatatagtgttattgctctgcagggcatagaggcagtgctctcctaccccctgaggaggctcgttgggagctgatggggaagccctggccaccccaggggtccaggggctgga

SEQ ID NO: 65761 - DNA, 1108 bp, Homo sapiens
aggggcctcaagtggggacaccagcagggtgtggggatgggggccattgccacggcaggccctgctcctgggcctctgccccttggtgcagggaagccacgcctgtgatggtgaggccccactgcgtggagtctagggggcctctgtgccctgcgcgatgctgcctgcctgcccaccccaggtgtggtaacagccctcacaagaattggtgaggtgtggactgctgctgcctctcagccacctacagggagtccgcattccatcaccgcgtggagctgccctgccatgaaccacatcaatacctggctcccaggcacttcctgcgtagtggtccccaggggtcagcccccactgctgactcaggcaggccacactcttgagaggtcagggagaaggtcaaagcagggcctcatagagcaaatgacccttgaggcagtgggagtggcgcctcaagtgggaggcggagggaggcccatagccctaggggtgagccccatagccctaggggtggagggtgggacaatcccatgctgccgcagcaaggtgggtagcaggagtagggggggaatgttggggacaagagaggatgcctggaggtcagtgggctctctgaagctgatgagcagcttgccttccaccctacaggcaccttggccatgggctaccgtgtgcagcccccaagctgggaggctgggagaggcaccagatgggcagcagggagcaggacccatgatgacagcaatgcccaggaggtggaggtggagatgtgttgggagggagggtgcatccagggagctgcttgctgaaggtggaggggctgggtgcttgtggtcacgtctgtgagaacagacactcagtaggaggggagccagcctccctgcccagggttgcaggtgctcagcctacccgagtcgtgctgcccaccaacctctgtcactgtggttctctcccacaacctgccaccccttcaggggtcccaggtgggggcagggaaggaggctgactgcacctcgagctgccctggtaaactgcctgcctctcctctcctgccaaactcgggggtacagtgttgtcctcatggacacgcataacacaaagcccctttctt

SEQ ID NO: 65762 - DNA, 1040 bp, Homo sapiens
tggcaaaaccccaactctactaaaaacacaaaattagtcgggtgtggtggcacgcacctgtaatcccagctactcgggaggctgaggtaggagaattgcttgaacccaggaggcagaggttgcagtgagccaagatcgcgccactgcagtccagtctgggtgacagagcaagactccgtctcaaaaaaaaaaaaaaaaaaaaaaaaattgtacctgcctcacaggatcctgtaagataatgagcgtagggagcttggggcaatgcctggcacctagaatggacctgttccatgggagggaatggcagcaggtaggcagtgaaggtgagggtagggctggcgggctggaagagccggctccaaggactgagagggtgggggaagctagggacaaagggggaattttgtgagatttcctggttggagcaggagaaggtggctggccagggggaggtcagggaaccagggggtctcaggttgtccactgggtggggaagcctcccaggcttgggggagggggttctaggagggctgtggccagggcccggaggagggcagggcaggggctgggcgggaggttctattcaccgtgcctcctaccccagtacttgcgctagtggctgtcagccagccaggcagcagtgcctcatcggacttgtagtttttcagggagaggtggtggccaagagtgtcaggaggtgcagtgccccttgggcaaggcctaggtgcagttattaagccaggaaggtagttttcagcagcaaggcttgtaggcttggtttccaaggcaggatttggctggcagctggtcatgggcagctgtccccgaagcttcatcctgccaggccccccatgtggcagaatggtttggtctccctccctctggggcacacaggccagaatgggcctcccgtctccttccaaagtggtgcagcccaaccgccaaaggccacaggtcacctagctggcagcatcctggcgccccctgcccccccagcccccactgtcagctcctgacttcctgtccctccagccctccgt

SEQ ID NO: 65763 - DNA, 1057 bp, Homo sapiens
gcaggagaatcgcttgaatccaggaggcacaggttgcggtgagccgagatcgcaccattgcactccagcctgggcaacaagagcgaaactcttgtctcaaaaaaaggaaaagaaaaagaaaaagaaaaaaaaagacaaggcaccaaactgtacacagtatcatgaggctgctgaaaacccggggtgagatgttcatcttttcacctatggctaatgtgtgcttggagttttaacaaagacctctcatttttttctaaaaagaacacccgtatcacagatgtcaggagcactggaccttcgggaactaaatacaatcggctcactctccatttatgcttttgagcaaagttcaggagggtttggggctgaggaagctctgtgttcctggttactttgtgcccctgctagagtcgtcctctgccatgggggcttgtggcccttcctatgtctctatcctggagggattcgtatccttgaaacatgaatggcagtccccagcttttacacacagacacacacatgtacacatagagacacacaggcaggtgggcacatgtgtgggctcatgcacacacacagcaggcaggcacacacacgagcacacacacgcatgcaccgtccacctgagttctcggggtttgaggagatggagggcgagttcgccttgcagccatgaaaactgcttgtggctagacagataatggactggaccatccttcctgatggatgccctgggcctctgtttaccacgcagctcctctctacccctttcttctctgttttcttttttttttttgagacggagttttgctctgtcacccaggctggagtgcagtggcgtgatctcagcccactgcaagctccacctcctgggttcacaccattctcctgagtagctgggactgtaggtgcccaccaccatgcccggctaattattttgtatttttagtatggggtttcaccgtgttagccaggatggtctcgatctcctgaccttgggatctgcccgccttggcctcccaaagtgctgggattacaggcgtgagccaccgcactc

SEQ ID NO: 65764 - DNA, 1033 bp, Homo sapiens
tctgaaggttggcaacagtgtttgaactcagggcagaggcagagggctgtgggtgggtggggagcaggagaagagcgccaagatgtgaaggtggaatgtggctggcctggctgcagtggggctgcagtggggcaggcgggacctggcagtggaggccctggggtgctttaccaccaagaggctgaggggcttctgggcgtgatctatgaagaccacaccctgcagagaccagcgagaggcactcagatgtgggcagggcttaggctgtgctgaagagagagccagagaggaaacctccaaccctcgtcaggcccagaggtgcccctgcaagaggagcaagtcctcccaccagccacctagagctgagccccagctcccttctaccccaaaccaggaggttgcacaattttggtttgagaggaggaccaggaggctgatgggagtcacagttgttgactcagtggctgatgggaattgtgttctacactcctccaaggactgatgggagttatagttctcaccttttgggggctgatgggaattgcagtttctgcccaagggactccagttatcagacctagagatggggagacccattctcccctcacaaagccctcccctctcattcccatgggccctatttagcaggtgcttccctcccagatggctgtgtatgtattttcttttctttttttgctttcttcttctttccgttgttttgttattgttttaactataataagagggccagaggcagtcaagccctggccaggtcctggcggcccatgggggttctggggagggggaggggggaagtcagtgggggtcagaggtggagggtgaagaatgagaaagttggggagttaggcttagctcaggaaccatgtgtccctgcccactcccctccttccttgcccctccctacctccctgcctctacatggcttctctccacccctcccagagtcctacgggacaggaccctgctccagtggtatccaactcctccctgcccactcttcctcatgggccac

SEQ ID NO: 65765 - DNA, 1045 bp, Homo sapiens
cccccatgcctctttctcttaatacagtggtgattgtcttgaggacatttgaaacaataggtgggaggttgcgggggcggggggcaacccctaaatctgatccttgagcaaggctgagtgctcttattcaggtgagaagttttactgcgccattgtcctcaaagcctttttcacttttctctcttactgtttggaagcagtggcctcttctgactcttgtgggatgcagatttctgggctctctgtattcttttcacttctgcttgcaaaccagccagttcttgcctcctcatactccttgcctccttggtctcttccttgtactatgttactaaaagtagaaagtagaagcctcatggtcagtggcctttcccagccctttccctcagtgcccagactccacaggcagtgcctaccctccaggttctcatgagcaacggtgtgcaccacatgctttgccactgcattatgtgggttttatcttcccagcctccacgccttggattgtcacgagtgccttctcaggtttgtgttatcgtgacatccatttctggtgccagtgtctatattagttaaagtaacatttgtttctgtaacagataagccccggatctccgtagttaattcaagagaagtttctcactcaggtgcaccctacctgggtatgcctgatcagcaggtggctctgctgccaagggtgctttaggaatccacactccttccatctgtggtgcctccattttcaacttgtggtttccaaggtcactgcaggagaaggagcatggaaagtggcaccaggaggctgctggggcactggtacgggcagtgcccactactcagtcatacaccaggcctactcacaggggatgtcaggaaatgtagtcttgcttcccaggagaaggggaaaatgagtttggtgaaggacgcgttccctggggtgcaccgctggtgctcagatgcctgtggtgcactcacatgttctggggcatgttcacatatggacatgtgcacacggaactcagacccaggctcagtggccggcagg

SEQ ID NO: 65766 - DNA, 1028 bp, Homo sapiens
gaatctggcctgggggcctcccagctccagaaaagacattcaggctgagggtgggccacgaccttggaaggggtgtggatagagcaggaccatagcatggcctgtggagccttggggcagaggctcagcttcaaaaaccaagggcagaggggtttctggggcacaggcgcccagacccagaggctaaagcccagttgccctccatgtcccccaagtaggctagagctgagaggggtcattcccatgggcctgggcccagggaccttcaggggagctgccagctgctgggccagaaaggccttcctttccatagcccagggcctgtgctttctgggtcagatgccttcctctctaggaggcccctctgctgagtgctgttacttcttcccctggggcgatcttggctcaaggatgtacactccaatgcctccattgctttggggggctctgggcatctggtgacttcaacacacagtaccccctgccctgctttactgctctgagctctaggcgtttattggtggctcctgtggccaacacagcactgctagcccaggcctgctggaagtggctgtgatgagcggccccataaaagctctgggacggggctctggggacaacggtctttgagggtcctgaagaaagggcactgagtggcaccacatgtgtttacacacaggtgcccatgttcacacactctgggacaggaattcctgggtaacaggaggagtctctgctttccctgcaccctgcagaggggtatctggggccagatggtcaccacgtaggggcatgcagtgcacactggatcccacctgggccatactctgcccaccgaagttctagcctcccagccctgtcttggagtctagtcaggggcctgggtctgatgctgaatgggtgcattggtggtctgagcccttttaggctgcattagggcagagggtgaggaggcgctgaagcaggcgggtcagctggttcccagtcagggatctgtgaggtcactgaccactgagccaccctcttgg

SEQ ID NO: 65767 - DNA, 1103 bp, Homo sapiens
aacccccagtgccagcagctgaaggttccgggggagatggggcaatgtggtaggccctctgcccaccccctccctcccacaaaataagcagcaccaaaaccaaagttaaatctaaacttaaacataataaacatcttttctaaaaaccaaaccaaaacaacaaactcagagggttaaaccgacccccagatccactaaaaacaaacagaacagcccaaccccacccagctgggaattctgaggtgtcatactggagtgtggggtgagattggagctggagcgggttttattggctgtcagtgagcgaagcaaggtccctttaacattttccacttctgtgcttgcatgtccaggtggggaggaagggctcggcttaacagggcctggtcccaggcagtgctgggccttggcagtccgggagaagagaggggatcctggccaggggtcagaaggcctggttgtaggtgggaggtcagcctgggcaggttgctgcttccacacaccatcactctgtctcacctccttctctgctctcacacgcaccgactccaccttggcctggcagctacctcctctgtctctgcctctttgtctcctctatctgcctcttccaggggctccatggcttcagggcttggggctggacactggggcaggatgtttggggaagcagagggagaagatggggatggactgagggaagaggatgaagaggggagatgaccttggagctggagaggagagggaatggggaaggtgggaaggcttgcacatggtggggaggagggactgggctccccttccccagcccatgtgtaccctgggtgccctccccttctggggtccccacctggctgggctaggggctgtggctgacaaggactttccctttggctttctgccccttcctcatttctccccgtcccctcctcccttactggctttctcctccattcctctttcctctccttggcttccttcttttcttccttcccttcctggtctcccctcactgcctgccccttctctgtcacccccttccactcctgcaaggccgccagctgaccatcttcaacagccaggctgccatcaagatcgggggc

SEQ ID NO: 65768 - DNA, 1001 bp, Homo sapiens
gaagtctgctgcccacaggaatcatgcctacacagccagagctgtcagtgttggcttgttggggggcgtgggggataggtggaatttagtgtaggagggttggtgtgtgttgagtgtccctacatgtacccagggacttgatgtaggctggcatccctctgcagagctgttttttcatgtgtctgtctgaccatacaaatgtctgcagttgtccatatgtctaaggttgacctgtgtgtacatgaacctctgtatgtattagggggccacgcaggcctctttatctccagggactttccagaaatgtctgggtacaagcctgcgtaattggtgtcataagcctgtactggcatctttactccagcataggtgagcccatgaaagtttacacattggccttttgcccctgcccctcgcagtcagcatggggcagcttctctgcctcagcctggctatctctccgcctgggagagtgatggaggtcgcagatgctcactctgcttctcagtcaggccctgtgtgtgactgcaatgtcgctcagactgtatctcaccatctctgtgtttctgcagttctccctgcagcgttcctgtttcccctccctctttatctcccatgctggggctctcctccgttccctcccaaggctctgtccacctcttctctccctgggcctgcatgtcagcatctccatctacctctccacatctctcctcatctttgcatatagttcagtgctatttccatatctttccattgcttcccctctggtttcctctcattctaaggctctgtctctgcctccctcaatatctttcagagtctctgcctcctcatttcttccatgtcctcatctccatccctctcctgtgctcctcagaccttggtttgtccttggccgccacagctgtcaccctgttgaacttggtctgtctgcattctcaaggctccctgcaagcagggactgagtgccccggacctagcacaagccctgatatcta

SEQ ID NO: 65769 - DNA, 1044 bp, Homo sapiens
cccaaaataaaccccattagtcgccatgttccctcctgcggctgactgagctctctgggggtgggggtgggggtggggggctggtcacccagtttcccggaaaggagccttgtctgggaggcctggaggactagtactccatggcctgcagagaagggaagggtagagaacaatcttgcattctttagaacataaatggagcagatgagattcataaaatgcttaattaaataattagccactaatgactcctcacaaagcacttcttgtgaggagaggggttcaagggaggacttaaagaaggagagaaacagatgaggcctaagggcaaaagcctagacagggagaaaatgtcagtctgggggtgggagaactctggagtcaggaactaggagcctgcagtggggggcaggagggcctgcagcacttctaaggagcaggccttgccagcagccaaggaggtggcccagttggtaacactaggccgggttccctcaggtacctcggggtctctcgcctcagggacttgaacccccttgtagttggggcaatcaggggtgaggaggctccatcccagggagctcctaggaccccaaaggggaggggctgcctgagtgctttggggggagccaccatctgcaggcccagggaggtgctgaggagagaagggaagattgttgcctggttcccaaagaggtagtgaggccagcagggggttgggggaagcaggagccatgggtccccttgctgttccccagagcacccaccatcaacaccttccatccccccagagtgagaggtgaccctgggaggaagggcaggagggaaagaaccacctggatggctaataactgacatctcacctctgcctgtggccaagaaaccacccccagcagacagagggggcttggctctgccctccccagacccaggtgtcctttctacctgagggccctggagcacagtggtgagcactgaaccctcaggatggggccccaagtcgagggcggagagttggctgacagtggggtatgcagtgacccc

SEQ ID NO: 65770 - DNA, 1057 bp, Homo sapiens
gagggccagatgtagaaggtaatggggaggacagagcttgggagtgatgggggcacagagtatggaggacagagatggaaggtgacaggtacaggggtgagaagagatggcatgcagagaatcttaggggtctaagatatgaagtgatggggggcctgagatggggctgaggaaggacggaaatgagaaggtgatggggtctgagaaggaaggttaagtttttccatagatggttatgaggggcagagataggaggtgattgtaagtggacagcgatagaggactgacacaggaggggaagcctggaaacgggaagtgctggacctacagaggtgagatgctgggggtcagaggtagagacagagcagagatgaggggacatggaagggagacactagagattaggggaacaaggatgggagaatggcgggacagtggagtgagttgggaggtgatggaaggccagtcatgggaaaagaaaggaaggttgctagagggatggaggtaaaacagagacatacatgaagaggtcaaggaggaagagacatgtcagaggcagaaatgacagatgtgacagaggtgggagagaggtgaagggggagagatgacagaccagcgatggaagggtgagggtgaggcagaggtggaggcaagacagatggagagatgataaggggccgagatggagaaggtgatgcgcaagagaaatggaaggcagagctgcacggagaggatgaaaggacagacagggcggggagggtaaggaagtagaaggagataatgaaccagacctaggggtaagcaggtttaggtgaggccaggaagcaaagtgctgaagacagagatgagggtgatgggggagaggagagatggaggcaagggtggggctgagatgatgggagctggagattggaggtgaaggggctccgggacgcaaagcagaggggccaggctcggcgtgcacagctggggtggggcccgcgggggcccagctgcgcacacgggaagcgccccccgcccccgggccaaccgggtggccggcatctacagtgccact

SEQ ID NO: 65771 - DNA, 1051 bp, Homo sapiens
gtccagagagtaccttcaggagaagaaaagtgaggatgccatttgcacccatcctgtgccccagaatgggggatccgtcctggagcccccattcctgttcagagtgccctccaggaactacttcttgggggacctcatggggagctctccaagtacccttcaggctcctgcctgctgagttgggggccagagggcaggtcttagcccaccctgaaaccatcaaatcttgtgctgcctccttttcctcatttcctctcttcccccactgttcctcctccaagacaagcagacataaaaatgggggtccccctcccctgctgccctctggcccctcctttgcctagccgtagctcttcctagggatttgatgttggttgtctcctgtctttctccctccctcctgggctggacaggtgaccatctcggtggacgggatcctgaccaccacaggctacacgcaggaggattacaccatgctgggctctgatgacttcttctacattgggggcagccccaacacagctgacctgccgggctcgcccgtcagcaacaacttcatgggctgcctcaaggacgtgagtagggctagggaggggctgcaggctgttcaggagccctttgtctcctgtcttcagcgtgacttagtctgacctggctagttgtctgggtcatctgttccttccaagtccatggtgggagacaccccctctttaaaacctaaggcccactgactccatcaagaggcttctcccctttgatttccttgagccttggaaacccctatcctcatagaggaccctcaaaggcagctgtggtacagaggaaagaatgctgggtatgaagactaaagaccttgcttgagtcccaactcttccactcattggttctgtgactgtggtcaagtcacttgactgtctgatgctgagtttcctcctctgtggatgggtagtcagtgcctacttcataaggttgtgaggggcacatgagagtgtaagtgaacatacttcattgagtggaaaacagctaccacacgtcagtggccttgtcatta

SEQ ID NO: 65772 - DNA, 1026 bp, Homo sapiens
tgtctccagtcaccctttttttgcgttttcctggtagtgtatcttgcttttttttctttctcatggtggtgtttgatttccttccactcattctgatcattctttcttttctatggacctaagtaacaagagaaaagcatgggctggagaaagagggtcttaggcagtctcatcaccctcaccttgctactgtgggaggcccccatccatgacgagaagggaaatgggagtagaggtgtagggtctctccgtttccacagtgtgcgctcccaaccccctgcccacccgcacgccttcacccttgtatcttttgaatgtctcttaaccctgtttgacagatgacgacgttgaggaccagagagatgaaatgacttgttagtgattccacaacccttattggtggtatggttgggactagccatttaattttagcactcctttgactaagtgcctaccatctttgagagccctggtgttaagcaaacctggagacagaactcaggagtcctgtctgagctcctccagctctggcctcctctagccctctgctgtcactgattctctctgagctcagggttttggcctttcagaccctttggcactgttggacctgcccaattcagccctctgtgggggggtcatcttacagaggaacagagtggggtccttagccggtaggcaggaccaagattgggctgcagggagaaactcatatagatatgaaatttgggatggatttaggtctggggaggtagaggccttggagtcttgcagggatgtggaattatggcaagaagtgtggggaaagaggaagtcccaaatggagagctaggagtaggaaccctggttggttcactcacatccttcttgcctctcagtgcctggttctatgggtgctggctgtggctcccctttgtcataagtgaaggccctcccaaaggatctcagaaagcccccctggaaagttccacagctcaagtattattctagttcaagtttggggatttgcaactggggttgaagtaa

SEQ ID NO: 65773 - DNA, 1043 bp, Homo sapiens
tctcgatctcctgacctcgtgatccacccacctcatgatccgcccaccttggcctcccaaagtgctgggattacaggtgtgagccaccgcacctgacccatttttctttatgtataaaatggtgatacatggctgggcacttgaacccaggaggtggaggtcgcagtgagctgagatcgcgccactgcactccaacctggctgacacagcaagactctgtctcaaaaaaaaaaaaaaaaatggggatacacatgcttatctcataggtttgttgtaagaattaaattagcatctgctgtataaaattagtgatgagtaaatggtagttactcttacaagcaaagtgcaggggagagtttccaagttgaggggatcagtaataggtttatgaaaggcatgctgtttacaattggcctcgaacattgattaataaacttggttgggggaagtcgtttgaagcaaaggagctgatatgagcaaaggcatggacacagggaaatgtacatcatatctgtagagggcaccaaggggtatagggagaatagtagaacctaaagcaggagaagcaggttgaggccaggtcttgatgatctggcttaaattatttaactcacattgaatgctaactgggtacagtgtattggcaaatggagccacaaaagaattttggggagggaaatggataagatgagttcatgtcctttgtagggacatggatgaagctggaaaccatcattctcagcaaactatcgcaaggacaaaaaaccaaacaccgcatgttctcactcataggtgggaattgaacaatgagaacacttggacacaggaaggggaacatcacacaccggggcctgttgtggggtggggggagtggggagggatagcattaggagatatacctaatgtaagtgacgagttatttgggtgcagcacaccagcatggcacatgtatacatatgtaactaacctgcacattgtgcacatgtaccctaaaacttaaagtataattttatatatatattatatatattatatatatatac

SEQ ID NO: 65774 - DNA, 1049 bp, Homo sapiens
ttccatgtggattcatgtagaactacctcattcgttagaacagctgcagagtattccactgtgcggttagtccatcatttccctaaccatcctcctgctgatggacagttagactgttccagtttttcagtatgattctatgccaggctgccatgaacgtccttttactgatccactcaggccagtatttctgtaggagaaattcctagaagtgggataattggatcaaaagatatgcacattctaaattaggagagagactgccaaactgacctcagacaaggttgtaccagtttgcacccccatcagcagcgtacaagtgcctgcttcccaacttcctcgccaacagtggatgctataaaaagcttcacaattttgccagtctcattggcaaatggtatcttggttaaatttgcatttctttaatactaatgggggtagggtatcttttcatatgtttattggccatttatttcttctgtcaattgcctgttctgattccttgtccattattctactgggtttgttggtctttttctcattgatttttagaatctctgttaatggatattaaccctttgctgttgaatgtgtttgcaaatattttctccctgtctgtcatttatgttgtctttttccatataaaatttaaaaacttttgtgtgctcaatatgtcagtcttttcctttctggcttcttggatttgtgttctgtgtagaaaggccctcagcccctcaagattataaaattattatatcttttcttttttttttttttttctgagacagggtgtcttgccatgtcacccaggctggagtgcagtggcatgatcttggctcgctgcaacctccacctcccaggttcaagtgattctcgtgccttagcctcccgagtagctgggattataggtgcctgccactatgcctggctaattttttgtatttttagtagagacggggctttgccatgttggccaggctggtctcgaactcctgacctcgtgatccacccgccttggcctcccaaagtgctgggactacaggcgtaag

SEQ ID NO: 65775 - DNA, 1352 bp, Homo sapiens
ccccctgctgccaccccacagtgatcccagctgcagacctctctgagcagatctccactgcgggcactgaagcctcaggcaccggcaacatgaagttcatgctcaacggggctctgaccattggcaccatggacggggccaatgtggagatggcagaagaggcgggagaggaaaacttcttcatctttggcatgcgggtggaggatgtggataagcttgaccaaagagggtatgggggtcagggttcacgggcaaaagacacccaggtgtggctgctggagagtggtgctgggagcaagcggcacgtctggaaagactggtccaggcccagcaaggtcttggtcatggccagcaggattctgggaaactttagagggcgcttacagcaaataaggttaatgaaattggaaaagaaagaagtaatatagaactgaaggaaaaggaagagaatattatatcaaccctaagagataatattgtttgggaaatggaagtaaaaaaatccttgctctacgccgggtgcggtggctcacacctgtaatcccagcactttgggaggccaaggcgggcggatcacaaggtcaagagatccagaccatcctggctaacacggtgaaaccccatctctactaaaaatacaaaaaattagccgggcgtgttggcaggcgcctgtagtcccagctgatcgggaggctgaggcaggagaatggtgtgaatccaggaggcggagcttgcagtgagccgagatcgcgccactgcgctccagcctgggtaacagagtgagactctgcctcaaaaaaaaaaaaaaaaatccttgctccctgaaagccatgggcaaaagggaaatatgggcacagtagttacaaggggcctatggtcagaaacagttcttcagagaagacattatcctggcattacattaaaaaattttattttattttattttaatgtatttttttttttgagacggagtctcgctctgtcacccaggctggagtgcagtggcgcgatcttggctcactgcaagctccgcctcctgggttcacaccattctcctgcctctacctcccgagtagctgggactacaggcacctgctgccacgcctggctaattttttgcatttttagtagagacggggtttcaccatgttagccaggatggtctcgatctgctgacctcgtgatctgcctgcctcggcctcccaaagtgctgggattacaggcgtgagccactgcgcccggccttttgttttgttttgagatggagtcttgctctgtcacccaggccgcagtgcaatggcacgatcttggctcaccgcaacctccaccgcccgggtacaagcgattctcct

SEQ ID NO: 65776 - DNA, 1050 bp, Homo sapiens
ctatcgcaacaatgttgtcaacaccatgcgcctctggtctgccaaggctcccaatgacttcaacctcaaggactgtgagttcatccactggtagccagcaaccccagcttgcccgccggccacgcccagcgcaggccttaccctgtccccacttttgtccctcagtcaatgtcggtggctacatccaggctgtgttggaccgaaacctggcggagaacatctctcgtgtcctgtaccccaatgataatgtgcgtcaccccctgggctgggggctggaagcctgagtccttggcagcaggggtcagggagagctggggaaggacacttgctggtgccctagtcacacccagggcatattgctggccttgtgcatcctgtgcccccacctcaagtcttttgagtgcaaggacacctgagtcctgaggaaactgggttagcgaagggcactttggaggggctgttccctggcgacacccacaacacactcggttcttgtacccctcttcctgacactgtctctcgccactagttcttggtggaggaaaggcccctgggtcccagagagggggccggctcagggctcaggggtcccggtatgggtgggagtccctcctggccacacccaccgcagctttaggccatgcccccaccgccctgactcacgctgcctcatgctgtccccagttcttcgaagggaaggagctgcggctgaagcaggagtatttcgtggtggctgccaccctccaggacatcatccgtcgcttcaagtcttccaagttcggctgccgtgatcccgtgcgcacgaacttcgatgccttcccagataaggtaccatgcgtgtggagggcgactctgtgaccggacagtgtgtgctaggcctctccctccagcctcggcctgcctgccccatgtaatagataagggagtggagactgggagtgtgggagggtcagttgttcaggattcacaatccacaggctcagaacctgggcttccctcctcctcccgccccactccccccattcctcccacccccatgagcaccggcct

SEQ ID NO: 65777 - DNA, 1901 bp, Homo sapiens
aaagctgtggggctatgcacacaaatggggtgaggtcctcgaggtacagattaggcacccattttataggccaggtcacagagctggtttacaaaatcctgctcagagtgtggccccaggtggcaggaagaagtgaaagaaggcctctaatcacttcctaagcagtggaatcacagggagaacttactgtcattaaaccagtatgatgatggagtggggaatgcctcagtttctcccaccgccgagggcctataggactacagttcccagggccccgtgctgcaggctagcggcctcccgccaatgctggccagtaacctgagcatccctctccaaaaggtcacttcagggctccttgagggacagcaacagggggagcctagagctgctcagcttcggtgggggtggagtgagggctgtggccctgcctcacacaacctccctcacaccacccctgcaatgcagggtcgtgggcccctttctcaaagacatccagtggcctctgctagttgcacctcttccgtcaggggacactgacttggctcctgcaccacagcctgcagggggtcctggttccttttgccacaacacatggcctcccatcctggttcagccactgacagacagctccccaatccagcactctgcctgctccttcttgtatccaaccctccaaaaggcagggacaagggacagaagaccatgtgcaaggcctggaggaagtgggtcagcacaggcctgtgaacaagccaggccagtcttggcggcccaagtggagctcacctctccctcccctctcctctcctccccttgccctcaaaatagctccctgagctgccaggccaagaccctcccattgcaggggaggcggggcgtgctgcccagagccaggctttaaatccccttgaggctggggagctccactccttggctggaggcagtgctgaggccgccgtcccctctaccatcagtccagtccggcccgccctcctgcagccatgtcccggcccctgtcagaccaagagaaaagaaagcaaatcagtgtgcgtggcctggccggcgtggagaacgtgactgagctgaaaaagaacttcaaccggcacctgcatttcacactcgtaaaggaccgcaatgtggccaccccacgagactactactttgctctggcccataccgtgcgcgaccacctcgtggggcgctggatccgcacgcagcagcactactatgagaaggaccccaaggtgctgctggggagcctggggtgggggtatgggctgaaggcgctgccagggagctggcgatcttgacttaagtggctgcccctcgtcactctaggttcttgggggtggagaatccaggggtgccaggcacaaggggtgctgggacaatctgagggagaaacctggggcaggagtgggggtcagggagctcagagcaggtgggctggctgcaaagggtcagtgcccactcggagaaggttggagtgggtgctggtgggcaggacggcgcctgtggcctggctgggcccaggtggaaggacacatcagttgctgcatgtatgcgcggtgtgcctgtgcagcaggcggggctggggcagctggggcggcagagatcaagtgtccggtggggtcactggtaaatgtcagcaacctgacacgcctcggtggggagtgggggaggggcgggcagacggcccaggaggggacccaggaaactgggagaccaggcactggcagcatcctagtttctggtgcctctgggtctccttgggattgaggcttgagggccaaggggaactggacagtgcaaggatgggaggtgacagtctctagcccagtctctagccactgtgtgaccttgagcaaatgacttttttctctgggggtgtgtgcagggggaag

SEQ ID NO: 65778 - DNA, 1048 bp, Homo sapiens
gcggcaaagtggcgctatgtgggttttagaaataaaatcaataaatgacttaaccacagcttagctatctcctccgcttctctcccccaggccagctccattcctgtgctccctccctttctgctccctgccgtcagcttttgttaaggttttggagaggaagtggctgactaaggcatcagtctccaaggtgctagaggccctgaaatggaagagacagcaggaaggcttggccctctgaaccgtggcaagcacttgcctctggcagaatcagagagagaaaggcctgcccacctgtcttaagacacctggggtgggaaagcaagccatttactccatcacattgtgacagggctgtgcttgccccaccccctctcctcacgttcatttctgctgctgtagcagcactgtccccgtccctcaaggcctggcaaggcctggcaagaggaatgccagtggggaaaggtcagcctcagggctctgttactgaggttcagccaagggctctggagaaacccaggattggtccaaggaaggaggccgggtttctagttagaaacttagacataaataacctcgagtgagttcaggttgtaaaagtgcttcagggttcattaaacctgcatacacaacaccaaggaggggcggaggaagcagggaaacagatgagatcgtgctgcccaggtgtgatcatgctgggctggggcatgcagtgtcaccccgggacaaagcctggaaacagtggggagtgatggcatgacaaagacggaaagaagccacagaaaaggtagttggagaaagttaaaaatttcccagtaaaaatgttcctgagagcaagcgccctgggtgcaagaggggagagtagctgggaaaggatggaatgaacttggccttccctgcctgtaagatgtggatggtctatggggatcgggtcctcagtggcaggaacataaagtcttgcaggaaataggggtcaatgcaaagaaggtgtgtgtggccaaagcaggctgccacgattgggctgtgaggtgacggcatggttaacaag

SEQ ID NO: 65779 - DNA, 2782 bp, Homo sapiens
accccctccgcccagcagcagtatggcttccagtacccccttgccatggcagcaaagtgagtagaatattttgggcttgtgggggtgggtgggatgggggtggggctgacaggaaccatagagcctcacacaagcaggcaggtgtcttgggatgagcccctgggctctgctggggttgtaaacagaaagggcctcctggtccagggggtggaggggcatcttgaagaggagagctgatgtttggtgtggttgtgtctggggagaggttcgtgggggcctggaggggagcctgctattgtaggtagggggccagaagtccagaccctcgcaggctgagtgagcggctggctggactgagcctggtgcatatgggtcgagtgggatggtgcatgcttgctctggcaagggctgcgattggggtgagagactgcagaggtgggactgggcagtggggagacagcagctgtggccttgaggttgaatgtgccgttcggtggtggcggcggctgggcggagggacatcagagctgttcttgtgtctggtaccttcccctcagcccttccaggggcattggtgacaaagggcttactctgttaagcccagagacctcgaggctgaccccagggtagtcctgcccacccctccactccccatcaccagccccgcccacccgccccccaccaccgtaccgcatgccaagcaaggagcaggcgcccctcgcccccatcccaaggcagcagccgcagacagccgcggtgtgcccccgcgcgtgtgaccttgggcttctttaccaccccagatacgacgactaccaccacgagcgctggcacagggtccatcccgccatggcaacagcagcaggcggctgccgcagcttctccaggagcccctcagatgcaaggcaaccccactatggtgcccctgccccccggggtccagccgcctctgccgcctggggcccctccccctccgccgcctccaccgcctggttccgccggcatgatgtatgccccgccccctcctcctccgcctcccatggacccttctaactttgtcaccatgatgggcatgggggtggcgggcatgccgcccttcgggatgcctccagctcccccaccgcctccaccacagaactagacttgttttttaagaaaatatatattatatatagagagaattggtctcgtttaaacacgccgaacctcaccatatggagccagacattgggacgcacgcatgtgattgtgtgtgcacgcatgtgtgtgtgtgcacgcactgggctgggccaagcgactgaggattcgcttgggaacgggcaggtggtagtaggggcgccagcttgggctctcctggcgccccgtagcatcgagtgtcttctttgtcttctttctctcctcacccaactccctttgcctctccccaaaccgggccgccaggatccctccccgcggcggcgatggcccgagccatgagagtgaggactttccgcgcccattggtgacccttccaggcagacagcctcagcaacgcccctggtggacaggatggttcggcaaagcagcctgagttatttttgtggacggaatcggaacacgctggctccatatcgtgaaatttttattaatttttttctttttcctttgttacttctttatcttttcctttcttcagactccgtccaaggagatgctctccccggtcttctgctgcaatttagattcctttcccttctctccagttctccttcccttaccaaggagaggggagcaaatggttttgggcaagggctttggccattcatgtcaagctggttgtgggtttttcaaggtgccatagccacccccaaagatgtttgtttaaagcgtggggttttttaatctctgccacccttgtcaagggagtcttgtaaagttgccgagggtaggttcatctccaggtttcgggattcccatccgtcctggcgatcctgccagcagtgggtgggcagcctgagctccctcgggctcgcctgccagcctggagttcttcctgtgctccttgatcacctgagctgcctcagattccatttggtcctctccttcctggaaggcttccttttatgttttgttttaatcccaaatgtctgaatgttttgcagtgtgtaggggtttgagccccttgttcattctccttcctttttcctcccgcttccctctccatgaagtgattctgttgacaataatgtatactgcgcgttctcttcactggtttatctgcagaaatttctctgggcttttttcggtgttagattcaacactgcgctaaagcggggatgttccattgaataaaagagcagtgtggttttctgggtctgcttctttattttctttttaatgcctgccccgcccggtttttcttttcacataaacttcctctaccaccagcagcagcagcagcaccaaaggtgccttaactttcgttcagcaccaggtccgggggggtgagactgtgggtggttaattagggaagcccaccacctgcctcctgtgtgtggctttggtggtgggagctcagtgtgtgggtggctccacagtctcccctttggtgactagttaacatcgctgagaaccaattttgcccctccttgttcactgctcatttttctagtctctgtcctttgaaggctttttcctggggctcagacgtccacgtttgatgagctccagtggtgatttgtgcctggaagctgccacctaaggccctgggcctggggaggcatcaacactaaaggtcaagccaact

SEQ ID NO: 65780 - DNA, 2532 bp, Homo sapiens
ttctgtgagaaggtgtcttaacttccccactagtgcggagaagtcaaatcctcaggtttactgtggctgaccataatatagagttcatggagctcttggtgggaaaatccaattctctgcgcttgtggtttcccaccaatgccaaattggtccagcctctcttccctcttgagtgtgaatttgtcaggtataaacttagtcatttctgcctctctagagggaacaccctgaagaacatagagaaggagtgcaatgccaagattatgatccgggggaaagggtctgtgaaagaagggaaggttgggcgcaaagatggccagatgttgccaggagaagatgagccacttcatgccctggttactgccaatacaatggagaacgtcaaaaaggcagtggaacaggtgagcggtgagcccagaaaggaagcctcctagcagaaacctaggtggaggccctaagcacttaactgtccattgcattttcactagataagaaacatcctgaagcagggtatcgagactccagaggaccagaatgatctacggaagatgcagcttcgggagttggctcgcttaaatgggacccttcgggaagacgataacaggtatgtgatcagtttaaaggagagtgtagagacctgaagaacctatggaagtagagattgttcccttgcattgacctctttttcctttaataggatcttaagaccctggcagagctcagagacccgcagcattaccaacaccacagtgtgtaccaagtgtggaggggctggccacattgcttcagactgtaaattccaaaggtgaggggctggctcttgcggtttcctggtagcctgcgatgtgcaggacaacttttctggcacattcattggttgctgttaatcttaccaagagaaacatcctttctgttagtgtggtctgtaatggtgtgatttaaagcccaggatgattagaaataggctgtacagatacccctgtttgtttgtcttgagcccaagaaaactggaagtttccattttgggtatgtttttactggggctcaataggaaattcactgcttttgctgttcagaattggttcaagaagactaagcaatctctacagatttctgaccagttgcaagtcagcactcgatatcaacactttctgactggctggcgaatatgtaaggttttgtttaggaagttcgttctggcagttgtgccagtcttgcatagattttcctttcctcaaactgggaatgaagtttgatgaaattgacttgagagaacctgtgcttcatcggtgctcagggtctcctgtgctcttcgcccaggggcccctctactctggtgatcccagatgcagaactgggcacgaaactgaagatctgatgagactgttgagagccatgcccagtaaggggttagaaagatgtgtgatgatctggtgattgaattcttcagaactttccatatgttggttcctcaggataaaagcttccttcttaacaagtttttcccctttctctgtttgtgtcccccaccccacttcaggcctggtgatcctcagtcagctcaggataaagcacggatggataaagaatatttgtccctcatggctgaactgggtgaagcacctgtcccagcatctgtgggctccacctctgggcctgccaccacacccctggccagcgcacctcgtcctgctgctcccgccaacaacccacctccaccggtgagcctgggggctggctctcttggtctggcttccccattctctactgcagagactgggagctatggccacgtggtttgggtagagcagacaatggatgtggatggcaacattgttcttccgggatctcaggccagtttggggacttctcacttcgggaagaccttgttcttgtgttctggtcctgtgtcataacccgaagaacaatgttgccactaggaggcgcaggcagggacgttggcaggaaatgctctcacgtagtctctcatgtctaccacccagagccgcccaccctggatgaattctggcccttcagagagtcggccctaccacggcatgcatggaggtggtcctggtgggcccggaggtggcccccacagcttcccacacccattacccagcctgacaggtgggcatggtggacatcccatgcagcacaaccccaatggacccccacccccttggatgcagccaccaccaccaccgatgaaccagggcccccaccctcctgggcaccatggccctcctccaatgggtaagtaagtgtcagaccagaaaccttgggggctttgggataagcaaggggttacgtcaggtcgctgttggctagaagcagctctcaagtggctgggcaatgtgctgggtctgcctggcttgccagggttgtggctctggaaggagcaagactccattctggttcagggagtgattctgtgttgggtaagcacagacctgccttttacaggcatggttttcagaactcgcgtaaggatagcaactgaggttatcacaggggtggcttccctggcca

SEQ ID NO: 65781 - DNA, 2055 bp, Homo sapiens
caggaagatgatgtaatggctttagaagtcactcactcatgcatctttcttccgccctttgccaggaaacattaacttccttgtttctccatattgactctttaatttgacttactacatttgctatattttacctatagatagattttggttgtagggttgtgttgtgtttcgtttctttttgaagattttttttttttttaaatttacattgtaggtcatagaccacaactgtttagtgcctttttggcctttttccctttaataatatgtctacaggtcaccagtcaattcctccaaaggttgaatttttaacaaaccttctttgcttcctggataactgggattagaatttagttgatctagccgatgcctgttggaggtgaagaagtcgggccagtctaacctctagaatactagcttttgcctttcacttctgcaatttgggaggaggttaaactgttgtgaggccttcacatggccaattgggtgctggtaagacttgtttttgtaactagctaagaatgcttaattctagacagctgtggggtgggaattagaaatgtcaagcatgttagaaataaaaccagagcagggtttttcctcccttctattcagttttgaaagaggccctaatgcctgattggttttgcttttgagcccaggttggagggaaatgcatgggttttcttaattaagataatttcttaaaaaggtgttatatcacttaagccactttattgttattttgatgctgcttaacttgcacagtaaaaacatgtttaaaacttttcttgtagacttaaatgtataagatggtagtctaatgagctggggtatgtttgcttttgttcactcttaatggattgtgctaacagtttatacaaatgctagaaacggaggtgtcatttagccgtcattagccatgaacaaacctgaccttttattccatcgtgtgtgtaacgtggtgtgacatggttccctttaggctgaagacagtgggagcagccgagttcagtccttgctctccaactaggcaaggttctctcaactaaaccaagggtataggagtcttgattactttcagtatgtttttttaataacctgatccacatggtctcttcccttcttgcagctgctactaaattttcattcagaatatcaagctatggtcctttttgtaatcttaactcaaaattctaggagtgtaacctctcttttttattaccgcaaaatccagctgtggtaaactgaccattttatcattacatttttttacttgtagcaacagcattttactccttaaaaaaatgagagagagaaaatctgctttctggacttgtaaactctggtggagaatcataggttttccccttgctgtttgcaggttcagaccctagacaagtatgaccaaatctgcatttgcagcctctcgcagaagctgctttagcactttaacgtttttctctacccagactccccaacctcgaacagccagaaaacaggttgtctcctgggccttggacacagccagccaggccattgaaggaaaagcaaagacgaagcgaaccatctctctccattgtgggggccaagtagctgcagtagccttcagtcccagttgcattgggttaaagagctcatacatactatgtgttaggggtacagaagcttttcctcatagggcatgagctctccaagagttaaccttttgcctaaacttggggtttctgtggttcataaagttgggatatgtattttttttcaaatggaagaaaatccgtatttggcaagaagactccaggggatgatactgtccttgccacttacagtccaaagattttccccaaagaatagacattttttcctctcatcacttctagatgcaaaatcttttatttttttcctttctcacacacaccccagacccctaacgttaagccagcttccatctccccattccacacgatcttgagtagcacacgttatggtcggttcctccgaagagtgttgtattagggtctgagaggcagaggggctgggaaagacttgtta

SEQ ID NO: 65782 - DNA, 1714 bp, Homo sapiens
cccggccagtattttctttcgataataatgggttttcatttcttcagggttttagtgtgtgggtgtggtatagccctgtggatgtatttaaagttagaaggaatctttggttagacacgcattaatcctatcttggagccagctcagttttaacccaacctagtaacatttgcccttattggagatgcctgctgaaaattctcagatgctgcgaaggtaaggaacaggtggttattccgcatgttgaagaaagctgctctggctctgcagttcccattatcttggaaaatcagctgtgtaacatttccctggcgtcactggcaacttttgtgaaaccctcatctctctttttcatgcacagcctcattggtcaaggcccgagggccaagtacattgtccttgaacacacattccattcttctacacgcctgctccccatatgaacagtgagcctgaaaacaaattcttagcactttatggttactggtttattaagatatgtggtttgtcatttaatatttgaataaatatttcatataattgaataagagctgcaggtattgggagacccttactagtacaggtctggttgtacagaaagagtatgtacaaatttctataaggtgttgaattttgttattaaatgtcttatttaaggaattttaaatgtattaatgaaaatgatctttgctcaattggtatttttccttgtcccatgttaattgggtctcattttgggctatgtttaacatttaatgaagaaaaaactcaattcttgccctcaagtaatttgatgggagtcgggtattggtgacgtaacatggtttatggttctgggtaccaatggtaagcaagccttggtggggaggaagaggtgaaacacctcctaataattgcttggatgttagccttagtgaacagtctttattgctaacccctcttccaacaaactgtttgcttccttaagtgataaccattttgaagtgaaaaaaacctatagatgtaaaaggactcctgccgataggtggttgggggtttttgcttcaatgtgttcactgatcagtcgtccctttcaaagtctccgagttcttcatgcttgttgttgagatttgagatgtttattggtaacattgtcttttttccatccttttttttctttcctaacctggtttcttccagtgcaactgcagatagaagacctgactcgtaaactgcgcacaggagacctgggcatcccccctaaccctgaggacaggttgggaaacagttttaaccagctgacagtaacgcttttacctttttctcaatacgttttactggtggcaacatattgtgtcagttcaataaaatcatagtatgacgactgtaccctgaccactttggggattaaggtttaattagaaatatgtatggtcagtcaacagttagaaaattggaataaaacttaaaaatgttgggagaataaaaagttacaggaaaatggacaactggtttccaattggtaagcatgtagatcttaacctgatttacccacccttaggggacagtgaggtggcccgttaacctgccttttcagtacctgctttggccaaaagcccagggcatagagtttttctcacaggtacacagtgcagggactaaaaatatttttgagcatcactgaacttgagcaagccaggagctctggtcagctcattgctgcagtcttcctgct

SEQ ID NO: 65783 - DNA, 2965 bp, Homo sapiens
cgcgcgcggcctggttctagggcctcgagtgcgcacgcgcgctgtggggggagggctgggcgggcgggaggcgctctgtgcgcagacgcagtgaggtggccgggctgtgcggcgcaactgtatagactgggggcccactattgctgtccagtccgctggtgtcgggaacaggggtggcgggtgttcagcgctggacggggtgctagctgtgaatgccagcagggcgtgaaagcctcacctgatgacgtgcagcgactcccttctggtcttgaggaaccagaatgggaaccgtaccaaggatagctcctctgcttctacagcaaggcagggttttcatccgggagaggttggcatgcttcagatgatggttgggtctgatctttcttggtctcttttggggagagaattttagtttgtttttttttttaaatctgttcagtatgtttagatctcagtctgatcggctgccctgtcgctttgttttaaaaagcttttccctctgatcctgtaccccttgggaaatagaaggactcttttgtggcaaatgtagggagtttctgcctatgtacggggaaaggagaacttggctgctattgtataggttgttgaatttttgatagatccttttaagagttcagaccctcagtgtccaactggccaggaaaactgaatgctgatcttggctaaacttatgaagacaaaggtgatcttgttgaagaattgggcttttcccacttggtagggtgtaactaggtttagttgtggtccggcctctcgtacaaaagtgactggtgaggggagtggaggtgggtggagcccccagtcccatcaggactgctttacaaatctatgattcttcagtgtatttttgtctcccctggggatttcagagcactcatggttgatgtagtatctatctaacactctctgcagccatatgcattaagattaccacgtttatatatctgacagtttttctagacaaaagaaggtgaaatgttaacttgcctgaccaaggaccacatacccttgtagtggccataagctttaaatctctgatctctgaggtttgttttctgtttttttaatgtttaagttttaggttaagctctcagcttcacagtctgctgagtttctgtgtagtaccttaaatacccttagctgtctgttgataactacttgtatttacatcggatggattttgtctctgccttttagacttcccaagtaagaagcggaagaggagccgctggaaccaagacacaatggaacagaagacagtgattccaggaatgcctacagttattccccctggacttactcgagaacaagaaagagcttatataggtaaatatacgttctgcatccaaatgcactttgagattgttacgatttattctgagcaagatctgcattttttgaaagtttgagattgtagttatcttttttgagatgagatactttcacgactttggtatcatctgtcagtttttgcccagtgagttctgcatttgcagctccttgttttggtctgttcgtaactgcagtgttctccatgagtatcaggaaggtagggtttcacttaggagtaagaacagtccccagtccagcagccacccttttcagctgctgttcattgccagttgatgaggtgagtgtcatctgcctctctggacaggccccagtggagaacaccgcaggtactgtaaaccaagtacttttcacagcgtggcctttcaccataattttatatttctccccctaaaatgtggtcttttactttttataggtactttctgaaaaaaaaaaaatgacaaaaagtggttctgaaagtgtgtttacaatttacccctttttattttcttgaatttaagagtttaaccttcccttcaacatcttttctggtttggtctatggagagctgtcttaaaatgaaggctcttgtatttacttttaaagaactctgctgggaaagggatattgcatggatatggaatgaagtgctaggataaaaaggttttatttgctgggaggttttgagaattaatgactatccacagtggaattgaaattaacctcaaaattgcttttttggaaaaaaaagtttttaatgcaagttttatctttatatacctgtgcagctgtctcaaaaaagttcactttataaacatttcctactaaccaaataaacatcccctttggaggaaattcgggcaaagacctcctaaacctacgaggctgtggccttcacaaccaaaaagcttcaaggccagcatgttactacttttgagggtcttaatttcctgttttttagactgctgagaattttgaggcgttggaattgtctgtctcctttcacagtactactaatacttgttctttcccctactgttcctgtctactcccacccattccattgtgtctcatattagactagtctgggtctttacatccttgtgaaatgcccctagtggagtgatatcccaagaacacaagcatacttagaagatgggaagagcacaaattctttatatctccatttctgtttttgtggagggctagttagttcactgggccctaaggactatttatagctataatcaaaatagaatcaaaggagaggtgtagttctccacagaagagaatgaccctttttatttagatcaggccccacatctccatagtcagctaggaagactcaccttctcccctcagtgaaggtgactttcacctcgagttgttgagcttaatactcaactgcaaagtcagaactttttaggcataaaggagcttggggaaccatgtgtcttactacttttctgtctcccacggtacatactgctttgtccaggatgccctcaatatctttttttttttttttttgagagactgagtcttgctgtgtcgccaggctggagtgtagtggtgcgatctcggctcactgcaacctgcgtctcccgggttc

SEQ ID NO: 65784 - DNA, 1034 bp, Homo sapiens
gaaaaaggctggaaccagcgacagccaatcccgcgacactacaacgcaggcgagattgattgagtccaccaccgcagccaatgagagagctcgccgtcgctccgtcatagagttcgccccaccccatcccctcctttctggactcggagctcagttcacgcagtaacaaatgaagtgcgcgctgcgacacctcccagcccaccgaactccgccgccatttcctcgcttggcctaacggttcggccaatcccagcgcgcatcaagaaggactgaggctccgccaatcggaggccgccgatttcgacccttcgcctcggcccggcccaatccaggccccggccccgccgcccccggcccgcccccgcggtgccctctctcctccctctttgtgcgtctcgcgccgccgccgcccgccgcgtgagaggacgggctccgcgcgctccggcagcgcattcgggtcccctccccccgggaggcttgcgaaggagaagccgccgcagaggaaaagcaggtgccggtgcctgtccccgggggcgccatggcgaccggagcgaacgccacgccgttgggtaagctgggcccccccgggctgcccccgctccccgggcccaaaggaggcttcgagccgggccctccgcctgcacccgggcctggggcggggctgctggctcccgggccgccgccgcccccgcccgtgggctcgatgggggccctgaccgcggccttccccttcgcggcgctgcctccgccgcctccgccgccgccccctccgcctccccagcagccgccgccgcctccaccgccaccgtcccccggcgcctcgtacccgccgccgcagccgccccctccgccgccgctctaccagcgcgtgtcgccgccgcagccgccgccaccccagccgccgcgtaaggaccagcagccgggcccggccggcggcggaggaggtgagtcgggccgagagagcgcgagaggcgtcgcgcggacgggcccggccgcctgaggggcgcgcggcggcggcgacggcggctgcacgc

SEQ ID NO: 65785 - DNA, 1013 bp, Homo sapiens
agagcacctactaagagcagcgggcctgtccaggggctccccgccccaccccacgccttagctgcaggcccttttgggcaaaggggcccatcctagaccagaggagcccaggccctggccctgctggggctgaaggtcagaagtaatcctgagaaatgtttcaggcctggggagggaggggagcccccgacgcctctgcaataactggaccagggggagctgctgtcactcccccatccccgaggcagcccagtccctagtgcccaaggcagggaccctgggcctgggccatccattccattttgttccacatttcctttctactctttctgccaagagcctgcccctgcatttgtcctgggaaacacggtatttaagagagaactatattggtattaaagctggtttgttttagtcctctggtccctctgggtagggggagtgaacccacctcatctcccgcctccttccctccaacacacgtttctgtgggcaccacagaagggcagggcccccagggttttggagaagccaggtagaggtgacaggaggccatggcccccagcagccttctaggggcactgtgccttcccctgcatccttgctcagaactgaccctcagctttgcagtttgagggctctgctgtagtttagcaccccaaggactcatgcagatggggggacctcaacaaagggactctcatccagggcacccttgccccacgtaggatctcactgggtgacccctggaagggcccaggaggagcccccagagggctgttccctccattcccatggaggctgctgcccatggaggtagcctgtgtgacctgtatcccctgcctccacctactgcctaggtgttagaccaggaacatcagatgacagcacgatcatcagattggatgggaaggctagcctgtgtccgtctaccagactcccaagggctgcctcagtgccaggccctggggtcactaccagaaacagaccagcccccagggagggcgtcctcc

SEQ ID NO: 65786 - DNA, 1025 bp, Homo sapiens
ttccagccgcccaaactgagagataagactcgctggtaagggccacaccctgctgccgggacccccttttctgtcagccccatagtggacaaacagcctctgccaactcccggggggcaaccccaagagccctgtcctttctgggctactacagaccatctgagtcaggggcctggtccttctgtgggttgaagacccagcgtggtcaggaaagaagggcagagggttggtggaggagccgctgtgtcgcaaggcagcgttgctcggccagtggcccttggcctcggctggctccttcctgggtgggcccagcagacgcctctggaggggtggtagggcagctggcaggacaccctgcacgagggctaacctggatctggcgctggggggctcttgtgccttctaggacccagaatttccaccactttctcaaactggccctgaccaagaatcctaagaagaggccgacagcagagaagctcctgcaggtgggaggcagggggccgggagagaggcccagtactcaaaagcagggccctggatcaggggccaacctgatcacccccctcccccactttccagcacccgttcacgactcagcagctccctcgggccctcctcacacagctgctggacaaagccagtgaccctcatctggggaccccctcccctgaggactgtgagctggaggtaggtgaggggggctggaaagtgagtcttgggctggtctgcttagaaagagcccgagggtgatgttggtggaggtcctttaactggcaccattccagctcagggagctggcctcagctgagccctcccattaggagtctctgtcatgctgacttttgtttcctgtaccacccccttgataggtccctgcccttgagtccaagctgaccatgaccacgactgtgccattttcttgctttctgtgtgatctttggcactgctctgtgtgggttctctcatctgtgaagtggggttccattttattttacagtagtcccagagggctgtcatgaaag

SEQ ID NO: 65787 - DNA, 1002 bp, Homo sapiens
gccccgaagcctccccctatcccctgaattggagagctctccttgatgccctctgttagggcccaccccaatcccagggcagaaggacatgagggagcaaagagcttgaggaatgccatactccggctggtccgggacatggaaattcggactcagggaggacccgggctgggcaatgactgggagacttgcctgggttcccaggacttgggggtcctgactcccagccctcatcctgccttacccctctgttcccagccccagcctttctaagccattgggaatagaatggccccttttgttctggtgtccaggggtgattgtgccaaagctcttatttccagtgccaagcccccagaggcttgtaagagttgggatgagggatggagagggactgggtctctgggaacaggttggaggtcttatctgtggactgtctgactcccagctgaggccaagatggggcatgtccccgtctctgcttagcgtctgggtgagaaaaacaggctgtgatccagaagaagggaagatagagaaggagggaaaggatgtaggcgaaggaggtgagagacaggataggaggaaggaagtggaggaggaggtgataggaattggaaggaggtagaagccgtgcagaggaagaggggagagggacgaaggaggagcgatgaagaagaggagggagacaaaaagagggatggaggagagagggagtctggagaacaaagggtcctttctctggggaggggtgcagtgggcggggctgacactgtcagccaatcctcccatcggggaagagaatcctggacagggacaggatggggagggtatttataagggctttttggtgggagatgggtacccagtgggggccactggagggtctccgggcacactctggcccttcccagaaagggggtcgtttttctcgaatcttcaaccagttgtgtattggaaactagggcgcattttactattgatcacagtcattatattgttatt

SEQ ID NO: 65788 - DNA, 1037 bp, Homo sapiens
gcacgtgtggctgtgtggccctgaatgccagctgactgggccccgggaatgtgtgagcacagcccagctctccacttctcccacagagaaggacgagttcgacatcccggacctcaccgacaacagccggcgccagctgttccgcaccaagagcaagcgccgcttctttttccgcgtgtcggaggagcagcagaagcagcagcgcaggtgcgcgtgcacgacgcgggggctgaggctgggtggggccgcctccgcttgtggacgggtcgaagggagggtggagcttcgccacccactacttacacctccgcccacagggagatgctgaaggacccttttgtgcgctccaagctcatctcgccgcctaccaacttcaaccacctagtacacgtgggccctgccaacgggcggcccggcgccagggacaagtccccggttagtcctctggagccaatcacaagccactttggtgaggctgagccaataaccggcctctgtggtgagctctagccaatcacgggccgctgtaattactcctaaggcctgggactcacacttctgctacctgggacttaagtaaaaccaggctgggggcccagtggcgttcatttgtcctggtctgttgtgccttgggcctcttgtcctccttgtgcctgctagtcccagcccctccgcactgtcacccaacaggctcccgaagagaagggccgagttgcccgcggctccggcccacagcggccccacagcttctccgaggcgttgcggcgcccagcctccatgggcagcgaaggcctcggtggagacgcagaccccagtaagggcagcccctcagcctccagtgtgccaccccccaccccaagtttctaccccctttggatccctgaaatctgatcttggtatttttgtctcctcgtctgctgctggagcagtgaagaggaaaccctggacatccctgtccagcgagtctgtgtcctgcccccagggatcgctgagccctgcaacctccctaatgcaggtgagcgggtccgggaggcttg

SEQ ID NO: 65789 - DNA, 1246 bp, Homo sapiens
aggtcaaacgcctcactctccctgcctgccatcccccagggatgtcaagccagacaacgtcctgctggatgtgaacgggcacattcgcctggctgacttcggctcctgcctgcgtctcaacaccaacggcatggtaaggaccccgccccagagtgggagcaggggatacaaggcgggccaagctctcaggaaaatgggaggccccaggcctagtgcagaggcatcaggccccccggggaaggtgggtgagacccaggccccaggtgggcagcagcaggccagcctggcagagtaggggtgacagggccatcgcgaggagccagcagtcccagccaagcccaaagctgtcctcatggcttcaccaccaccacccacaggtggattcatcagtggcagtagggacgccggactatatctcccctgagatcctgcaggccatggaggagggcaagggccactacggcccacagtgtgactggtggtcgcttggagtctgcgcctatgagctgctctttggggagacgcccttctatgctgagtccttggtggaaacctacggcaagatcatgaaccacgaggtctggacaccaggctctgggcttccagagggggcagtgggacccctgagtctgtgtggttggaagtaccggcaggtgaggctgggttcctggacacttgacccagcctgccccctcccccgacccacaggaccacctgcagttccccccggacgtgcctgacgtgccagccagcgcccaagacctgatccgccagctgctgtgtcgccaggaagagcggctaggccgtggtgggctggatgacttccggaaccatcctttcttcgaaggcgtggactgggagcggctggcgagcagcacggccccctatattcctgagctgcgggggcccatggacacctccaactttgatgtggatgacgacaccctcaaccatccagtgagtggcaaaggccactgcaggaggggagctgccctacccccttgttggctgggggaaccctccctctgaagtcccctggggtgggctgggggtgaggccttcagacaccggggcttatgatttatggactcccagactgacccgttccagccaccatccgctggcccagcctcttccagccaaactggggtgggggagcatctcccacaggctccccatgcttgcctgcactgaggtgggctgtgtcaagggaagggcctctgaccacaggtatcattctattaac

SEQ ID NO: 65790 - DNA, 1010 bp, Homo sapiens
gggtgcaagggattctcatgcctcagcctcccaagtagctgggattacaggcgtgtgccacgacacccagctaagtttcttgtatttttagtagagatggagtttcaccacattggccaggctggtctccaactcttgatctcaagtgatctgcctgccttggcctcccaaagtgctgggattacaggcctaataaacccttttgaaagcaagcagagtcgttcccattttccatatggtcacactgaggcccagagctgtagagcgtgggcttgggctcagtcgcagccagacaggggacagtagagctatgacctccatctgagctcccagactcacagaatctttctccatcccctgagctggcaaggggggcatcctgggctctgatcccaccccaccccttacttccccaaacctgctgcagacagcctgtttccgggaggagcgggatgtgctcgtgaaaggggacagccgttgggtgaccactctgcactatgccttccaagacgaggagtacctggtgaggatacgtggcggggctggaggggaacatcctagggacacaggagagggcccttggggccaggggcactgggcccaaagagagacccctcttgggaccaagagactcccacttcccaccagttcctgggcttggcgcctcctgcctgagccctggctgggaactggccagcccagagctgctgggagatgcaggcctgccttcccagagccctgcgggaccgcggtgaagtggccaggtgcacccttcccccgggtctgattcttgtccgccacctccagtaccttgtgatggactactatgctggtggggacctcctgacgctgctgagccgcttcgaggaccgtctcccgcccgagctggcccagttctacctggctgagatggtgctggccatccactcgctgcaccagctgggttatgtccacaggtggggccccaaccccgctgccctgcccaaccccgctgccctgcccaacccctg

SEQ ID NO: 65791 - DNA, 1572 bp, Homo sapiens
agatgtgccagggagttgtcccctagccccaacccttccatccagggcgaggcagtcagaggcccctgcctctgtgcctgtctccctggtatgcctccgtgctatgcctgtctgcctgtgttgttgtcaccccccccatgacacccacacacgtgtgtgtgtttgcacacacatgtgtgctcctccctgactgcctccagcacctctgcctgggaccccggcatgggggccctctgttgacaatctcccaaggtaactcaaagggctgtgactcattcctctcctgcttgtctctacttgtccctgctcctgcccggagcccccatgccctgtgggaggccagaggattaggcagcctgtccaggggcctggatcctcctgcctgtgggcctgggcttcggccctcttctggcgggtgggtccctatggtgctggcttcaactcccacggggaggcccggggctgctcctccccagctccacacacagacctgggaaagagacaatgaatttctgtaatgaggtttccaccccgcccccgctgcgggcttctgcctgataaacctgtggaacagctctctgtcccacccacagacccgcccagctggcagggagtttacctcctggcagggggaaactgaggcagggcgccagaccacagctgccccccatcctgactgatcactcctgcctccctaagacccaattccttcccaaaacctggggctaatccaggcctggaaagtgcctgggagtggctggagttgcccttcctggaggtatctgggatgtgaggaaagaggacgttcttgaccagacaaaagcttcgtccagacagggaggcagggctgggagtgagagagccggtcaggcctggaggcatcctgagcactcacgccttcaggggctagtgctagcaccagggaaaggcatctttgtcctgtttgtgagtctcagcaccttggcagactggcatccatgcctccagcctgaggggccccacgtgggaagcatagagcctgtcctccctgccctaggggctgcaggcctcacccccaaccaggcacctctatgcctacagggtcccgggacccaggcccacagctcctgaatgggagagaagcctctctggggataaggaatgtcacccgtccagtttcctaagacaggccctggcctgaacctgtgagggggccaagaactgtgaggtgggggtaggaatggtgtccccatggtccccagggtgacctggccaagcagagtcaggccgcagactgggcaggactacaagtcccatcagcccctgggatggaggctgcctagagtctggggccaggggtccagggaggtccagggaccaggcggtcagctgagcccggcctctgaccttccgcacttcctgatcatggccaaaggagcaccagttcctgccacaaccccttggcccgaggctgtccctggggaggtcatccctgcctgggctcacaggagcggcagctcctggcttgcccaaggtgagagggggaatggagccctccctccctgcactctgagtcccgccctgtgtcccctc

SEQ ID NO: 65792 - DNA, 1927 bp, Homo sapiens
aaagagctggaggtgcctcctgtgtacaggttagagagccaagggccagatggttttgccgagtcgcccctgctagtgtgggggagcagcactttatgcttgtgaagccctgactggaaccacttggcctggagtctgggaggggcctcccttcccagcccttgtccttcctcccccgcccacaggaactcctgcagacccaggacttcagcaagttccaggcgctgaagcccaagctgctggacacggtggatgacatgctggccaacgacatcgcgcggctgatggtgatggtgcggcaggaggagtccctgatgccttcccaggtggtcaagggcggcgcctttgacggcaccatgaacgggccgttcgggcacggctacggcgagggggccggcgagggcatcgacgacgtggagtgggtggtgggcaaggacaagcccacctacgacgagatcttctacacgctgtcccctgtcaacggcaagatcacgggcgccaacgccaagaaggagatggtgaagtccaagctccccaacaccgtgctagggaagatctggaagctggccgacgtggacaaggacgggctgctggacgacgaggagttcgcgctggccaaccacctcatcaaggtcaagctggagggccacgagctgcctgccgacctgcccccgcacctggtgccgccctccaagcgcagacatgagtgatggcgcccggccccgcacctgccatttgcacgcccggccgggaggcagagacggggggaggggaagcctcaccatttctcaaggtccataaagactgagcggatgtttcctcgcctctcgaaaaggaaaaccaccatctttcttttaaggctgttcctgggcctggcgggggaggcaggggtgagaggatggaattgtgtgcacaagaactgtggctattttaatatataacgttagaggctgcgttctttgtcgccgcctcccctgtgtgccagccctgtgtgcacggcctctgccccccggcctttgctgtggctggagctggacagtgcagcgactgcgaccgtgggggagccaggtcgcccttttggcagctgctaggctgaggctgcatggacaggaacaccaggcaccctccgtgtgcttctgagctgaggttgcttcacgggaccgtggcttccttcctcacctggctctgcctcccccgtgctctcgggcgaagtgggttcttgtgccttcccctcccgggcccaggctccccgtgcgcgggccctgccctttcctcccgcgccccaccggctccgacgcgcaaccccgctcagcagtcacagaagcagggcccagccaccttggtctttttttgggagttcaggggagtaggagaatgtcttccagaaaaatacataagctagtttctgttctgtaaagtgatatctttcatacttgaccaaagttcccaataacttcccaaccactgttcaaaagctgtgatttttgtctccccttcccaccctccagccaaggagcagccctgcccagggggcattaggtgtgggtacccggggagcaccccgttcctggaccccagtgttgcatttcctggctgaggaagggtggtcatcccagctcctgccctaccctctcacttaactggagctttgggacgcaccctccacagtgggaggtggtggtgggtggcggtggcggggcctcacgacagcttggtgctggtaagaggaagcccgtggttctggctaggctctcatgtccagacagcggggaccaggggaaaacccagccccttctgtaatcccccttcatttcctaccttccttcctcctctgtttagcaaaggagggcagctcacttggatgtccttacaacgcccctggcccccaggttgagcaataagaaaccagaaccttgcggcccagtgg

SEQ ID NO: 65793 - DNA, 1209 bp, Homo sapiens
aagcagtcaggatgcagccaggctctgtcagggacccctgaggactgcctcagggacgagaagggggccgggttggggtctcttgggctgcctttgcctgtgtgctaatctgagtgactttaaagataccgttctcctgtgtcagcagagaaaggtggcctctgggggctgcgttcattcttgagtgctgcctgtgtgactgataagggcattccaaagggcagctgggtccggcaggggtggtgcccttggctccaggggctgccgaccagttgcgtggtcccggcagtgcctcatgccgagtcatcccccggcggggcctctgtgggcagcccggccagttcgttcgttccccaccatggtcactaggcaactgtgaactaagcgggagtttttgtgtctcaatctccccatgaaagctgtatcagcatcagcagggtagtgtttctacttgcagtagcagatcagagacctggccagctttgtgtctgactttctgctggccactgccacatcagtgagttccattgagttatcacagcagctgcatctaggaggaagctcctgcctttcagaggaggaagcagaggcttaggaaagttaagtaattggcctaagatgacaggcaggccagcaagtgtcggcgctaggatttgaacccaggtaggggctgtgctcctactgcggcggagctgagaagggtgccttggcatgaaggctgtgggcgaaggagtgccgggagcttgggtcagacagacctttgcccctgttgggtcattactgtggacacacagtaatgtgtgtccctcctgagacacacagaggccaccctctgtttctctcccacccaaggttagactccagtcctgaaatggacctgaggtctggggctttgaacagcagtgctggtattgtgttccctgttcccagccataaatgatcccttggggtctccagggagcctggtggcctgggctctcgtttgccctctggtggtctgcaggctccctctaagcctgggagctgtcctgatccttagtggttggatggggcctccctgcccacactcccacctgtgtgtcctgagccctccggcccagaggcaggcctgcgccgtgggccgcccccacttcctgccgacacctcctgagatggagatgccgctgccagcagcacccccaggctgaggtttcaccagggtgctccgaa

SEQ ID NO: 65794 - DNA, 1112 bp, Homo sapiens
aagcccagctcctcactcccacacctcaggagtcaaacatcgtgcccaaggccaccctcctgtcccctctgctgggcgaacacctccctcctccatccccccaaattaaagtctctttgtaggtcacttggggtggtacatggtggtcccccagcccgcctgtctgccgacactcagtctccctccccgtcctgtggcccagctgccacattcctctcacctgcagcttctttactgtgcccttaagtacagaacatggtgacgctccatctgcaaggagactggagaccagaaccctcccctgaggcccacgtctgcccaggcaccatgcttgctcctagaggtacatgttggggtgtccccgagggcaggaatatagtgggaccctctcagaggtggggtcaggcctccgtctcctgctcacccaacctggtcccctgccccttggctccatgtcctgtcccagaaacacctctcttgccctttggtcatcattaagcagaatttcaggatgtctgcaagatcccccacccctggtgtacatatccagtgtaatgctgggaatgcggatctggtgacttactccatgacatgcggtgttagatggtgcagtccactgtacaaagggagataatcccagtgggccccccagctcactgagccctctgaaagcagagctggctggacagtggcttacacctgtgatcccagcactttaggagactgagggggtgggtcacttgagcccaggagttcaagactagcctgggtaacatggcaaaatcccatctctacccaaaatacaaaatattagctgggtgtggtggcatgcacctgtagtcccggctactcaggaggctgaggtgggaggatcacctgagccagggaggttgaggctgcttcgagccatgattgtgctactgcactccagcctgggggacaccatgtggaaaggaatgtgggtgacctctaggagctgagaggggccccagcagaccaccagcaaggaaacggggacctcagtcctatggatgcaaggaaccggattctgccaacaagaatgagcttggagacagattccttcccctgcctcccggtgatagggcagcctg

SEQ ID NO: 65795 - DNA, 1247 bp, Homo sapiens
acaagtagggtggaccctttgtctctggctttctctgcccaccaaggtgtgtgtggagtcgggggcacagctctgagccgacctgggcattggggaagaaataggaaaaggcagcagtgatgacccccctaattccccatccccctccaggtatctatgaagatggagggaagccacctgtcccttgcctgcgtgtctccaaagccctggaccccaagagcactgggcgcaagtacttcctgccccagtaagtaggggctctggactgggcccaggagaggagggttctgctgggggtggcagggggccagtttggaactgggtgccgggggccctgcaggccagtaacaggcctgtgccccggcagggtagtggtgactgtgaacccccagtccagcagcacacagtgggaggtggccccggagaagggagaggaactggagctgtcagtggagagtccctgtgagctgcgggaacctgagccctcgcccttctcctctaagaggaccatgtatgagacagaggaggtgagacttggccccacctcttcccaggaccccctcccgcccaccgcccgggttcctgccgtaggagccacctgtgtggctgtgggccagggcagcacgaccacctggggtgggcatgagctgacccaacaccagtgaggatttcggctcttccattctttccagccagtcagagagtctttctgaaacggcactggtgagggcaggcccctggggagcatgggtcctcgattggaaagatcaggtcctgccccacctgacccgtggatcagcactgtacacttagaaaggcagttaagggccaggctctgccacttggtgactgtgtcatcaccctggggagttatctgaccttgaagagttacctatagatgagtttcttcccctggaaaatgggcaccatgacctgtctttctctctttttttttcttttttttttgagatagagttttgctgtgtcgccgaggctggagtgcagtggcatgatctcggctcaccgcaacctccgcctcccaggctcaagcgattctcctgcctcagcctcctgagtagccgggattacaggcgcgtgccaccacgcccggctaatttttatatttttagtagagacggggtttcatcatgttggccagactggcctctaactcctgacctcaaatgatcacccacctcagcctcccaaagtgctgggattataggcatgagccaccgcacctggcc

SEQ ID NO: 65796 - DNA, 1022 bp, Homo sapiens
accatctgtgacttggttccctggggaccaaacaaggtgggagctggtgatagagtggacagagcctaggtttttcagtcattgatcttagtcaagcacttgaactctctgagactcagcttcctcttccataggaagagaagggtgagatcagcctttgccaggctgtatatctgggttcatgtttattgagagcttattgtgtgtgggtgctaggctgggtgctttatcacatcctgtccttccagcaccctgaggagggttcagttgagcctgggcagaaggcctggtctactggaggcaccagtgtcacccctgcctgaccaagccttctgccagagccacatggtggggcagacctggcctcccaacccccagcctggtggcaaactattgctccacctggggtacccggaatctgttgggagcccctgctgaagcctctgtcccctcaggcaagatggcccccaaccccctcctggacaccatgcgccctgactcgctgctgaagatgaccttggggggtgtgaccctgaccttgcttcagacgtctgccccatcttccggaccacctgacctcgccacgcactttttcaccgagtttgatgccaccaaggatgggcccttcggttcccgagacttccatcaccttcgaccacgcttccagagggcctgtccctgtagccatgttcggtataagcccgaggccagggcctgaggagagaccatcagagccccctaagtgcaccttctgacgcctgtcctcttccccgcaggctaacgggcacagccgtgcagctgtcctgggagctgcggacgggcagtcggggccggcggacaaccagcatggaagtgcacttcgggcagctggaggtgctggagtgtctgtggccccggggcacctctgagcctgagtacacggaggtgagggcagaggcagaatgtgtacgaggcggggtctggaggtttgggtggctgtggggccaggcctgaccctgtgtgcctcccgggtcccatcccag

SEQ ID NO: 65797 - DNA, 1050 bp, Homo sapiens
ctgggcctcatgcatgaccacaagcctgcagctggcccaggagtgtctgcgggatgggctaccggagccctctgagccaccacagcccctggaggggctggagatgtttgcccagaccattgagactggtgagcaggcccctcctggccgccctgtctcctgcccttcagtggcacacagaacaggggctccagacaacggcacggccaccctggtgcccagatgggaaattctgcctcccctttgctgctctacctgacctgagacccctccccaactcctcagtgcttcggaggatcaaagtgaccttcctggacactgtcgtgagggtggagcactctccgggtgatggggaacgtggtgtggccgtcgaggtccgtgtgcagaggtaagggcaggccgatctggggtggactggtgtgaagatggggagtgggggctgctggatggtccccacccgcagcctaggttcctgggaagaggcagggtggatctggatgggcctcggtggtggtagggttggggaggtgggctgcatcgtgagcccggactggtgtccagaggccaggtgatacaggcccagagtggccgaggccccaagaaccaagttagatgctgagggtctgaggagcaagggctggcctgagcctccgggctggacatggtggttcaggacggcctaggtgtgatggggcagctctgcaggctaggctccctgaccccgtgcccctagagcagagcactgtgtggagagaggggctccaggcctggggtggccagggcacgggctgaccctacactctccagactggagtactgtgatgaggcagtgcgggacccaagccaggcgccgccggtggacgtgcatcagccgcctgccttcctgcacaagctgctgcagctggcaggggtccgcctgcactacgaggagctcccggcacaggtgagcgggctctgattcccacagcccctgtctcctctcccttgagcccattgagcccctcccatcctttctgaccatctctgactccattttctcaacctttccct

SEQ ID NO: 65798 - DNA, 1044 bp, Homo sapiens
tgagtgattttgggcagatagtcaaccccttctatgcctcccatcctttagggggtaagaaaaagaaatgagaaagtacatgaggagtacttgaagctctggagaacaaagacactttatacaaccaagataattactattaaaggaacattttcctcgctctctaccctttgtatcttcctattcttagtttgacacatcatctccctcaagaacagtacccacagcttcttactcaacataattaccttttcaacctgattctggctttagaaaaaactctagtaaaaggaacatgtttattgattttgactcaaggcctaaagacattcaccatcatggaccctgttcccaggaagatgatttctcctaaattaaggtgatcacagtgactctcagtgtaagtcacttgagctggaaaaattgaatttgctcctatggtccattgcttaatatgttctgccccctttgcagggagttagggtgtaggatcacagtcactgtgcatgtgcgtgtctgaacacattgggagcctgtgtggcgaaagcttagaagaatataacacgtacctctgtttcataagaagtgtttagggacaatgggaaggaagagaaaacccccttgcctttgttacttcaggtcccagatctagagatccagactttggaaggataaaaaatgggagggagcagatgaatggcccagaaatgaaacagagtaactgcacgtcgcattttgttgttgttgttgttttgctatatctgttcgaactgcacttgtaaacagatctggtcctgaacatacggaggacagtcttgcatcaggttttcagagtattatgttctgatggaggtcccagatgataccttcagtctgaattccagctataatgttttctctctcttatgactttttcttgagaagacatctctcaagattttgggagatcacaaaaaggctacagtgtcttgtgaggagacttttccctggttcagcggtaggctgtacctctgtcccagggcctttgccctcctgttcctcctc

SEQ ID NO: 65799 - DNA, 1049 bp, Homo sapiens
actttccgctctgtcagaggatgatgccgagggcccagatgagcaggatttggactgtgttgctgggaacgggggcctacactggccccaggatgagttcgtccgtacctgggggccctgggttctgactctcaggtcagacgcagccaagatgcaactcaggaacttcaaggtttccgctccggccaagagccccagtccggcaggggaaagggtgggggagtcgcccttgctcccccagcctcagccctcgggaggcgcagcgtcagggcgggcggcagcacagaaaccccccgcgccgctagagggaccctcgcagcagctgcgcgggcgacctcgcggtcacgtgcggcaagggcgggaccaaacgagcgtccggccaatcgactatgccgtcggcgagcgtgatagccaacaggaaccgggagcggggtcccgggactgggaagaaacggcggccgggagggggctccggggaccatggggctcctgaccattctgaagaagatgaagcagaaagagcgggagctgcgactgctcatgctgtatcctaccggacgccggaaccgcgagggtggcggggtccagccgggcaggcggtgccgggcgccccctgtcgggagcggaacgcggcggccggcgcgtcccaactgcccctggcgtcaccacgcgggccccatcaatcgccccgtcgggccgggaggagccgcaccccaggactggggcaggggccagctccgagggccgcagaagcggtcctgcaggcgcagcggcggggctaggcggcccgagtgtcaggggtggtgggtcccggagataactcggacgccaccacccggcggcctggcccaagcgtggggccgctgccctcccggctctgatctcctcccccgggcccgagggttccaggccccggccccgccctcgagctccgaatcccgggggcgtgcggggtggcgggtggcgcgtgtgggctccgcggatcctttcgagcgtggatccaacagtccgtctctttggtgttacgcggcccgtggttgtccctgcgg

SEQ ID NO: 65800 - DNA, 1139 bp, Homo sapiens
ctatgtgatatcagcaggttaacctctctgagcttcagtttccttttctgtgggaattctagaagccacctcacagacatggccaagattcagtggagataatgcccacattttgcagctcactggaggtacaccttctcccacttcccatcccaagcctgtcacctctgggctttgttcccccagagcaagacttcagccaggatctaccccacctaccacacagcctttgacacctttgactatgtggacaagtttttggacccgggtgaggagggagacaaggggcatcctgagaccaggacaggagaggctgaagactgagccctggccttgtcaccttgccgcaggcttcagcagccatcaggctgtggcccggacagcggggagtgtgattctccggctcagtgacagcttcttcctgcccctcaaagtcagtgactacagtgagacactccgcagcttcctgcaggcagcccagcaagatcttggggccctgctggagcagcacagcatcagcctgggtatgcacagccctgaccctgaggtatggggagccctgcacccccatgactgagccactgcttgttcctcacagggcctctggtgactgcagtggagaagtttgaggcagaagctgcagccttgggccaacgcatatcaacactgcagaagggcagccctgagtgagcaagggcagcgggcaggggctgggagggcagcacccagggcaggataccaggctggtagctgggctgctggctccagggtgactggcagttcctgcctccccaccagccccctgcaggtccggatgctcaatgaccagttgatgctcttggaacggacctttctgaaccctagagccttcccagaggaacgctactacaggtgagtctgtcccagagtcctgggaggtgcctccaggtggggccggacaatggctccccacctgagacgaggtggtcagcttctctgccctttagagtgcaacccagcccctgaagaagatgggaatgtaaggctcagggaggggaggaaagttgcttgagggtccctctgggagctaggactggaacccacatttcctcccccgaccgccactgctgtaagagctccctggccttcagagacaagtg

SEQ ID NO: 65801 - DNA, 1026 bp, Homo sapiens
tggacatcggtgaggtcctgcccagtcttgggaatgcccgggggtggggagctgctgggcccagccatgatactgccacccctccaacagtgggccccactgggggcatcatccactcctgccaccggactgaggagaacgtgaccggggagcaaggggggccagatgtggtacaaccctatgctgcctatgctccttctggaaccccacaggtgggcccagaaccccccctactgctctggcccagctcccttggttccacccagggttctccccaccctgacccagggaacgtgcctcaactggggcacagcgcgccctccggaatttactcaccgggacactccatcgctgctcctttcctccatcagtcattcaacaaacactagtggctctgctcaaggccaggtctgttacagggcacccagacatggaggaaatgaggggtgactgttcttggggagcttacaagctctgggtgaggtgggggaacagaatctaaattctccctcctgccatgcaaacttccaccccccttccccacccacacttcgctgggcccagctctaaggatcaccccctcttgggactagggcctcctcgtctatgccaaccggggcgcggaagaagactttaaggagctacagactcagggcatcaaacttgaaggcaccattgccctgactcgatatgggggtgtagggcgtggggccaaggtgagtggcagtcccccagtgcaggaggcctcggtgaggaaggggctgggcagtggactggaggaagtgaggggaaggggaaggagaagaggcagtgttgagtggggaaccaagccccagggtggggcaggaaaggcaaggtgttttcgggttgtcccaccaatgggctgtgtggcctcggatgcctccctgaccctctctgagctgtaggaaataaaggggttgagtacaattttcaggtttggtattccagaagtctaagtcctcctgtgaaatagttttgaatattcaacttaagtccctcctgttg

SEQ ID NO: 65802 - DNA, 1190 bp, Homo sapiens
ctgttgaggagcaagaacccaagggccctcaggcttccgaggagcggaacttggaggtgatgggaaaccccagggcctcctaaggcagtgggcaggggaggcaggagagctggagaaattcttcctgtatctgaatggaggcctgaacccccgtcgtcacacccagcttccagctgtcagggcgtccaggcccagctcctgggttcagggctgaggaatgggtgcaggggagttcagcgctggagggcctcctggacaggtcccattcatacctcctaccaggctttccctacagggtgggggatacagacgatggggcccctgaaagacagggagatggcaaggatggggggtgtgggaggacccaggctcttgggtgagcagccgtgaccctctccagtcaccttggcgctttctctgcaaagccaccttcctcagaacaactggaacccaccgtcacgttcctgtttacactcctgaacacctctgagcccactgagccaaaagaccctgaatcgtaaggctgcatgagagagagagagagagagagagtgcccatgcaggcacatgcaggcacgcacaaaactgggggaggtggatggtgtttctccccaccccacacccagaaacattcaaacctgggctaggactcagtcctggcccgtgcagagaggaggcccagagaggcctgctgaagccggggcctttggctgggcacccccacaccacccacccacttccctcatcccctagaccctctggcctgaccttcactacccacttgctccagggactcggagatccaggagtaccagttcttagatcaggaggactggggcccccagcggacctcaaaggagatcaggcagttgcagaatgactgcatgaggtgatctgggcgggcagatgggagcgggtagggtgacagggcttcccccgaccaaggccaggcctggctttcaggtcagggcccacgtggctggtgaacgggcattcaggaacccccacctttaattgtccaagaacttgaggagcgttcagtctgggggaggggcttgttctctggatgtcgggctctggagctggggtccacacaatcccatggccgctcgcccctctcaggtaatgctggggtcagagccccatctgtcagcaaaggtcctgaggtgggggcagggcatgacggaggc

SEQ ID NO: 65803 - DNA, 1645 bp, Homo sapiens
ggctgctgggggcagaagacttgtccggagtctcgccagtggtgtgctccaaactcaccgaggtccccagggtttgtgcaaagccctgggccccagacatgactctccctggaatctccccaccacccgagaaacagaaacgtaagaagaagaaaatgccagagatcttggtgagtgagaggcaggggtttttctctgccgtgtgctctgggagacgtgcagggctggggctctggctcttttgggggataggcagcacctgcagggtgtgggtgagatgctccagccaccatgttcccttctcactcacctgctcctcatttctcttccctcagaaaacggagctggatgagtgggctgcggccatgaatgccgagtttgaagctgctgagcagtttgatctcctggttgaatgagatgcagtggggggtgcacctggccagactctccctcctgtcctgtacatagccacctccctgtggagaggacacttagggtcccctcccctggtcttgttacctgtgtgtgtgctggtgctgcgcatgaggactgtctgcctttgagggcttgggcagcagcggcagccatcttggttttaggaaatggggccgcctggcccagccactcactggtgtcctgtctcttgtcgtcctgtccttcctatctccccaaagtaccatagccagtttccagatgggccacagactggggaggagaatcagtggcccagccagaagttaaagggctgagggttgaggtgagaggcacctctgctcttgttgggaggggtggctgcttggaaataggcccaggggctctgccagcctcggcctctccctcctgagttgccttctgttggtggctttcttcttgaacccacctgtgtaaagaggttttcagttccgtgggtttcccctttgattctgtaaatagtcccagagagaattcgtgggctgagggcaattctgtcttggaggaagaagctggacattcagcctgtggagtctgagttttgaaggatgtagggagccttagttgggtctcagaccataagtgtgtactacacagaagctgtgttttctagttctggtctgctgttgagatgtttggtaaatgccaggttgatagggcgctggctgcttggagcaaagggtgcatttcagggtgtggccaccaggtgctgtgagtttctgtggctcatggcctctgggctggtcccttgcacagggcccacgctggagtcttaccactctgctgcaggggtggaaggtggcccctcttgtcacccatacccatttcttacaaaataagttacaccgagtctacttggccctagaagagaaagttgaagagtcccagacctactagcattttgcaactatgcttgtaaagtcctcggaaagtttcctcgcgtaccagacagcggcgggggctgatagcaattttagtttttggcctccctatcctctcacatgagaacactgcctggatgcatctcatgatctctggagaatttccccatctttctcttctttccatcgtgtggattcaatagtgtggatttgaaggctgccctgcccccgactctcctgccgcacccctggccattgtaccttttgatgtttagaagttcgtggaagtagac

SEQ ID NO: 65804 - DNA, 1025 bp, Homo sapiens
gcggcgctggaggagctcgagacggagcctaagttatgtctgggaggcgaacgcggtccggaggagccgctcagcgctccggtgagcggagggcgcgcgggagacgtgaggtcgagccgtttgggggacgcagtccggtgaaagatggcctcttccctcccgctgccgccgccggaggaggcgcccttaaaagggcttgtttgggaatcttctcgctgtctctagaacctgttctctggactctaaggtctagagtcctcctctaccacttaacttttttctctttccagggccaagggccccatctcctactaagcctctgcggaggtcccagcggaaatcaggctctgaactcccgagcatcctccctgaaatctggccgaaggtgagccccagatttctcacttcctccccttgtggcccctcacctaatgttgagctcacgttcatccctcttctccagacacccagtgcggctgcagtcagaaagcccatcgtcttaaagaggatcgtggcccatgctgtagaggtaaaggctaaggagagtgttgtgggtggttaggcgggcaaaactggggaccagctatgtgatcaattggtattgtcccccgcaggtcccagctgtccaatcacctcgcaggagccctagggtgagttcactttcatctacttaattaagtagaatctgggtcactctagagctggacagcacacattggctcctcacatctgcccagggagctgttttgcagtactgcaaaaacagtttgcctgtgggcacctgcatgcattgccagtcttgattactccctgaagacttaatacacttaactttttatgccttgtgtatttctaccattttcctggaacttcctttaaaagctgagctatgtcttaactccacgtactgcctttctaatccattatgccttcagctttcatgtatgggtgttctgagataagtcatgtgtatgacatttttacagttttagcagaagttattatcaaaggatgtttcattaata

SEQ ID NO: 65805 - DNA, 1417 bp, Homo sapiens
gttagcaaacctgtgagtgtatagatgtgtatgtgtgagggctcctgtacccatagtgtagatatagggaatgccacttgtgtttgattatgtgcttataaggacatgtacatttgtgcccagggatgtgtacatgtatatgtgtgcctgtgtgtgtatcgaggaaccttttctgaaactgttcattattagccattagcccaaagaatatgatgagtgcaggcccagagaggactcattgaaaggactgaaaggggaggtggcgttttcttcctacccaaacttacccctgtgagctggacagcttggtagcacctgcctggacttagatggtggtagccaagaagactgacattttagggaacaggacggggaggagaaggctctggcacacacacatgtgtccatatgtcctgcaatggtctggggactattgctaggctaggagccctaagtgtcttcttcctcatgtctcttctcccctgtctcatgggccctaagatctctttcactgggcctgcctcaatgaacgtgctgcccagctaccccgaaacacggcacctgccggctatcagtgccccagctgcaatggccccatcttccccccaaccaacctggctggccccgtggcctccgcactgagagagaagctggccacagtcaactgggcccgggcaggactgggcctccctctggtgagagtccctcgtctgtctgaccatctatctgccctgggccccacctgagtcagatgggtgggtggggacaatactaggcagcctggtgacccagattccttcctccagatcgatgaggtggtgagcccagagcccgagcccctcaacacgtctgacttctctgactggtctagttttaatggtaagtggtggcttccaccgactgtttgggctttagcctccctgctctgctgacagctcccttggtctgcagtcacatgctctacccctgagctctatgcactgcttctgctgacggctctctttccacccacagccagcagtacccctggaccagaggaggtagacagcgcctctgctgccccagccttctacagccaggccccccggcccccagcttccccaggccggcccgagcagcacacagtgatccacatgggcaatcctgagcccttgactcacggtgagcctgggagttatccaggccgcagaaggataggaagagggtggaatggtttgtatagggggagcttgaggatccagagacccacccggaggaacctttccttaatccaggcacagccattacctcctcacaattctgagatgttctgtcagactgaggagagcaggtgatccccctagccctccccaaagcggccagttttcctgagtctattgatgctagtggctccaccctgtagcccctaggaaggtgt

SEQ ID NO: 65806 - DNA, 2518 bp, Homo sapiens
ctgcccaaggagccccaggactctgtgaccaactgggggtgaccctgaccctccagtctctgtctctagggctgtttttaggtagtacagagtgccctgcctccaaatcccacagcccttgtcccagtcttggtgtatgcccagcctgagtctgggtgctgacctgggattactgtttgcccttgtccttatccccacagtagtcttgggtcctccccagggttttctgttcacccatggtccctgccccgcctcactccaagctcagggatgcctctgattgctgggccctacctgtcccctgccctccagatgacggcgctaatattgtatccctcccttcttatctggccccggagactttctgcctcatcccagctacttccatcgtatgtctcccgggcccctgcttggaacttgggtgtcccccacacacacctgcagtccccaagctgcatccctgtgtccctgcctgcaggtgtcggtgctgaccggcatcatcaagatcagcctgaagacgctgctggagtgtgtgcggctgcgcacctttgggcgcttcgggctgcagcaggtgcaagtggactgccactttctgcagctctacctgtggcgttttgtggccgacgaagaactcgtgcacttgctgctggacgaagtggtggcctctgctgccctgcgctgcccagaccctgtgcccatggagcccagtgtggttgaggtcatctgcgagcgcggctaggcgcagccgctgccatgcaccggtctgtccctgcaccccatggcacccaggatctggtctcggtggtccttccccgcaggcaggtgtcaggaccggcctaataaacatgtgtggcctcctcctctcgcttgctgggcgggcctttccgggggcggggttttgaagctgaggcttctgaggcgcccgcgtcgggtccgcccccgagcgccgattggctggtgtgctgggcccagcatgggcagggggcggttccacttaaaaaccctgggacgagagcggtccttgtctgcgttccgtgtccaggcaggtgcaggcgccgcggggccggatcctccgcgcggccgagtccatctcctgggaaatggggcggacagtgtttccttgactgactattgtgagcgccctctctctccggcggagcggagaccatggcccccactcagggcccccgggccccgctggaattcggagggcccctgggtaatggggcagagagatgggacctggggcaaaggctaagcgaaggagagctggagcgggtgaactaagagcgggggcgagatctgaggatggaaggctttgggggtgtcggaggcagagggacccgggggtttgcagcgaagggtgtctggagagggagagctgaggaggggccggttctgggggctgcagaacggggatttatggtgtcgactgggagcaggaggagggtcttcgaggggcctgggggcgggggactaagatggacgcctgggaagggaactgggaggcagcggggtgcctgggggccgagggctgaggacggggtgcggaggcgcactctgggaatgccgagagggtcccgcagagacgtcagggcgcccgtgcgggccggcggggagctggggggctaggggcggacgcccgacgtgatggcccttcccgcaggcgccgcggctctgctactgctgctgcccgccaccatgttccacctgctcctggcggcccgttcgggccccgcgcgcctgctgggtccacccgcgtccctgccggggctggaggtgctgtggagcccacgggcgctgctgctgtggctcgcctggctcggcctgcaggcggcgctctacctactgccggcgcgcaaggtgcgggccccgctcgcggacgctcgggggagggaagcgaatgggctcggcgagggaaaggacgccccgggccttatcagagcccccttggacccgcaggtggccgaggggcaggaattgaaggacaagagtcgcctgcgctatcctattaacggtgcctaggggacgggccctcgcgctggagttaagcggccgggggtggagctccaggcctagcggggaggtccacggagattggcccccaccccaggctcctttgtgtgcctctgttacgcccaggacagacgccgggggctctccctatgcccctcgtccccacagccttaccccatttactgctactccgtgcaccacagcagtggctggggtgatcctctgaaggccagggtggcagcctaatgcttggggcagggtctgtggcccccctgagttttgggctctgcgtgtgtttgcggggtggggatgtggaggcgcgcagccccagggctcactgtgcgctgtggttcaggcttccaggccctggtgctgacagccctgttggtggggctggggatgtcagcggggctgcctctgggggcgctcccggaaatgctcctgcccttggcgtttgtcgccaccctcaccgctttcatcttcagcctctttctctacatga

SEQ ID NO: 65807 - DNA, 1150 bp, Homo sapiens
atgacagaggccatgggcaaccccaggggctgcgggtggtgcagcaggaactgggcctgcaggctgtaggtgaagggcacccaggccatgtccccaaacgccagcatgaagccaaacccgtcatgtgtgatatccatggtggtgaggacggcctcctgcagggacaagacccagacacactggcttagtccctatgcggccctcagacacccaccctcgtccagtccagcctcacctcgtgccagagggcatcacccacgtagagcaactggaagccattgaccagccacatggccagtgagggactgcctcgaagctctgcctccttcatcaacagggccaggttgatgaggacctggggagagggaacaaggcaatagtctccacagaagtggcagccttgggcagagcagtggccagcctctgcccttctcaactgtcagttacactccagctcttaagtggatccaggccctagacccaaggacagagactgtggacagggaggtgcccgcagcctgtttcttcttgccttgtctgtcctaagccctttcgggctaaggcttcagtgctcaaacagacctgttttcagatctcagcatcatcacttgggcaggttgcttgccctctccacagcctactttcccccacccctgtgtgaaaaatggggataatcatgggcctgtcatgactcaatggcatcatcgtgtttgaagccctccatagcgtccctggcaagtggtacgtgctcagtgtggctagccggagcaagcctgtgctgggcgcctgcatttgacactgagctctgttctatcataaagattacctcttctaatcttcccagtaatcttaggagaaagctttaattttatcacatctcaaagatgaggaagtgtcctcagatgtgcctgtcatcaggccaggacccagacccagggtgggcacctggcactcctgcctcgggtaagataatttccagggcaacaggagaggccttgcccaagagtttctttgggtaatcttggccacagaaccagagatcacagttggaatgttgtcaaggccactagtgacgggtaggttgctaaccccagcgatcaatttcaggttctgcactgccttgaccatcaagcagcatgcggtcactccc

SEQ ID NO: 65808 - DNA, 1595 bp, Homo sapiens
tatcccagagcatttcttggcttctcttacaagccgtcttttctttactcagtcgccaatatgcagctctttgtccgcgcccaggagctacacaccttcgaggtgaccggccaggaaacggtcgcccagatcaaggtaaggctgcttggtgcgccctgggttccattttcttgtgctcttcactctcgcggcccgagggaacgcttacgagccttatctttccctgtaggctcatgtagcctcactggagggcattgccccggaagatcaagtcgtgctcctggcaggcgcgcccctggaggatgaggccactctgggccagtgcggggtggaggccctgactaccctggaagtagcaggccgcatgcttggaggtgagtgagagaggaatgttctttgaagtaccggtaagcgtctagtgagtgtggggtgcatagtcctgacagctgagtgtcacacctatggtaatagagtacttctcactgtcttcagttcagagtgattcttcctgtttacatccctcatgttgaacacagacgtccatgggagactgagccagagtgtagttgtatttcagtcacatcacgagatcctagtctggttatcagcttccacactaaaattaggtcagaccagggcccccaaagtgctctataaaattagaagctggaagatcctgaaatgaaacttaagatttcaaggtcaaatatctgcaactttgttctcattacctattgggcgcagcttctctttaaaggcttgaattgagaaaagaggggttctgctgggtggcaccttcttgctcttacctgctggtgccttcctttcccactacaggtaaagtccatggttccctggcccgtgctggaaaagtgagaggtcagactcctaaggtgagtgagagtattagtggtcatggtgttaggactttttttcctttcacagctaaaccaagtccctgggctcttactcggtttgccttctccctccctggagatgagcctgagggaagggatgctaggtgtggaagacaggaaccagggcctgattaaccttcccttctccaggtggccaaacaggagaagaagaagaagaagacaggtcgggctaagcggcggatgcagtacaaccggcgctttgtcaacgttgtgcccacctttggcaagaagaagggccccaatgccaactcttaagtcttttgtaattctggctttctctaataaaaaagccacttagttcagtcatcgcattgtttcatctttacttgcaaggcctcagggagaggtgtgcttctcgggttggtggtatgtcccctaggagaacagtgaggcagaaaaggcagaagcctttggtatggggggaagaaatggtaaactacaagagaaatttcctgtgaagaaacagctacagatcctggggggcttcagatgtaaaattggggttattccctatcctaagtaacttgatcagtccccccaggtcattctttttcatcttctaaacagagaaggtagcaggaatcactgtggtgagaggtttgttatggaggcagcaatagaagggatgggtgggggaagaggtttgtatagaaggtg

SEQ ID NO: 65809 - DNA, 1086 bp, Homo sapiens
tgactcgaagtgatccgcccaccttggcctcccaaagcgttgggattataggcatgagccatgtgcctggtccaccttggcctgttttgtttttctttccttgggctcagcaattcaaattctagttgttatttggtggaagcagtagcccaaccccagtttaggggaaggtagcacagggcagagccactgggcactttgtttccttggccctccgaagctcactgttgcaaatacccccaagcctttgctctaggccagatcttgtttggtgcaggtgatggagaacacagatgactcgggcatgggtcttggagatcttctgttcaaagtacagtgctggcactggggcacagagtgcccacgttagccccgggctctgatagagaggtaggaggcacgttcttggtcactgttccattgcagaccagacttgctggcctgaccacaagggagtggctgggaactcacagccagcatagggacatccccctgcagccttctgacctgcaatcaaggctggggaggggtttgcaggcaggaatatgctgacctttcaccctgccatcccatcccaaccccagctcactagccttcatatatgccttatacttggagtcacaggggccaaaggcctgagaccccaccctgcccccaaactggctaagacagctttcagttcctgactccccaacttggtctctgccctgaagcagggcactgaactctgggctgcttctctgtgtgtaaaatgggcacatcttcctaatctgttaatggtcagtggtgtccccaaggatagtgctggcttccatggaaaccctcactcctggagattccattccattttcaagtgtacagccacagcaaggagcccgacactgatttgatcgattctgtgacacaaaccccaccaattgttaatgcaagtttttatttggctgtatatacaatttaagctattaaaatttgtacaatatttacaaattaaataatcatctgaaactgtctccaacaactcttgtaacacaaaaccaaggggaaaagacaggggcaggcaggtcccagctcctgtggtccctcctt

SEQ ID NO: 65810 - DNA, 1050 bp, Homo sapiens
agccctagatttgaagcaagactgacccaggttccaggccttgcgtcagtgtgatcacttaaccccttcgagtctaatttgtaaaatggggtagcgtaagctattctttgtctgatgatttcgagggcgaaatgtgatttcccccccactttctcctatgaattgaggctgtgccaggcaccgggctattttgcacagcacgagcatcacataagttattttcttgccccatgcaggtctccgggccagggcaatgttccgcacggcagtgatgatggcggccagcctggcgctgaccggggctgtggtggctcacgcctactacctcaaacaccagttctaccccactgtggtgtacctgaccaagtccagccccagcatggcagtgagttcagggctcagggagggaggaactccctgggagggaaggaggagtctgcctgggcaaggggcggggctagaggtcaggtaagtagggaagtagccgccagctgcctaactttgaataaactgtgatgaggatgtggaggatcctgcatgatgagtcccaaggagaggaaagcagaaagtgacctcaaaccacagcctctccccactcctaggtcctgtacatccaggcctttgtccttgtcttccttctgggcaaggtgatgggcaaggtgttctttgggcaactgagggcagcagagatggaggtaagatgtcggctgccccaaaggtgagggcagggtgctgggaaagaatgtttggtatccacattattccctgcctggcccccagcaccttctggaacgttcctggtacgccgtcacagagacttgtctggccttcaccgtttttcgggatgacttcagcccccgctttgttgcactcttcactcttcttctcttcctcaaatgtttccactggctggctgaggaccgtgtggactttgtgagtcaaggcagggagttctggagcaggtggaagccagggagtagccagcgggcaggcttaaggagcagggagggctaggttgagggtgtggggtgagccccaggcctcctgaca

SEQ ID NO: 65811 - DNA, 1041 bp, Homo sapiens
ctccaaaagagcagcatctatatgtgggggtgtctataggtgggatcggggtccctgcttgcttctcctagcaactgttgtatgtgcaagtgggaacgtccaagaccctgagtgctgggggctcatctgatagggcggggggacctagccactgaccacagtgtgtgcctctttctgcagatctccagcgttctagacatggaggccatcactttcaagaagttggtgaagggccatgcctactctgtgaccggggccaagcaggtactgccctgggtggggccttccctgaagggcggttcctgccccctggcctgtccttgcctctctggcacctgaccagggctgtggaaggtgctggctcctcctttcccctcctgcagcaccttatctctcttctggggacacccatctgagatgcctatcatgtcctgccctgactgactgtagttcatgtgtgcagctgcctgcctgggctgtgaattccaagaggacaggcttcatctgggtgctgagcagggcttggagaggatgagggtatgggaggcggagtgttaaagtgcgtgcatgggccaggtgcactggctcacacctgtaatcccaacactttgggaggctgaggtgggcagatcacctgaggtcaggagttcgagaccagcctggccaacatggtgaaactctgtctctactaaaaatacaaaaactacctgggtgtggtggcaggtgcctgtaattccagctatttgggaggctgaggcaagagaattgaattgcttgaacccaggaggcggaggttgcagtgagctgagatcgcaccactgcactccagcctgggtgacagagcaagactctgtctcaaaaaagaaaaaaaaaaaaagtgcctgctggaagctagcactgacaggagctctggcaaataggtgaactaccgaggccaggtggtgagcctgatccggatgcggaacccctggggcgaggtggagtggacgggagcctggagcgacaggtgaggggcagtgggcactgtctggagtgccttgg

SEQ ID NO: 65812 - DNA, 1027 bp, Homo sapiens
gcgcacgcgccctgggccgcgcgtgcgcgcgtggggttccggaatgagccggggaaagcaaggggaaggtttggggttggctcccggtttcgcgcatgcgtgcactgcacaaaccatttggcgggtttttccggccactcagttctgccaccgtcactgagaagctcagcggtagcttttgggaagcaggacgttctcaccaggagagcgtcctctcgagatttctgctccctccattcagggcgtttgggagccaccccttcattttttaaaaaaagtatttctctgtgaccgacggccggggccttctgacggtctgaggtcttgcttgggccagtcacctcctgtcacggtccgcggaggggggaaggataagagggcgaggagctcatcgctcgccacccccgtgggcttcttgggcgcaggtcggagctgggtgggccggctccccggcccctggcttgggcgaccatgtccgcatccgcccagcagctggcggaggagctgcagatcttcggcctagactgcgaggaggctctaattgagaaatgtgagtcccgcacccctcccgccctgcagccgtgctccacgctctcgcccgagttcctcggcgcctagaaccgaaagtggagcgcttccaatttccacttcccctggagcagagttctcggtggctgtgagatgaagaatcaaacttgagttttgagatttaggatgtggggactttgaaatgcccaccgggtaccgcttggatgccaaatcaaaaataggaatatgcagcacgattttaaaccaactcgaagttcccgaaaggcggaattgggatgtgctagatagagactaggcactggtggcacctgagtttggaaattgttgaagccccggtaacaaagcaacagatgtgggggttttgaaatgtagctttttattcttggctcctccctttccagcctacaccttaaacctctgctgatccatcagttattttatcatagctgttggtggtctgtgcaaatatgaatccctt

SEQ ID NO: 65813 - DNA, 2009 bp, Homo sapiens
ctcagagtagttcctctggctcttttccccatctcagttaatagggacgccactcttcctgttgcacaggctaaaaatatcagcatcatccttgactttctttttctcataccttacattcagttagcagatcccactggcttcacttccagcatgtaaagtcctatccagagtccagccacttctcgccatctccactgccaccaccttgatccaagccaccatcatctctcacctgggcttttccatgattctttaattggtccccctgattctgcccttatcctcttttgtctcccctcagtggtgagctttgtaaggacaaggatgcttctgttttctcattgcccaaaacagtgcctggcactaatagattctgaataaacattgatggagtaaaccaggattatttttgcttttctaggtgaaacttcgagaaatgaactaagtttttacttgtccaattttcctttctacagtggtagagctttgtgttcagtatggacagaatgaggagggaatggtaggcgagcttatagccttctgcaccagcacacataaagttggccttacctcagagatcctgaactcttttgagcatgaggtaagaacaaaatgaaagcaaactaataatgtgattctccatttctgctctacaggggaggcattgtgatatattgagaggagtgtgggctttcgagtcaggcctggattccagtcccagtgtgagcttggacaaactatgtccctgagcctcagtttccttttctgacattgggtctaataatctgtattttttatgattgttataagaattaaatggggctgggcgccgtggctcatgcccataatcccagaactttgggaggccgaggcaggcagatcacaaggtcaggagttcaagaccagcctggccaacgtggtgaaaccctgtctctactaaaaatacaaaaattagttgggcatggtggcaggcgcctgtaatcccaggtactcggaaagctgaggaaggagaatcgcttgaaccgaggaggtggaggttgcagtgagctgagattgcgccactgcactccagcctgggacagagcgagactccatctcaaaaaaaaaagaaatgagaatggacataaagcacttaaaactatgcccagcaggtgataagtcttcaccaaataattggtattattaggattgttatatgttatagacagtcatgggatgtctttgtttttagtctgtgtgtatcttaattctttgaggaatgttagatctttgattatattttgaataccttttattatctcaaggcttttgaaaacacctctgctattacttgactatgaagtactgtattcactatcttttctttttcagtttctgagcaaaagattatcgaaagccaggcatagtacctgcaaggacagtggccatgcaggagctagagacattgtttccattcaagagctgtatccttttctgctgaaggtctttgcaccaagctacatgttgtattttataatttgtctgtagtcgcatgtgtaatttaaaaacaaataataaggccgggcacggtggctcaggcctgtaatcccagcacttttggaggccgaggcaagcagatcacttgagcccaggaatttgtgaccaacctgggcaacatggtgaaaccctgtctctatcaaaagtacaaatttttttttttttttgagttggagtttcgctctttttgcccaggctgaagtgcaatggtgcaatctcagctcactgcaacctctgcctcccaatctcaagtgattctcctgcctcagcctcctgagtagctgggattacaggtgcacaccaccacacctggataattttgtattttttttggtagagacagggtttcaccatgttggccagctggtctcgaactcctgacctcaggtgatccgcctgcctaggcctcccaaagtcctgggattacaggcgtgagtcaccgtgcccggccaaagtacaaattaaaaaat

SEQ ID NO: 65814 - DNA, 1875 bp, Homo sapiens
tcagctaggctggtagaacaagttccaaggttgcctttcaatgtatgagttggtagatgtcctcatggaagccctagtaatggagggacacgggcaatactatcagtgattgccccaagtcacttcactttgctaaaacgcacataaccattcccagcagcaaaaacttgaacgatgtaaaggaattcaacttaaagatattcatggttccttcgttagaagccttcttcaggttggccttgacttgcctaaaacctcagtgaggacttgagtaaagggcagacttggagatggggtggggttcatgctgattccctggaattgtgctatggggtctcctgtggccagatggaaggccagattcagcaaccaaatatcggaaaattggcaaaggttttagaaggtttaaactggccagatgtccaggcacccttcctgcttctgtaaaatgactgactttaatattttacaatgtgctgtattttctcttcttggcaagtgaaatgtcttaaacataatacttttttccacttctgggattgtagttctgacctgtaagatagaagaacttggcagcgaactcaaggaacattacaagattgaagctttcactcctttgctagccccagcacaggtaagagttgttctaatagttctcactaattaatattacgtttttaaatcgatgaccaagaggcatccttcttgcttcctttttcacttcttgtctgtgttctagtttgaacatctgtcttggttgaatttgggaaaatgggcccttctgaagaaagatttgtaagtgctgtctggttttgtggccagagagtgattttcttcccacttggattagagtcttgcacataagcagagactcaaggccttgtttcccttggtggtgagtcaggtagctccccggggatttcccacaaatagaagcattcacgtatcgagataaaaggacagcagcgacggtggggttttcagaatcttgttctctggacaatgactcacagtctctcccctggtttggtctcttgttatagacaaactgctgccaatagtatctttatatcatagtttaatctggcatatataccagtgctttctctctagaatgttttctaatctaaggggaaatatattctagaagtttctttaaagtacctttgtcaatgtttacattcaaagaatgatcagttggggaagtgatgcagaactgtgtcatagaaggaagtgttagaggacttggaaggaagtaattgagggaaggcagggaggcacaatcactgggaaagatgagacttcctctgttttctcccaagagtgggaacagaacagaggaagccatggagacagagattttagctcaattaataaagaacttcctgttaagaggttgtatggtatgtggctaaggatatggctctagagccaaatttctggtttcaaacccaagcttcacccacagtttgaccttgactaaattatctaacctttctgttgcttgttttcctcatctgtaaaatggatacagtaatatccacccgatggttgttgcaaggattaaatgagttaatacatataaaatgcctaagaatacattttagaacagtgcatggtatttagtaagctcaagaaatgttagctattattaagtagttatagctgcccaaagatgcagtgggctgccctggggtggtgaggacagggtggggtaggcatccaggggcaagttcccctacactagagatgctcacacttaggcagcctcctaggaaggctcaagtgctgggtggatgggtggacaagatgccctttcagagttcttccatcctgagagtcagtgatgacgcggtagtcacctcagggtcaaag

SEQ ID NO: 65815 - DNA, 1478 bp, Homo sapiens
ttttacagtattcttacttctttctcattactccaacttctgaactaatctctttttaaagctcaaaatactattattagtatggtgatcaatttaccttgctagatttagaaagtcagaaaacccagtgtgcatttttattgttcgtttgttttttgtttttttttttttttttgggacagagtttcactctgtcacctaggctggagtgctgtggtgcgatctcggctcactatagcctccacctcctgggctcaagtgagcctcccctatcctccctgagtcttccgaatagcttggactacaggcacacgccaccatgcccaactaatttttgtatttttttgtagagagagggtttcaccatattgcccaggctagtcttgaactcctgggctcaggcaatctgcccacctcagcttcccaaagtgctaggattacagatgtgagcccagtgttatagtggttatggggctctgggagcctccctccatctggggcaaacgtgtttctgcctgtgaaattggcttggcgccccgccagcccatctgctaactgtccccaggctctacaggcagccttggagggacagatgagccctccacagagaactgccagaggaggtatctgaagtcattcacagacacaagtgattctgatttgttcttttggtgtctttgtttctccccttgcagtttggccctttcctggatgctaagcatgaacaggtggaggtgagtgggctggggtgggaaggggtcctgggtacttgaatccagtcaggctctcacttttcattttttagtgtttatcccacatctgtaacaaacacattaagtcctgtggctaatcagaaaatcattttagcagagcactttattaataaagatctggaatccaagggcctcctttcaccagaatacaaggctgtctggaagctgggggagggacatataagtcctaatgttcctttgtttgtgatgcctgctgctaaggcacaagagcactagcacaaatgcaggtgtctggcagtcatgggctgccctgtgaaagaacctgtcctggccaataccccaagcttataactcatcttgctgtcctttgcataaaacacgaatggtccttcctgggacatctccatggctgaggtctgggacctccaatccttcgtctcacgatactttaccttccatggaaaatatttcaaagtactctttcttttagtctctctcagattgcattcaagagggttaattcccacatctcttctcctcccttcgactagacttagctccttaagacaaagaccatgtctttttcatctttgcgtctccttcagctcctagcccaacagctgacttctatgggtcacctaacaatgttaaacaagtgaataaacaccaaacatctgccgtctaaatctgtctcctttcctttcttgcagaattgtctactgacaagtccatttgaagacattt

SEQ ID NO: 65816 - DNA, 1033 bp, Homo sapiens
aatttctttgtattcctgagaggtcagaaatgcagagcattaagctgagtcatcattagtaaaagtcagagccaggctaagcacggggctcacgcctataatcccagcactttaggagactgaggcgggcagatcacttgaggtcaggaattcaagaccaacctggccaacacggcgaaaccccatctctactaaaaatacaaaaattagccagatgtggtggtgggtgcttgtagtctcagctactcgggaggctgaggcagaattgcttgaacccaggaggtagaggttgcaatgagccgagatcgcaccactgcactccagcctgggcgacacagcaagactccatctcagaaaaagaaaaagagccagtgagaaagcacctcagagaaagcgagcagagcccgcggttctcgtcctgtttgcgggagcagctggaggaccctcccgctgtgacgtacgaggttgtgcaatgctgagcatagttgggatgtttttctgatccctccttctataggcgctttctaaccatgagcaggaaggctatttcctccttaactattgcccttccaaagcctacactgaaacagggcaattttgtcccttgagagcagccagctgcacctcagtcctttgtgtttatcacagatgtcaagcccttgagatgtggagcacagattgtcccattcaagttaccctgtggcctgtttaccagaccctggcacccaaatggtggactggatcaccctagtgagcttctcagtgtcaaagggacaataatgaatatgcaaacacctttggtctcaggattctgattttctgttatagacatctcagttcacactctgagaggacaccacaaacagtgataagggtgacagctgtcaccagcacctttatcacatgtgaaagtgtatgtatgcctgagaagtccacatgttttaagcaagagacagagatggaagtgagagctattggtggattttaaacatgcccgcaaagtaataccttatgcctatttgatttataaacg

SEQ ID NO: 65817 - DNA, 1228 bp, Homo sapiens
cttggctgaggtttgagattcaggtcagcctggctacacacccgcctcatgatggtgccaactttgcatcctcttgcacagtacggtgctggctaatggccttccttgatcttgattatgagggattcctgtgctttcccttctcaacctggtgtcctgcgtccctcctcatgtggggacagactgagctccttgtgggtgggtctttaaacttccccagaggcatcctcctcttgttgctgtgccttggccatttaccttctctctggtttattaaattctccagtcctccctgaagagaaatgggctgaaaaacagagttctgttttcatgctttcttttctttcccagttcttccggaacttcagacagattcagccgaatactcaagcacatcttgacccagaggaggtgagcttgccgctgggacccctgactgtggagagagtgccttggggtcatggagctatgacaagcatgactgtaagagccttcaccaggctaccagcagggaactttaccctgtgatgacaagcctgcattctgccccacacacacagagaaaaagtcggtctgtggatgccagcagcacgaaagccagtacctagggggactctgtctgagaagggggccccccggtcagctagtgctgacaatttctctctgtctctgtagctactacccactctacccgccccaagaagacatggccattgactatgagtcgttctatgtttacgcacagctgcctgtcaccccagatgtcctcatcatcccgtcagagctgaggtacttcgtgaaggtaggtttgaactctgctttttcccagaaacaccagaacccagtctttgactttcccttctagaccacccggcactcacccctcatgggtcagctgatggggatggggcctctagcaccctgccctgtggccttgtttctttggggaggtggtgggaccagaaaacaaacaactctgtcagtaaaatgcttgagtaaacagtgtcctctcctccctccccaagagaacgagagcccagatgactaggaaggccctcaaatgagggctttcaccaggccacatagaggtgacctggggaagatttcatatgtacacttgcctgtcctctgcctcccaaattctgatatgacctccaagtgggctcagctgggaataccttgaagaagctattgggtcattttgatctctgccaccctttagccctgc

SEQ ID NO: 65818 - DNA, 1147 bp, Homo sapiens
acaaaaaaaattagccaggcgtggtggtgggcacctgcagtcccagctactcaggcgcaaacccgggaggcagagcttgcagtgagccgagattgcgccactgcactccagcctaggtgacagaacgagactccatctcaaaaaaaaaaaaaaaacttcccatggccggccacggtggctgacgcctgtaatcccagcactttgggaggccgaggcagttggatcacctgaggtcgggagttcgagaccagcctgaccaagatgaagaaaccccgtctctactaaaaatccaaaattaatcaggtgtggtggcgcatgcctgtaattccacctacttgggaggctgaggcaggaggatcgcttgaacccaggagacggaggttgcggtaagccagtattgcgccattgcactccagcctgggcaacaagagcgaaactctgtctcaaaaaaaaaaaaaaaaaaaaaaagcttcccacaaggtcacacaaataagcaacaacattttaatttaaactaggaggcgagtgtcaggacagaaccaccaataatgtgctcccagggtggccaatcagaggcaggagagggcatggctgcttgtggcatcagggcaaccttttggaagcatgctatttgatttggccatgtggcatggtggggaaagcatttcaggctaaggaaataacgtgaagcacaggggaaagatatcccaaagtatggaagggagcaggagcaggattatagcatgcttgaaaggcgttggtgaggaatgaggctggtgtgggtgggaccacgtcacagaggaggttctgggtggccttggccagtctcatcataggggagcttttggatgcacatatttctacccatgctaaccctcctgtccactcagcggatcctagaaccagatgacttcctggatgacctcgatgatgaagactatgaagaagatactcccaagcgtcggggaaaggggaaatccaaggtgaggggccagcgtgctgcctgcatcttgggacagggtggcctagggaattccttattttatttcaagtgagattagcggccacttccaaaagagtctaactcctcaggcccagctaccaaaataagggtgtctctttgctcttcttggcagggtaagggtgt

SEQ ID NO: 65819 - DNA, 1025 bp, Homo sapiens
aaaagagccccagaagctagagagccccacggcctgatgctcctggctgaggggaagtggccgtcactcaaggcctgtcccagagtggagctgctaggggaagggatggttgccctctgcctcaggtggagcccccacagcttgcagggatggggacatggcactcttgtatcctaacacctttctctgcaatcttcttcccactcagtttgtggaaaacgttacaagaaccgaccaggcctcagttaccactatgcccactcccacttggctgaggaggagggcgaggacaaggaagactctcaaccacccactcctgtttcccagaggtctgaggagcagaaatgtaagctgaggtgtcagaagtggtgggcaagcagaagttggcctggttatgaaaaccactccttgcatgggtgttgagtggctcagggacccccatgggtgtcatcaaaactctttctctctgtagccaaaaagggtcctgatggattggccttgcccaacaactactgtgacttctgcctgggggactcaaagattaacaagaagacgggacaacccgaggagctggtgtcctgttctgactgtggccgctcaggtactgcttcccgtgaaggctgctgctttgcccagtccccaaggggctcttggcttgctggcctctagggctgtcataaccagcccacctcgcttttcctaaccaagagaagatgtagccacaggcaggagctcctctcttccccccgcatttccgactgtctgtctcactcacttcccccactacagggcatccatcttgcctccaatttacccccgtgatgatggcggcagtgaagacataccgctggcagtgcatcgagtgcaaatgttgcaatatctgcggcacctccgagaatgacgtgtgtatccccgccccctcctcagcatggctccttctgggcttttactgctgtttgcacagttccctctaaagtgagctttcttttaaaaagggagcaggatccctcccacatgccacacgc

SEQ ID NO: 65820 - DNA, 1024 bp, Homo sapiens
accaccgcactctagcctgggcaacaaagcaagaccttgtctcaaaaagaaatagtcactgggcacggcgtctcacacctgtaatccaagcactttgggaggctgaggtgggaggattgcttgagcctgggatttcaggaccagcctgggcaacgtaaggagatcttgtctctccaaaaacattgaaaaattagctaggtgtggtggtgtgtgcctatagtcccagctacttgagaggctgaggtaggaggatcacttgggcccaggaggtcaaggctgcagtgagccgtgattgcaccactgcactccagcctgagtgacagcaataccctgtctcaaaaaaatataccatagagcttgggctttagggaaaaaaaaaaaaaaaaaaaagtggaggtgatttgatcaattaggagctctgaaaggacccaagtgagaaatgacagtgactggatctgcggtggagaggggcagcatggtttcccacataagattctcacatctgttcttacctgctacctacccctcttggaaatagcagtgtcctgtagtggcctgaggcacatcagttattcagtccccatcctcttccctcttgcctacttcaggaccagttgctcttctgtgatgactgcgatcgtggctaccacatgtactgtctcaccccgtccatgtctgagccccctgaaggtaagttgcccagatcttttactcagaacaattactttattagttacttggaaaatactgagttctatgttctttatgttatcacttacatattcttccaaattagggagtaaagcaccttgccttggctcagtttagaatgccttcctaacatttcaacttaaagggtttagtgtttgcacattatcagctacatttacaacagaaaatcaacagcccagaagaaagcagatgctgagccgagatcaggcacccagaaggaatgatttattttcttccaaccagtccagaaaactcaagtggtagattatctgatgtgaaacttctgcagtca

SEQ ID NO: 65821 - DNA, 1122 bp, Homo sapiens
cctctttcctccagagtggctctctgcggccctgtgttcctgctacagagtgttcttttctggagtcaggatgttctcggtcaccctcctggttctgccctgtcccattccaccccaccccagggggaacagtagcttcaccttgttattcccattgctctcctggctcactcttacggtcggtctccagtgactgaagcattccccacccttggaatttctcatcttctgcctcccttcctactccttttggttttgtggggagaggggaaggatcagggggccaggccagcagctcgggggccacaaggagatggataatgtgcctgttttttaacacaacaaaaaagcctacctccaaaatcccctttttgttcttcctggacctgggcattcagcctcctgctcttaactgaattgggagcctctgccacctgccccgtgtatcctggctctcagctcatggggaagccacatagacatccctttcttcccttgcacgctcgctagcagctggtaaggtcttcacaccctgattcctcaagttttctgcttagtggcactgacattaagtagtggggggacagtccatgccaggacaccctggagtagccttcccccttggccgtgggcaggccctaactcactgtcgctttggagttgaggtgtcttttttttttctttctttagttcctgtattctaaacattagtaaaaataaatgtttttacacagagccctctgctggatggtttatctcctgcctttctccattaagaaggccatttcatcctaagatttccatgatggtggtttttttttttaatgttttgaaatacagcttttttccccccaaattaaaatttttttgtggaaccccaatatgtaaagcgaatataaaattggttattttgttttgttacataaattcaagtttataacaattctttgttataaagaacaatgaagctgttttgatcaatacaaaatttgggttaaaatcaactttaacatctatttttatgtttcagttgatttggagaattctcctagtcttggatacatagatggaagtgatgacaggtttataacagttgaccttgcaatctcagacatttaaaac

SEQ ID NO: 65822 - DNA, 1060 bp, Homo sapiens
ctggcccgggcctccgtccccggctgggcgtgcgccttgccctgcctgggcatccaggtcgacccccggttcttgaccgtagcaacccgcacccctcccaccagcgcccggtctgcactcttggcccctccaggcagcgccgctcaaccttgcggacccagcctgggatcccttaccgtactcaccgagagcttgaggagacctccagccccccatccctggctcccggtaactgctgtttctctttgcctttgcagatggacgggacagaaggcagtgccgggcagcccggccccgctgagcgatcccaccgaagcagcgtgtcctccgtgggagcccgaggtgggtcccacccgcatctcctcttccacaccctcctgggaccccagccctggagaagtagctctggcttgtcttctttttcattaaagataatttatgtatcgactaagaaataataaggtacattcagatgtggaaaactcacagaagtcagaggctctgtcactagtttactggccaggttgggtcctcgctctcatttgtaaaatgagcttgtttaacatagctgtgaaattcaaatgagattatatgaatgaaaagtgaaggctgatgtggttcatgcttgtaatcccagaactttgggaggccaaggtgggcagaccacatgtgcccaggagttcgagaccagcctgggcaacatagacaaaaaagaaagtgacacgttcactttctttgtgtcatttctttttttctttctttcctttctttctttctttgacagagtctccctctgtcgcccaggctggagtgcagtggtgcgatctcagctcactgcaagccccgccttcggggttcacgccattctcctgcctcagcctcccgagtagctaggactacaggcgcccgccaccacgcctggctaattttttgcatttttagtagagacggggtttcatcgtgttagccaggatggtctcgatctcctgacctcgtgatctgcctgcctcagcctctcaaagtgctgggattacaggcgtgagccaccacacccggctgt

SEQ ID NO: 65823 - DNA, 1051 bp, Homo sapiens
caggagggacaggtggcagctcttctcaatgtttttttttttttttttttttgagatggagtctcgctctgttgcccaggctggagtgcagtggcacgatcttggctcactgcgagctccgcctcccaggttcacgccattttcctgcctcagcctccggagtagctgggattacaggtgcccaccaccatgcccggctaattttttttgtatttttagtagagatggggtttcaccctgttagccaggatggtctcaatctcctgacctcatgacccgcctgcctcggcctcccaaagtgctgagatcacaggcatgagccaccgcgcccagcctcttctcagttttgagccctggagccactcccctcacctcctcgtgcttcccagcaggtccctgctgctgaaaggtctccgcctggacagtggtcagcaggctctcctggccacctccagcagccctggcccccagaccaagtgccaaacccacgactggctttgctccacacctggggccacgcgcttccctccgcctgcagtgcccacccttctctgtgccatcaggcccttctccctccggtcgcacactgccagctcagatgctgccacccctacgaagcctccccttcatcccacctctgtttctcccttccctggggcgggtttcagtcacccaaacagcagaagttcctcagagcccaggttggggcctcgagcagcctccctcagcatttctggtgctggccggaggctgaccccagtcccctccccaggtgtgccttcttccacggtgaggttgacaagccggcccaaggctttttgcaccggggtgggcgcaagccagtttctgtggccatcagtctggaaggcgtgcacgtcatcgatagcagagagaaggtactgcccccagctcctccagggtggagaggatgggagggggctcctgactcaggtcttcctggttcctctgggcctgtgggggcctgggggcaaggtggatggactgtctgggagggaccctgcctccgttggatgtcctcgtagcccctgag

SEQ ID NO: 65824 - DNA, 1792 bp, Homo sapiens
tgctgctctctcaggaccatccgatcaagctgcagctgccaccctcacctagaaacatgcctttgtgcccacctcaagatgggcagtgtccctgttctgaagtgcccagtggcagctccagtggtagaggaccaaggattgaggtttgggacctgaagctccagtgtgtgcctttggcctcttccctggacttgggtgaccagtctccgtcttcctcctgctagtgctccaccccccggacttggatgaccagtttcccaccttcctcctgctggtgctccatcccccaataccaggctgggccaccactctgaggagggtaggaggggcctccctggattgaaccgggacagaaacacggtgagggcccccaccacacctccctggttgaatcaggaatggagggagccaggcagggccctacctggggtcctgtgcccctcgttctggtctcctttgcaggcacgagataccagaaagagcatgcctttctgatagcctttggtgatgtcactgctgggaggtggctatcctgtggaccacctggcctccagacccacactcacagtctgtgaaaaactgaaaatcccctggtgggcactccctggagcccaagcagctcccctaggggactgaccggacctgacctcccctccctgtgtctgggtcttcaggttttagtttggtctttgttcatctgagttgtgctggggcaacgccaggaagtgccctgggtacctctgctgtgcgctccttcccaggtggcgccatggattcctctgggggctggcgcatgcccaggaaagcctgggccacacgggacactctcttctttatcgaggacacttggaaaggtgactgatatgggtgcttggcttctctggtcccagcttgccctccggggagcaggggctctgtcttgtcccagatgagctgagagcccctgagaggagggctttcccagccctgggaccctccgaggtgggtgtgcgggtctcacaggtgcttcctgggacttcctgtggctgcacagggcttggctttgtcttcgttcccggtggaaaaccgtgggagaggaagcttgggcctctactccaagtatcagagcctgttcaccctcctccctttggtagcttgtgaatgtgccaggtgtttcgaggtaggcttgccttctggcagcatggactttgttaaaataataggcggaaagaagaggcctgggaagggcccccagtcttttggaatgtcctggtcacagggtcatgtcagctgccagttctcgtctcccgtcctggagttgctcggtcttgcggagctgcccgcctgcctgttctggcggctccagcgcaggctgtccctgctgctttgattccaggtgattttattttttttatttttttattttttttgagacggagtcttgctctgttgcccaggcaggagtgcagtggcgcatctcggctcactgcaacctctgtctcaagcgattctcctgcctcagcctcctgagtagctgggattacaggtgcatgccaccaggccccgctgatttttgtatttttagtagagatagggtttcaccatgttggtcaggctggtcgtgaactcctgacctcatgatctgcccgcctcaacctcccaaagtgctgggattataggcgtgagccaccgcccccagctgattccaggcgaattcttctctgatgggcgggcgagggtgtgttcgtgtgatgggttggagtgtgtgtgtctgagtacacagatgatgtgttttcccttcagcttcttacgt

SEQ ID NO: 65825 - DNA, 1052 bp, Homo sapiens
gtcctggctcctgactgccctgaccttcttcctgccactgggcccatgatgggggtccccaactttcaagaacacagggtaaggggtttgtttccctggtggtgggcgggggcattcctcagcttcgtgatgggtcctgagttttccaaaggtcaggatccatgtcctggaaacggattctgctgtagatgtgtgcttttctgtgaaatgacagcttagtaaaaatacttaaactggggctatttggagacatctaagaggtggagtgagcacaacctggcactagtcgcctccctcctgaggcagttgactgtccggcctctgcccctgggcccttcctccttcccagctgccctgagccctcttccagcacctcctgtccccacctcacacactaagtcttcctgctatttttaactatttgacataatttgcaaaagagagaataatagtcccagctcttcccaaggacttctttgtccggtgcccatctgaccttggcactttgttgtgggggtggcagtgaccctgacaagttctcccagccagcgagagcacaggcctcccatacagtatcgtcaaggtcagcagcctcccgggcaggggggttctactccccgcagaagccctggcaccatggccaacttgctcacagagggcactcagtcagaccaaggtgggttggggcagaaaaggctccttcagagattcaaggacagtcacaactggtgctgtgatggggccaccgggacaagcacagtgcaggccattcccatcagcagggacccaagaggaagtggtaggctctggcagtgggggcggctggcggtcctgaagacagagggctttgcaaacctaggggtggaggtagtgggatgtcagcacctgggctccctgctcagaggagctggcgccaggattcccagtgggtgggcttggggaggaggctggaaaggttagcacaggcgaaagtgtggggcctaggaaagctgggctcgcttatttggccaaggagggtggggagggttggaggaggtctaggggccgctgga

SEQ ID NO: 65826 - DNA, 2316 bp, Homo sapiens
gatccctccgccgccgcctggaattttccagatgtcctgccggcccttctttcgggcctcggctgggcgtggtgacctcaagcgaccccggcggctcccgtcgcccactcaagagggcgcccccgcccgccacgcccccagcccctctcggggaagcgcgtcccccgcccgacctcaacaacatccgggaagaaaaggggtcttcttcctcatggcattcgcctcccaaatgtcaccttgagcgctgtccgcgatcccaaaaagcactgttaaagagaagcggggatacactggggtccttgcgtgggggccgcctgggagaccatgcaccgcccgggagtctctccgggcagggtcggggagggacttttttgccggtggccgtggaggaatcgtcccgttgagcaatgaccccggtgacgcggctgagggctataaaagcaaaagttgtggcaagtccagccggagttagcgacagggagggatgcgcgcctgggtgtagttgtgggggaggaagtggctagctcagggcttcaggggacagacagggagagatgactgagttagatgagacgagggggcgggctgggggtgcgagaaggaagcttggcaaggagactaggtctagggggaccacagtggggcaggctgcatggaaaatatccgcagggtcccccaggcagaacagccacgctccaggccaggctgtccctactgcctggtggagggggaacttgacctctgggagggcgccgctcttgcatagctgagcgagcccgggtgcgctggtctgtgtggaaggaggaaggcagggagaggtagaaggggtggaggagtcaggaggaataggccgcagcagccctggaaatgatcaggaaggcaggcagtgggtgcagggctgcaggagggccgggagggctaatcttcaacttgtccatgccagcagcccctttttttccagaccaagggctgtgaacccgcctggggatgaggcctggtcttgtggaactgaacttagctcgacggggctgaccgctctggcccagggtggtatgtaattttcgctcggcctgggacggggcccaggccgggcccagcctggtggagcgtccaggtctgggtgcgaagccaggcccctgggcggaggtgaggggtggtctgaggagtgatgtggagttaaggcgccatcctcaccggtgactggtgcggcacctagcatgtttgacaggcggggactgcgaggcacgctgctcgggtgttggggacaacattgaccaacgctttattttccaggtggcagtgctccttttggacttttctctaggtttggcgctaaactcttcttgtgagctcactccaccccttcttcctccctttaacttatccattcacttaaaacattacctggtcatctggtaagcccgggacagtaagccgagtggctgttggagtcggtattgttggtaatggtggaggaagagaggccttcccgctgaggctggggtggggcggatcggtgttgcttgcctgcagagagggtggggagtgaatgtgcacccttgggtgggcctgcagccatccagctgaaagttacaaaaatgcttcatggaccgtggtttgttactatagtgttcctcatggcgagcagatggaaccgggagacatggagtccctggccagtgtgagtcctagcattgcaggaggggagaccctggaggagagagcccgcctcaattgatgcctgcagattgaatttccagaggcttaggaggaggaagttctccaatgttctgtttccaggccttgctcaggaagccctgtattcaggaggctaccatttaaagtttgcagatgagcttatggggggcaatcttaaaaagtccacagcagatgcatccggctcgaggggccatcagctttgaataaatgcttgttccagagcccatgaatgccagcaggcacccctcctttcctggggtaaaggttttcagatgctgcatcttctaaattgagcctccggtcatactagttttgtgcttggaaccttgcttcaagaagatccctaagctgtagaacattttaacgttgatgccacaacgcagattgatgccttgtagatggagcttgcagatggagccccgtgacctctcacctacccacctgtttgcctgccttcttgtgcgtttctcggagaagttcttagcctgatgaaataacttggggcgttgaagagctgtttaattttaaatgccttagactggggatatattagaggaagcagattgtcaaattaagggtgtcattgtgttgtgctaa

SEQ ID NO: 65827 - DNA, 1894 bp, Homo sapiens
gtgatgccatctcacaggcaggggaaatgtctttaccagcttcctcctggtggccaagacagcctgtttcagagggttgttttgtttggggtgtgggtgttatcaagtgaattagtcacttgaaagatgggcgtcagacttgcatacgcagcagatcagcatccttcgctgccccttagcaacttaggtggttgatttgaaactgtgaaggtgtgattttttcaggagctggaagtcttagaaaagccttgtaaatgcctatattgtgggcttttaacgtatttaagggaccacttaagacgagattagatgggctcttctggatttgttcctcatttgtcacaggtgtcttgtgattgaaaatcatgagcgaagtgaaattgcattgaatttcaagggaatttagtatgtaaatcgtgccttagaaacacatctgttgtcttttctgtgtttggtcgatattaataatggcaaaatttttgcctatctagtatcttcaaattgtagtctttgtaacaaccaaataaccttttgtggtcactgtaaaattaatatttggtagacagaatccatgtacctttgctaaggttagaatgaataatttattgtatttttaatttgaatgtttgtgctttttaaatgagccaagactagaggggaaactatcacctaaaatcagtttggaaaacaagacctaaaaagggaaggggatggggattgtggggagagagtgggcgaggtgcctttactacatgtgtgatctgaaaaccctgcttggttctgagctgcgtctattgaattggtaaagtaataccaatggctttttatcatttccttcttccctttaagtttcacttgaaattttaaaaatcatggttatttttatcgttgggatctttctgtcttctgggttccattttttaaatgtttaaaaatatgttgacatggtagttcagttcttaaccaatgacttggggatgatgcaaacaattactgtcgttgggatttagagtgtattagtcacgcatgtatggggaagtagtctcgggtatgctgttgtgaaattgaaactgtaaaagtagatggttgaaagtactggtatgttgctctgtatggtaagaactaattctgttacgtcatgtacataattactaatcacttttcttcccctttacagcacaaataaagtttgagttctaaactcattagaattgttgtattgctatgttacatttctcgacccctatcacattgccttcataacgactttggatgtatcttcatattgtagatttaggtctagatttgctagctccaagtaattaaggccatgtaggagagcatggtaaccacagatagaactggtattatcccaagtggtctgcagactgctgagtggggatgggatctgctctctgttgagagttggtaatcattggtttgaaatgtgatgaaaccactcaagccaatgaaggtgggtgtgtaggtggggagtactttgccataatattttaaaacattacctggttagagttctaagtggtacttatttttgtttggttaggggaaagcctgaataaaaacagaaatggacacataatatgcatattccatagtctttgggaggctggaatgtgcctgggatttgggtctaagtgtatgcgtaattcttacctcactaaagaatttgccttgtttttttccttttggtgagtgactaaaacgtctgggcttccctgtgtgcgtgctacagtaagcaagcagaggctgtgcaaaggtgtgagcaggatcacgtggaatctggaggatacatcttggcttgcaaactgcctctgtctcctgggtgggactgttctgtccttgcactgctgttctgtgttacctcttggggtgt

SEQ ID NO: 65828 - DNA, 2096 bp, Homo sapiens
tgctgtgtgcagaatccagggtcctctttctgcttgcaactcctttccctggatgccccagaaacaatccaggcctcctttcctatcttacccctttgctttgctttttaccccagcacctctataaccgccttctcttcttttcagaactccttgtttctcgtcctgttttttatgattacaaaactcttgcttccaccctggaagataactgctatagatgcctgtatgtaaatggtgctgtctccagcaactggcatgctgaagaagaattgattcacggggtataaatgttggggattggaagtggggatgaaatggcacttgttgatacaggagcagagaggtgaggccgactgctgaagacagctcgccaccctccttgcctccactccaatccaggggctggggccacattctttgccttcatttatcctcagatcaggtgagatcgacaggaggtgttgatggcagtgccagcaattattgctaatccgtttgcatccttatgcatagatctgaattcagactttgtgaatttccagaggtgtgggtaatataatagaattcagtgagtgggcatggctgatcttgtgcaaattaaaagttatggggcataagaatagcaaaagttgaacttcttttaaaaaggaaagtaccctgagagccagtattggttgaggctcttcagtatgcccaggttggcagcactgagaaccgcaggaacggcctgttgttacaaaaaggagattgactcagctgcccttggtgcatctgactgactatgactgctgagagattccaaggacccttaatgccagggctaacctctccatgtgcagtgagacctctggaggaagtgtcatcctctggctttgtgtggtactcattatggtgcagtgcgggcatgaaatgaagacacccaaataggcttacagatacgatatgttttaaatgttcgtatttaacaaaaacatactgacactgtttggaaatggcaacaggaagatagcaaaatgaatactaacattacgaaaagatgaacaggtacatgttccaaggcaggtggctgtgaacttcctctgagtgaaggcatcccctccagcacctttcagcctgctagttaggacgacccgccgccaccctccaggacctccagccctgcactgcctttcctctcttttaaataattcttcattgagttctaatatgtaaaaaaaaaaagtttactgtaaagtttgcaaataaggaaattttttttaaaagtcctcagtaatcttaccagtaacaattgttatgggcacatttgcttttggaagatttcttttgtatgcatgggataagtacatttttaaacaaaaatgggattatgccataaattctattttgtgactttaatatatagtgaacaccttttttaatgatgacaggatgttcccttgcatggctgtatcaatttaaacaatcttgtttcaatgggcatacagggtattttctagtttttttttcctcttagaaaataatacttgcgatgactttccttgtagctcagactttttcacgtctgttgttatctctttgggaatgctgaatacatacatttcgagaaggaaatgactgttaaactcttaagacttcaggttcatattgctaaactgcccagcagggagggattttttcaattagtgttctcactggtgaggcaaacctgatgccttcccctcttcctcagaaccggctttatcacattgaaaacctttgctcctccgacggatcgagtctgctttccctctggatgtgagcattgctttgtctgctggtgactgaacatctctaccttgtgtcaattggccatttgtggtgtgtgtgtgtgtgcgtgtgtgtgtgtgtgtgtgtgtatgattttctaattcctagtcatttttctattgattgttttgcaaaagccatttacatcttaaggatattgataatcttttgttatatttgatgcaaatatttttttccagtttataggttgccttttaattttgtgtttcaggtagataaaagttaaacgattttcttaggttagtttatcactgtggtttctgaac

SEQ ID NO: 65829 - DNA, 3586 bp, Homo sapiens
acaacgttggcactaccaatcccccaccctccagaggggtaaccagtgttaccagtttgctgtgtttcctgctacacctcgccttattcacttccatttgtatctgaaaaacgtgttgcatggtttcttttctatagaagtggtaaaatgctattgtgtcctgtacattattgattactttttttcatttaacagtagggagatgcctgggagtacacagagaactgccctcattgttttcaacttctgcactgtatgtctgtgagtttagccattctgctgttaatggaaatttacagtattctaatcttttgatattacaaacagttctgtgcgatcatcgtcatacacaaccccttgtgcacaatgcatgagtgtttctcagggtaggtaccaagaagtgaaattcctgggtcatagggcgtgagtccgacatttttctccattctgccctgttgccctccagagtgggtgtccagctttgcatacctaagtatgagagtatctgttgttcatatcctctacgacgctccatatatgaaacttaagtttctgctagttgccatctttgatctatcatgtatgcagtgacctactaagactgtaattggtacagtagattcttgtcatctgtgtgtgaatttagcattcatgggcttaatgctgacaaggcccccagggtccaagacatataatcatgtataattttgtcaaggtataattttttaaattgcttttgtcatgtgtctgctggtgatgcccaacccagtgctctgcacccaggtcacactgtggctttgtcctctgcttatgcctgcattgcagcaactgtcctgaagagaccaaaattatgcagatttaggtaagtccatggctaatgttattatattatgtgctattgtaatggatggggctgtggagtgtatgaatttataaatcactggtcttgtaattaaaattcaaacactatagaaaaaggccatgtagaagataaaagttcctctataatcccggacccctaagataactactaatgacaacttcatttatattccttcagacattttctggctgtggatgtactaaaatgtatcctattattctctgccctaaaatggaatcatacaaggtgtactgttatttttatggctctataacatgtcatattgtacgtgttggtatggtcattttaaccatttttctagtgatggctttgaggttatttgcagtttcctagccatctcaaagtgtgctgcggggatctcttttgcatccctctgggtgcagagctgaggcacccagaggcagtgtccagaggaggcagcatctgtaggtgtcttcacctgctctggctcttggcacatctggttggtgacactgttttgtgagatgggttgaaagcacgtgctgccaaaatagaataatgttggtcctctcctcatgtgccgtggaactggggtaaaactgcgtagtggctgcagctgcctgtccataccggaatcgagtataacacggtgcctggcttagcacaaaacagtagtgggtcctgcaggccccagagtctaattcctggtattctttcccctacacagattaaataaaccaaaaacaaactattctaggaaagcgtctgtgacatttgtaaaaagtggtatttaatgatcttttattcacttgtctgtttagtttgttgaaatcttaagtggcatcctggtctgggaaggagtgctgtctgcgcctgccctccgctgggcacagcgtggctgcttcaggggctaagcacacactttctgtcttctaaagggccgccacatgccaggagctcaggtgtgagcccggctctggctcttacctcatagggtcactcataggggcacagggagcagaacattgtacacagcgaggcaccacccggcttggcatctgcctcggtggacttactacctctagaaggaaatacctgagttcctctggcctcagctcctagagtgactggtgtgctgtccctgttactcttctgtcaaggtgacaactgtgtgacccatcatctgtgtgtcaaagcaaggccctgcctgggcctctgctcctgtgctgaccccaaaggcaaatgctttgctagtttccttccagttaatttcacctatgaatagatgtgtgaaaactgttcaaagccatacctgcacatgtttgaacttcaaaccctgtgggtgattcagtggcatctttctctaacccccagcctcccttcccacagaggccaccgtcatggccagttgctgcagtttctttccagagaacctgtgtatgtgtaaagctgtacaggcgtgggtacaccacacagcctgtcttgcactgtggactgttgagttactagtacatctaggtaagcaccgcatatctgtattcatgtctgccttggtcttttcaacatctgtgtggtagccgtgtttgaattacccattccctttttggggaaccattaagttgtttcagcaatttttactgtagataaggctataccgcatatctgtgtacatgggtttttatgtacatgggcaagtatatctgtgagagaaaagtttcctcaggaggaattctgggcacagcatgtgtaaatttctaaatatgatggacacccccagcttccacctcaaggaggttggtcccattgacatttccccacaccttcacccaggctgtgcccttaaacttggttatttgtcaatgtgagaagtggaaaatagtatttaattgtagtttggatttgtatttctattgggttgtatacttactgattaataataagagctctttacatattaaggaaattaacccttttcaaatacattcctatttctcactaatctttaagttttattgtaatattttgctctttagtttatatatatatgtatatatatatatatgtatatatatatatatacatatatatatacatatatatatactaattttcttttatggttcctggattttgtgagtagtttgaaaaggctaatccagctgaagattttgttgttgttgttaaaccccatgttttctcctaactctttttatttttattttggaggactctatctagacttaattttagcataacaagtgacagggttagttagcctgttgtccttacaccattttctggctaatacagctattaactattgatctgtctattcacgtgccagttcctaatggttttacatagtgtaatctgcacttcaaaatagcgaagggaagccctacctcattattctacttttccagaattctcctggctattccaggctgcatgtttaccttaaccttccctgtgatgtcttcatgccgttgtcttcttatgcaagaataaggtacgtctttccatccactcacgtctatttaatttgactttgcattacacagaaagctggtcttggtctgtctacctcggcatctagttgtcctcactgccccctagccgaccccaccccatctgactgactaccccatcacagagtacttttatttacgttttgctctgcctaatggttacttgatactgtcacgccgacagtgtccagtt

SEQ ID NO: 65830 - DNA, 1221 bp, Homo sapiens
tgtgtgaaactgaaatgaatagtatcgtgcaggtacttgtgagcaaggggagctgctgtttcctgtccctttatgatgggaaatatctagacaagttcccaaccctctgcactgcaggctgcatggcacggagggtcttgtaacaccagctggggctggccttcttttaggagcttcagtggttctgaaaacttttatttgtttgtttgttttagtagatgtggggtctttctgtgttgcccggactggtctcaaacttctggactcaagtgatcctcccccgctcaacctcccaaagtgttgggattacaggtgtgagccactgtgcccagccttgaaaactttttcaggttcttccagggttactgggctattaaatatttctatttcattataagtcagtttttcaaagttatattatcttaattaccttttttatatgtattagtgtagagtagcattttatattttgatatcctccttatgcatagtttttcactttttattcctagtttttcgtttttaataagactttcaagaaatttattttattggccttttgaaaaaagcagctttagataaagtaagcagttctgctttcattttataatttatttctacttttgtttcattaatcttttcctccggcatgccttggattttgttgtgttactctttttctagaggctcgcattgtgtgtctggttcacttatgatcacgcttgcctacttttaagaatggaagaggggaggtggagggtggctgcacagtcgagggtgtgaggcagtcttgctctagccccaccatgccctcagcccgctgtggccacgctggttcctcaattgctggggcgtgcagtgtctgtaagggaggctactgatgccatccgaggaagatgtaaggtttcgtgtgggcagcgagagcctagcaggcatgtggggtgcccagcaaagggtaacagtggacagttgttgcctcattccacagagttttgattttttttttttttttaatggtcactccatcaacatcccccatggccagagcctgagctggtccccagagacacaggcattcagctgacagcctcgccttcacgctgctgctgttctcatgggggacaggcctcaggtggcaatgcacaaatcattagttaagggcagttgtgacagttaccaaggagtgtagtcccccgccccccgcccagtgaaaacagccct

SEQ ID NO: 65831 - DNA, 2260 bp, Homo sapiens
gctttctgcccatgtacatgtgtttattttacactgttgtgattggtagttactatgtggggacacaattacttgggctgaaataatccacctgttgtggttggggtcctctggggcattccagggtgagaggttgtcactgccacctgggccatgtgggccggcaccagcattttgtggttacgaattctacagtcacaaatatctttgggcaaatccccttctatacctcaaggcagcttttggtttgcaaccccactggccagagggaagggccagtcacttggctctctcactgccctgcgccccagatggttctagggctgctgttttcccttggccctgccaacaccactgtttttacttctgctcattggctgagtgcagtggttcctggaagccagtggcacgtttccccgcgtagctcgcttatcccacagcacacacccaagggttctgttgctaacacgctgaattaattctttgctcatcttacagagtgtgttttgactgcccccatttctgaggccttgtaaggccagagctttgttgcttcatcggcaggttgggacttagatggccgtgaatgtttcctctctgctgctgcagtaagtaagtgcccgcaccatagtgtgtttggaggctgaagttgaagcgaggctgtgaggggagatggacgtgtgaggagggatgatggggcttgagcaaagtgggggagggggcaaaggcagttggcccaacacattccccacccctttgagaggtctgaggcctgcagacctggctcggagcccacctggtagtcctcagactgtgtgtgtgtgtgtgtgtgtgtgtgtgtgtgtgtgtgtgtgtgtgtgtgtgtgtgtgtaaaagagagaagttgtggagaaatggggggctgattctgctcagattcatcaggatgagtagaaggcacccagctctcaccctggcctgacatgtgtgtccctgagcaggttacagtcctctctgagcctctgcttcccatctggaccctgctgggcagggcttctgagctccttagcactagcaggaggggctccaggggccctccctccatggcagccaggacaggactctcaaatgaggacagcagagctcgtggggggctcccacggacccgccgtgggcccaggggaggcagagcctgagccaacagcagtggtgctgtggaccgtggatcctgagggtggcctggggcaagtaccggctgagggtccaggtgggctttgtgtacctttgggtcctggggccctggtgacttggactccaggttagagtcaagtgacaggagaaaggctggtggggccctgtgcttccgacttcatttcgagtgatggcagttcccaggaaggaatccacagctgacggtggctgacagatcagagaatggaaggcgaggcaggcgggcgtctgcgtgacctcaggtgcttggggcccagcagacccagagaaccatttccactaggccagggtgccggaagtgtccacaggtcttagattccctgttcagatgaaaagatttgtgcctttaatgataaaagtgatctgcatagagtcaaaaattcaagccatgggtataaaatgcaagtaaaatccctgccctcacctatcccaccctactacacagagatgtcctctcgagtttcctagactcactctggaaatttctgtatacacacagaagcttgtgcctctgctcgtgaaggcagagggagggagagctgaagggccagcaccttctcacctgtgggccccctcagtgctcggtcccagagcatgcaggactgtgcctcgtgttcagtttgctggtctgacttcatgctccttgggcaggatatgcatgtgccatgctaggagacatgtggatgtgaagctgggggacaatgtcccctggctatgcctttacaagggaagtaaggaaggtaggaggtgagcctgggagggagggagggaggcgcggagccgccgcaggtgtttcttttactgagtgcagcccatggccgcactcaggttttgcttttcaccttcccatctgtgaaagagtgagcaggaaaaagcaaaaggcgctggtggtggcacgtccagcacggctgggccggggttcgagtccccgcagtgttgctgcttccttccagctccctcctccaggcctctcctcccaccccaccagggatatcttgtctcctagaggggtagcattgggtggggcaccccaggcctctcccagaagccc

SEQ ID NO: 65832 - DNA, 5611 bp, Homo sapiens
agtagatggcaagtttgtgggttttttttttttacacgaatttgaggaaaaccaaatgaatttgatagccaaattgagacaatttcagcaaatctgtaagcagtttgtatgtttagttggggtaatgaagtatttcagttttgtgaatagatgacctgtttttacttcctcaccctgaattcgttttgtaaatgtagagtttggatgtgtaactgaggcgggggggagttttcagtatttttttttgtgggggtgggggcaaaatatgttttcagttctttttcccttaggtctgtctagaatcctaaaggcaaatgactcaaggtgtaacagaaaacaagaaaatccaatatcaggataatcagaccaccacaggtttacagtttatagaaactagagcagttctcacgttgaggtctgtggaagagatgtccattggagaaatggctggtagttactcttttttccccccacccccttaatcagactttaaaagtgcttaaccccttaaacttgttattttttacttgaagcattttgggatggtcttaacagggaagagagagggtgggggagaaaatgtttttttctaagattttccacagatgctatagtactattgacaaactgggttagagaaggagtgtaccgctgtgctgttggcacgaacaccttcagggactggagctgcttttatccttggaagagtattcccagttgaagctgaaaagtacagcacagtgcagctttggttcatattcagtcatctcaggagaacttcagaagagcttgagtaggccaaatgttgaagttaagttttccaataatgtgacttcttaaaagttttattaaaggggaggggcaaatattggcaattagttggcagtggcctgttacggttgggattggtggggtgggtttaggtaattgtttagtttatgattgcagataaactcatgccagagaacttaaagtcttagaatggaaaaagtaaagaaatatcaacttccaagttggcaagtaactcccaatgatttagtttttttccccccagtttgaattgggaagctgggggaagttaaatatgagccactgggtgtaccagtgcattaatttgggcaaggaaagtgtcataatttgatactgtatctgttttccttcaaagtatagagcttttggggaaggaaagtattgaactgggggttggtctggcctactgggctgacattaactacaattatgggaaatgcaaaagttgtttggatatggtagtgtgtggttctcttttggaatttttttcaggtgatttaataataatttaaaactactatagaaactgcagagcaaaggaagtggcttaatgatcctgaagggatttcttctgatggtagcttttgtattatcaagtaagattctattttcagttgtgtgtaagcaagtttttttttagtgtaggagaaatacttttccattgtttaactgcaaaacaagatgttaaggtatgcttcaaaaattttgtaaattgtttattttaaacttatctgtttgtaaattgtaactgattaagaattgtgatagttcagcttgaatgtctcttagagggtgggcttttgttgatgagggaggggaaactttttttttttctatagacttttttcagataacatcttctgagtcataaccagcctggcagtatgatggcctagatgcagagaaaacagctccttggtgaattgataagtaaaggcagaaaagattatatgtcatacctccattggggaataagcataaccctgagattcttactactgatgagaacattatctgcatatgccaaaaaattttaagcaaatgaaagctaccaatttaaagttacggaatctaccattttaaagttaattgcttgtcaagctataaccacaaaaataatgaattgatgagaaatacaatgaagaggcaatgtccatctcaaaatactgcttttacaaaagcagaataaaagcgaaaagaaatgaaaatgttacactacattaatcctggaataaaagaagccgaaataaatgagagatgagttgggatcaagtggattgaggaggctgtgctgtgtgccaatgtttcgtttgcctcagacaggtatctcttcgttatcagaagagttgcttcatttcatctgggagcagaaaacagcaggcagctgttaacagataagtttaacttgcatctgcagtattgcatgttagggataagtgcttatttttaagagctgtggagttcttaaatatcaaccatggcactttctcctgaccccttccctaggggatttcaggattgagaaatttttccatcgagcctttttaaaattgtaggacttgttcctgtgggcttcagtgatgggatagtacacttcactcagaggcatttgcatctttaaataatttcttaaaagcctctaaagtgatcagtgccttgatgccaactaaggaaatttgtttagcattgaatctctgaaggctctatgaaaggaatagcatgatgtgctgttagaatcagatgttactgctaaaatttacatgttgtgatgtaaattgtgtagaaaaccattaaatcattcaaaataataaactatttttattagagaatgtatacttttagaaagctgtctccttatttaaataaaatagtgtttgtctgtagttcagtgttggggcaatcttgggggggattcttctctaatctttcagaaactttgtctgcgaacactctttaatggaccagatcaggatttgagcggaagaacgaatgtaactttaaggcaggaaagacaaattttattcttcataaagtgatgagcatataataattccaggcacatggcaatagaggccctctaaataaggaataaataacctcttagacaggtgggagattatgatcagagtaaaaggtaattacacattttatttccagaaagtcaggggtctataaattgacagtgattagagtaatactttttcacatttccaaagtttgcatgttaactttaaatgcttacaatcttagagtggtaggcaatgttttacactattgaccttatatagggaagggagggggtgcctgtggggttttaaagaattttcctttgcagaggcatttcatccttcatgaagccattcaggattttgaattgcatatgagtgcttggctcttccttctgttctagtgagtgtatgagaccttgcagtgagtttatcagcatactcaaaatttttttcctggaatttggagggatgggaggagggggtggggcttacttgttgtagctttttttttttttacagacttcacagagaatgcagttgtcttgacttcaggtctgtctgttctgttggcaagtaaatgcagtactgttctgatcccgctgctattagaatgcattgtgaaacgactggagtatgattaaaagttgtgttccccaatgcttggagtagtgattgttgaaggaaaaaatccagctgagtgataaaggctgagtgttgaggaaatttctgcagttttaagcagtcgtatttgtgattgaagctgagtacattttgctggtgtatttttaggtaaaatgctttttgttcatttctggtggtgggaggggactgaagcctttagtcttttccagatgcaaccttaaaatcagtgacaagaaacattccaaacaagcaacagtcttcaagaaattaaactggcaagtggaaatgtttaaacagttcagtgatctttagtgcattgtttatgtgtgggtttctctctcccctcccttggtcttaattcttacatgcaggaacactcagcagacacacgtatgcgaagggccagagaagccagacccagtaagaaaaaatagcctatttactttaaataaaccaaacattccattttaaatgtggggattgggaaccactagttctttcagatggtattcttcagactatagaaggagcttccagttgaattcaccagtggacaaaatgaggaaaacaggtgaacaagctttttctgtatttacatacaaagtcagatcagttatgggacaatagtattgaatagatttcagctttatgctggagtaactggcatgtgagcaaactgtgttggcgtgggggtggaggggtgaggtgggcgctaagcctttttttaagatttttcaggtacccctcactaaaggcaccgaaggcttaaagtaggacaaccatggagccttcctgtggcaggagagacaacaaagcgctattatcctaaggtcaagagaagtgtcagcctcacctgatttttattagtaatgaggacttgcctcaactccctctttctggagtgaagcatccgaaggaatgcttgaagtacccctgggcttctcttaacatttaagcaagctgtttttatagcagctcttaataataaagcccaaatctcaagcggtgcttgaaggggagggaaagggggaaagcgggcaaccacttttccctagcttttccagaagcctgttaaaagcaaggtctccccacaagcaacttctctgccacatcgccaccccgtgccttttgatctagcacagacccttcacccctcacctcgatgcagccagtagcttggatccttgtgggcatgatccataatcggtttcaaggtaacgatggtgtcgaggtctttggtgggttgaactatgttagaaaaggccattaatttgcctgcaaattgttaacagaagggtattaaaaccacagctaagtagctctattataatacttatccagtgactaaaaccaacttaaaccagtaagtggagaaataacatgttcaagaactgtaatgctgggtgggaacatgtaacttgtagactggagaagataggcatttgagtggctgagagggcttttgggtgggaatgcaaaaattctctgctaagactttttcaggtgaacataacagacttggccaagctagcatcttagcggaagctgatctccaatgctcttcagtagggtcatgaaggtttttcttttcctgagaaaacaacacgtattgttttctcaggttttgctttttggcctttttctagcttaaaaaaaaaaaaagcaaaagatgctggtggttggcactcctggtttccaggacggggttcaaatccctgcggcgtctttgctttgactactaatctgtcttcaggactctttctgtatttctccttttctctgcaggtgctagttcttggagttttggggaggtgggaggtaacagcacaatatctttgaactatatacatccttgatgtataatttgtcaggagcttgacttgattgtatattcatatttacacgagaacctaatataactgccttgtctttttcaggtaatagcctgcagctggtgttttgagaagccctactgctgaaaacttaacaattttgtgtaataaaaatggagaagctctaaattgttgtggttcttttgtgaataaaaaaatcttgattggggaaaaaagatgggtgttctgtgggcttgttctgttaaatctgtggtctataaacacagcacccataattacagcataatcttcaagtag

SEQ ID NO: 65833 - DNA, 1379 bp, Homo sapiens
ggggagggggcgggcagtgcctacgtggcgggcggagggaccgagggaccgacaggcggacagggccggggtcacgtgggcccggcgaagtgtccctaaggctgacctggggagagacctggctgcgggcccttgtcttccggccacacaacagctctgggaccatctcaggccccgctgccctcccctaggccacaggcagccccgtgtccatcttcgtctatgatgtgaagcctggcgcggaagagcagacccaggtggccaaagctgccttcaagcgcttcaaaactctacggcaccccaacatcctggcttacatcgatggactggaggtacctgctgccttgcctgcccgtctctgcccctcacgatgtcctggttacccactcctgtctcccctcctgccctgtttccaccctatgtgccccagcacccccagatttggtttcctcttccccatctctcccaacttcaagtcgcttatctctccttcctctctgcccctccgcccttgataaccctgtgtccccttccccagacagaaaaatgcctccacgtcgtgacagaggctgtgaccccgttgggaatatacctcaaggcgagagtggaggctggtggcctgaaggagctggagatctcctgggggctacaccagatcgtggtgaggtggggggcagtggtgatgagagcagggatggggggttgcaggtgctggggcgtgatggctccttttgcccccagaaagccctcagcttcctggtcaacgactgcagcctcatccacaacaatgtctgcatggccgccgtgttcgtggaccgagctggcgagtggaagcttgggggcctggactacatgtattcggcccagggcaacggtgggggacctccccgcaaggggatccccgagcttgagcagtatgaccccccggagttggctgacagcagtggcagagtggtcagagagaagtggtgggtgactgggggcagcgcgccccaacctgccctgtcctggaggcccctgcagcctcaggactcctagactagttggcactcccctgttccctgctgcctggctggggagggaatcagtgtcccaggagtgagggacactcctctgcccccagggtcctcagggcggtagggcgggatggacacagcattcggggttgggtgattctgaacttgaaagctctgtgacctggacagatgtgcctagttctctgaggcttggtttttttaatctgttaagtgaggctaatgaaacctgcctcttgggactgatggctcagctgagggacatagccaggccctggcatgcagtgggtgcctggtgcccaaggcaggctggaggcctgtgcaggtggttggtggggccctaag

SEQ ID NO: 65834 - DNA, 1047 bp, Homo sapiens
ttacaggctggtccattttggctcagtgggaggatgaggtctgggagtaaagtgtacctaatccttgccttcccacggcctaccaggaacttcctgcccaatccagccagggcagggaaaccaagtaagccccttcacctctttgatcttcagtttcctcctctgtgctcacatcctgggtggcgagcagtagaggcaacactgataaagggcctgatgcccttagtgatgcctctgctgtccctagtggctgctctcccagcaacaggtcaggtagccgcaatggcagcaacagtccctaacccaccgagcatctgccgtgtgccagcctgttctgcagcttttatgtgcattttctggttgaatcccagaactatcccgtagatggtagagctgttatcccattttacatggcaggtaagtgggacagttgggctttgaacccaggcagccaggctccagagcccataaggcccataagcatcacttctccttgtcctcacccatggctgggtttgggctgcaaccaggctgatctcttccccgggtcccgtcctcactcccccagatcaaagagccagccgagaagcaaaaattcttccaggagctgagcaagagcctggacgcattccctgaggatttctgtcggcacaaggtgctgccccagctgctgaccgccttcgagttcggcaatgctggggccgttgtcctcacgcccctcttcaaggtgagtggaactgtggggtccagaaggctggctgggtgcacaggaactgccaaagagaaggccctggggtagggcaggctgtttagggcagacccaagcccatatgagcaggagcttcctgccagtgtctataaacaggtacctgaccagctgtcccctggggaggagagactctgccgctaaaatccttttttccacaaacctctggcttcacaaccctcagcccttcctccatttctccgggtctgacctgtgcaccttggttcccagggcccaggggattacctactcaccaccccactttgccctcctccctcctg

SEQ ID NO: 65835 - DNA, 2103 bp, Homo sapiens
tgaaggggatataggagctgggtaggctccagtcaccctgtgggcttccttggtgccccttccccccagtagcccccttcccctagcagcctctgccctgtcccaagacccccctgaaagctcagtgagcctctgctccccaggagttcctgccccagcccccacccctgttcctgccacccctacaacctcaggccactgggagacgcaggaggaggacaaggacacagcagaggacagcagcactgctgacagatgggacgacgaagactggggcagcctggaggtgtgtggggctgagggagcctccccaggggaccccagctcaaatccacaggctgccattcagggagcttctgtggggcctggctggagttggcctgtcctcatcagcacagcatccctggcacgtaggcctcatggagtggccattgtaggccagagccagcagcaggccccattcaaccccagcggccccagggagcaggctaggcagatggtgcctggggcattccctgaacttcctcactcttacccacaccgtccccctttcccctcctccagtgcccacccagccatgggggtcagcaaggagaggccactcctgggtctagaaccagaccagttctgcttgggggatgggctcaggttgggctgagggaggactggggctgtcctcagaatggggcagagctgggggcccaatttccccatctggctgacagcagcagtttctggccctcaaggctgttggaaggggcatctagatctcattccccagccttaaagaggggtgagggcaggccagggtcagcgtccatttaatagatgggaaacagggcctgaggagcaaatgaggaggaaggcaaaagacagtggtggggcccgtggctgggatgatgctggggcgggctcacttgccctttagcatggggtgggagtcagtggtcccttcccacactgcagcaggaggccgagtctgtgctggcccagcaggacgactggagcaccgggggccaagtgagccgtgctagtcaggtgagctgggtctggtggggaggtgtgtgtatggggctctttcctccttgggcccagggctacttccccctcccgctcttctacaggtcagcaactccgaccacaaatcctccaaatccccagagtccgactggagcagctgggaagctgagggctcctgggaacagggctggcaggagccaagctcccaggagccacctcctgacggtacacggctggccagcgagtataactggggtggcccagagtccagcgacaagggcgaccccttcgctaccctgtctgcacgtcccagcacccaggtacccagcacaggtctggcgagagggtagagatggtggacctcagccagaagtgggccccactgcagcccacacttctctttacagccgaggccagactcttggggtgaggacaactgggagggcctcgagactgacagtcgtaagtgcttcccctgggtgggctgaagactagggctccccgactagcccgcccctacaggcccccggcaggcactggctggagagctgagaccggggctccccttcctgacgccaggacaggtcaaggctgagctggcccggaagaagcgcgaggagcggcggcgggagatggaggccaaacgcgccgagaggaaggtggccaagggccccatgaagctgggagcccggaagctggactgaaccgtggcggtggcccttcccggctgcggagagcccgccccacagatgtatttattgtacaaaccatgtgagcccggccggcccagccaggccatctcacgtgtacataatcagagccacaataaattctatttcacaccccttgtgccgggctcagtctagcccctgggaggcggctggggtctggcgccgccctgcgcagcccgcgcccacgtcagacgtgaacatcaatttgcttcgaaagccaagggtaaagaggcacgatctgatttatcagtttctaggaaacaccctctgggaggaaggcaggcagcgcccgccggagaccttacaaccgcccgctaaccggggaggggggccggtaggggcgcctcgggtc

SEQ ID NO: 65836 - DNA, 1057 bp, Homo sapiens
gggctgctgtgcaagagcgagcgctgcgtgaacaccagcggctccttccgctgcgtctgcaaagccggcttcgcgcgcagccgcccgcacggggcctgcgttccccagcgccgccgctgacgccgccgacgccgccctcggcccagacctcggtgatcactgagggatttccgcgagctcggcctcacttctgccccgacttgtggctcggacccagggaccttcagggcccgcagaccctcccggcgccttgagacccgaggcgcccctaccggcccccctccccggttagcgggcggttgtaaggtctccggcgggcgctgcctgccttcctcccagagggtgtttcctagaaactgataaatcagatcgtgcctctttacccttggctttcgaagcaaattgatgttcacgtctgacgtgggcgcgggctgcgcagggcggcgccagaccccagccgcctcccaggggctagactgagcccggcacaaggggtgtgaaatagaatttattgtggctctgattatgtacacgtgagatggcctggctgggccggccgggctcacatggtttgtacaataaatacatctgtggggcgggctctccgcagccgggaagggccaccgccacggttcagtccagcttccgggctcccagcttcatggggcccttggccaccttcctctcggcgcgtttggcctccatctcccgccgccgctcctcgcgcttcttccgggccagctcagccttgacctgtcctggcgtcaggaaggggagccccggtctcagctctccagccagtgcctgccgggggcctgtaggggcgggctagtcggggagccctagtcttcagcccacccaggggaagcacttacgactgtcagtctcgaggccctcccagttgtcctcaccccaagagtctggcctcggctgtaaagagaagtgtgggctgcagtggggcccacttctggctgaggtccaccatctctaccctctcgccagacctgtgctgggtacctgggtgctgggacgtgcagacagggtagcgaaggggtcg

SEQ ID NO: 65837 - DNA, 1048 bp, Homo sapiens
gggaccggagccactgcgagggtgagggatcttagagctggggtgctgacctgtccctccctaccccaggacccccaccccccagggtccagtcctaatccagatctcagttggggcataggggcgtgggactgacccagggctctgggagaaagctttggctgcctcaggctggggttggtgatcagcccctgagattctccaccccttccatcccctacagacattgatgagtgtgacttccctgcagcctgcattgggggtgactgcatcaataccaatggctcctacagatgtctttgcccccaggggcatcggctggtgggtggcaggaaatgccaaggtatgggggactggctgagggttcctgagggatgtggcagggagcagtaattccctagacacactgtggcctttctccatccatccatccacccatccaaccatccttcatccatccatccatccatctatccatccatccatccatccatccatccatccatccatccatccttctatccatccatccttccattcatccttccactcacccacccatccatctgctcagccttccagtctttcacctagaataacaatgatcacagtaaacatgacagttagtgctatcgtggtgcttactatgtgccaggcactctgttaagctctttacagatattaatgtattggtcttccccatcaactcacccatacacatgcattcatccaacaaaagtttaggctgagtgcagtggctcaggctgggggcggtggctcatgcctgtaatcccagcactttgggaggctgaggcgggcggatcatgaggttaggagttcaagaccagcctggccaatatggtgaaaccccatctctactaaaaatacaaaaattagccgggcgtgatggcgcacgcctgtagtcccagctactcgggaggctgaggcagaagaatcgtttgaagatgggaagcggaggttgcagtgagccgagatcacgccactgtactccagcctgggcagagagtgagattccatctcaaaaaaa

SEQ ID NO: 65838 - DNA, 1032 bp, Homo sapiens
gtgagtatgggacagaaacagacagaggtcccatcctctccctcagtcattctttcattcattcccccgaaccccctgtgggacccagagctgaggccagcctggccctgccttccagagcaccctctataaggaggcagacagacaagaacatagccaagcaggtgccaggcagagctggccagtgggtggtaaggcaggagagggagctcaggggggccggataggaggaaagcctccctcctggtggagacactgagctaggaaggatgagatctgcatatatagagaggggggggacctggggccctgttgtggagggaagggcatggatgaggccaggaggcaggaggcaggcacatttgcaagagggagatgggtcctggggtgtgcagtacacagggaaggagcagagggggatgggctgaaaaggttctggtccatggagtgagcttctgcctgaggcaggtttctctgggacactgagattgtggaccagcaggagaggctggaagccaaggaggggtctgggtggccaggcctgggccagggcaggagcagtggccctagggaggaggggaggcaggttcatgggacattagaggctgtaactgggcaggggagagcaggagggacggagccgtcggggctcagctgtggatgcctggtggccaggtgaagaggaggtggggaggcaggatgctgacttctgacagtatgtcctgggcagaggtgcctgagagagccctggaaaggctgggggctgtgtctgtgtcttgagatgtggacatctttggcagtggtgaggtgggcgccccaggatggtgaagagggagagggtggagagcaggcagagaggactgaggcctgaaggagggaagggtttatgggagaagaggaggaggcgccagggacggagccaatacctttggaaggctcaaggggaaagccagatcaccataattatttgctaccacttattaagcaccctttgtgtaccaggccctggggtaagcatttgtacagccctta

SEQ ID NO: 65839 - DNA, 1001 bp, Homo sapiens
ttttccaaaagaagttggaaatatgagctgggcacagtggctcacacctgtaatcccaacactttgggaggctgaggcaggtggatcacttgaggtcaggagtttgagaacagcctggccaacatggcaaaaccccgtctctactaaaaacacaaaaattagccgggcatggtggtgcatgcctgtagtcccagctactcaggaggctgaggcaggagaattgctagaacccgggaggtggaggttgcagtgagccaagatcgcaccaccgcaccccagcctgggtgacagggtcagacaccgtttcaaaaaaaaaaaaagttggaaatacaaattccaattcaaaaaatactgagacactttgtggggcaaaaaatacgaaaacccagggctgtgggtctcattgctgcttttccctgggcctgtgcccacgcgatttctctgcaggactccctcatccctgtctgtgccctcctgatccacaagcatctcatgccgacttcctcccctatcttccctcactcccccacccgaggccatggtcctgatctgtccttcccaggttcattctatttgcttccatccaagaatccatcccactgtattgtatcccctatctggccacaggctgtggcatctgggcagctctcctgggtctcaaagggtgcctggggtgggactggggaggccacacccttcctggcagttgaagtggaggcaccagttggggtgtgttggtggggagccccagctgtgatgtcaggcctcacagggcctgggctccatctggctctttggggctgaaggaagggctgcatgaaccccaaagcccccagggagccatggcctcttggagccgcaccccccgacttggctgcctggctctcttacctgtggtggtgaggatgctggcagcgaagagcagggctgagggaaggtcccaggtcctgccctctgagctgttgcccagggtggagaccccatgggcctgggtggccagg

SEQ ID NO: 65840 - DNA, 1050 bp, Homo sapiens
cgttggaacgagtgtctccccgatctccctggggcagagtcggggcgggcgctgccgggattggtgccaggctgacctctccaccatcgctgtctcgggcgcaggaactactgagccgcgaggaggagctgacgcgagcggcgcgcgagcagcggtcacaggcggagcagctgcggcggcgcgagcacctgctggcccagtgggagctagaggtgttcgagcgcgagctgacgctgctgctgcagcaggtggaccgcgagcgaccgcacgtgcgccgccgccgcgggacattcaagcgcagcaagctccgggcgcgcgacggcggcgagcgtatcagcatgccactcggtgagggccgggccccggggcgtcccccgccattggctgcgggggtgggggtggagccaggcctgtgtgctcaccgcgctgggattggtttagggtgttgtgggtgggcccgtgagatgaaggctgggaggggtggagccaggagtgttttttttctgtctgtgggcgggttctggcggaagtatttgcatgtcggtctgggagtgggaaggggtggggttcacgaaagttctgggaaggtctagtgggcggggccggccggcgccagggcatctccgactcagacgagtagctttccttatccagacccaggggctcaagaaagcagtgaggctggtcacagtctcacagccatcgtgccgctccctatgtggcctgggagctggccttgggcccctgcaggttggggtcctggctctacttcatcacaaacctgaaccctgctccccccaacccaaatcccagacttcaagcaccgcatcaccgtgcaggcctcacccggccttgaccggaggagaaacgtcttcgaggtcgggcctggggattcgcccacctttccccggttccgagccatccagtgtaagaaacttcacctctcatgcccctctccgccccccagctccttattctctgtcagaccttattcttggaggcggagcccactcactatcccctcttcctccccgcccccaggctccctgc

SEQ ID NO: 65841 - DNA, 4926 bp, Homo sapiens
taaagggggcgggccgagaggggcgtgcttcggtagtgcagaactctcgctgctactaggggagtccacgcctccaccttttccccgcctcctgtaactcattggaagagctgtgcgccaattactttgccgttacccaatggctactcaactgtctctttggttccgcccagtcgtctaccctgggttggcaacgcctgggtctacgcatgcgcccaaacgcttttacgctcgaacttgctttagtcctggagtctgcgcacgcccaaagggcacccctcgcgtcctaccgcgccatcacctttctgcgcttgcgcattcatgccgtcaagttttccttttccgggtcccaattggaatcgttgggcgcatgcgccactgcaggctggcggttcgcggctccttcttccggcctcctccttaggccggcaccagcagaagccgggcgagcgcggagccccaagcaagtgacctgcgaccccgaaagtggaccccagatcctggggttctccctggtccggagactagggagctgtcgcctgcaccccgggagcacccaccccacgaccacctctggatgccgccgacgggtacccggcccgtgccccgcgcctgcctgccggctcggcccctcggagcaattctgggccaggagtggggacccggaccccgcccctgatgcagccccacccccgcgtccgggccttgcaccactgactgtcccggccggccccgccccctgctcgcaccctcgcgcggccgagcccccctcccccgctgggggaggccatggcgtgagcgtgaggccgggccccggggccctcaggcgccagacggggcatgggccgggggccgcccccatgagggtcccgggagggggggcgcgggcagcagcggcggggccatggggtcgcaggtgttgcagatcctgcgccagggggtgtgggcctcgctcaccggcggttggttcttcgacccgcaccagagcaccttctccaactgcttccacctctatgtgtggatcttcctgctcatctttcccttcttactgtacatggtgagacgccacggccacctgtaactccagccgggagagggagggcagcctggcagggattcagggcagtgccctgggctctgggacgtggagagagaggaatcactgcagagtttgggtctgtgtggaagaggggccaaagtcttcctttcttggatcgagtgaccttgaaccctacacttaatctcatccagctaagcagaatacagagccctttgtcgaggtctgtgtactggttgtgtggagaggtgatgaaattttcttgtgagtctgtgaatcccagctatgatgttgatggcaggtacatcctgtgggggcgaggctttgtgaaaagggacctggcttactttcatcttcaggtcctgcctcccagcttgatggtggccggcgtgtactgcctcgtggtggctgtcatctttgctactatcaagactgtcaattatcggcttcatgccatgtttgaccagggcgagatcgtggagaagcgcagctctaccatgggggagctggaggaagagcctgcccagggggacagcaatccacccaggtgggtggggtaggggctgtgctggggattgagggtttttggtgcctgggccggaaccttgcagggtggagtaggggcttagggaacattggctctctgagtgattgtgaacacttgtcctgtgttagccctggaattgtaaagtgacttctgaaaaagaagcagtgacaaagatgggaggaagtagcatacacagaggagaggttagctcaaagctgctgctctttttcaccgccagggaccccggagtggagatgacagtgttccggaaagtcagttccacacccccggtgcgctgcagctcccagcactctgtgtttggcttcaaccaggtctcggtgagtgggcctggacctcagcttgtcctcctgtccctctgcgagccagtccctactgtgggtgcatcctgagcctacttcttgccttgtttgttccttcatggctctctgtctactcaggagctgctgccccgaatggaggactctgggccccttagaggtaggtggctgctcttcagggttggagcatagtgctgtggaacaggggctggcgtgctgtgccagggggtcctgctgacacctctggggccatggttgcagacatcaaggagctggtgcgggagcagggcagcaacaatgtgatcgtgacttctgccgaccgagagatgctgaagctcagctcgcaggagaaactgagtgcgtgggccttatggggccgaggcttgtgggctagaccagctgtttcgttgttgaatcccctcaactttggctccatcctgggtctcctctgtattcctctgtgggacctccccagtgtgctgctgtggctgggctctcagggaaagtacagggcataagacctcccttaaccactagtttgttttgcagaaaacccttttttcattttctgtttccctttattttggcagttggagaccttccccagacgcctccaggggctgtcccagacccctctcttgccagtacagactcttcagagccttctcccctggctggagatggagcgccctggagtgggagcagcatggctgacactcccatgagccccctgctgaaggggagcctcagccaggagctgagcaagagcttcctgaccctgacccagcctgaccgggccctggtgaggaccagcagtcgacgggaacaacgcaggggggcaggtggctatcagccccttgaccggcggggctcaggggagcccacgccccagaaagccggctcctcagactcctgcttcagcggcactgacagggagacattgagcagcttcaagagtgagaagaccaactccacccatctggacagccccccaggggggccagcccctgagggcagcgacacagacccaccctctgaggctgagctgcctgcctcaccagacgccggggtcccctcagatgacacgctgcgttcctttgacacggtcattggagcagggacgccaccgggcctggctgagccgctcctggtcgtgcggcccaaggacttggccctgctacggcctagcaaacggcagccacccctgcgaagacactctccacctggccgtgcccctcgacggcccctgcttgaaggtgggggcttctttgaggatgaagacactagtgagggcagtgaactgagcccggcctccagtctccgatcgcagcgccgctacagtactgacagctcctcttctacttcctgctactcccctgagagctcccggggtgcagcagggggaccccggaagcggagggccccccatggggctgaggagggaactgctgtgccccccaagcggccatatgggacccagcggacgcctagtaccgccagcgctaaaacacatgcccgtgtgctgagcatggatggggctgggggtgatgttctgaggcccccactggctggctgcaaggcagagctggaggcccaggttggggtggagcaggctgctagtgagcctgttgtgctgcctgctgaggcgcgaaggggacccgctgccaaccagcccggctggcggggggagctgcaggaggaaggtgctgtggggggaggtgagtgcttgctctagaggcaggggctgggggacgtgagctacgggcttggggttgggcaaagggcaggtaagaatggacctggtcagtgtcagctcagcctcggttgtaggcagcagatggacgtgggcctggtggtgattgacattgtctgccaaacctcttagacatggggctcagccacctggctccacatccttgattagcacctgagtctctgtcccctgaggactctcatcatccacactcatcctcccaccaccagtggggtggggcagggccgatcagtgtcatccttgtttgcaagtaaggaaactgagcatggggctgtgtgacctggctgggcctcagagccggggcgtggttgtactaggcctttagctccctggcggaacaccgtccccaaccttactcccccagccttgtctgagcatctgtcacttacacttgggggcctctctctgggcagcggccgaggagactggcaggcgggaccgctcaagcagtgtgaggcggacccaggccattcggagacgccacaatgcaggcagcaaccccacccctccagcctctgtcatgggctcgccgcccaggtgagcaccttgccagctgtgccgaggggcaccgggggccggggagggcccgcaagctctagctggcgctgacctggggctgaccctctccagcagcctgcaggaagctcagcggggccgggctgcctcccactcccgggcgctgacgctgccctctgcgctgcatttcgcctcttcactgttgctcacccgggccggtgccaatgtgcatgaggcctgcacctttgatgacacttctgagggtgctgtgcactatttctacgatgagagcggtgagcctttcccaagcccggtggcccagtgcctccccgccttcccccaacagcctgagtcctcctagcagtggtgctcgctcggccctgtggcaggtacactgctaatgctgccagacatcatccttgcagcctctttgaggcacggtgtctctgtcatcttttgctctgctgatgaggaaacagaggctcagcttacagtacaggggagatctaaagctaggacaggtgactgccgcgcccaggctcttgacctgtaggccctttcctctccagaggctgggctgccctctcagaggacacagcacaaggttctgcctcatttgatgggtctggtgcccacgtgagccgggccttggtgcttctgtctctgccacgctgcctcatctcccataccctgc

SEQ ID NO: 65842 - DNA, 1054 bp, Homo sapiens
aggcatgtcctcaaggctgagccctgcatgcacgctcggatggggtagtcagagtgacagtgacaggccctgtctgggaggagggtagcatttgtgccaggtcccaaaggacaagtggacttccttgagcttcagaagaggtgggagagtttgcctgactggggaagacaggcgtgggagcgggtgactctaggcagcccctgcagccactgggcgacgtcctgggaacctggagagaggaggagccctttcagatgaagggttctggtggggtccagggccgctagacaggggcctttatgtgctgatggaaatggtcaaccagaccggtgtgctgaaggggggtaacagtagaccatgtggggggtggcggggctgacggccgcggctgtggggactgcagtttgacctgctggaccaggactccctgcacgaatcccaggagcagacactgatggaagaagcgccaccccgggcccagcatagttacaagtactggcttctccctggccgctggacctctgtgcgctatgagcggcttgccctgctggctctgctggaccggtgagtgtcccgcagccttggcccccaattcttggaaagcccctggaccttggctccccagactctgtacctgtggaggcagtcatggcagcagagagcctgactcgggggaagctgagggcctgtcgttggctggagtctgcagtggtggtttctatggttcatttgtggtgtaaaggggtggccaagtgggtggtgctgtattaaatctgtttattccaaagtcctgctgaaaaaaactttttttgagacggagtctctctctgtcgtccaggctggagtgcagtggcatgatctcggctcactgcaagctccgcctcccaggttcacgccattctcctgcctcagcctcctgagtagctgggactacaggtgcccgccaccacacctggctaatttttgtatttttttttttttagtagagatggggtttcacagtgttagccaagatggtcttgatctcctgaccttgtgatctgcccgcctcggc

SEQ ID NO: 65843 - DNA, 1869 bp, Homo sapiens
tttctcagaggggacacagagtcccagaaaatccaatagagaagtcagatgacttctacccagtgtagagaacttgggcctagagcccatgtggcttcccgtccatctgggtttctctaggcacagggactgggtgctggtcctgtgtgcatagcgtggcacgcccaaggcagcatgcacgatgtagccacgtgcagttaactcagtctcagctggggatggatgaatcccgggagtaatggcaccctgagctctcagccctcaatgtccagagcaggcaaagattgggaaggagagagcaatacaatggtcgctggagcaggtgctgccgggccgcgtcgtcgcaaagttataggtgttcacatcttcagaggacaagggtctggcatgggcacagtcccagagctgggcctttagggcaagatccatcttccccactgccccactggaaggtgaggcaagacgggcacgccctgactaggctgtccctgcaggacgcggggagtgctggagaacatcttcggcgtgggcctgagcagccttgtggccttcctgggctacctgctgctgctcaagggcttcttcactgacatctgggtcttccagttctgcctggtcatcgcctcctgccagtactccttgctgaaggtcaggccgggctctctgtgtttccttccccacccgacttttcccaagattgcccttcccacaactccagttttaaggagtataagctgaaaggtagataatttgtctaaggttccctagagctggccagctcttttacaagcaagaaaactgaggctcaggacagttcgggggcctgacctggtcactcataactgcctagtggtggagctgaacaggtctggggcctctgaccatcccgtgggcatcggctctagttgccaacgtagccctgtctcttccagagcgtgcagcctgatgcggcgtcccccatgcacgtgagtacccatggagcagcgcctctggccaggaggccccgggaggggctgagaccaggtggggaggagggtagggtatggagggctggggctccctcaccacccccatcacccccacctggccaggctctccagcttggacccagggccaggcctggggcccttgagtgtgtgcatgtgtcagaggtgtggccagtcggggagacccagctcctcatgggctgacccctcagggccacaactgggtgatcgcgtacagccgtcctgtctacttctgcatctgctgtctgctcatctggctgctggacgccctgggctcagctcagcccttcccacctgtctccctctacggcctcacgctcttctctgcctccttcttcttctgtgcccgagacgtggccactggtgaggctggggcagggatgaggtggcccaggagagtgagtccccgagggtgggccgcggaaagccagcaggctgaccaggccttcgtgtcccctccctgccagtgttcaccctgtgcttccccttcgtcttcctcctgggcctcctgccccaggtcaacacctgcctcatgtacctgctggagcaaatagatatgcacggcttcgggggcacaggtatgatgcccacaggtggctcagggatggggcccgtgtggaggcccaggagggccctcggattgggtccttggctccacccttgcggaaccttctcctgcgtctgtactgcagactcaaggtttctgccttctcccctctccttccctccccaggcaagtggtttatatctgagaatcttggaagctctaaaggccgcttggggcttggggcagcagagaacaatgggctgggggtgcctttccagggaggccagcctctgggagttgaggggaagcgcggct

SEQ ID NO: 65844 - DNA, 1080 bp, Homo sapiens
cacaggtgccgcccaggtgatgtggtttgagaagctgtatgctggcctgcagtgcgtagagaagtacctcatctaccccgccgtggtgctcaacgccctcacggtggacgcccacacagtcgtcagccacccggacaagtactgcttctagtgaggaccaccccaccctcaacgatcccatcatccgctttcccttttgatccgtggggaaactgaggcctagagagggaatgaatcatgtctaaggttgtttagcaagctaaagcaggaccccagctcctgacacgccatcccaggaagtggttgcttcttcaaaggcaaatgtgttcccaccactccctttggaagagcagagactaagagtcacgggcccaaaagagcagggaccagcccagcagagcagaggccaggggttgctctccggccagagtaggcgagggatgggacacctatacccactgccccggtcccctaccaagcacccgatgcctgccccttgcccacagctgccgggcgctgctgatgaccgtggctgggctgaagctgctgcgctcagccttctgctgccccccacagcagtacctgacgttggccttcaccgtcctgctcttccactttgactacccgcgcctctcccagggctttctgcttgactacttcctcatgtccctgctttgcagcaaggtgagttggtggctgtggcccagaccccaggctgtccaatgggagcagagccaacttctgcctgggtgggaagagaatttcctgagggcctgtggccaccgctctgtatcagccccgtgggcctttgcagcagcctctcaaggaaggggttacttccaccctctacagagaggaagcaggctgaaggaggttgagggacttgcctcaggcttccagagaattggtggtcagccaggatttgaacccaggcctgtctgaccccacgaccacctcctcagaaatggttagggtaatcaggacctggccttatcctctggacgcagacctctgagttccacgctcttttgccaccctggatccagagcagtccgagctgagtttcagaagcccctagtg

SEQ ID NO: 65845 - DNA, 1048 bp, Homo sapiens
tttcttcctcacgtgggcattctgttcttgttttctggcctggcccaggatggcggtcatccacactgcgtaccctctgagggcagggcctgtggctgttctcaattttcagtactatagtctagcttcagcctcaccagtgacctagtggcgtgacctgaggaagtcatttatcttctctgtcttcactgaacctcaactttcccatctgtgaaaaggggccagcaataggaataagaagctcacagggtacttgtgtgaactaaatggccaccgccccctttgagctcaggcaggggttgctaatggcatcaggcgccttgagccatgtccagagcacaagggctggcagtgaccttgagtttggcccccgtgggccaagccagtgcgatgacccaagcctctgaatggggcctggcatccgggggcttccatgagtgaccctgcatgtcttttttcttctccctgttggccctgccagctgtgggacttgctgtacaagctgcgtttcgtgctgacctacatcgcgccctggcagatcacctggggctcggctttccacgcttttgcccagccgtttgccgtgccacgtatccagcctgtgtttgggtgggggtgtgcagggagggctgtggcctggggcagtggggggtggtggggggctgggaggtcctgttgcccgccgcctccttgactgtggctcagactcggccatgctgttcgtccaggccctgctctcggggctcttctccacgcctctcaacccactgctaggcagtgccgtcttcatcatgtcctacgctcggcccctcaagttctgggagcgcgactacaagtgagtctcacaggaggcgggagcatgcccagcagggcaggaagggagaggtttggagcccaggctggaggccacccacagaggggcccacagcaggtatgggagggcttggtcacagtggggacacatgaggcggcagatccaatgcagggagagcctgcaccaggccaaggcttcaggctcacagcttggggatagtggggtctggggatg

SEQ ID NO: 65846 - DNA, 1738 bp, Homo sapiens
atttgtttgagcctcaatttctcatacaaacggggcatattctagggcagaggcaggcagatgctgcttgtgagtgctagccccagcacaggacttcctgctctgtaagtgggtgcttcctggcggctttgtcactcctccctggtctaggggaaggagccaacttgcttggttgctcttgagagctgagatggctctaggagcggggcatcccagaaagcggacttcagctcagtcttggggaggagcctctgaacctccatgctttctcctccagtggccagggccgggaccccggcctgacgcctgcccctcctctcccagagcatcatctactacgtgagccgctcaccaaagctggaggtgtggctcagccatgagggcatcacggcagccctgaggcctgtgcgggtgcccggctatgccgactcggatcccaccttctcgctgagtgtggatgaggactatgacctccgcctgtctggcctctcgctgccctccttttgtgctgtgcacctcgagtggatccagtactgcgcctcccggcgcagccaggtcaggctccactacctgaggctgccacctggggctgtgggacctgggcttccctgctccccttctccccatttggtttcctctcactctgagcctcccttagcctgagccccagcccccactccaaggtccctgtcccaggtctgagctgggctctgggatgggggtccttatgccacagcccgtggaccaggattggaactccccgctggtcacgctgtgttttggcctgtgtgtgctgggccgccgggccctggggacagcctctcacagcatgtctgcaaggtgagtgctcgggtgtcccgcggggcctactgccgtccccaccccacctcttccacgaagagcactgtggtctctggccacagtggccacagaaactgcagtggcccttcctgttggggtacctcttctcccacgggcagggcacttcctggtcatgaccttgcctgctcctcagtgctctgtgagagacatgggcagagattggcctctttgtcaagatggggaaactgaggctcagcgtgaggaaaggcctctgcttggatcactctgaagccttacccctgggtcctcgacacccctctctcccctccctgtttttcctcccacttagcctggagcccttcctctacggcctgcacgccctgttcaagggggattttcgcatcacctccccacgtgacgagtgggtctttgccgacatggacctgcttcaccgcgttgtggcgcctggggttcgcatggccctcaagcttcaccaggttggggaggggtgtgcccagcagcatgggcaggtgggggatgaagcctctctccagggcaggggccactgacccctgttcccgtcttctctaccaggaccacttcacgtccccagatgaatatgaggagccagcagccctatacgatgccattgcggccaacgaggagcggctggtcatctcacatgagggtgacccagcatggcgcagcgccatcctcagcaacacgccctccctgctggcgctgcgccatgtcctggatgatgcctccgacgagtacaagatcatcatgctcaaccggcgccacctcagcttccgagtcatcaaggttgggccggccccacctgccctaagccctgccccaaacccccttgggccggccccctgaccctggcgtgtggctctcaggtgaaccggga

SEQ ID NO: 65847 - DNA, 1032 bp, Homo sapiens
gccccctggcccgggtctcctcagttctgagggccccagtggaaagtggagcctggggggccggaaggggctgggaggatctgacggggagccagcctcagggagccccaaaggaggtacccccaaatctcaggtaaggcacctgtgggagggttgggtcccagaaggctaaggcctgctcacccgccaacctctcccccctcccccaggcgcctctagacctcagcctcagcctcagcctcagcctcagccccgatgtcagcactgaggcctcaccccccagagcttcccaggacattccttgcttggacagcagtgcccctgagagtggcacacctatgggtgccctgggcgactggcctgcccctattgaggagcgtgagagcccggcagcccagcccctgctggaacaccagtactgagctacctggcgcccactggaccacctcctaggattcagtaacggacctgctctgctgcctctctgctggaccacagaactgagtggctttggcctacatgtctgaaccctgacctttggctgccttggccagagtaccaaaactgagtgacccagacctctgaccttgacccctgatctctctcatccccagtccagggcctgggctccccagatggaggcagtcagcctcccagccaggccctaagagccaaaccatgggctggtcccacttggagcctgtggccaggaccacctcagcccctgggcctgcactgcctgcaggtgtggcccccttggcctggacctggggcctgaattgtgggaagggtggtttctttctttccttttttttcttttcttttttttttttttttttgtgcttcggagacatcagaattaataacactatttttgattttggttggcagtttctttttctacctgggaatgggtacatgatagtacaggcggctaagttgggatggacaagcacgcagaggggtgaaggatgtggggctgaagtctagtagagatcaagggcagaccaaggtggggttcaggtagaaccg

SEQ ID NO: 65848 - DNA, 1036 bp, Homo sapiens
acccaggcccccagcctggtcctccaccacccgtgttggcttccggccccctccgagaccatcaaagctgcttccgctttccaggccacttccttgtctgcctagggctaaagtttccagccccctccccagcttagctgggcaaggctagaggctgggctgttgggtcttggtcctgagggtcctggagcctgggcagccctgggactgccagggtcccccagtcgccacccacacaccttagctttggcctgggcccagagtaagggtcccaccaggacctagcccaaccggacagatgacttgtattggctgggacgggaaacccaggggccactggtgtctgggtcctgcccacttaacaaagggaggacgtcctgtccccagagaccttcctccttgcccctcccacttccttcagggtccctggagagctgatcacccagagaggtctgatctcagtgccctggacctcaaggcctcaataccacaaggacacatgggttcccagggaggcagcggcagggcagcaggaatggcaagaggacttccttcagcacaggaagtagccccaactgtgggcccagccctctgccaggcccccacatcctgaggaaggtgctggggtcacagcagctgtcatgggaccccagtcaccctgccctgaaggacaggccaactcaccttcttgcaggctactgtgcccaggcttgggggcaagaggagtcacaatgacagggacccatagggacctctgcctacctggtctcactgatgcagacagggaggtctgaaccccatgtgacagatggtcagatgaggtccagaggagatgctcttgcctgaagcaattccgtgtcagagctaggatgtgagcctgggtctgcccatctccaggccctaagcagggctgcacctgcccactgctgtctgtgtgcgtaggttttggggggtgggtgttgggctgaggttcaaggtctcacaggatgcaagattgagacacccaaagccccagggacctgctaagtgcggaaac

SEQ ID NO: 65849 - DNA, 1048 bp, Homo sapiens
ctgaaggctattgcagttgcccaggctagacacagtggcagcgatagtggaggtgaagaggaggtgacagtccaggaaggactgggtagtcatgtggctgactggaaggggtgaagtgctaggatttcccagcttcttggcccccaggagtggtggtttaaggaggaggagcagggtgggggagtcacagcaaggtgagacattaggcagccggagaaaaaggcccggggtttggtaggccggtctgaatgggaggcggagatgggggtgtcatccttgctgcagccagggagggggaggagcatgggtggagaagaggcccaggcagaagagggcggggttcctggggccctaggcaaggtgagtttccagctatccccagtgccacctatggctgagagggtaccaggatgaggccacatctggggaccatatggggagtggggggtgcagggggttgggaggaatgaaatcgaagtggggactgtaagtgcagacaagtttagttgtagaaaagggaggtgaccgctggaggggagcctgtgctgtttggaggagttcagagcaccttgagctgggcatggttatccagttatccgcagagggaagagccgggaagagggcacagaaatgggagcatggggggcagaggtggtgcctggcctgcaggggctggggtgggggtgccttggattcaggggtgcagaggacagtccagccttgagataaggaggatgataatgtgtatgtttattggaagggtcctttctgtgaatcaccttctctactgccacatgggaaccagcctcctcccatcccttcctacctgtgcactcccaagcacgaggagcacaacagactgtactcacctgacaggcaagggcacaagtggctcagagagggctggtgctcagccccaggccagcgtcccatccattccctaagagctggtggggtggggctgcaggggactgagacctatgccttctgtctcccacccacagctgagcttccaacgcaaggtgggcatcctgtactgccgggcggg

SEQ ID NO: 65850 - DNA, 1032 bp, Homo sapiens
aaactcaaacttttcccctgtcctgatggtcagctcccttctctgtagggaactctggggtcccccatccccatcctccagcttctggtactctcctagagacagaagcaggctggaggtaaggcctttgagcccacaaagccttatcaagtgtcttccatcatggattcattacagcttaatcaaaataacgccccagataccagcccctgtatggcactggcattgtccctgtgcctaacaccagcgtttgaggggctggccttcctgccctacagaggtctctgccggctctttccttgctcaaccatggctgaaggaaaccagtgcaacagcactggctctctccaggatccagaaggggtttggtctgggacttccttgctctccctcttctcaagtgccttaatagtagggtaagttgttaagagtgggggagagcaggctggcagctctccagtcaggaggcatagtttttactgaacaatcaaagcacttggactcttgctctttctactctgaactaataaatctgttgccaagctggctagagatccgctttttttcagcaaacactgagcacacattttgctagtcacatcaggccagacattggtggtagagagctgggtgaatgcgtgcactgtcctctgagagcttgcagtctgagaatgcccttggaaaccccgagttaccgtccagtggatgaaaacgggcagctaaggcaagagtcctagcacactgagagcctagtagagcccgctggctgtggggatggagcagtttcaggagtcttccaagaggccccattagctccaggtcttagatcagctgagagtggatgtcaaagagggactagccagcgtcagaggtaagagaaacgatgttcgaaagatgtgatggggccaaattccttgggtggcccagggagtgtgtgcttctcttggggaatgtgtggtgccaggtaaagatctacccggcccaccgatgctttgatactctgttctgggaggaacggtgaaatcttcaatc

SEQ ID NO: 65851 - DNA, 1050 bp, Homo sapiens
tgtgagcagtgcaggaaggtgtgagctggaggctggggccccccaggtctcctctttgcccagagcatggcccctgtactcggcctcaccatgtggtcttagaggggcagattcagccaacagaggcctccaaaagctgtgggattctcagaactgctgagtgtcacacatcccttctcattggcagagaaggttgggagaatgggtcttgggaaagcctggctcctccccttcctcctgagggacctttgagagcgtcggggacccacctgaggagagcaagtcccacttctcccccttactttcccagacgatcgtcaccggattgaggagaaacgtaaaaggacatatgagaccttcaagagcatcatgaagaagagtcctttcagcggtgagatggggactgggaaagccagagaggaaggcagcgggcagggaggggacaccctggggctgagaactgacctagcccttgccctacaggacccaccgacccccggcctccacctcgacgcattgctgtgccttcccgcagctcagcttctgtccccaagccaggtaaggatttccttttgtcccactggaacgacaggttcagctctgttcagctgaggagcagtggagatgaagactcctgggccccattacagacctactgaatcagaggctttgaaaggatggcgcaggaaccagcgacttcctgggatgctaatgcacactgaagcctgggaaccaccgtgccacttaaattctatattgggtatcttgggaatcagaagttaaaaatgcagaatctctgctctcatctctcacttgaattgggggaacaaaaatcacctctaaattagcaagatgtgtgtgcctgtgcgaggctcaaaaactgacaagctctgcacttcaggccgctgctcacttggtgctccatgggctcattgcctctcaggacttagtttttcagctgtaaactgaggagtccagcttatctctccaagtgtcccttcctctaaaaggctggaagagtttcgtgggcttgagtagtcagggaggact

SEQ ID NO: 65852 - DNA, 1020 bp, Homo sapiens
tctcttacaacctggtattttccactggccctgggcaggactcccaggacagctctgatggaataccgtcagcaccacgcatgactggcagcctggtgtctgatcgaagccacgacgacatcgtcacccggatgaagaacattgagtgcattgagctgggccggcaccgcctcaagccgtggtacttctccccgtacccacaggaactcaccacattgcctgtcctctacctgtgcgagttctgcctcaagtacggccgtagtctcaagtgtcttcagcgtcatttggtatgaggggtccagggaggctgccttcccagcaccctccacgttgcccttgttcctgatcctcctctcttccccagaccaagtgtgacctacgacatcctccaggcaatgagatttaccgcaagggcaccatctccttctttgagattgatggacgtaagaacaaggttagtgcttgagaggcagtgaggcgctggggtgaatcaaatgacagcttcttcttgctcaggtaaacactgaccagtcaagccagcagatcagtccagcccatttttattgagttcctgctgtctggcaggtgctggtagccaggaatgagacagtctctgttctctgacagcttagtccatgggagagacagtcataccaatgacctctagctcccagtgtcctaagtgtcatgaaacagagggtaggttagcaggacccaaaggaggtggtcagcagagcttcatagagggttacctttcagccttggtggatgacaaagtggctgaggggatttcttgcagtggtgttctgaagagtaggcatggatgcacaaaggtggtctttgtgaaaggcagagatcattctggttgggaggcagaaaagggaggatgagggaaggctcgtacatgggacagagcttaggtgatgaagatgctgtgttaaccaccattttgtaattattaatgtggacctgggcatccaagtggcagtacccagcagcaggcggttaaaaagcaattcc

SEQ ID NO: 65853 - DNA, 1004 bp, Homo sapiens
ggagccgctggagcgggacttcgtgagcaaagggatagggttgaaagggggtgcgggcgggagctgtagtcccgatgctgagccaggccccttccccaggaccgcttcattggagccactgccaacttcagccgcttcaccctgtggggtctggagaccatccctggcccggatgccaaagtgcgtggggccttaacttggcccagccttgcggcagcggtgagtagacgaggagttccgtcttgcccccgggtggatgggctggggagcacaattgcgcagacggagcctggaggattctactgggtagtgtgtgggaagcgtagctccctgaccactcttcctagcatgtctagaagcggttattctgaacagctgggtccttcctcgggtatgggggccagcttgccgccctgtcttacaagtccaacagtagaggcgactcctgttgcagattcacgcacaggtgcccgaggactgagaaccagagcttgaaattcaaagctgcgatcccttcacagcagtaaaccagctctttggaaccgattccatcaccccaataaaggagctcttcacagcacctgtgagtctgggcgccttagagcccctaagccagcatgggccctttccccctccccaccaagaactttgcatggctctggcatatagaaacaatttattgccgggggcaataggggtaagagaagccagaaatttttgcagccagcacccaccccacccccaacttctactttacaaaagaaatttttacaatcaccagccctctgtacagagctcccccatccggatcccttctcactgtacacagctgcctggctccctctggtccctgcttcagaggaggcctgggcctgtggccagctgaccttggagttggtctgagcccggagctcgccttggtgctgggcaccagtgggcccctgccaggcctgtcctctcctttttgagctgtcctcagccccatctcccttagagtgctttgt

SEQ ID NO: 65854 - DNA, 1322 bp, Homo sapiens
tggcacacctggcagcacccaagttgggggtggccctgggcccctcgcttgccgcacctgcactggcctcttcactggtggccgagaaccagggctttgtggcagcactgatggtgcaggaggcaccggccctggtacggctgagcctggggtcccatcgggtcaagggcccactcccagtgttgaagctccagccggaggcgctggagcccatctactctctggagctgcgcttccgtgtggaaggacagctgtatgcacccctggaggctgtccatgtgccctgcctgtgtcctggccgccctgcccgccctctgctcctgcctctgcagccccgatgcccggcccccgcacggctggatgtccatgccctttacaccacatccactggtctcacgtgccatgcccacttgccacccctgttcgtgaactttgccgacctctttctgcctttcccgcagcctccagagggggccgggctgggcttctttgaggagctctgggattcctgcctgccagagggtgctgagagtcgtgtgtggtgtccacttgggccacagggcctggagggcttggtgtcccgccacctggagccttttgtggtggtggcccagcctcctaccagctactgtgtagcaatccacctgcccccggactcaaagctgctgctgcggctggaggcggccctggcagatggagtgcctgtggccctgcggaccgatgactgggccgtgctgcccctggcgggggactacctccgtgggctggcggctgctgtctgagccccgggagaccaggtgggggcaggactgtggcccttgtgggggccaaggcacactcctgtagctctgtcgccaaaaccctgcattccgcagtgccctcgctggcttgttttcttttgggccccggttgggagcaggctcctgggggtgagggtctgtctgagtctgtttttgctgctctagcaagatccctgagacggggtaagttataataaacagaaatgtattggctcagagctctggaggctgggaagtccatagtggagggcccagagcccagtgaggacccttctgcatcttcccatgacagaggacagagtgacaggagtgaggggagagagcgaacccactcccaagataacggcctgagtccacgcaggagggcagagccctcgtggcctgaccacctcttagggtctaatcttatactgttacagtggcaatcgcatttcaacgtgagcgtgggaggggacaaacattcaaaccatagcagggtcataggccccaagaaggcttccagacagaacccggcactgtaga

SEQ ID NO: 65855 - DNA, 1074 bp, Homo sapiens
tgtgtgtctgtgtatctgtgtgtgtttctatgtgtgtctgtgtgtgcgtgtgtctgtgtttgtctcgtgtgtctgtgtgtgtgtatgtgcccatgtgtctctgtgtgtatgtgtgtgtctgcgcaagtgagagaaaggagacttgagcaagggagtggggagcctctgtggcacctgtgtgcggactgatgaggatgccaagggaggcagggttttgcctttgtccttacagatggaaagggacccgtcactgtcactcttaccctccccaagaccaactcaggctgtcttgatgggggtaggtgggtagggggtgggaggtgagggcggggaggagggcaggatgttagggattgagcagaggctggcatcctcttctcctttcccaaggcgagagaatcctgttcagccctaatggcttcacttgtgttctgagttcatgtaatgataagaccatttcttccttttgacttccttcagcaaagagttgtcgagcatccacgttgtgccaaggatggttagagcatggagaggtgcacccttttgggagatggaggcatatgcatagtgggccgtggctgaggatgaggatggagcagctgtggtccacctttgaggcccatctccctcaagcagctaccaagcagtgtaggtcagagtagagatactaaggcaggaggaaagaggctggggactaggggacctgctgcaccagttagccagactgcatgtgtttggggtctggggcaaggggagagcctgccttgggagtgtcagagaagccaagaaatgaggagcggggttcaagtggtttagaggggcaagaggggctgagagacacaaagcatggaacagaatggtctgcttcaatgtttatctatgtatgttcatcttcatggttaaaggagttaacatatataaaatgcttagggcatatacatgaaatggttagagtggtgcctagcatattgtaagggccaacataagggttagctattatattattattattgttatattatttttgctgtatgttctgaggatgtgctgagctattgaacagatggatgcacc

SEQ ID NO: 65856 - DNA, 1135 bp, Homo sapiens
tgctccagccactgcctccctcccctgctttgcccaagtgccctccctgaactaaagtttccctgaacacatagccgggcttgcacagctgccaagccctcagcgccctctgtccagctcttactcagtccccgagatccagactagatcccacttcctctgtgaagccttccctggcctgcacccctcaacaccagacctgacctggaacagttacctaaggcttctttgctggatatttagatgaagaggtgcctcccaccccttagctgcccctctgacaagctcccttcccagtgcccacctttctgatgcagaagctggagggccgggtggcttccgatgaggacctgaagctgtcagacatgctgaggtactacatgcgtgactcacaggcagccaaggtgagaggcagccccagcgcagcgctcaggcccggatgccaggacagggcagcagtgaccctgtgcccatggtcctaggacctgctgtaccggcggctgcgggcactggccgactacgagaatgccaacaaggcgctggacaaggcgcgcaccaggaaccgggaggtgcggcccgccgagagccaccagcagctgtgctgccaacgcttcgagcgcctctccgactccgccaagcaaggtgagcccgcagcccccagccccagcctggggccacatgccctgccctgcccggatccccatgcctcttcccctcctctccagagctcatggacttcaagtcccgccgggtctcctcttttcgaaagaatctcattgagctggcagagctggagctcaaacacgccaaggtgagccctcccacctcactgggcccttgtgaagcctcccacctcccacctccctccctcccccaggcaccagggtgtgcgtgcatgtgagggtgtgcacgcatgtatgcgcgtgtgtgtgcatgagaggagccccagctaaggcttggggccatgcttccctggctcaggacccgtgccttctgggtaggaaggcccaattaacagcagctgttattgcagagagcaggggtgtggggagcgagggagcatctaaggtgcagaaagaatggcagcctgactcagggagcaggggacttcaaggacctgtttctcctctgcagg

SEQ ID NO: 65857 - DNA, 4533 bp, Homo sapiens
ccaggctaatcaatagttgcttcgattcagaaatgcaaaaccctaacctcactcaaaaatttcaggccaagggatccagataataccagatgggtcttaagaaagccgttttgctgtgggataaagagccgcttagtcggggatcgttttcgggtcattttactgagcgccgcctcgccgggctcagagcggttcctgggaaattggaccaatgggctcgcgctgcgcgctgcggtgccgcccaggacctgggcctacatttccctacatgcactgcagctcggagccggccggcgggaagactccgttacccagcgagcgaggcggcggcgcagggccagcggactccatttcccgtcggctcgcggtgggagcgccggaagcccgccccacccctcattgtgcggctcctactaaacggaaggggccgggagaggccgcgttcagtcgggtcccggcagcggctgcagcgctctcgtcttctgcggctctcggtgccctctccttttcgtttccggaaacatggtgagcggcaggccacggcgcctgagggaggcggctgcgggtcggtcgcctgcgcgcgggaagcgactggggagcgacgtccgcaccccctcccccagcgccccgggcgggatgagggtctcgcacgaaggggcgggcggtgccggaatgcgcgtgcgcgcccgtgggcgccggggagggccggtctggacgtcgctcgcgctccgcctgggctcccctcccccacccgctggtgcgcccgcgcggacaccggccgcggggggaggggttcggggcgcgcgctggggcgcccctcgcggaacggccggcgtcgcgcctttcttcttaggggcgcgctctcgactggagcatgcggcgtccaaacccggcccgggggcggcgaggaaaaagcgcgcgagaggtctcggcgcgcgcgccccacccaaggctgttcctgtctgcgcgtcaccctccctcggcagccgggtccgtctcgggagcaggtggcagggatgcctgcgcccgggaggggcgggtgctggcgcggcgaggggtgatgctgggaagacggggtcccggttggggcgtgggtgcctgcgattaaggccttgcaccgcaaggcttggagggggcatcgcagagaccgcggcccgttcgggagcgcatctaacgagctgcgttctcacccgtgcatcgggcgagggctggaacggcgctgtctgtcggcgcgtgcgcgcacgctcaggcccggccgccggtgccgaagccctgggccagcgaggccttcccggatgggcctgagtgagggtggagccgagtttagggaagtgacccaggcgggcaccgcccggaaaccaccccgccccctgtatacggcccgagggctgagaaaaccgaaggttatgtagcttgcccaggctcctgcctgcaggagatgggtctgatacacccgttgttttagggcgattccacagggttagggacctggagatgctgctgcctctcggatacgcgtttctgcattggtgagggggccgggcccagccgatctcctgtccccgcccactccggatgcggccgagtcacgtggccggcttcttctgcagttccggggagtttgggggaccagatttaccttggattgcccctccctctcctggctcgggcaccccgaagcacgacgcagagtaggaagagtttaaagacctcgaggcctctgggcacttgagtttggcatgttaatttttatcagcgacttctggggcctagcaccattcccggaagaagggagttgtcgggcagggtccttaatgggggttgcaattcttgtcttggttgggaaagagcctagctgggaacaggggtcgtttgtgtagtaactgtattaagcagttctggtgggtttgttgtaactgttcggtgtccttggggtcccatctagcattgtggggtcttggctctttctgaagaggagtcttggctcaggtgtttgggtcctccatatccgaagttctaaatcaccagttttatccaaaggctgagagcaagtactgtgagtagcaaatgagtcagtagccggtggatcttttaattctgggttcacattttggtcaaggttctgcttttcacgagttttgcatttctatcctgtaaaatgagggaaggggttgttgaactaggtgatcagaggccatggctgccattctgaggttgtgtcccatctggttctttgacagtgacttgggtgggaaaactagtgacttgccttgggaagggcactagtgaccactcgggacgtggactgagatcttctgaaaaaacaaggggcagttccctagaatccttttcttgacgtatacgtggcatgtctcctaggcctccggtgtggctgtctctgatggtgtcatcaaggtgttcaacgacatgaaggtgcgtaagtcttcaacgccagaggaggtgaagaagcgcaagaaggcggtgctcttctgcctgagtgaggacaagaagaacatcatcctggaggagggcaaggagatcctggtgggcgatgtgggccagactgtcgacgacccctacgccacctttgtcaagatgctgccagataaggactgccgctatgccctctatgatgcaacctatgagaccaaggagagcaagaaggaggatctggtgtttatcttctggtgagctcattctggcacttcttcctgtcacctgccccctttctcatgatgggaacttctgtggctcctggtcaacccagatgtgtgggtttggagggggagggggttgtaacaaaagactcctcactgccagcccaagggtttctcaaagtcacctgtggctttgctgttgctgggagttgcctgacgcgtgtttctgtccagggcccccgagtctgcgccccttaagagcaaaatgatttatgccagctccaaggacgccatcaagaagaagctgacaggtaagggccagcattggtgctgagtgcccttctgctctggccttggctgcagggcagggtgaatggcacgcagagggggtctgcccccttgtcttcgctgcctgcttgttccttccatctgctttgattggctccttcccagccacagaaactacccccaccccagtgcttcctgctcacagatgctcccctttcttctttatagggatcaagcatgaattgcaagcaaactgctacgaggaggtcaaggaccgctgcaccctggcagagaagctggggggcagtgccgtcatctccctggagggcaagcctttgtgagccccttctggccccctgcctggagcatctggcagccccacacctgcccttgggggttgcaggctgcccccttcctgccagaccggaggggctggggggatcccagcagggggagggcaatcccttcaccccagttgccaaacagaccccccaccccctggattttccttctccctccatcccttgacggttctggccttcccaaactgcttttgatcttttgattcctcttgggctgaagcagaccaagttccccccaggcaccccagttgtgggggagcctgtattttttttaacaacatccccattccccacctggtcctcccccttcccatgctgccaacttctaaccgcaatagtgactctgtgcttgtctgtttagttctgtgtataaatggaatgttgtggagatgacccctccctgtgccggctggttcctctcccttttcccctggtcacggctactcatggaagcaggaccagtaagggaccttcgattaaaaaaaaaaaagacaataataaaaaggctcattaatgggatgtgtttttcaaggttgggacacaggagacttcaggattgggggtgcactgggataatggtgctatctctctcctctgtactccacacccaaccagcccctgcacacccttatctggctccaatgactggctgagacgcctttctgatggtcaccattattctgttggtgctgtgattgacactggactggctgtttaaggagtgggtgctggctacaggggtcttccagcggaagtgatttatgcctgaactgggtgctctgtagccttgcctggatggacagtgaggtccatctgatattctgttctgtccctttctaggtgtgggctgataggcaagtcagaggtagctcaaaggttctgtttggtctgctgtcttccctggatggctgactcaagtttatgagggtcaggttcagtggctgctgtgagtcaggccaagttgagcctttgacctcctctagatgtggctggagtgcattcagggtggggccagccaggtggagcccgggacttcagaccccggtgtcttgagcactgcctccctgtgtttaaccaaaagggtgttgccggtaccctgagccttttgccagcattgtcaagggctgtttccagcctgtactttgggctttttcctgcccagcaggcaaagacatacaagaaatctggccctagggtgaggtgaactgggagtggtaatgtggcat

SEQ ID NO: 65858 - DNA, 1033 bp, Homo sapiens
cgggatgccctagatgtccttattaggacaagagactcgagggggcggggccagcccgacagccggcttgaggctccttataaggccgcggcgggcgggaggcgggagccggagcccattggtccaatttagcttggctggggctactgcgccgtgggctaggcacagtcctgaggggcgggactggagctctggcgcccacctctcccttcctcgcaggctggagacctgcgtgttgcgacttccggcatagcagctagaggccgggtgctgcttcaaaccctggcgggtcgcctgtgtccaactcagctatacgtgtctttcaggcttctcaggttgaagccctttgtagggtttccatcttcaacctccctgagggtctcccacttccgattagccacaaaaatgacgaagtgttctcccctctacctgtgtctgggcttcttaacccgcagcctgctcctccgctcccaaacccaaccgcgtgcccatctcaggcctccccaactgccaggatgcccaagcacctcttacttacagtcctccttcctctaggcctctgacccccgacattccgagttctattttgggccttctcggcacgtccccgacttcctctccaccacacactctttgccctgtatcccggggatgaggatcaccatttcctccaagggtcctgcagctcctcctgccttacctttgtgtcctcatccccggcacccatttctgggtgtccctcccaccaatacgtttgcacccgtttgtctcctagcccccgcctctcctggactcttttcaagaccagtctccatctccagcctccttcaagcttgaggctgaagctgacaatcttaagagaccttagagccgccaagctcaggttagtccgttaagcgccgcccagccagtcctccccgtcacagggggcgctgtccgccttcctctcgcctacacaaagaccccgctctcgaatctggggtgacaggaaggagccggtccaggctccgggggctgggaaagggcgcgtctc

SEQ ID NO: 65859 - DNA, 1039 bp, Homo sapiens
agggctggatcagtgggggtctgggccaggccatgtctgagaagctaggcagagacagtaccttattcttgatggctcctgcgttgaagtcactgaaggtgaggagtgagcagagagggtttggagaggtcatggcccctgattcagggttcccaggggttccccaggggcggctgcgtagggtgtggccctgagggaagaagggactgaggccaggctggagctcgaaggaacaactccagccagcccctgcccagtcctcagccttggggggccagcctgagaaatggggatctcacccaccttgcttcttttggggatgcacagggcccaggcaaggtgaattccttgtgggctctgtcccgacactgggaaaggggcctctgctcacctggtagagtctctgcaggccccgcgtcaagagggccaggtaggcggctgactccttaatgtctgctgtgcgcttcacaaaaaagccatcaatgacctggggaagaggacccaagagagggaaggtggctcctggcctagaccatgaaccatggaccacaggggcccctgcctgcctgcctggccctgccctcccagctcacctgagtgttggtgacagcctgcagcagtgtgctctcaggaaggctgaggttgtggacggaaccatgctcttccaccaggtatacccggcgctccagaccacagcgcttcagccggaactagggaagtgtacagagtggacagggagggtcaggctggatgaccacatgcctgggcatccatgatgtcacactcaaaatggtgccgggaccctgttcccaccagttagcctctgcatcctccctagcctctccacctgcctcacaggggcctccgcagctttgctcatgctgacactcttgtctagaaagccttttctccatctctcaacactgcccatccttcaagcctcccctgggccggcacatggcctctgtgactaggggtccacccagcagcaagtaccaaggtacagcctctgtatttccactcctggaggtttatgcct

SEQ ID NO: 65860 - DNA, 1050 bp, Homo sapiens
caaatctctgggccggggcctggagtccgccctcctcgttacctcctctcctctcggggtgactgaagctcgtggtgcagagctcccagctcctgtcaatgggggcccctgggcctgaacatatagagacccccatttaggtgaacttggcctgcccccccaagtgccaccctgccccagcctgaggcttcctgcagtgtgacccgcccacctcagccaccaggactttctttctccctttattgcctttctcattctgcccctcacaacaggctcctcagctagggtagctgcagggagggtggctccctcctgctcctcagaaggtgtaggcccctacaaagacggtgagcctcagtacagagctggcccggtagctcatgagggaattcatggtgaccatctccaggtccagcacgtactcccgggggcccgtcaccggccgggcgaggaccagcatggcgctgacgttgttgatttgctgcagggcagtgggtggggggacatatatattgtgtcagcctgtgtgctaggcccctgccccagcgtcacctccctgccccgtggccgtgaggcagaggaacagccctggccaggctgccaccccagcctctcatgcagctctttgacaccctcgatgtctctcctccccacccaggctcctgccctcagaaatctcctgctggggctcttctcaccctctccagcctgctctgtctgacccaggctaactgacgattcaaggccacatgtggctcttgggactggtgggacctttggtgacccaaagtgagcagactcccttcagagcattcaatttcaaaaagaaagagaagggctggtactagacaaaccccttctcctgctgagacccatgcatgcggctgccagtcactgtgagcagctcactgtgagccgcccctggccccctcccacctaacagatccactagcaaggagtggactttctgaccccagggccctgcacacgccattcccttggtttgtgggtgaagaaactgagatcaatatggaaaaccagtaccaggac

SEQ ID NO: 65861 - DNA, 1050 bp, Homo sapiens
ccagcgccatctcacccatcaaggaccaggtatctgccgctacccagctggctctaattcagctaagtggtgggagggagaggggcacggcccgaacacctagccccgccccaccctctcgccctccagaaaaactgcaactgctgctgggccatggcagcggcaggcaacatagagaccctgtggcgcatcagtttctgggattttgtggatgtctccgtgcagggtagggttgggagagggtgcgcgtgtgacaggggagggaggcctaggggcctggtcacccacactgtcccttcttgcaccagaactgctggactgtggccgctgtggggatggctgccacggtggcttcgtctgggacgcgttcataactgtcctcaacaacagtgagtgcactgccccgccactctggacatctgcagggggacagggtgggcaggagcggaacctcctcccttgtcttgcttatctgcaggcggcctggccagtgaaaaggactacccgttccagggcaaagtcagagcccacaggtgccaccccaagaagtaccagaaggtggcctggatccaggacttcatcatgctgcagaacaacgagcacagtgcgggcagggcagggacacgggcggatggcagggacagacaccggggcagaggcagacacgctgggctactgggctagaagacaagagggggtggggggagcgaaggagcgagagacccacacacccacatgccaagggtctgatgatgttcctgtccccaggaattgcgcagtacctggccacttatggccccatcaccgtgaccatcaacatgaagccccttcaggtgagatgggggagctgatggggaaggggcatacaggagacttggccccacactcagcccctcggcccccaccccctgcagctataccggaaaggtgtgatcaaggccacacccaccacctgtgacccccagcttgtggaccactctgtcctgctggtgggttttggcagcgtcaagtcagaggaggggatatgggcagagacagtctcatcgcagt

SEQ ID NO: 65862 - DNA, 1174 bp, Homo sapiens
actgctctccggggaaagctgggcgtcttctctgagatggaagccaacttcaaggtctgtggtcccatccagcctctgacccttggcatcttcagcctccagttcgccacccctaccgggcagctctgcccctgccagggattggccggcaggtggcactgctgctccctctggtggccgctgacgggagcagctcataaacaatggggacttggttgatggagggaggtggatggatctggggaggggcctgctcctcctcccccagcttctgtgctcagctgccaacttctggggcagaaagcagagctccaaggatccctgccccacagaacctgtcccgggggctggtgaacgtggccgccaagctgacccacaataaagatgtcagagacctgtttgtggacctcgtggagaaggtgagctgtcgtgctctctgacacccaacctggtctgtccctggcctatacaagtgctaagtattctcttgggcccgcagtttgtggaaccctgccgctccgaccactggccactcagcgacgtgcggttcttcctgaatcagtattcagcgtctgtccactccctcgatggcttccggtgagcagccctgtcctcctgtccagcttggctttgccccagcctgccacctgccaggacctcgcctcctgcagactcaaggttccccattctgctaccctgggggtgggaccaaagtctctggaccaaagctctggctctccctcttagaagctgtgtgatttggggcaggtttcttaacctctccatgcctcagtttcctcatgtacaaactagggttcatcatgagaagaattgtaaggattttctaagggcaaaatgaatgaaggtgtagaaagcacgcagggcagggcctccatcacggtgagtgttgtgaaaactcagctgtcactgttcatgttcttacagacaccaggccctctgggaccgctacatgggcaccctccgcggctgcctcctgcgcctgtatcatgactgaggtgcctcccaacgctccgcccacgctgacaataaagttgctctgagtttggagactggtcctcgctccggggagcaagtggggggcgtgcagatgtgcctgtgtctgtctctgagcacctggtgtccgtgtacaaggatggatgtgtacagtggctcc

SEQ ID NO: 65863 - DNA, 1009 bp, Homo sapiens
tcttccaactcaaacttgtgaagatctggagagcatggtgctaaaatggggttggatttagagataagattgagtaaacatttatccaaggcaagatacagcaggagttgctaagcatttgatttgataacaagtactaataactaatagttggttgaaggaataacaaatgctaaatcagcatctgctgactggataggtggatggggaagggagagatgttcaataagtggtttattgggtgagcgacacagtgtacactctgaccagtcctctcttctaccctaactgccctgcagtttgacaactttaaacgggtcttcaaggtggtagaggaaatgcggggctccctggtggacaatattcagcaacacttcctcctctctgaccggttggccaggtgaggagctagccacctccccatcccgcacactacttcctgggcccggaggctcgtccaccttccctaccccaaaccttctgacctcctgagtatgctgggggaatgattatcccacttttggtctgtactttttttttttttttttttttaatgagacggagtttcactcttgttgcccaggctggaatgcaatggtgcaatcttggctcactgcaacctctgcctcctggttcaagcaattctgcctcagcctcccgagtagctgggattacaggcttgagccaccgcacccagcttggtctgtactttggaccagactgacctggattcaaagcacagtccagcgatttccagctgggctgttgagaggtaccatatgtaaagcccatggcacagccctggcacttaggaagtgctcagtagatagtaactgttacccttatggtctcccactgtatccactagtaaacttgagctggaaccttctcttcgcacagatggggaagggtcatagagaagtgacttgagacacgtcacacagtgacttgaggcagagagaggccagaactcggacacccagctgaggttgcaggtgggagctgcttc

SEQ ID NO: 65864 - DNA, 1050 bp, Homo sapiens
aggcctccccctctcttccctcgccgctcccgccccgtcccctccccgactggctgtgtcccggaagtggtcataagctgggtcccgatgccgcgagcggaatctcggcgctcccggaagtggcctgaaggcggcgcgccagtcccgagcagtgctcgctcctgctcggggcgctgcggccccgggcgtcgccatgaccagtgagctggacatcttcgtggggaacacgacccttatcgacgaggacgtgtatcgcctctggctcgatggttactcgggtccgtgaggggcgtgtggggaagccagtcggcggagcggttgtgttgaatgggagagggggcggggctaagacttgggcatcctttagggaagtgggcgagcgcctgggaataagaggtgttataggggtctgggatggaaacccttaagggcctctggcgtcggcggggcggggcctgatgctagcgtccgctttccagtgaccgacgcggtggccctgcgggtgcgctcgggaatcctggagcagactggcgccacggcagcggtgctgcagagcgacaccatggaccattaccgcaccttccacatgctcgagcggctgctgcatgcgccgcccaagctactgcaccagctcatcttccagattccgccctcccggcaggcactactcatcgagaggtgctcaccctctgggatggtggagacatcaaccagtctgactgtatacccattttgccggctgaaacaggcccagggagggatgggatttacccagccatcagaaagttgagagtggaaggggtcagacctaggccctgctaggccccgccagactccctttcctgtcttttatggagggtcaatggtgttctctgactccacaaggtactatgcctttgatgaggcctttgttcgggaggtgctgggcaagaagctgtccaaaggcaccaagaaagacctggatgacatcagcaccaaaacaggcatcaccctcaagagctgccggagacaggtatgcactgcatccacacggacacagcatcccatcta

SEQ ID NO: 65865 - DNA, 1053 bp, Homo sapiens
ttgtcagttccctctactttgagccttctgttagcttccagtgagacagcgtggcttggtgattagttttgggggttttattttattttgttttttcggtagagacagggtctctctatgttgcccaacctagtcttgaactcctggcctcaagtgatcctcctgcctaggtctctcaaagtgctgggattacaggcatgagctactgcacctggccctggtttggtggttaggatctgactttagagttgtatagacctggggccaaggccagtcctgtgtcattactcactacttgtgtgatcttgggcaagtgactacccttctgtgccttcatttctttggtggaagatggggaaaaccagagtacattccccagagagattttgtgaggattaaatgagacagggaaactgagactgagggagtagctgaagggaaccctcttgttcctgttctctcccagacaacataagcgccccctctatgcatgtcagcaggtggagaccccctcaccattccgtgtgcgcaccttacatgttcttgcctccgcctccatccttgctcctgccacccccgctacctggaatgtcctttccttcctctctgcctctgccagtcctacccatccttctaggctaatatgccaccttttccaggaagctttccctgatctggaagtgactgttgtaccctctgggcctcccgtggggctcctatcactttcagccttgggcagtagtcacctgtagcctaccttaccccctcctaagcctgtgctctcctttctggcaggagcttctctgcaccctagcactcctgggcggggtcggaaccactgcaatgcctctgtgccttacctgttcacaaggccttcgacgtacccctggaggcggccccagggcccggatgactcctggccggggttgtggggggctgtactgagggtaggtcagaggcctggggtaactgctgggccccaggaaatgaggctgtaccatccactgcagctcctgactgccactcatggtgttgatgcttggcaccaggtgg

SEQ ID NO: 65866 - DNA, 1650 bp, Homo sapiens
gcgatggccccgcccccgagtcagcacctccccgtcggccccgccccttcccctgccggccccgccccacagcgcggccgctgcggccgctgaggcccgcggctccgccctgtggctgcgcctgtctataaagttgttgttgaggtggcgcggcgctaagatggcggcggcggcggcggcggccgtggcgggggtggggcgcggtggcggtggcgcggagccacggcaggagcggagccgggcccggggctgggccggcgtcgaacgcagcgaaggccggaggtgactgcgggcggcgggaggggcagggcagggccggggcgggagcacagctcgggcccgtgggcgttaatggcggcgggcgcggcacggccggagcctggctctcctgcaggctctaacaagccctggttcgagtctgggaaccgccccattggcctcggaacggcctgtaacctctctggacttcagcgtcctcgtctgtaagtgggcccgataacgcctgcctgggaggcctggccttacagagccggcctcgggagctgcgcgaacgtgcgcttctttgcgttcctctattaaatgccagcgcaccggatacctgccaggaaaagggggccttggcagggccgggaggtgtagctggggctggttgctcccacgcctggattcacccttcggccctgccacgcactgcaggtgtgaccttgggcaagtcctttttctcagcctcagtttccttttctgtaagtcaaggagaatagtaataactgcagcaacccttctggagcgctgactcctcaggcatctaattttcatagcagatctacgggacaggaacagttgttatcccattgtaaagatgaggcaactgaggcgcatcgacagtaactcttactcaaggccacagtttaatccagtgcctggcatctgtagttattgtctcagaccctgccctgactcggttccctcacagcaggatggaaccaggtgaggagctggaagaggagggctctccaggtggccgtgaggatggcttcaccgccgagcacctggctgcagaggccatggcagctgacatggacccctggctagtgtttgatgcccgcacaacgcctgccactgagctggatgcctggctggccaagtacccaccatcccaagttacccgctatggggaccccggttcacccaactcagagcctgtgggctggattgcagtgtatgggcagggctacagccccaactccggggacgtgcagggcctgcaggcagcctgggaagctctgcagaccagtgggcggcccatcacaccgggtaccctgcgccagctcgccatcacccaccacgtgctctcgggcaagtggcttatgcatctggcaccgggcttcaagctggaccacgcctgggctggcattgcccgggccgtggttgaaggccagcttcaggtggccaaggtgagcccacgtgccaaggagggtgggcgccaggtcatctgtgtttacacggacgacttcacggaccgcttgggtgtactggaggcggattcagccatccgtgcagcgggcattaagtgcctgctcacctacaagcctgatgtctacacctacctgggcatctaccgggccaatcgctggcacctctgccccactc

SEQ ID NO: 65867 - DNA, 1050 bp, Homo sapiens
cacccaagcggtccgtgaagtcgtccgtgtaaacacagatgacctggcgcccaccctccttggcacgtgggctcaccttggccacctgaagctggccttcaaccacggcccgggcaatgccagcccaggcgtggtccagcttgaagcccggtgccagatgcataagccacttgcccgagagcacgtggtgggtgatggcgagctggcgcagggtacccggtgtgatgggccgcccactggtctgcagagcttcccaggctgcctgcaggccctgcacgtccccggagttggggctgtagccctgcccatacactgcaatccagcccacaggctctgagttgggtgaaccggggtccccatagcgggtaacttgggatggtgggtacttggccagccaggcatccagctcagtggcaggcgttgtgcgggcatcaaacactagccaggggtccatgtcagctgccatggcctctgcagccaggtgctcggcggtgaagccatcctcacggccacctggagagccctcctcttccagctcctcacctggttccatcctgctgtgagggaaccgagtcagggcagggtctgagacaataactacagatgccaggcactggattaaactgtggccttgagtaagagttactgtcgatgcgcctcagttgcctcatctttacaatgggataacaactgttcctgtcccgtagatctgctatgaaaattagatgcctgaggagtcagcgctccagaagggttgctgcagttattactattctccttgacttacagaaaaggaaactgaggctgagaaaaaggacttgcccaaggtcacacctgcagtgcgtggcagggccgaagggtgaatccaggcgtgggagcaaccagccccagctacacctcccggccctgccaaggcccccttttcctggcaggtatccggtgcgctggcatttaatagaggaacgcaaagaagcgcacgttcgcgcagctcccgaggccggctctgtaaggccaggcctcccaggcaggcgttatcgggcccacttacag

SEQ ID NO: 65868 - DNA, 1097 bp, Homo sapiens
cgcgcaccggccaggaggcttcaagaggagggcactagggccctgcgagcggcgtcttaaccggcggcgctaggactccgcgggaaacggcgggggcggagcgggcggcaccaggacccaggggaaccgcgacgggcgggcggcgagcaggcccgggagccgggaggctgcgggcggcggcgctggacccgacgcggcgagagaggccccgagatgccgagcaagaagaagaagtacaacgcgcggttcccgccggtgagcacgtggcagagcccggcaggagtgggcccggctcccgggtggcttgggcccagttcccgctgggcaggcgggcgcgccgcggtgttcgggggcctggacgccccgccccctccatgccctccccgcgtccgtgtcccccgccccctttctccggggatgccccttcctcccccagcacccccttaggggacggtggcgacggggtctgaactctgctcccccacccgcaggcgcggatcaagaagatcatgcagacggacgaagagattgggaaggtggcggcggcggtgcctgtcatcatctgtatcctgccgggggcggaccgggtcgaggggcgtgggggagggaggcagcgggtcgccctctcctgccccggagttctccttgacgctcctcagcccgggcgctcgagctcttcctagagtcgctgttgaagaaggcctgccaggtgacccagtcgcggaacgcgaagaccatgaccacatcccacctgtgagcggcgaggagccgggaggggccggcgggtttggcgcggggagttcacacactgaggaaggcagagcctgggtggcgagggaggtgggcggcagccgggacaccagcaaggccacagactggcagaggagaggctgggcttccaggcagagggagccacctgagtaaagcagggcaggcccgggagcggagatcggcccgggctccagcctgacatctggggccccttgctgccacccactgcgggtttgggtgtctgggcccctcttgagtgccagcccctcctcacctcttccaggaagcagtgcatcgagctggagcagcagtttgacttcttgaag

SEQ ID NO: 65869 - DNA, 1034 bp, Homo sapiens
gacatgcagggggacggggaagacaaccacatggatggggacaagggcgcccgcaggtggggccagggcctggcatacagtggggaaggccaaggccacagggcttgggggtggccaaggagtagggagcactccgggcagatggactgtaccttcccaaaggggccggaagccaggcagcggcggccggaagaacggtgggatgggaacgaaaagcaaggacaagaagctgtccgggacagactcggagcaggaggtgagtgaggccccagcccttcgccctgcccttggtgatgggacaggcagcctcgccccaggctgaactggcaggaggccagctctcatccttttctgcaacctgtttgctcactggtttatttgtaaattggggctatgagggtctactgctgtccctgccactcccagtgatgggttcgtgtcttttcttgtcaactctgacctctgcggtgctcacaggatgaatctgaggacacagatactgatggggaagaggagacatcacaacccccaccccaggccagccacccctctgcccactttcagaggtgagcagcccagaggcatgggagggtgctggcagactccccagagccaacttacccctcttgttctccctggccccttggtcttgttgattgtggcagatttgtggggtggaaggagaataactgaggagggcttgaaggcaggagactgttctcccgaaagatcctgctccaccctgccagggcccgtgggtggggcctgggcctgccctgcgtgagctgccctgggccttggccgcatggatctggagggtggtggtgggagggtcagatgggggagggagggtcttggcagctgcccctgtggagggcacggtggggctcaggcctgactctctcctgccttctgccctgcagccccccgacacccttcctgcccttcgcctctactctgcctttgcccccagcgcccccgggcccctcagcacctgatgaagaggacgaagaagattacgactcctagcgcct

SEQ ID NO: 65870 - DNA, 1080 bp, Homo sapiens
aaggcaaggccagggttgtcattcctacttctcaatgaggaaactaaggacctgaggggaagggccttctttaaggacgcaggagcgaacaagcagcagaaccagtctgggactctgcaaccatctgagcggccacacaccaagtccctcattaggggctggcaccaccacgctggtcaccccatgccttagaataacctggtacagagcagcgattatgaagcccacttgacaataaggaaagtgagactcgagaagagtcactttgcccaggatcacacagcaagccggcactgaagcagggtttgaagccacattgtcagtggtttccttgggcatgggggtgggagctgcagagtcaggggcctctatctgtgtcttgaaggagccacaggtcaatgggggtgagaatggagcactctcctcagaggcccccaaggacagaacccaccggcagccagcctgacaggcactacaaccccagcctggacccggagtgcagtccctgagataaaattaaaggctttatggcaaacacagtatgagatttctggtggtgggggtggtggaagctacgggttggaagttggaggtggcaggtgggtgggcagcaggcttagctctgtccccgcaccccctccccaccaggagctttggctcttttggttccccccacccagtacacacagccccttctctgctcctgaggagtggggacatctcaaagagcaagagctgtgacttctccaccccatctccaatgtatatgttgggtcctataaattcaagcatgaataagatgaaatgactcctgcctctgaggacgcccagtgagtgggagagggggtggatccttaaaggggcgcatacaacatagcctaacacatgctgagttgtgccacacagggagccacagactgagcaaccactgggtgaggggaggggtttcaggagagattgggattgtgtgcactgcgctttttttttttttttttaagacagagtctcgctctgtcaccaggccggagtgcaatggtgtgatctcaactcactgcaacctctgcctcccaggttcaagcg

SEQ ID NO: 65871 - DNA, 1199 bp, Homo sapiens
aggcagagccctccgagcggcgcgtgaagcgggagaagcgcgatgacggctacgaggccggtgaggaggcggggcctgcgcagggggcgggtcgggcgggggtcccggaacgcgtgggtctgggtgtgcgcgcagtgtcagcgaagctcttcaggccaggaaacccccaagctgtttaccagctctattaaatagtctttctacgggatcccttgagcccaggagttagaggctgcagtgagctgcggtcccgccagtgtactccagcctgggcaacaaagcgagactctgtctcaaaaagaaaaaagtctttctacggttgtttaggattagaggttgactttctccactcagctgcttgaggacagagggcttctgttttcctcagttgtctggtacaatcagattctcaataaatatgttgaatgagtgaatgaagtagtgtcagcatatacagaggcaagaaaaacctggtattggacgaatcgtgtagggcgcatggtagagaaatgagggagtaagatagacagggatgtgaacacaaaggaccctgtactgtagtctctgttaagaactgtagattgtcttgaggatagtagggagccatggatgtgagttgaggagtgagttgctcagatccgtattttgtaaacatcactggattgagaatttagtcaaaggtagtcaggactggagaccaggaaaccaggagggctataggccaggggagggctgatggtggcctgcaccaaggcagcagcagtgggattgagagaagtggacaggttggagaggtgttttggaggaggaatgaacagaactcagcacttgtatgagggtgggaagaaggaatggaggatgactccttgaattttggcttgagcagccagataggtagtgggtgtcatttctactgaaattgaggagtagggaagagaagcagatttggagcgggggtggggggagatagttcacttttggggttgtcaaggttgatggtaatggggaaatccagagtttggactggataaagccattgggagtcagtatctgggtggccagtgaagcccctgaaagactgtgacatgagaagagggggtcaggactagaacctgagaaatgcccttatgttagtagtaggcagagaaagatgttaccaaaaaaaggagacagagtaaccaaaaaggcaggaaaacctt

SEQ ID NO: 65872 - DNA, 2647 bp, Homo sapiens
tcagcagctttcctgcaaggcctgccctttttgcactccgcttggtagagccctgagtgttttctggtgatgctgagtggcctgaagtcctaggtcacccctccctgtcccgtaggccaagttactggaggagatggaccaagagtttggtgtcagcactctggtggaggaggagttcgggcagaggcggcaggtgaggctgcagcaggggtggtacaggggacactggtggccttgctaccggaatcccgaggttgggtgcgtggagggaggttcctgactcgccgattcttcccttaggacctgtacagtgcccgggacctgcagggcctcaccgtggagcatgccattgattccttccgagaaggggagacaatgattcttaccctcaaggacaaaggtaatgcgagctgggtgccctgggtgggggcacagcctctgctgagttgcggacaagtgtgaatggccactgctctgtgctgcccccaggcgtgctgcaggaggaggaggacgtgctggtgaacgtgaacctggtggataaggagcgggcagagaaaaatgtggagctgcggaagaagaagcctgactacctgccctatgccgaggacgagagcgtggacgacctggcgcaggcacggcctgggcaggctgggtggcgggggctgaggtggagaatgtcgggaatgggggctctgaggaggtggtggctcagtggcttttcaggagccagcctgggtcccaacctgtacctcttgccttgcagcaaaaacctcgctctatcctgtccaagtatgacgaagagcttgaaggggagcggccacattccttccgcttggagcagggcggcacggctgatggcctgcgggagcgggagctggaggagatccgggccaagctgcggctgcaggctcagtccctgagcacagtggggccccggctggcctccgaatacctcacgcctgaggagatggtgagccctcccgtgccttatactcggggtcaagattctccctccctctggggctcctgccctgcccgcaggcactgagaagacagggcgagtatttgtgttcacaaagcgcttggcctcgcgggtgagcactaaatggcaaccgggggaggcaccaggtgtggatgggtcagggctgctgagccagatgggccccagtctgtttcggctctgccatgctgccagctcgtgccttggataaaccatttaactgtgagcctggggcaccccatctggaatggcagtgacaggagccgcctcctgaggttgctgtgaggatgagtgacagcgtgggtgaggggtgactggagaggtgtgcgtggattctgtccacagggtgactgtgtgaacgtgaggtagacagctggcgcggtaggcgtcttcctcagtgggtaagagcaggactctggagccagactgcccagctctcccacctaggagctgggcaaccttggggaaggtacttaacctccctgtgccccagtttccctagctcaccagtggaattgagatagtaaccaccccacatgttgctcatgtgtgggaagcgctcaggacgctggctagcacagaggaacaccaaagaagtgttcaccctcgagggcttgtggcgacctgcctttctgtggcccccgctccatgtctcgcccctcttcccttaaggtgacctttaaaaagaccaagcggagggtgaagaaaatccgcaagaaggagaaggaggtagtagtgcgggcagatgacttgctgcctctcggggaccagactcaggatggggactttggttccaggtgggcttggacacggtggtggggcgagatggctgggctggggtggcctggggaccggtgctcaccagagaggcctccttccctcagactgcggggacggggtcgccgccgagtgtccgaagtggaggaggagaaggagcctgtgcctcagcccctgccgtcggacgacacccgagtggagaacatggacatcagtgatgagggtgagggcccggccagggggtgggaggggcagggacaggagccgcgggttggaggagatggtctgagcaggcatcccctgtgtttcccccagaggaaggtggagctccaccgccggggtccccgcaggtgctggaggaggacgaggcggagctggagctgcagaagcagctggagaagggacgccggctgcgacagttacagcagctacagcagctgcgagacagtggcgagaaggtgaggctgggcatgggcagggtgactgcgtcagcagtcacctgtcctcacgagcacctgtgtcataggcgacagccacattcctgtctgaagcctcttttccatttgttttttgttttctgggtttgttttttttttttttttttgagacagagtttcgctctttcgcccaggctggaatgcagtggcgcagcctcagctcactgcaacctccgcctcccaggctcaagtgattcttattcctcagcctcctgagtagctgggattacaggcgcacgccaccagacccggctaatttttatatttttagtagagacggggtttcactatgttggccaggctggtctccaactcctgacctcatgatctgcctgcctctgcctccgaaaatgctaaaattacaggtgtgtgc

SEQ ID NO: 65873 - DNA, 1032 bp, Homo sapiens
ctcaccaccctgcgggttctagaagtgctgtctagagtcctgaaaccggagtttgtcgggggaggggcaggtggcaggagggagcctggaggaaggagtttgaggctgaggtagtgtgtgaggggctttggagggggattggcacaggcctggtcaggaaggccctgtaggatgttgggtattcattcaaagggcatccaaacccattgatgggtttggagcagaagagtgaccccagtgaaagaggtgcagagtggagttaggcggcagatagcagctgggcctgcatgggctgtgggcgtggcctgtctggctgctgccagggaggacccttaggttcctgggtctcaatggcatcaccccagaaactgctgggtttgcccacagccgctccctcccccaggtggtggagattgtgaagaagctggagtctcgccagcggggctgggaggaggatgaggatcccgagcggaagggggccatcgtgttcaacgccacgtccgagttctgccgcaccttgggggagatccccacctacgggctggctggcaatcgcgaggagcaggaggagctcatggtgcgtctggggcggccccgccctctgcttccctcggctgggtgggctggctggggcctgggccgaccctggtcttttgtgccccaggactttgaacgggatgaggagcgctcagccaacggtggctccgaatctgacggggaggagaacatcggctggagcacggtgaacctggacgaggagaagcagcagcaggatgtgagggccgcgccgctggggggtgggcgtttgggggtgctcaagctggagatgagcaccgggctcggtgtccagagcctcagcctcctcatccagagtgggctctgcagacctcccagggcgatctgaggagtaaatgaggaaattaaatgttgtggagggctggtgcctggcaggtggtgaccagtgggtggggctgagaagagccggtatggcctgctaaccacccccgccacgtgtcccgtagttctctgctt

SEQ ID NO: 65874 - DNA, 1156 bp, Homo sapiens
ccactccttcccctccactgtggcatctgtccgtctgctctgcctttgaggctccacacctgcttggggaaggagaggggagttgaaactgttccagctgtggcacagagagccctggtgttaggaccccagctctgccatttccctggccagtgacccttggcaaggggctcatttctgcatctttgctttgcctgtagaacaggcctgatggctttccagaggcaaggaaagggaggtgcccccacagggcctgctctgccttctcaggcggccctggagctgtggctctcgaggggttgggagtctcacaacccctccatccctagggctgctggagaccacagtgcagaaggtggcccgggtgaaggcccccaacaagtcgctgccctcagccgtgtactgcatcgaggataagatgtgagtgtggtggggcctgtgcagggctgaggggcctgtgccagcttggagcttcgggaccacagcaggcggcagctcctcacactaaggcctcctctgtctcgggccagggccatcgatgacaagtacagccggagggaggaataccgaggcttcacacaggacttcaaggagaaggacggctacaaacccgacgttaagatcgaatacgtggatgagacgggccggaaactcacacccaaggaggtgagcagggccttttgcaggcggaggcccggcctgccacagggaggccaagcccagggccatgcaatgccccgggccatgcaatgccccagggtcctggctccaccagcctctggctgggggcctggtgaatgccacggatggggagggggccctcagggctgaggaaggctgtgcctcagtttgtctctagtgggcacagcagtctctttgcaagcctggcaggagggtcagacaggcactcgggacctctgccctcctgtcctcacctgcgtgagcccttcactggctttcctggcccgcagggccattccagcgtccaggcccttccagcactctcgtaggccgcccgaccgtcctgccctaccactcagctgcccccttgctctctggggtttgtctccctgcagccccagccccagccccagcgtccaggcccagcccctgcgtggcaggtctccaggttccccatgctctgcccccatggcag

SEQ ID NO: 65875 - DNA, 2158 bp, Homo sapiens
ggagacagcccaagggcagcgcttcctggtgagcatgccctccaaataccgcaagaacatctggatcaagagaggtgagaggattactcctgtaatcctggcactttgagaggctgagatgggaggatcgcttgagaccagcctgggcagcataatgagaccttgtctctacaaaaagaaaaaaattagttgggcacgtgcctgtgatcccagctactcaggaggctgaggcctgagaatcacttgagcctgggaggtggaggctgcagtcagctatgatcatgctattgcttgccagcctgggcaacagagcaagaccctgtctcaaaaaaaagaaaaaagagagaggtgagagaggcagccctctctaggagatagaaccccttcctatggctttggctttccttattgcaagcaggcctgactttgccttttctcttcttatctacaggggactttctcattgttgaccccattgaagagggagaaaaggtgaaggctgaaatctcgtttgtgctctgcaaggaccacgtgcgctctctgcagaaggaggggttttggtaggtggtccccttgatcattggctgtctggcttctggaggcattgccttcctagcttgggaattaggggagggaaggtcatggcatcccaggcagacacagctggaagcagctcttttgtgagaaatttatttgtcctttctgactttggctcatctcttggcataggcctgaggccttctctgaagtggctgagaaacacaacaacaggaacaggtgaggaacaagccttggggtggggtacatggaaaataaggggttcatgctttggtgccttgagggaaaaatagagccttctttcctccttacatagggtatctgttgagagctcctaagcatgtggtataacatggttatgaatggggtttgaaggtcagatgctctgggttaaaatcttggctttgccacttaaagctgaatgactttaagcacgttatttaattccttcaaactctattttcttatatgtaaaatgggagctttgtgaggattaaagaagtggatggcttgtaaaattgcttagtgcagtatctgttatgtgatatgggtccattaagtgttagttggtggtcgtagaatcattatttctaactaaaacaaatggctgtggcacacgtttggggagtggggtcagtctttagcctgtttctttggccacgtttccccactgtttgctctcctgtgtcccttgtttgagtctttaaagggtgctgtagggccctgactgctgggccggatggtcctttttttggaactccttgattgtagatattattttcccagaaggcgctgggctaaccctgctctcttcccttcgtgcagacaaactcaaccagaactcccagctgagccacagttatcaggagaggagtccagctcagaagatgattctgacctgtttgttaacacaaaccgcagacagtatcatgagagtgaggaggagagtgaagaggaggaggcagcctgagactccaggacccaattctccacttgctcagggactggcccctggctcttctgggcttggacattcccagggtgctctgcacatcttcacccctgcatgaggacaaagcagggctcctctctgaactgatcttttgattcagagaattaaacccctggtgggttggtgacttgttctggtgtctgagtggctctctcgggggagggagattgtgatgaagtgaaaaactgctccctatttattagagaccttgtgggtgggtgggctgaatggggaggaaatgggaaatggctggagtctttcccaggtggtttgttctttcttattgggcacttagaaagtgccaggccgtgctctgggccttcttgcatgtgtttaacagctgggagcactcctgcttccttgcctgcttgcagttcataccaatttaagcattcaggatgacagccctaggacctaacacccacctgcctctaagagacgctcaggagcccatggtgcctcgtgctgttctccccgcctttctagtcaccctgtgtacgggagtgctcacctccagctactgtgtccatccccacatacgacctcatctctcccactctgcaccatctatcacttccagaaggtggc

SEQ ID NO: 65876 - DNA, 1752 bp, Homo sapiens
taggtgtgcgcttcgccctgtaggtagagagaccctttggttagctttccacgccaagtggccgttccaggcaggcagtgtcgtcttggttcagccaaggtcacagagggagtgatagcttccgcgcagccctggctacggactctgggcatctttccactgccccgcttgcgccacctgttaggcaggatcgtttttcctctggggcaagatcaaaatccaggtcctgcaggaagaaactcctcttaaaaatagtagggaagagtctccctggaactgttttctcctttcaggatgagggggatcgagcaagccactgtaacccctggcttggcttcctcttactatgagattgctcgtgggcccttagaagttccaggtcttcagccctaatctgccttttttttgggattcctagattaagcctgatcaagatgacaacctcccaaaagcaccgagacttcgtggcagagcccatgggggagaagccagtggggagcctggctgggattggtgaagtcctgggcaagaagctggaggaaaggggttttgacaaggtgtggggtggctgcgtgtacctagtgcaagcggggggtggaagggaagtgattccatctgctgggggatggacagtaaggtataatctgaagaggctgccagagcctgggcacctggtggagaggagaggggggcaaaacccgcgctgcttcctgggcttgtgtgctctgaatggcacaggaatggctgtcttgctcttatctctcactgagcactgagcagcacgctccttccttttccctgttttgcaggcctatgttgtccttggccagtttctggtgctaaagaaagatgaagacctcttccgggaatggctgaaagacacttgtggcgccaacgccaagcagtcccgggactgcttcggatgccttcgagagtggtgcgacgccttcttgtgatgctctctgggaagctctcaatccccagccctcatccagagtttgcagccgagtagggactcctcccctgtcctctacgaaggaaaagattgctattgtcgtactcacctccgacgtactccggggtcttttgggagttttctcccctaaccatttcaacttttttttggattctcgctcttgcatgcctcccccgtcctttttcccttgccagttccctggtgacagttaccagctttcctgaatggattcccggccccatccctcacccccaccctcactttcaatccgtttgataccatttggctccttttttggcagaacagtcactgtccttgtaaagttttttagatcaataaagtcagtggctttcatgactgggctttgtgcactgaaaagcaagtgggctgggagttgcctctccttcagggactgaccatgtttccctcactccttatcagtagagaccgaaactggcagcttcccttccactcccagagggcagccaccctagccatgtaggcctcaggcaggtgacttttgtctcaatccccgagtgatgtgggagagggtgtgggtggatcttttcctgggagccagatggactgtgctccagatgtcagttaagtcaacagctgggctaggcagcacctggtggaaaagtcagtgggagtcagaggtaccagacagggtgggccggatgtgggtgagagttcacctgccagtcatcatctgctctcccggcctctgtaagggtgggcagggtgcttgccatcttccatgatctcttagggag

SEQ ID NO: 65877 - DNA, 1049 bp, Homo sapiens
cgggactccctgggagcgtaagcgttcgaggatctgaccggagggccgggccggaaagcttgagagccttcgctcccgcaggtgaggcgcagaaaacactccctcggggaagtgccagccctcctcgcagccccgccctccggcccgccgccggccttcggggccgtagcggcgcgcagggcccgcagagaccgagacctgcgcactacaactcccaggaggcctcgcgaccagaccgccgaggggccactagagaaaggtgcgtctgcggcgaatcccgtcgcccagcgcacggcagcgggtgtgcctgagtgcgcgtcgcctcccaaccagagaggacgtggcatacggcgccaccggaagttccggcaagtgggccctgaggctggccccagcttccgggttggtcgcgcgccttcctgcggctaagatggcgacggagcatcccgagcctcccaaagcagaattgcagctgccgccgccgccacctccaggccactatggcgcctgggctgcccaggagcttcaggccaagttggcagagatcggagctccgatccagggtgaggaacacaggaagtcgaggggcctttacgggcctgcggagaagcggagcctggttacccgggagactcgggtgcgaggggcggaggcaggccgctggggcctgacctggccgggctggcctgccccattgatcgtgtactttgccctgcaggtaatcgcgaggagctggtggagcggctgcagagctacacccgccaggtaggtgttggcggcgggacgtcaggataggccgagcttctccaggagaccttatataccccatcacggctcggtcttcattctttctttatctcggcacagcaaggcggaggcttgccctttttagcttgttcttgcctttgccagcttagttgtaatttcttgtatccatcttggtcctcttcagtgcccagccagagcgctggcagacaggcactgggtacgttttgttgaatgaattgggagcgaacgtcgtttagtgaaacagctagttttggactgac

SEQ ID NO: 65878 - DNA, 3569 bp, Homo sapiens
aaaagggcatatatagtaaatatatagtttaatggttttttacacactgaacacacctgtacaaccagcacctggaccatgatccaaaacattaccagcattccaaaagccacgccacgtgccctcctcccctgcaggtttaccatcaccctttcagcaagagaggtaattttttacgtgagtgttttgcctcttctgacattggatttctttttcccgtctcttagtagctgctccagtgggcccagtgggccccactcctacagttttgcccatgggagcccctgttccccggcctcgtggtcccccaccgccccctggagatgagaacagagaggtgagactgatgatttattcctagggataagagagtggtagtttaggatgggactatttttggatttttagagaaaggttctgtgagaagatggggggacttaaattcctgggggtagtggggagcccttcttatttaaactaagggtatggcagagggactggggagacattactgaggcagagtcttggggtccctctgaggaacactaaaccccactgagcccagttggtgttgcccactctctgctgcttacatcacctgggcagcagcctttctagtccaagaggtggaagttggtggaaaaagggcactgtgggctgggtgcggtggctcacacctgtaatcccagcactttgggaggccgaggcgggcggatcacctgaggtcaggagttctagaccagcctcaacatggagaaaccccatctctactaaaaatacaaaattggccaggtgtggtggtgcatgcctgtaatcccagctactcgggaggctgaggcaggagaattgcttgaacctgggaggcggaggttgtggtgggccgagatcgcgccattgcactccagcctgggcaacaagagcaaaactccgtctcaaaaaaaaaaaaaagaaagaaagaaaaaaaaaagaaaaagggcactgtgatttgccttctctgactgggtgtctctggcagatggatgacccctctgtgggccccaagatcccccaggctttggagaagatcctgcagctgaaggagagccgccaggaagagatgaattctcagcagggtgagtgccaggcgttctgatgctgtagccacagaacctggagaggctgagctgagtcctcatccctctgtccctttccctggctcttggtaaaggcaggttactgtgaacgagtgcagggcagtggcaccgtgaagactcatcaccaccttcttccttacagaggaagaggaaatggaaacagatgctcgctcgtccctgggccagtcagcgtcagagactgaggaggacacagtgtccgtatctaaaaaggaggtagggattggagctgagtgtggaaggaaagccaggagatgggacttgggtacggaaataacacaatttgtaagtgttcagtaagtaatagcttctattttgtgccaatttccgccctcagcatcttatagatatttttcatttaattgctttgagttccaagtactatacgtgcctacattttacagctgaaaaagcagaggttctgagacgcacagtaatttacccaaaggcatacagcttgtgagtggcagaactttggagtctgactccaaggccccttcgcagctacttcatgagatggcctccttgggaaaagcctgactgttgaactgtgggggagaatgggggaggagtttaggggttggggtgctggcacagtgcttggattccctgacccagctggttttcctcctcttgacagaaaaaccggaagcgtaggaaccgaaagaagaagaaaaagccccagcgggtgcgaggggtgtcctctgagagctctggggaccgggagaaagactcaacccggtcccgtggctctgattccccagcagctgatgttgagattgagtatgtgactgaagaacctgaaatttacgagcccaactttatcttctttaagaggatctttgaggcttttaaggtacaaggagagcacactaggaaggggcagtgccaaacagggaaggggctcagaggtgggtgagaggcagcggtgaacaggcatcttttagtgctggccttaggaactgggaaggggctcagagggcaggggtttcaccttgtctgcctccttagctcactgatgatgtgaagaaggagaaagagaaggagccagagaaacttgacaaactggagaactctgcagcccccaagaagaagggatttgaagaggagcacaaggacagtgatgatgacagcagtgatgacgagcaggtcaggcccagccctcctggtgggaagcagggactctgggcacaggtggctgagatgcatccagagagggaccatggtgaactcttacagagctttggtggcttaaggttggggtgggttgggcagtttcattcacatctgagtcctgcttaaaagggctgattgttctgttctaggaaaagaagccagaagcccccaagctgtccaagaagaagttgcgccgaatgaaccgcttcactgtggctgaactcaagcaggtaagacctgagaggatcctgcaggccctggagcccagctgggagaccacctggggagccagggaggtgaaaaggagttctttgaaggaggtgtgggtgatttgggtttgggtcctttgaggaagaagagcttcagaactgagaagtcggggctctcgagaacacgcattactatgtgttttccagctggtggctcggcccgatgtcgtggagatgcacgatgtgacagcgcaggaccctaagctcttggttcacctcaaggccactcggaactctgtgcctgtgccacgccactggtgttttaagcgcaaatacctgcagggcaaacggggcattgagaagccccccttcgagctgccagacttcatcaaacgcacaggcatccaggagatgcgagaggccctgcaggagaaggtgagggcctggcagggctcagacctgcccccgggtgtccccatccttcatagcagtgtgcttcaaaatgggaatctggtttgaaacccacctaccacctacttgttacttgtctaattatccttttgttttcctcctctgctcttcctcccctctgccttcactttgccagctcacctggtgactcctttctcagatgtactttgtggctagagattcgtggtggttgtgtaacttcttaattttaaagcttttagttaaatgctttgaattcaggaggtagaaaagaacatggggaagtctctgctttccagagaactgttgagattcatctcttgatgagatggtttaaaaactagttattgatatacacggctgaggctgatattgtatagtctgttttgttcagtatggattatgtaattttgaaaggttttagcaggaaggattttgatgactttcagggtgagataattgaggcttcccatgatctcatttggagttgggagctggattctctacatgaatttggtgagtacttgttaaggcttgtttgctgccattctccacaggaagaacagaagaccatgaagtcaaa

SEQ ID NO: 65879 - DNA, 1067 bp, Homo sapiens
atctggtggcttctttccctgatagactcttcgtatcctgtcttagaaatgataatagtttgtggtaggtggtttagggatggaggggccaaggggcagatgcttttaggaaacttttaatattgggagtggtagagaaattgctggttttttctgatccttgaaatcgtagtcaccatgatgtcatggaatttatgaggtggaagaattttgcatatcttcctgtcgagtgccctcattttacagatgaggaggcaggtcctaacgttggccgtgttctcatagtgggttattgacagcactgtgagtctggcctggtttttattccttccccgactttggccagggaaagaagtgatgagaatcagagtgggagccaggtagccctcactgggattttatatctgatgtgcgttaggattgtgctcccactgagtgtctgggtctacaatgtagcatgctctgcttttccctcaggggaaggagttcgagacacgactgaaggagaagaagccaggagatctgtctgatgagctaaggatttccttggggatgccagtaggaccagtgagtgtcagttagctgtctggggaagcagcgaagaggctggtggggattggagtggaaggcagagacagggatagggtttggcagatggtatcctgttctctttttcctgcagaatgcccacaaggtccctcccccatggctgattgccatgcagcgatatggaccacccccatcgtatcccaacctgaaaatccctgggctgaactcgcccatccctgaggtgagcattgtcctttcgttcattcttggccatttctgcttttgaactggaaggtaatttgtttgttttccttctctaactccaccatgtgtctctttatttacttaaaaaatattttattgacataatatttgtcatataccatgtgtatgtgtagaaaaacaaataatggtttttgttttttaaagaaactgacatgctcatcataaaatattcagtcagaattgacaagtacaaagatgaaagcaagtcacaattttaccactcagaaatagcc

SEQ ID NO: 65880 - DNA, 1490 bp, Homo sapiens
tttgcagctaaggagtgaactgattgtgctcactgtcttgcagagctgttcctttgggtaccatgctggtggctggggcaaacctccagtggatgagactgggaaaccgctctatggggacgtgtttggaaccaatgctgctgaatttcaggtatgggccatgtactagcgatcttggttttacttaatgtcatgaaggttagattgttggtttatagcttcattatcagggagttgtgtgttctgacacagcagagcctggaaaagggcatacattttcctgagatgttaatgtaagctcctcactagaatttgagctctaggtaggtagggattattgtgttttgactcttacaccccttcagcttaaaacagcctggcacataataggtacttagaaaacatttgttgaatgataaagtgatctctttcagaccaagactgaggaagaagagattgatcggaccccttggggggaactggaaccatctgatgaagaatcctcagaagaagaggaagaggaagaaagtgatgaagacaaaccagatgagacaggctttattacccctgcagacaggtgggggaagcagagaatgcctcttggaagtgggctatctttggggtccttctctttactccagagcttgttcctctctttacagtggccttatcactcctggaggcttttcatcagtgcctgctggaatggagacccctgaactcattgagctgaggaagaagaagattgaggaggcgatggacgggtaagggtaccagacagggctgagaggggaggaccttcacttccctttggctggctggctgactgttgttcctttctccctcatccttttttaaacaattattgaaccaactctctgccaggcactactgtaggcagtgaggagtcagcagttgaggtaaactggtaatcagagaacaagatactttcagatgtagataaggatgttgaagcagaggaaactgggtaatgggatggggtggcagggaggcctttgggaaggcctcactggggaggtggtgcttgaactaagacccgaatgaaaaagcgccagccacaggatcatctgggtcagaagtaacagtaaatgcaagcaagtgcaaaggcactgagacagggatgggctagtattttgaagctccatttttaggtagttgaatgtgtagtgttgttaggtcttcatgaattgacccctttatcatgaaatgaccctctctttatccattctgctctttgttccctttttcctgtttttctaccttcttttggattacttgaacaatttttatgatttcattttatctccagtgttggttaattagctgttaagtttttgctttgttattttagttgttgctctggggtttatagatcatgtctttatcaggatctaccttctcttgatgttacactgcttccagatagtattaagagccattatagtatacttcatttctctcctcccaat

SEQ ID NO: 65881 - DNA, 1997 bp, Homo sapiens
tgcatgtgggagtcctggtctgtgatcccttgacttgattcagggggccccttagctccatctgtgttccctggagtcagcactgtgccacccccccgcccaattcttttctgtcatgggcagaactgcagaggctgcatccttggggagctcagaagctctccaaggcgctgagtggaggtgccacctgtatcttttgtttccgcttctggagacccttttgtcccttgctttttgggcctgatcccattgtccttcgcagaagtgagacacctcagctcttcactgtgttgccagagaagagaacagccactgttggaggggccatgatgggatcaacccacatttatgacatgtccacggtgagtacttggaggatactgcttttggaggctgagaaaggcagcagaagctagggcttctctgactctttggagatgaccaggccctgatctcctttccaggttatgagccggaagggcccggctcctgagctgcaaggtgtggaagtggcgctggcgcctgaagagttggagctggatcctatggccatgacccagaagtatgaggagcatgtgcgggagcagcaggctcaagtagagaaggaggacttcagtgacatggtggctgagcacgctgccaaacagaaggtaggcgcttccaggggcgctgggctgggtgagagccagggaccctggcctgccgttttcagtggcatggtgccctctagtggtgagagtgagggtggcctctgcttgctgctctgtgcttccttagatttggaagtcttagaaatcctccagtgggctgccctctttaaggacgatgagggggaggaactcagccaagtctgagagggagctcgaagagaattcagattcagcgcctttcccacagacttctatgtctatgtcaggctgcccacccttgttttgggggtccgggggtggttcaacctgtcttaacctgtgtctctttctccctatacagcaaaaaaaacggaaagctcagccccaggacagccgtgggggcagcaagaaatataaggagttcaagttttaggtcccctcacactagccctttttttggccctacgtctggatgcctgggcttcacacaagaaccacctctcccgcagttcccaaggacttgtcatttcatgttcttattttagacctgttttgtaaataaagctgtttcccaaggaaagagatgaatatttaacactcctgagcctccctcatctccttttagccccttcttgcaaaaggactaaaatagtctctttctacaatcactgggctgccccagtaaccacgaacataaactgggattagacggcgcatttgactggtggtgacgccaaccccaggctgaaatctgtgtttcaccactgccctgctttgtaggaaggcttgggggaagtacctctaggtctggtttgaccttactactttgtccttggggagtaaaaatagccagattagcgccctagcgcggcagaggaagtaacagtgggcttgggaagtaggccagggcaggccttcccaactgaccttgtgaccagaagttcaagtccttacctgtgcgacaacatagctcaaaagctaaattgtcttgagtccatatgaacccttgggttcaagcaacactagtcgctggggtttgggatttgtatgtgggatggggggacttactttctccaggttgtaatctggtcctgagcagcctttctgacagactagagcaggctggatcactggctcccatgggcatttgccagcctgtggggagggtagtcatgcgctgctgttgtactactgttggtgtttaagtgcaccagtggaggcgctcacttgccggagggttcaagatggtctcggggttgtggggggcatgatccagataggacgtggcagctgagctaggccttaggaggaatggaattttagaaatttggtaagcaacaaagcactggcactctaaagaggcatttg

SEQ ID NO: 65882 - DNA, 2337 bp, Homo sapiens
cgtgcagctcgctggctgctcgcgctcgggcaggcgggctgaggaggctgccgcgcccccgccgccgccgccgcgggggaagcctgggagccagatcggcgtcgcctcggcctccgtaacccccgcctagccgggccatggcggaacgcggaggggcgggcggtggtcccggaggcgccgggggcggcagcggccagcggggatccggggtcgcccagtcccctcagcagccgccgccgcagcagcagcagcagcagccgccgcagcagccgacgccccccaagctggcccaggccacctcgtcgtcctcgtccacctcggcggcggctgcctcctcctcgtcctcgtctacctccacctccatggccgtggcggtggcctcgggctccgcgcctcccggtggcccggggccaggccgcacccccgccccggtgcagatgaacctgtacgccacctgggaggtggaccggagctcgtccagctgcgtgcctaggtgagcgcgggagggtgcggcggggcgccgggggagcggggtggccgccggggcccagccctccccgccccagcgcccatggggtccccgccctccatctccccgactgtcccgcggcccggcctggctccagccaggcctcccgggactcctgccacggggacccgccctctcctggcagccccaccttctgcctggggccgggaccacccttctgtcctccccgagggaccttctggcctcggccccgggctttctccgattgggctgaccgaatccggccttcctggcagtcagtttccctgagtaagtcactctcctgcctcgccggcgccgggagctgtacatacatggatgtggtatagatctcttgatattattatttcccaatagactcagcatgtgccaaactcgattgtcacctcttgcaggtaaagctcatataatcaccctaggggcttctcattagccttcggcacacatgttcatttgaacttcatattacacacgttctgtcccaagcgctaggctcttagttttggggccctatttaatgtgtcctcaagtgtatttttacctcccctcccccactaaaactggtcccagaatctcccagctctgcagggctgtatgaaattactgccttgttcctaaattcaatccattgctctctgtctgttggaaccatctggggactttccttccattggcaaaataggcctgagtttgggaatattttctgtttttgtattggcaaggcagtctgtctccaactctggggacagggtgctgtgtcttacagtttgccacttgaataagacggtgtgtggagctggtttcacccagaaagcccagagaagtgcctggaggtgttcttttttgtcaccttgtagctgagttgattctgttgccttgaagtcttgggctgtctcctcactgttggttaggcagacggatgtgtaagtcagagttagagaggattgctgggctcccccctcgactgtcttcctttccccacctttattctggataatattgttttatatatatatcccagataggaatgatgagagtacatctttctgtttcgctcagcttaaggaacagagcattatcgcttctgttgaagctctcagggtgccccttcctgactgtctcccctcttccttctacaaaggtaaacactattttgaattgtgtttatcatttcccttgttagaaaaaaattagttttactacataatgcatctctatatattttatagttctgaatgttcttgaagtttgtgtacatggtgtcatcctgtatgtgttctgtgacttgattggtttttttatttttttttaaatcagcattaggtttgtgagaatcatccatgtggtatggtagccatagtttaaatattttcatgatgggtagtattctgttgtgtgaatgaatataccgtaattctcttgaatatgtaggttgtttcctgtttaacacccacagtaatgcacacatttccccccaggactcctagtgctcttgtgcagaagtttctttaggttgtattcatatggaggggtgggattgccgctcgcagggtatagatctgggacttcactaggcaaaagtagattgtttccacaggctgcttccactctgtgtttccacatcacttaacagatttacacattgttttttttttctctgtcctttctctagggaaatcaggagccacattaatttagtttgctgtggccagatccatagcacaacaccaagctcaagcgagagttgagtatgtgatggtgttcctctcttgatcctaagcaggcctctctctttctatacaggccca

SEQ ID NO: 65883 - DNA, 1104 bp, Homo sapiens
gtagagacggggtttcaccatgttggccaggctggtctcgaactcctgacctcaggtgattcacctacctcagcctcccaaggtgctgggattacagttgtaagcaaccatgcctggccaactgtaaggtttttaaggtacaacaaaggttggaatatttgagtttagtgctagcttcaacaatttttctgaatctcaaatatcgttcttcctcttttctccttgtgagtaatgatctgtgtccactctcagatcaacctgggctcccttcatcctttcaacactttcagtacttttagttttgtaaatacagtggtatccacaggtcattttggcaaaaacactttttagaactgtatgcgtcttagaaattgtgatgtgggtaatttgctgtgtatgttttttagtgacctcgtataaatataggtagatgtgaaaggagtgacgccttaaatttgctccctactgtaacacctgttcccttctttgtagtctgtgtaactcctccaaatgacagatcttttggacacattagtggttatgtgatttctttctaaactagttttccaaactacctctcaaaactttattatgagtaggatttcccccagctaacattttgggtatgactggcatgttaattgtctctgaaggattttagactggttattttgtttttgattttgagataggctctcactctgttgcccaaactggaatgcagtggcatgaacacagctcactctgttcagcctcaacctcctgggttcaagtgatcctccctccttagactcccaagtagctggaaccacaggcacatgccaacatgccctgctaactttttaattttttgcagagacaaggtcccactatgctgcccaggctgatctcaaactcctgggctcaagcaatcctcccgcctcagcctaccatagtgttgggattataggcgtaagccaccgcacccaggctaggctggttattgtgctgagatataggaaggcgttttttcttttcagctgttttcttttctttttctttttgagacagagtcttgctctcttgcccaggctggagtgcagtggcgctatcttggctcactgc

SEQ ID NO: 65884 - DNA, 1051 bp, Homo sapiens
ttgttcctgcggtgggtcaccctcgccttagggcttttgcacttgctgttccctctacctgtgataccctttccctggatccttggatcgctgagactagctcctgggtatcattcagctcttcactgacctgctaccttggaaggctgtcctcacctgcccaaccccttctgggagtttataaagctacttcacacctactcgccattactggaaataatcttgttcctttatttagttactttatagatgctcaataactacatttgtcaaatcaatgacactgattttcctatagtgttttataatgtttattgaatgactatctgttatgcacaattcatccattcaccaaatatttactgagtgtttctgtgtgccaagcactgatctaggctctggagaagcagcagcagacaggctgacaaagtccattctctcccggggtgtgctttctggtgggggtgacagatgaggaacaattatattgttatatctgtgataaatggtcagatagcgagtagggtcacaaagaatagtgtggtggggaactgagtgtggggggaaaggctgtcttggtgagggagggcctctggtaaggtgacagttgcgctgatgctcgctgcagtgaagctgatgaccagagcatttactgtgtgccacaaaactgccagagccaggtgctacgatcccttttctcagaagggaaaattgaggccctgtgaggtgaaggcatttttttaagactacacagtttaaaagtgggcggggctggaatttgtctcatgactcatgattgccagacaccagagccgtttctgtgtttaaacttggtcccccaagccctgtctggttctcatagctgacaaataatatttaatgccttattctttgccagctggaattacaaaacactgctcaatttccatcatagacagcgagaggctgtgtggtatagtggctgtgagtgtgggttctggagccagtcaggtcagattttactatttgagtgactctggacaagtttttaacctctataatgcttcaactt

SEQ ID NO: 65885 - DNA, 1050 bp, Homo sapiens
tgcgcatcaggccgggcgctgtggctcacgcctgtaatcccagcactttgggaggccgaggtgggtggattacctgaggtcaggagttacctggccaacatggtgaaactccatctttactaaaaatacaaaaaaattagccgggcgtgtggcggtcgcctgtaatctcagctacttgggaggctgagacaggagaatcgcttgaacccgagaggcagaggttgcagtgagccaagatcatgccattgcactccagcctgggcagcaagagcaaaactctgtttcaaaaaatataaaataaaatgtctgagcatctatgttcatagaaatcatgaccttcacatctttgaggagtgtcagtgaaactatgaatatgatggtataatatttatactgcagcagctctcatatcagccaccttttacattgtcttcacaagcaggtttttgtttggtactttaaatcacaggcgatggaatggggcagtgtaatatgccttaagtctattgtttatgaaattatgtcctcagagttaaaatatgtagaaagtagttgacagcattctgtcatctctcccatgcactgcttttgctgtggatgaaaatgaataagcaactctggaaaccaaggtcctctgggaacataaaaactcctgtggctattaatggatttaattgtatttcctctctgccaccaagatatgcaataaattgtttatgcccttgccgttagtggggagaattgttcattaaacgcatgtaatgtcattattgctttgtttttattacttgtaggtagtcctatctctccttttaaaaaaagtataaaaagaatggccgtaattattaaacactggccattaatccctttggttgactttttcctccatggagaaaaaggaaagtatcatctcactggggaagcaagcttgggctggaaatgggtcatggtctcccaaatctaagatctggcagaaggttggttttgtatgctttggacttgggccaagtgatatgtttacttaggctccagaagggcctggttctaagg

SEQ ID NO: 65886 - DNA, 1587 bp, Homo sapiens
aaagttttaaacacttacatctactggtatataggtatgcttgccccatttccttttcttttcactttctctttttacagaaccctgctgcaagctaactcatgtatgcgtccgttcatgcttttgttcattcttgtgtgatacagaaatgtatatacacatacatacagtgggttgggaatcttgtttttaaaaaatagaatcacattgaaactaatttttgcatcctgtttttctgaacaccttggagaaatccctataaatcaagaggtttcattctaatttgttctttttagatgctgcacatactctgttttctgatttggttatttgatcatgacggggtaggaatagagagggacaggcttcaaagaaagggtagtcaggaaagagaaagaggaggagtgctaggtattcctggggtcttcaacctgatgtgtcatcgaagtgggtgggaagttgggaaaatggtggtggggaggtgtgttggttggttttagcggggaaatgagtatttttttatatgcactaaaattacctaccaggcagttgaatacataggagcagggagtgagtccaaggataggactggagttgatagacaaagctataaagggagacggttactggggggagagctctgtctcgcttagcatcacttgctgttagtggtgggcccagacagtgactgaaatattttcattccagaccagggtccagtgtatttatacttgatgcattaagttctgatctttaaaaagctgccagttttttagaaggagagtttttattttcattttatatggtgtgggctgaaggaatcttttgctaaatataacaatgtgagtttgctagtctttctgaggcattgaaggcatttaaaatttgaaaccagagctacctgatgggaacatccttgatctcttctccaagtcaaaccaacctaggccacgtgtaataattagttcaattgaatggctgaagaaggatttatttgccccttttatgttacagaggagatccacagtacagctagaaaagggatgcagaatgaacaggacagacacgtgattctgaccctgataaccactctgcatccatcggatttactattattattattattattattattttattttttattttgagacgggtctcactctctcacccaggctggagggcagtggtgcgatctcggctcactgcaacctccgcctcccaggttcaagcgagtctcctgtctcagcctcccaagcagctgggactacaggtgcataccaccacgccaggctaatttttctgtttttagtacagaaggggtttcaccatgttggccaggctggtctgggattcctgacctcaagtgatctgtctaccttggcctcctaaaatgctgagattacaggcctgaatcactgtgcccagccaagtttactattattattaaaaatactggtggccttgaaatcagtgtaaaataataatgtcatctttttaggaataaaaatactgctctccccatgccccactggctgtaggaaaattgagggaaatggttgttattttctctttgtaggttggatt

SEQ ID NO: 65887 - DNA, 1056 bp, Homo sapiens
aattgaggctgcagtgagccatgattgtgccactgcactctagcctgagtgacagagagaggccttgtctcaaaaagaaagagagaaagagagaagagagagaaagagaaagaaagaaagaatgaatgagttagctgggtgtgctgatgtgtctgtagtcctagctacttggggctgaggtaggagaattgcttgagcccaagagttcagggctgcaatgagctatgtttgtgccactgtactccagcctggatgacagagcagcaagaccctgtctctaaaaacaaaacaaaactaagaattttaggatgacacaactcagtccatagcaagtgatacctctttgactggaacaaataaccttatgcttcaggtgcaatatctcacacagacactatggccttcgttcactttttaaactagcatttattgaagacaaaactatgtgccaagttttatgccagctgcaggggatatcccgtaccctccaccagtagaggagacagagccagtttcagagaagggtggtgagtacctggggatggatggatgtgtcaggaaaagtttcattgagaaggtcgcatatggccaggcgtggtggctcacgcatgtaatcccagtactttgagaggctgaggtggatcacttgagccaaggagtttgagaccagcatgggcaacatagtgagaccccatctctattttaacaaaaagtaaaagaaaaagagaaggtcgcatatggtctttcaggtctgtgaagaagtgtgtgcatagtttaccacacaacagcatatgagtcatgtcaccatcattattgtcatcacccatctttatagtaacaagaaggtagttccttcacactctaacctaagccctttttcttcatcttcacctggctttggttcttttgctacagttactccagcctctctccccagcctttatcttccacattttctgctgtgttgtttcaacagccagtgacttttctgttcatactctattgatgatgaagtaaaaattgattttgatttgtttctgatttcttttccttagt

SEQ ID NO: 65888 - DNA, 1031 bp, Homo sapiens
tttcttaaagatatgagaacctagctctaacataagcatgaaatgcctattcctgaggcattgatcacattgtcattgttccaggttcctctctgtgctccctgaaatccccattagcgtaattccccaccatccccttgtgcggagtccactgccccactgtgctgctgccctcgactgttgtgaggccggctgagtttcagtaacagggactcggtgattaaatttctttttctttttctttttctttttttttttttttttttttttttgagacggagtctcgctctgtcccccaagctggagtgcagtggagcaatctcgctcggctcactgcaacctctgcctcccaggttcaagtgattcttgtgcctcagcctccctagtagctgggacctacaggtgcctgccactacacctggctaggtgatgaaatttcttcagctttctctggccctccctacttctaggatccaaatgacacgctacgtatcgttgccatttctgatttggatgtacaaatatagggacagatgggtttgtgtttgtttttgatgtatttttttttctctcttaatctggctgtaaaagcatttccaatggcttatagtttagtatgtgttcccaaagtgggagcagcctgtacatatggaagtccagttgggtagggctccctgtaccctggcgccagggcgttgttctgaccgatggtgccccctgatggccagtgtagaaacttggtcacggtgtcatctttttctcactatcactggggattcccttcactccccagcaattactcacttttattctgtcttgaatcttagataattatgccggagataatccttcttatctcctctttgggtttcttgtttcttccttatttattgctctcttacctcaaaaatatcttatttcagccaagtgcagtggctcacgcctgtaatcccagcattttgggaggctgaggtaggtggatcacctgaggtcaggagttcgagaccagcctggccatcatggtgaaaccc

SEQ ID NO: 65889 - DNA, 1042 bp, Homo sapiens
gttaccgcacttcccattcgcatctgcctgtcatgttctaccactaacccccaggaagaaatgaatgggaaatttagtttgccatgatttttgccctgatttaacatacggtacttagtttgggaagccatttgctgttgaagaccttctttcttgtttttttaagacagagtcttactctgttgcccaggctggagtgcagtggcacaatctcggctcattgcaacctctgcctcctgggttcaggcgatcttcatgtctcagcctcccaagaacctgggtttacaggctcacaccaccatgcctggctaattattgtatttttagtagaaatggggttttgctatgttggccaggctggtttccaactcctgacctcaagtgatctgcccgccttggcctcccaaagtgctgagattacagaggtgaaccactgcacctggcccctgttgaagacttttgtgaaacaaagcattttttaaagtttcttaagtaatattggaattaacttagagtggactgtgtgaagtaaatgtgttgtcacaaacttaacggtgtcaacatggtaacaatattgaaaaatgcttttaattttgtgagatgcgtattcatagaactaagagtcagaagttcttgaaccttgattcctgtttgcctcttactgataatggactatatttagccttttcttgggttgggtccttatcaaagaatgagaagactaactaatagtaacaataatatgtgtttgctgtatgacaagagctagccaggtgatttgcagttttagtagggtaaggtacagcactatgaaccatttctataacaaaaaggaaatgtatcatgtcaaaagagtaaacaaagttttttagagaagaggaaaacaaatcttgaatttgttatttgtacaaatatacatagaaggctatcagggctgtctgagttttctttcatgtgtgagaatgaaggtaaaacttgctccaggtgcttagataagacttgaaggaaacacaggcatttatttggtttattgttagatcaa

SEQ ID NO: 65890 - DNA, 1083 bp, Homo sapiens
gccaacatggtgaaatgccatctctaccaaacaatacggaaattagttgggtgtggtggtgcgtgcctgtagtcttagctgctcagggaggctaaggtgagagaactgcttgaacgaggtgagcagaggttgcagtgagctgagattgctccactgcactccagcatgggcgacagagtgagaccctgtctcaaaaaaaaaaaaaaaaaaaaaagttattggtagtctgacctgatgctgtcctatcccagtatctcagtcacacccagcatttataattacctggaaaccatgctttgtttttgtattgctgctaacatttctgatacaaagctagatgattattcagatcttaggtctaaaatttatacttcctgtattgaggtctcaacagtagacttaaagatgctcattcatatcccagaattcttctttacaaggtggaagatctttgaataggtagctatgatgtgacgtgtattgttatttgaatcaaagtcttctggtttcaaacagtaagataatggtattttctgtctgtgaagtcctttatcaggaatgtctaaggattattttgttttctctttctgagtgcagctgtttgtttctaaagcaaaatataggtcttgccttgaggtgggatagatagggagatcagagaaagatggaattatctctggtcaaaaaaccccagctgattatacaatgctttaaaatgtaccatttaaaggtaaaatagcaagttgtttcggcctctgtgacctatttttaaaaaatgttaattgtctttgtagataaagacatcttgagtccaaattgcagttttcttactctgtttaagcattgtaagactgtcagaagctgaactttgtgggaggggagtcaagtgaggagagaatgcaagtaagaaaggaaaaagagtgaaatcacaagttggtgtttcccgtcctggcttttcggttcatgggaagtggcagaatctggatttaatgcctccataattgggaaaaagagcagaaatcttcatatttagtctctgggtattactgtgcagctttcgaactctacagagttaatgatttc

SEQ ID NO: 65891 - DNA, 1070 bp, Homo sapiens
agtccccagacagtcctctaacccagagactgttttatcccagagcccccattccccaacttgggcaggaatgaataaaagtcacctggaggtttatggctggcctggagggccaaagcaaccctttagccagtgacggtaagggtgtggagacctgggtaggcaccgtggccccttcccttcctctgccttggctaacactgttagccatctgctgcaccacatcacatctccttagtgatcctcgcacaccccgtggactgtgccaccatcagcctccacgtcgggatctccgtccttcccctctactccgtatccctcctagtcggtgtccctctcatcgtaattccagtaattcaatgcccaaattgaaacacatggagaaaacacctgataaagtggcaagggaagagacagttctctgaataggtgtggaccccagagctgtggcgtagaagccaggcatcaagccgaatcagctccaccagcagcaacttcatggctctcctttcaaccctgactgcccccttttagagacaggaagaattgaagcacagaaagactgtgtgtcctccagaacccctcaaggacccagctgcccattaaccacgctcgactctgttttgtatttcgtagtaccctcatttccttaagcgagatgccaacaagctgcagatcatgctgcaaaggagaaaacgttacaagaatcggaccatcttgggctataagaccttggccgtgggactcatcaacatggcagaggtgagaggaacacagtctccagactgttggcctttgagtcacagagcccaagggacaccccagcccagccagttgagccttccagatgattttcccagcctgctggctaggtgcttaattctgttttacgagttaattatttgctggaaattcagagtatacttgtttttatcaaatactgtctccttcatgaaaagttttaatttttaaacaggtaaaactcaaaaaattacataaaatttcaaactttcagaaaagttacaagaatagtacaaagagttcccatatgtggattcatccaagttctt

SEQ ID NO: 65892 - DNA, 1085 bp, Homo sapiens
tgtgaggtggaaatgtccttgttggtcagccctggaataaccaggaatggggctgctgagagagaagcagtcttttccctgggctccgggaggggcccgtttccacaggcctctcagtgggctaacagagggataaagatgaaaattgttgagagcgattgcttcgccttcctgtgagctgtaaggagggtaggaagaacccacatgggcgatgggcctcgggattcctcagctgtccctcctggcacagcttcacagtgtggagcggtggcaggaactggggggaaggtggcctcaccatgtccccgccctcaggctggatcatggaaatgacgtgaaggttactccagccagtgtgaagctctggcatgtcccttaagcaggactataagggcagcccaggagaaaggagctgctcatcaaccaaaattgttaatagggatgaccctaaattcagagactcctttttccctgcaggtgggctttgggctggagcatgtgtcccgcgagcagatccgggaagtggaagaggacttggatgaattgtatgacagtctggagatgtacaaccccagcgacagtggccctgagatggaggagacagaaagcatcctcagcacgccaaagcccaagctcaagtgagcccccctctctgtagctggcctccagactctccttcctggccatagcagtctcctgacccctccctcgctgtcccctctattaccagagaatcttggtccttcatcctttctgaacctctggctgtcttggagaaggtcactgttttgcctctcactgacagaagtcctataggactctcaggaagtaccccctctcctgacccgcccctcctcttcaccctgcacttccctgctcaccgggcgttctggacacctgtagcttgttgacccaccctgaatgccagctccattcaactctcccagcatgctgttctgagccctggcagcactgaccctggctgtgctcttcaccacaggcctttctttgaggggatgtcgcagtccagctcccagacggagattggcagcctcaacagcaaaggcagcctcggaaaagacacc

SEQ ID NO: 65893 - DNA, 1037 bp, Homo sapiens
ccagacatatggcaatgattggagacatttttgtttgtcacaaatgagggagtggagagttgccactaccagcacctagtgagtagaggccagggatgctgccagacatcccacagtacacaggacaggcccccacaataagaatgagccagccccaaatgtcaatcgtgccaaggtggaggaaccctggtttagagtgtgacatagggagcctgctgtggtgatccttgttccatagtttactaggtgaccctgaacttactagcctgatgcttctcagtattatatgattgactcagagaaaggactttgagtcattgggaggaagtgggatatcatttatatttttctgcctcctatggttccctacaagaaacaaaaagattcactaaagccagtaccttccctgcatctaagacctacaacccacacgtcactgctggtgactttgagttgctgtctgcacagcaagaagcaatattaacaaatacgaaaatctggttatgtgtctatatttgcaaaggaaatttttaatatttatgagaaatgctaataagagttggggacaaatggagaattaatttacacctaaatggcttaacattgggtgtctttctgcttagtatatcctgttagagggttttctggatgttcccaccaagcaaaaagcatttggctaccatggatgtctttagtctcaaaatcaaagacctgaacctagcatactcctttctctggcaagcaaaggaggcctcccctctatgtccttcctgggcaagtgtattcactggatccagggtcaaagacttcatggatgcaatagcaaagccatctaaattttgagcttctcttgcctagtgacacctcgtggagtcagaatttctgggttctgaatctccgtgttattgacttgatgacaaagataactgatccctccaaaacctggttttcacagaaatgtacccgcctccccggcccacataagaaaaaagccctgaagattttatgaggtttgagattaaatgaaagtattttaa

SEQ ID NO: 65894 - DNA, 1051 bp, Homo sapiens
ctgcgtgtctcgtgggtcggccccaccccctccttactggcagtccggagacctggctgcctttgcccagcttcggtctgaactgcagaggacaggggccctgcagctcggtctgggtctcacttgcctcttggcccttgtgaaggagtgatgtgttctcacctgtgtccctgctctcctccctccctatcccagtatgtggctgagctgctccaggaccagcggaagcctgtggtgtgcacctgctccaccgtggaggtccaggccgtgctgtccgccctgctcacccggatccagcgctagtaagggctctggcctcccttctcctgcccttagagattccctctgacctcatcttccaaccctgacttctaagcaatgatagaccctcctggcctcatcagaccaagaatttgcagaggggcgtatgtttaggggggtggcggcagcaggctgtagggcttgaggccccggcagaccccagaggatcgggggtggaaatatcaattcctgtgctccctgcctccctgcctggacccccgccatgccttgacttgctttatcctcttaaacccatgatgaaggagaggacacactggttttaaaaagatcttttattccttccatctgcaacatgctgctagacactcaggagtcagtgcttcccctaccctcagggccttcttaaaaggcccaagtcccttgcccttgtgaaagagaactatggattccaggcctgggggcacacaccctgcgggcatcccaggcacactgccgagtcctacgttagcctcagctgttccgtctgcttcatgggcaatgccctctgaccctggatttttctcttggttgtgaaagcactgtggcttattccctgtatgatcctctctgttttattttgtggattggtttgcttttcccctgtgggttgttgagatcacagaaagtcagctctgggcctcccccgggcaggatcctggcacccctgagcactgctatgacgctccccttcctccccagctgcaactgcaactcttccatgccgaggcca

SEQ ID NO: 65895 - DNA, 1070 bp, Homo sapiens
ccattctttcctccaggataagcgccgggacagcgccccctatggggaatacggcagctggtacaaggcctgtaaagtagacaggtgagtggggcggggctgggctggggagcagggcacggcagggcgggctccacattccatactctcacccccaacacacccctcctctgctgctcatctggcaaggcccaactcacaggtcacctgtcccaagaaggctctgtctcccaattctcagcctaattctctggctctgggtctcccagcttttggtcctggtgacaacatcccatgagggccctggggccaggtccccagccctggggtgatttccccaggacagaagaggctgggtgggcccagcacagggcttgacatgggaaggaatggattctggctaccccggaggtccatgcttcctcagggcccactgtgggctgggtgccaggatgggccctgggtctgggggaacatggagtttgagactgtcccatccacagccccacagtcaacaccaccctgcgcagcttgggggccctataccggcgccagggcaagctggaagccgcgcacacactagaggactgtgccagccgtaaccgcaagcaggtggggctccatgcaggagggggtgggcagacacctgtgtggccctgggtgtggtccattcactgcctgatgcccctgcccctccctcagggtttggaccccgcaagccagaccaaggtggtagaactgctgaaagatggcagtggcaggcggggagaccgccgcagcagccgagacatggctgggggtgccgggcctcggtctgagtctgacctcgaggacgtgggacctacagctgagtggaatggggtgagtccggggcctgggccgggtcgggctgggagcctaggtggccagcggggcctagaggcaagcctgtccacctgcaggatggcagtggctccttgaggcgcagcggttcctttgggaaactccgggatgccctgaggcgcagcagtgagatgctggtaaagaagctgcaggggggcaccccccaggagccccctaaccccaggtga

SEQ ID NO: 65896 - DNA, 1049 bp, Homo sapiens
taaatcctgtgtgcttccctggctcagtgcacgttctcttccctgagttattccagccattcccagttggtctctatcttgctattctgatctgggctctgcctcctgtcaggactagcataggtgtgatcctgttgcttctggcctaagaaacgcccactggctcctggtctaagtccaagacttagccatgctaagacagtctgtgctctggcctctccccaatcccccctctttcctcccctcttccccctctcccctcttgcctttctcctccccactcccccattccccctccctgtcccccctccctgttgagtgtctgcatcccagcaacattccatttcctcccattccccagacacaccatgcccctcccgttcagtgacctggcacatgctggctccccagctggcacctctcctgcacaaggccagttcccacctgcaggcttaggtccactgttgctcccacctcaagcagaggtggtctgggggctccccagcccctgccttctaacctgttttgcccttgtgtgtggcctggtctattcatctactgtcccgtgaatgtgttagggcagggcccaagtatgatttccccctttgtccccagcacttagcacaggacccaacttggaacatggcaagaggtctaagtttgagccagtgtgatatgaccaggcttctggctcctaaggagtataagtggccctagcttgagcactttcctgaaagtcctgtcctttgtgtgtggggtaggggcgcaagtgctgggagagtctgaagccaagtaatgaggctgttggtgccaaaagtaggatgaattttaggctgttcccaggattcctgtctccccacaggccagggccacctctgagaggaccctcgaactcctgtgctccaaggcttcaaaccttaaagggattttcaggccacggtgggaactgtggctcttgcggacccgttactctctgttcctatctcccgtccgctctctctttgcttctcacatgtggttagggcctgcaagtgtctcagggagagaga

SEQ ID NO: 65897 - DNA, 1231 bp, Homo sapiens
ctgttctgggtctcggatggaagagggcagggaggaaggttcagcctggagcagagggcttcctctgcatctctgcatcgctgagcccaggacttaaggggcccggagctgtactgttcccctcagagaaggtcttctccaggcctggggtaggggtgacagttgggagcaaaataactttggcccctggccccctttaggaatcctacgccaacgtgaagcagtggctgcaggagattgaccgctatgccagcgagaacgtcaataagctcctggtgggcaacaagagcgacctcaccaccaagaaggtggtggacaacaccacagccaaggtagcagacgggccggtctgcccggggtcggggcgctggggcctgctgcccctcacctgctctcccctcctcttctctcccctcctcttctctcctctcccttgtcaggagtttgcagactctctgggcatccccttcttggagacgagcgccaagaatgccaccaatgtcgagcaggcgttcatgaccatggctgctgaaatcaaaaagcggatggggcctggagcagcctctgggggcgagcggcccaatctcaagatcgacagcacccctgtaaagccggctggcggtggctgttgctaggaggggcacatggagtgggacaggagggggcaccttctccagatgatgtccctggagggggcaggaggtacctccctctccctctcctggggcatttgagtctgtggctttggggtgtcctgggctccccatctccttctggcccatctgcctgctgccctgagccccggttctgtcagggtccctaagggaggacactcagggcctgtggccaggcagggcggaggcctgctgtgctgttgcctctaggtgactttccaagatgcccccctacacacctttctttggaacgagggctcttctgtcggtgtccctcccacccccatgtatgctgcactgggttctctccttcttcttcctgctgtcctgcccaagaactgagggtctccccggcctctactgccctggctgcagtcagtgcccagggcgaggaatgtggccaggggatccaggacctgggatccagggccctgggctggacctcaggacaggcatggaggccacaggggcccagcagcccaccctttcctctccccactgcctcctctcccttcctacactcccagctcgagccgtccagctgcggtgggatctga

SEQ ID NO: 65898 - DNA, 1238 bp, Homo sapiens
cggccccgcggtcccggtcccggccgcatcacccacgtcccccgagccccacgggccatgcccggccggccctaagcgcgggccggggggcgtccccttgcgcccgggccccgcgctggcgccccccgggccgccgcccggcgcgggggccatggcgttcaccttcgccgcgttctgctacatgctcaccctggtgctgtgcgcctccctcatcttctttgtcatctggcacgtaaggccgggctggggctggggctgggggcggggtggggggcaggggccacgcggagctggagggacccagggcgggtggtctcagagcccaggggaaacttgctatcccccagccgtcggcttgtcggcttcgcccccattaacaccccccgtggtcggctttcttcccggggccccccttcctccgccgcccccgcctgtctgtgtgtatgtcagtcggtctctgaccccctcctctgccctcgtcctctgctcccatgcagcccgtgaggtggggggtggaattctggcatttttgttgctttatcttctatgtccccccccaccaccatccagccgcctccattagtccgtcgggcagtttgtctgtctgctgcccccccccccccgcctttgtgggtttttccagccagagtgatggagctggttgctatggcaactgcatctgtttacaggacccacagatctcagagtccattaaccctttgccttcccagccccctccctgaccaagcagcagttggctctcatcagcccccagagacctagcccccaccaccggctcaccttgggtttccctacccctcctgttgggggcttcccagccccccaggtttcctctccattttccagcttccctcctcttcctgtcccccttcccctttgtctctcacataccccttggtctgtccctcgccctggcctagcctcacacctggttcttcaaaatgtccattcctcatcctgcatccgacccatcgcttcccccaggctccctcctcctcccctcccgctcctctcctccagggcctcctctgcctggctcccgtcccctcactacagaactatcaatcagcctccagctggttgttgggggcccctggccccactttactgccctccgtccccacccccacccaaaccccgtgcctgtttctgtaacagcctgcccagctcggccctggctggctcagctcagcatcctctgctcacacctcccgcgc

SEQ ID NO: 65899 - DNA, 1045 bp, Homo sapiens
gggtctcagatccaggtcctggggctgagtcctgggccttccatatccctttggggtctgggtccctgtggggacagattgagagtaaaaggtgctgtgggaggtggggtctagctgggctctgggcgttgggggtagggccaatctcaggcctagacccctgggggtcaccaaccctttcctcctcccacccccagaatgatcctcagtgtgctcacggggctgctgttcggcagcgatggctactacgtggcgctggcctggacctcatcggcgctcatgtacttcattgtgagtctggtgcacccccccattcccctgccttcacttgagggcaaacctccccctcctggccaggcttcagttctcctttcttccaggtgcgctctttgcggacagcagccctgggccccgacagcatggggggccccgtcccccggcagcgtctccagctctacctgactctgggagctgcagccttccagcccctcatcatatactggctgactttccacctggtccggtgaccccctggccccagatggcactgagtttttcattcattgaagatttgatttccttgactttgtctgacccttgttcctggggcctgatggggagctacagatacctctgcgcctctgcattgcccaggggatcgggcttggggccgtctaggaagaaggtggacccagggagggcttcatgactttggtgaccttgatactgccttgtaagggtttcagcagcctcagctgggaaagagaagatggaaggaggctgctgaggggacctggaaggcgtctgatccctctggggggctccagcagggtctgtgggctagtggggtgagacaagccaggctggggattcagcttagggctgccccctatacagtccctgtaatcggcccccatctcctcttcaagctttccaggagcagaaccggggcccacatatttgcagtagtttattcatattttgtcacaaatggccggggagggggtgccggactcctccaggcgacatagaaaataggtccaag

SEQ ID NO: 65900 - DNA, 1300 bp, Homo sapiens
gcagagcctagaggggaggaggggaagaggaagggaggcgcctgggtaccccttctccttgtcctcgaggtgaggattgagggcccattctgctggctgggacccccgacggcccctcctcagccctagccaggaaggtctgcaggacctggggccccgagtgatgtgtggggtgatagggtggtgagtggggctgtgcatgcatttgggtgaatgtagcctgcttctgtgtgtgtgttgtgtgggtgtgtgaattgggtgtgtgcgccctgtagtcaggtgaggggcgagtgggtgcctggctcgggttgtcacccagtggtctaggtgtgcgcatgtgagtgagtccctttgtgggcaggtctctccctgtggagtctgaggagcctgggggtcagtttgcagtggggggtggggagatgtgcactgtggtcaggtgaaggtctggtatgtctctgggcttcactgcacgtgcaacgtgtatgtgcacgtgtgtgtcctgtggtggatgggtatgtggtgtgtgcgtgtgtgtgtgtatgtgtgtgtaccatgctacggttctgggagtctgtgccctggggacaggcgagggtctggagtttcctgggtgacaggcagtgtggccctccacggtgggtgggtctgtgatgagcatgtgttggaggggcgtggacaagtgtgtgtgcacctgacaggccttgcaggtcagctggcgctgtgctcccatgctgggtgatggggacaggctgtatctgggctgggctagggggtggttcctctcctcttgggcctctggaggcctggtaggtctggggtaggagaggtggccccttaaccccccttttgttgtttccacttttttcctcccctttttacccttcccctcgccccactttatccctacctgcttctctctccatggcacctgagggtgaggtggctaggctggcagccctgccagggagggtgtggcaagccctctgagccagggagtggcccctgctgcccagtagctgtgtcccacccccttgctcagcacagatggggagtggaggatggccctccatctgctccccaccccaagactcgcacctcccccgttcttgaggctccctctttctcatcaactcaaaagcctctgccgagacttctgagtccctatggaacaagggaccagagggagtctcagggtaatggtgatcatatttattcccatggccagaccctgtgctcacttcttcacacatatgatcttgttgaatcctcacaatagaaccagtttacagatgaggaaatt

SEQ ID NO: 65901 - DNA, 1039 bp, Homo sapiens
agtctcagggtcccacagggaggtgtgtgtcaccaaggagaccctcagctgggaggggccggtgctgaccttagtctggcttctgctagcacctccctccctccctccaccctccgccctccacccctccacccccactgcggcctctgccccactttgaagtcctaacataaataccatgtctgcttgggttccccttcccggcctggtcacagcccccagacctggcttccaccccagccagccccgtgggagtgtggtgccagcagacaagagggaggtctggaccacccagggaaggtggcgagccagagaccctgagacagagacagggagacaccggtggtggagggggagaccaaagtgagcagagaatggagagacagaccccagaaaccaagcaggggacgatcctgagggcaggagaggagagagacagagactccagagacagagagggaagagaggggagcagagagaaagagacccctgcagccagagagagacggagtgagaccctggggacagtaaggggcaggaggaagagggcacaagacaggaagcaaaggggaaagtaagaaccttcagagaaggttccagagatggggtggggggaggcagggacaggggtagcagggggaaggatgtggtggaaagagaagtgtccctggcaagtgggaccagccatctcgatttcctgggattggcaggggtgttgagggtgtcccaggacatgggactttcagtgctgaaaccaagaaagtggtcagcaaacctggacgagttggttgccctgggtggtaggcctctggcagacaccacggggaccacagtgtccactccacaggcaccccttgcacaggtgaggaacctgtgaccctgagaagggctgctcctacactggggcaggaggcctgggcccttctagctctgacacgtgctctgggactccctttcttgtgggcagatggggccagatgttcaggtcaggcttctgccacgagagggaagtggggtcccagctgggcccaggttggac

SEQ ID NO: 65902 - DNA, 1033 bp, Homo sapiens
tcatgtctgcacctgtcccagttgcctggcagattggcaaggcaggctggcagagcctgcgtgcgtgggaggcagccggcagcaccgccatgtgctgacgacctcacagccagactccccctggttagcactgagtgtcagaaccacccccagaacctcagttaagcaaataggttggtttccatggagacatggcatattttctccatggcaacctaaaatcctaaaacccaggttcaggaatgagtcatctatggacagtagagggtgctctcccacaaggctgacctgaggccaggggcagatgagcaactgaccacagagccaaaggtgcccccagagcatggctggggcctgtggggactgaggccgcttaaccacttcccgcccacgtgtgcaatgtgagtagctggtgaggctgcaggaggccgtgtgtggaggtggcatcccccagctggggccctcagagcagggctagcatggaggggacccctgacccccaaagcagggtccagaacagaggaggcgggcactggccaggcagggtggacacacaagagttaactggcgggtgtgacaggcggaccgccctcaggaagtgttactcactggggatgtgcgtgccttgccttgggactggattctcttcctgaagcgaaggagctcccagccatggaaagccctggagagtcaggcgcgggctctcctggagcccccagcccgtccagcttcactactgggcacctggcgagagaaaagttagtgaagttggcagggcagccaggtggggcagggaggggctgcgagaggagggcctatccggggatagagaaagtgggaaacccgggagtggggaagaggagagcaagggtcccagcccctggctccctgctcagatctgggtgcctgcccccaggccagcccaggacccactgtatgacgtgcccaatgccagcggcgggcaggcaggcgggccgcagcggccggggcgcgttgtgagcctgcgggagcgcctgctgctcacccggcccgt

SEQ ID NO: 65903 - DNA, 1020 bp, Homo sapiens
ctcatggaaagggtgatgactagggaaaagagggtgcagggcacggctgctccccaccaccaggtctgcatttgttcatcatcatcaggagcagaggtgaccagagggttcagagtgggaggcggggccagcccaggccaggagcgcctcatcttcccaggcctcagccacccagggtaaaaggtgccagggaagttgtgggcacctgagaggaggaacagatgtggaggacctgagggtgctcaaagggccaggctcagcctcaagcagtgttttcattgccaacacttactgtacccactccgcagagcccagctgggcctgggccccagggccacagctagcctgcatgtgtgtactgcactttacagtttgcaaagctcttccatacccactctctcaccgaagcctaattgaggctcttggaaggagtcaggcaaggattgtgcttcccccattatacaggtgacaaaactgagtcctggggaaagtgactggtccgtggtagagccgggacccaatcccctctctctcctccctgttggtgctgttcttcctgcccaacacctgtttctcttttcctcaaggggtttggggcaggagcctgggcacttactccccgtttttgctgtttctccttctgaccctgctcttgggtctaataaccccatttatttgtatgatgcgttcaccaagtctttatttccgaagtgctgttggctctattggcctcagtgaactgggtggggtcggaaagattgtacccccttgacaggtgggatgactgaggccctgagaggggtagggattggtgggcatctctgtgctgggtcctctggaccacatgatagctggggggtactgacctgcaaggaatcctgagctcctgggcagagcacctagttggatggacaactattgctctcccactccatgagcccctgggctctcaccagcatcctctgcctccccaggatagctcctccttggaaatctggccttagagaggcagtcagtgtg

SEQ ID NO: 65904 - DNA, 1044 bp, Homo sapiens
acttcatcaccttcatgctgctctttgccgtttctaatggctacctggtgtccctcaccatgtgcctggcgcccaggtccggggcaatggggtggggtggggggctgggagtagggaggtgggttcagtctttgggaagggaccgcctgcaatggagggacggcccatcctgcttctggccagcccaaccctagctgtctgcaggccttgctggcgccccctactgggccaagccttaactgcaggggagagaactgggctagggaggtacccgcccaaccaagtagcccaggcactggttctggggccgcctcaatgtgcctcagtttccccatctgtaaaaaaaaatgggttgaactgtcatccctcagggcccatctaactgtaaaattctcagttgaaggagagctaaggttttgaccaaaaacaaggtcatgggctatttcctcaaggggcaatggagtggagaatccagagagaatgaagctggcagggcagacaggctgagagcactgtggaaagggcaggctgtggaatctggaatcccatcatgttagactcagaggccctgagagacatccttatccagcagcctcatttacagaccaggaaactgaggcccggaaagaaggggccagttatggtgacagaggggttgggtcagagcccagactggatgggcagagggcagtggagctgggtccagatttagacccagcattttctaagagctcctgttcccgggtgttctaggcaggtgctgccacacgagagggaggtggccggcgccctcatgaccttcttcctggccctgggactttcctgtggagcctccctctccttcctcttcaaggcgctgctctgaagtggcccctccaggctctttggcagcctcttctcgacgtctccttccggagctgagatccagcccagggcgaatggcgagcttggctcaggcctctgcggggtggaggcccctgggcctgaggctgccagcagcgggcaggagctgctcttcatccacttggagtgctgtggggaaga

SEQ ID NO: 65905 - DNA, 2078 bp, Homo sapiens
acctcaggtgatccacccgccttttcctcccaaagtgctgggattataggcatgaaccactgcgcctgaccccgatttatttttttcttgtgattctgtggtctttttgagggatgccattggaaagtgagatgaaggaagcagggggcaagacattagaagttccctgggatggggcagtaggaagagagaatctcatatttcttttttctgttaagcctgacaggacatttgaaattaagattggacagcccactgtttcctacttcctgaaggcagcagctgggattgaaaagggggcccggcaaacaggtgagggccagggtaagcatctgagattctgggggctccagaaggaagcagtaacacctgaagagccacttgttccttcctcccagggaaagaggtggcaggcctggtgaccttgaagcatgtgtatgagattgcccgcatcaaagctcaggatgaggcatttgccctgcaggatgtacccctgtcgtctgttgtccgctccatcatcgggtctgcccgttctctgggcattcgcgtggtgaaggagtaagtatcctggcatgtgcagtgtgacgagagggcccagaaagctctggactcgggcagagctgagagggcccattgcagtgggaaagtcagcttttaagtcaagggaccctagattctagaggatggggtgggggtgggaggccacattcattgatctggaatactcttattgggcacctgttatgtattagacgttgttctgcaaatgttctaagaaatggaaagatctccatgaaggatccaagtgggagaagttcagtgtgacctgggtctgtcgtcctagaggcaagtggagaatggtatgagggaaggaccagtgcgaaggacttttgagctgtgtcaggttcatgcttgctcctgaggcaaacagggacccctgtcatggggcttcggatgacttcaggaattgtttcattgaagtaagatgttgggtgggagggtgtctggcctagacaaccgccgggacagagatagcattcaaccctttactggcctcttgctgctgtgttacatcccatgtcaaggctgacaattgattatttcccaagaagaatggggttaagcatggagcagacacagacttgaattttctcaaatctttttttttttactgggagcatggagatgggtaaatctgacccctgtcctgggagagacacacatgctcagccccgtgacgtcattgtacagcatattctggggcacagagtaccccagttaatctggactggggcctggctgatgcctcaaaggatgagtagggatttaataagggaacaaaagataggggtgttgggggttgggagatgttgtccctggagaggaaatgagcaaaggtatggaggctgggaagtcagggaggcagaaggggccaggcaagctgggcttggagacaggggccccttcaagcccctgcaagacatagggtcctgtgagctcccactggtgaccaatcatgcgccaaccatttgtcttttttcacttgcagcctcagttcagaagagcttgcagctttccagaaggaacgagccatcttcctggctgctcagaaggaggcagatttggctgcccaagaagaagctgccaagaagtgacccttgccccaccaactcccagatttcaaaggaggtagttgcaaaagctgtgcccaaggggaggaaggaggtcacaccaatatgatgatggttttcatgactttgaatgatatatttttgtacatctagctgtatcgaggcatcaggcctgaataaacatcctttcttacccactgtcatcttctatcttgggacctcagggaagggaaccagtactggtggtagccaatatgggcagacattaggaaattggggtcttcatactgcttctcagatgtgcaaactgaggttcagccaagcaaagtaacttgcccaggtccttttttttcttttttaagttataattttgttttattgcccaggttctgaattggtgccagaggtaggaatagaacccaggccttctcatttgaaatcctgtgt

SEQ ID NO: 65906 - DNA, 1035 bp, Homo sapiens
cgctccacagagaacatgattgacttcgtggtaacagacacgtcccctggaggaggggctgccgagggcccttctgcccagagcaccatctcccgctatgcctgccgcatcctctgtgaccgccggccaccctatactgcccgcatctatgccgctggcttcgatgcctctagcaacatcttccttggagtgagtgagccccaggaagggaccaactcttcatctgtgaggcaaggggtaggcttgggaggtgcagcatcttgaggtgatgaaccagcccacagtaatccaaatggtggtcctggcagttagcaaccccacctaactgatgagcaaagtgaggcccagagagacgctcaagtcatgcagcttcaatgccagtcctctctgggccgcctctgaacttgaaggtagcgggggcagtgcctctggcacatggcctgctggggggcccctgggggatgtgatctgatccctcatgtggtcccaggagcgagcggccaaatggcggaccccagatggcctgatggatggactgaccaccaatggagtcctggtgatgcacccggcaggcggcttctccgaggactcagccccgggtgtctggcgggagatctcggtctgtgggaatgtgtacacattgcgggacagccgctcagcccagcagcggggcaagctggtaggtggcccgctccattccccacccctatccttgccaggccctcacaagctgcccatccccctgcccaagccaggagatgatctccagtccttctgccccagggagccccaacaggctccatatcagggaatcccaggcccagggggttcttagcatgagccacttgtcccacagacaggcagacagaccagggtccccaagcatagcatgcataccactggaggtccagggggtgatgcgatcaaggcacacacagacatactgtgcagtcccaggtggcttcaaggctgctggcagcttaaaaaaaatcacaccttcttatgagagtgacacttggcccatgtgtgagcagt

SEQ ID NO: 65907 - DNA, 1030 bp, Homo sapiens
ggcaatgctgctccccactgcaggcctcagttttgtcatctgtagaatggtaagcatgttgggtcgaatgctttctgaatgccctcccagatctgacattctgtacacaggatgccatgtgctgatggagggaaggagaggaaggctggaggtggagggagctgaggaggggatggcagggaaggaggggggtcccaggtttcccacctctggaggccacatccgttgcatgggatgaggaccttggcaagccttaggggtgggccagccagagagaggcctgggcagagctgcagcaacactggagatgagcatgtttgtttgttttataactttttcccctggaggtagatggaggggtaaggggtagaggctgctgaaaggagggaggggcgggaagcctgggaatatgacgtccctgcagccctgaccttggcaactcctctttctcatgtcccctgtcttccccaacagggaatcaccacctatttctctgggaattgtaccatggaagatgccaaattggcccaggactttctggactcacaggtttggggttaggggagctcaaggtagcagaggtttggtggggttcctagtcccagccccctcacaactggtgaccactcctgggtctctgcttgactactccctgtgtactagggaaggcgcgacccctgcccaccccaggctatagagcctaatgacagcctcagggcagggcgaggaaccaggacctcaggccacaggggtgtgaggctccggggtccatgtgtcagtggtgctcccagctcagccactcaccagccatgtgatcagtttccatgtctgtgaagtggtacccacctccagtagccctgggttcgcagaggccgtgcagtgcctggcacagtggttgcagtcagtgcttagtagaagtgcacagtgtcctgagcagagcaggagagtcggccctgggctgcccactcccactctctcccactcctgctcccagccaacccagaaggcccagcctgctttgcctccatgc

SEQ ID NO: 65908 - DNA, 1047 bp, Homo sapiens
cccagctaattttgtattttgagtagagacagggtttcaccatgttggccagactggtcacgaacttcagacctcaggcgatctgcccgtctcagcctcccaaagtgctgggattacaggcgtaagccaccatgcccggctgatatatatttttttgaagttgagagtttatgctcatgtctgttggctacagggagccattgaaaatcttagagtgaaagagtgctatggggaaaagccggctgaggtgtcttactcaggccttttctctgagtgaggcctcttactccagccttttctcttgaatgacaccttctttccccagagccttccctggactctgaggtgacttccaagctgaagagctatgaattccggggaagccctttccaggtgacccggggggactacgcgcccatcctccagaaggtggtggagcagctggagaaagccaaggttggactggctgggggctgaggggtgcgggctgaggacccctctgggcagcagagcgggtgtggaggtgggtgggtggcccgaggctgaccgacccccgctcacctcaggcctatgcagccaacagccaccaggggcagatgctggcccagtatatagagagcttcacccagggctccatcgaggcccacaagaggggctcccgcttctggatccaggacaaaggccccatcgtggagaggtgaggcgccagctccaccccacctgccccctcctgcctgcccctcctccacctctgcccttctctcccccagttacatcgggttcatcgagagctaccgcgacccctttggttcccgaggagaatttgaaggtaacttcctcagggaggaggtcagtcacagtcccttcccccacatccaagtccacgtttccagtgtcccctgatggttctccccacccccgctcagccataaccataacagtaagaacagccatggtaaataaacaccgtttacaatgtattgggcactgttgtaagaagcttagctatattaactaatttagagtccatcatcccatgaggatatt

SEQ ID NO: 65909 - DNA, 1048 bp, Homo sapiens
ggcgcctttccctcacccaccgtgtgttctgcaggacgaaaaaggagcattcaactttgaccaggaaacagtgatcaacccagagacgggcgagcaggtgagggaggcctcagcagagccccagggtactgggagggtgggcacaggtggggcagtggccaccttaagcccgacagtggagctccttttccagattcagagctggtatcggagcggggagacctgggatagcaagttcagcaccatcgcctccagctacgaagagtgccgggctgagagcgtgggtctctacctctgtctccacccgcaagtgctggagtaagagcagcagggccgaggggcgggctgtcccgctgcagtggccagccctgggggcgtggagggtgggtggtagtggccagtgggatggggacagggcagcctctgaccatcctgccacctgcctgcccctctcacaggatctttggctttgagggggctgatgcggaggacgtgatctacgtgaactggctcaacatggttcgggccgggctgctcgctctggagttctacacacctgaggccttcaactggcgacaggtagggcctaggtggagccccctggaggcggaagggagcctgcagtgggtgccaagatcagggtgcaaggatgggaccactgtacctttaaggcagatgaactgggtttaatgctagactccactgtttgggaggcaagtcacatcactcttgtgagccccagagttcctctctgtgaaatgggagtaggactctccccggccaccatttcacggtgaatcagatgaggtgactttattaggactcctcgcagttgacgcactctctgccacacacaattctaaacgccctccatgaattaactaccccaggaggtaggtgctattgttaccctcattttagagatgaggaagtcgaggcacaaggagatgaagcaacttgccactaagtggcagagccaggattcgcatccatacagtgcctacagggccattcagtgccacggctcagttatgtgtcctttggatat

SEQ ID NO: 65910 - DNA, 1231 bp, Homo sapiens
gatctcctgaccttgtgatccgcccgcctcggcctcccaaagtgctgggattacaggtgtgagccaccgcatcccaccagcaatagaaactttttgacaaaatcaaataggtgtggtttgaggaggcgatgtgacgtcattcagggtccagaaatgtgggtctgagtcctggctcttccgttattagctgtgtgcccctaaggaagtccctttacctctctgggcctctgttttatcatctgtaaactggggataatgatgcctacttggttccccttttgagcacaaacaaggttgtggaggagaaagtgtttggggaccctggagggggtagctgctgtcctcagcaggggatctggagcagcagggatcacagtgggtgacatggggagcatgggcaccaggtcccgcctggaaatggcctccctgtctcctagggcagcctgccctctctgtgagaagaggaaggaggaagcatttgaggggaggagaataagcagaaaaggacccgcagggttggggagaatgacaataacagttgccagttaatgggcaactgggaccaaggaccaagcctgggaccaaggaccaagccaaggaccaagcctaggaccaagcacttgatacgggctacaaatgctgtctttcccctgctccggcaggcccatatgcaggcccggtttgtgatcctgagagtcttgctggaggctggcgagggactcgttaccatcactcccaccacaggctccgatgggcgcccagatgcccgggtccgcctcgaccgcagcaagatccggtctgtgggcaagcctgctctagagcgcttcctgcggagacttcaggtaagcaaaggcctctcgtctggatgggtccccaccaacctctccaggggcactgagtgttaccaggcacggagaataagctgtgagcagtttcttatgctgcagtgaggaaaggtagccagtaaacatgtaagcgcaccgggtgcctcacgcctgtgatcccagcactgtgggaggccaaggagggcagatcacttgagctcaggagttcgagactagcctgggcaacatggcaaaacctcgtctctacaaaaaatacaaaaattagccaggtatggtagtgcgcacctgtagttccagctactctggaggcggaagtgggaggatcacttgagcctgaggggtcgaggctgcagtaagccatgattgcaccactacactccagcctg

SEQ ID NO: 65911 - DNA, 1015 bp, Homo sapiens
agacagatgaagtcgttgctgaattgtgagcttcaggacaccaaggactgtatctgtttcacctagtgtggcacctggtgtcttttattatttatttatttatttatttattttgaggtggaatctcactgtcacccaggctggagtgcagtggcacgatctctgctcaccgcaacctctgccacccgggttcaagcaattctccagcctcagcctcccgagtagctgggactacaggctcatgccaccacgcccagctaatttttttgtatgtttagtataaacagtgtttcatcatgttggccaagctggtctcaaactcctgacctcaggtgatcctcccacctcagcctaccaaggtgctaggattacaggcatgagccaccatgcccagcctaaatctttatttgattgactgaatgaacgaaagcagcaatgcatttaatactccccctgtagtatttccttcctcacagggttactgtaaagagtaaattaagtaattaacctaaaacgtagagcacaggtttttttggcagagctcagtaagaaacagctgctgctgtaattgtgattattaagatttttatgatgattcagtttccctattcagacctttccctgctgttttctctccatctcctccccaggctcagacgtgcagcttctggaatacgaggcgtcagctgctggcctcatccgatccttctctgagcgtttcccagaggatggacccgagttggaggagatcctcacacagctggccacagccgatgcccgattctggaagggccccagtgaggccccatctggccaagcttgaggaagatgtgtggccttgcccccaattccatcagaccaaggctgcaagtggccctccattcgtgtgtgtatttaggggctggggagggggaggggcaggagcttggaccttggtactacctcagctgagggtggtgacacaaccccttccatttgtcagcactttccagcctgccaattgcttcccctctgt

SEQ ID NO: 65912 - DNA, 1060 bp, Homo sapiens
gtcagatagggaaaccgaggcctaagatgtgcatatgtgtgtctggaggtcgctcggtgagccagtggcggagcctggacttgtacccagacgttctgtaccttatgttcagagtgacctgtaccagcttcctcaaagtttttttttcccctcccatgggactcactccccaactgtctttcccccacttccagcaatgaggccaattcgaagtggttggatgcgcactacgacccaatggccaatatccacaccttttctgcctgcctaggtgagtctctggaaccaggaaccctgggttctagtgggatggggagtcagacaatggtcctgtagtgaagcctctgggattctgagactctggttttggcccttttgttttccagcgctggcagatttacatggggatggggaatacaaggtaagcatatcaccctagccaggagagttgagggtaggggggtgtacccagaaatgagatttcctgacggctgaaaataggcccagcatactctggaattcacatatactgtgaaaaagcacatttagcgttaaattttgtttttatatggaaagtgaagagaacttattgatttcataatacagactgcagaaagtaaagcagatcaaatatttctggggattctactaagacaaagcctcttagttaacctgatttctttgttggaagggcaaatcccttggttgggggtgggcactagaatctggagggaaagtaaaaaggagggaagtgaacgtttgatgtttatcaaaagattttaagatgggccatgagctgtcaatttttgaagctggataatgggatatatggggactcattatatgagtctctctacttttgtatgtgaatgaaaattttccatagtaaaaatgttacattttaaatttaattttaaggccagcaatcccagcactttgggaggctgaggtgggtggatcgcttgagcttaggcattcgagaccagcctgtccaacatggtgaaacaccatctctactaaaaatacaaaaattagccgggcatggtgatgggcacctgta

SEQ ID NO: 65913 - DNA, 1029 bp, Homo sapiens
tacttgggaggctgaggcagaagaatcacttgaacctgggaggcaaaggttgcagtgaactgagatcgcgccactgcactccagcctgggccacagagcaagactctgtctcaaaacaaaaaaacaaaacaacaaaaataaataaataattacaaatacaaatagaaaaattagccaagcatggtggtgcatgcctataatcgcatctactgggaaggccgaggcagaatcacttgaacccaggaggcagaggttgcagtgagctggagatcacaccactgcactccagcctgggcaatgaagtgagactccatctcaaaaaaaaagtatgtcacaagtgaaactgtgtatgtgtgtgtaaattgtcctgtgtcacagtataaaatttgcaaacaactggcttgggccataggtgctgggagggccggtggtatgctcgttgaaagaagggtaaagaggagagaactgacagaaaaggcgggttggagtcaaatgtggaaggccttcagtgtcctaagaaagagaacaaaagccattggaggttttctatcagagaccagacatatttgtgtttttgaaaggtagcaaaggcagcattgtgaagggcagactggggagaaagacccgaaagacgagtctgggagatctattaggaggttgaccccaaaagtgagggccagtgatatttggtctggaactgaggtagtgagattggaggggagatgagaaatataggaaatatttcagaggcagcgattccccaggcctgtctctatcacttctcacctattatatctggggcctcccctacccatcccctgtcttgctttcctctccaagatatttccccaactaaactctgacgtctccacataggatgcagtgaccagcctttgctttggccggtacgggcgggaggacaacaccctcatcatgaccactcgaggtgagtggagtcagacctggcaagggctttgaagtcgggagtgaagggacaggcctgcttctggggaaagaggaggaggtgga

SEQ ID NO: 65914 - DNA, 1141 bp, Homo sapiens
cccagcctcctgagtagctgggattacaggcgcctgccaccacgtctggctaatttttgtattttttagtagagacggggttttaccgtgttgtcaaggctggtctcaaattcctgacctcaggtgatctatctgcttcgcccccccaaagtgctgggattacaggtgtgagccaccgcatccagccaagaatggcctctttaatgtctgtgagctccccaagggcagagacaccctctagtgcctggcaccgcctccagggctgaggaggtgctcaccaagtctgtgatgcaggaatgaagccgtatcccaagtagggggctgcgtctgcccagtttaccagtgcgttcttgtcacccagcacgggctggccagcgagtatcgacacagggtttgctgagcggaggaatgagccctgctttgtggtggaggggagcaggtggcaggaaagccggaccccactgcccctccctgaccctctctgctcttttattgcaggcagagtgtctctggcacagtttgccttggccttcgtgacggacacgtgcgtggcgggtgcgctgctgtgcggggctgggctgctcttccatgggatgctgctgctgcggggccagaccacatgggagtgggctcggggccagcactcctatgacctgggtccctgccacaacctgcaggcagccctggggccccgctgggccctcgtctggctctggcccttcctggcctccccattgcctggggatgggatcaccttccagaccacagcagatgtgggacacacagcctcctgactccaggaagagccagagctgtgcagggaggaaggggtgagaggggggcccccacacctagactcagtaaggaagtcgggttggaccttaacatctgcattggacaactccaccccttccttggccttgcccctgcccgcctacactcctacgtgtccagggcttgggccgtgacttaggcagaggagtgcagaggagggtctggcaggggctgctcaggccgcctagctgcccctttgccaggttaataaagcactgacttgtttctcagcctccctccatctttgcatagtttctggcccctcactttgttgctggggctgtttctgggaccctctgtagggcct

SEQ ID NO: 65915 - DNA, 1020 bp, Homo sapiens
tggcttgagagaggtctcaggactggggatgttagggctggaagagacctcagacctgtagtgctagaactagaagggcctgggacatcttgtttagcctgcatttacttgtaaagaaattgaggcttagccagggcaaatggctgttgccacttccgcaggatgggctctggggcagccctgtgcacaatatggggcatctgagctgctgggggaactgacgctgtggttccttcctgcagttactgctaccaatgccaaagccaggtgccgccacgcagcggacactgctctgcctgccgcgtctgcatcctgcgtcgggaccaccactgccgcctgctgggccgctgcgtgggcttcggcaactaccggcccttcctgtgcctgctgcttcatgccgccggcgtcctgctccacgtctctgtgctgctgggccctgcactgtcggccctgctgcgagcccacacgcccctccacatggctgccctcctcctgcttccctggctcatgttgctcacaggtggggagcctgggaggcctctgcacagaggcaggggccctggtattgggctggggagtacagcccattctggtgggagacgggctttctggcctgggggacccagccccagtgtcagtgatggccagtaagggcagcttggtattcacccgggggtgcagtatggaaactggtgtgttgagacaagtgcagcgttctggctggagaattgggagattcctggagttgttgagagaggagaaagactcgtgggagtctctgcatggcgggatgtggaagtgcattctaggagcatttctaagtgagagaagcaataggaacaaaggcttggagagtgggcagggaattgtgagaattaaggccagattggtaggggaggcctggctggtggggtcctgagaactggtgtgaggagatggctcctatttgactggacagtggggagccagtgaaagtgacaggcaggagaaggcccagttatgggaagctggggagggcag

SEQ ID NO: 65916 - DNA, 1029 bp, Homo sapiens
tctccccaccccagccctactggctctcccaaccctgctaaccccaagcgtgggcctgcagagcctccctctgctcagagtagccctggcttcctcccagcctcctcctgtccatccccacccatcacctgcccttctgccaacccatgctcctgtcagtcattgattcactcatcattcatccatttacttctgcatcgatccattcacttgtatttaagtagtcacatggccctctgctctgtgccaacctatactagcccctggactcagaaatcaaccatcccacttcttctctgacttgtggggactaccccatcctgctttcgtagttgtcaaagtcacccccacctacactctggccacagcctgggtgtgggtggagaggggtgggtgagctgggcaggtcagcgcagagctgtctgccttgcccctgcctggccctgtcagctgctggagtggatccgccgcactgtcccatggctggagaaccgtgtgggtgagcccagcatgagtgccatgcagcgcaaactagaggactttcgggactaccggcgtctgcacaagccgccccgcattcaggaaaagtgccagctggagatcaacttcaacacactgcagaccaagttgcggctcagccaccggcctgccttcatgccctccgagggcaagctggtctcggtgagctctacacacattccctaggtgaccttgaggtccgtatcccatctgtacaatgggcaaaccgtgatggagcgcacccctgcctgctccacaggacatcgccaacgcctggcgggggctggagcaggtggaaaagggctatgaggactggctgctctcggagatccggcgcctgcagcgactccagcacctggctgagaagttccggcagaaggcctccctgcacgaagcctggacccggggtaggtagacctacctcatggggctggactgtctcttggggtggagattggtgtgcaggggcaggaggggaggttcttggcaaaatgcacaggacaagggtag

SEQ ID NO: 65917 - DNA, 1267 bp, Homo sapiens
tcaaccgcggccgggctgcggggacgcgggccgtgctgggccttgtgcgcggccgcgtccgccgggtgaggacgcgccgggggcgggggcgccaggcccgggtccaagggataggagctttgacctaacattgggatggggcctgcccgctggacgaaccgatctctggtgatggggaatgggcagcgccgcacgggcggggccttgggcgccgtcaagggccgactgtgcccgcctcacctactcctctctccaggcgggtcaggggtcgctgtactccctggaggccaccctggaggagccaccctgcaacgaccccatggtgtgccggctccccgtgtccaagaaaaccctggtgagtgatgaggctcttggggttccccgccccgaggccgagtaaagcagcagttggatgatgacgggtcaggtcaagacgcagggatctgaggtagctgctgccccaccttgagccacttcccaggccccgagggctggaaaccaagatgctatgaaggggaggatgccccggtgcaggccgtgcctcactgtccactgtgatggggtgattgccttaggggtggctctcatctgaggagcctccagctccatcttggccagatcttgctccccagatccagatccaggcccccagagcagcttcttcctctccctccagctctgcagcttccaagtcctggatgagctcggaagacacgtgctgctgcggaaggactgtggcccagtggacaccaaggttccaggtgctggggagcccaagtcagccttcactcagggctcagccatgatttcttctctgtcccaaaaccatccagacaacagaaacgagactttcagctcagtcatttccctgttgaatgaggatcccctgtcccaggtgaggagccctcagcttgaggagccctcagcttgaggagccagccgctgcctcatcacccttctcccttccctctggagtgggtttctctggtcagcctaaagactggtctgcctatccaggacttgcctgtgaagatggcttcaatcttcaagaactttgtcattacctataaccggacatatgagtcaaaggaaggtgaggacccagccttggctgtacctgttcctatcagaacaggactttccccccaacttggcaccttggtgtgtgggaggagaaagacaagaggcagtgtacctgttcaaggaccccataattcctgagctctccctaagccttcccagcctggcagccaccctgagtacctgg

SEQ ID NO: 65918 - DNA, 1016 bp, Homo sapiens
agtcgggcctcaggaggcactcccgctgctatcccgctgccggccagcagcttggccacctggctgcacagcgacgccaccgtcagcttcgccagagggaaggactgcagaatccggccctcctgcggggggcgcttctgaggctctggggacgtcgtcctagtggggaagagcgacagcggacgcagcagccggtggtaaaaccgctggagctcaggctcgggcttcgggggctccatcatagagccggcggccgccaccgtccaggaacagaaagccgaggggttactaaggcaaccaggagcccgacggcccgagtgcgcctgcgcggccgccacccggtggctgacgaagcagggccttgcgtgcgcacgcactaggaggaggagttaagggtggctttagaggctcagtccccgcgacgccgcgctggttggtgctcctgcgccggaggagttctgcgtctcggggtggtgactgggtccagaatggcttcggattcggggaaccaggggaccctctgcacggtgagggtcgaggcttcgtgtggagcctcgccgggcagagagcctcggcccctgggatgatcgttaccttgggaagaggagaaggagtgggcacttgggttggggcctggggccatgggatgaaactagggtgcgagggtagcaggggccctgcgtgagtgttggggggtgactcccatggtcctggaatggtcatgagagatcatgaagaaggtgcttgaagaggggttaagtggggcttgttcccagacccttgcggtggtcatagggtaggtggtgaaacaaagtcataccaaggcacttccccagcgatcatcggttggtccctgccgcccttgcagttggagttcgcggtgcagatgacctgtcagagctgtgtggacgcggtgcgcaaatccctgcaaggggtggcaggtaagaacagggtaaacttttctgcagacagtccagaagcctctgggagggaccaggcgaatctattaggcgaac

SEQ ID NO: 65919 - DNA, 1051 bp, Homo sapiens
catgggaagtttggtggaaatggggatggagaattgctgtctgtttttctgttccctgctgccagcactgggtgccagcctctgttgccctcttccctctctttcttgccaggtgtccaggatgtggaggtgcacttggaggaccagatggtcttggtacacaccactctacccagccaggaggtgcaggctctcctggaaggcacggggcggcaggcggtactcaagggcatgggcagcggccagttgcgtgagtgaccactgtggccttggcccctctcggagggaggtggctcagagctggtacaaatctaatcataggattctcaggctctgggttggagtggctttgaggaaggtgtgaaaattatgtgagactccctgcccttcccgagctgctgaagaggtgtgctgggtgaggtggcaagccagcccaagtgtctaataccttgcagagaatctgggggcagcagtggccatcctgggggggcctggcaccgtgcagggggtggtgcgcttcctacagctgacccctgagcgctgcctcatcgagggaactattgacggcctggagcctgggctgcatggactccacgtccatcagtacggggaccttacaaacaactgcaacaggtgagttgtctgaagtctccccagtagcattctcagctacacattttcacactgggccctcaccaatactctgtgaggcacatacacacaggcacaacctccagatgaggaaactgaggctcacagaggttaaatgacttgccaaaggtccacagcaggtaaaaggtagagttggggtttgagtcaagatctgaccttggctgggcacagtagctcacacctgtaatctagcactttgggaggctgaggtgggcggatcacctgaggtcaggagttcaagaccagcctggccaacatggtgaaaccccatctctactaacaatacaaaaaaaaattagccaggtgcagtggcatgtgcccataatcccagctactagggaggcccgtaatctcctgaggcaggagaatcacttgaact

SEQ ID NO: 65920 - DNA, 1048 bp, Homo sapiens
actgagctaactggaggctgagaagcagagctgggcaattgcctcgccggaaaaacagtctgatccaatgggaatgactgcacaggcaggggaaacttccactggctcttttcagcccactgtcatcctgcccaggatttcagttccagggagggagtgttcagatggtccgggacttcctggaccactttccacttccagacagggccaagaggaccttgcctgcccagtccttggggagctcagatcctacgagactggtacccacaggaggaaatgggtactttagggaagcaggaagaggcgtcggaatcaggaaatcagaagatagcagcttggcaccacgtggcacacatcccctatacacacactggatctcattccagcaccgcggagacctgggcaatgtccgtgctgatgctgacggccgcgccatcttcagaatggaggatgagcagctgaaggtaaggtggaaaagaaggtgggcacccttcctaacagggtccatcatctgaagctgtcgtctcccctcaaaggtgtgggatgtgattggccgcagcctgattattgatgagggagaagatgacctgggccggggaggccatcccttatccaagatcacagggaactccggggagaggtgagtggtgtcggcccctgtaggaggctgtgctctgcggatggtgcatgaggaacccaggggtgggggccaaacaggtacccacccctgaccacacattcttctgcaggttggcctgtggcatcattgcacgctccgctggccttttccagaaccccaagcagatctgctcttgcgatggcctcaccatctgggaggagcgaggccggcccatcgctggcaagggccgaaaggagtcagcgcagccccctgcccacctttgagcaggacctcaccttggctctgttgctgtcctccagggcgagcactttccacttccagagggggccagagggactttgcctgcccagtctttggagagctcagtacagggcaggagctgctgtggtgttcccttggcaaatgaaa

SEQ ID NO: 65921 - DNA, 5067 bp, Homo sapiens
cgcggcaacccccaggcgcgggtttggacagggcttccagaatgggaggagccctgacttccaattgtacaaagttttcctgggagcccgccggtcccagccccacccgggccagagaccgccttacagactaggcctctctgccgccggcgccgctcgcgcgcgttctcctctcttcagccctccctcttcttcccaaccccctctcccgccacgggctgtggcggttggtcgtccctttcccaccccctcagctaacgagcgggctctaggccctctgggattggctgtgcctgagcacatcttccctcagcgtttctgattggtcgctggacgcgcgggatgcgagtccccattggctaggccagggcgcctgcgcggcggggttctcggtcgccagccattcctgaggaggactgccggtcgttcggacgtcttgcctgtcgctggaggagaggtccgggctctccaggaaggtggctgcggcgacaaaatgaagatattcgtgggcaacgtcgacggggcggatacgactccggaggagctggcagccctctttgcgccctacggcacggtcatgagctgcgccgtcatgaaacagttcgccttcgtgcacatgcgcgagaacgcgggcgcgctgcgcgccatcgaagccctgcacggccacgagctgcggccggggcgcgcgctcgtggtggagatgtcgcgcccaaggcctcttaatacttggaagattttcgtgggcaatgtgtcggctgcatgcacgagccaggaactgcgcagcctcttcgagcgccgcggacgcgtcatcgagtgtgacgtggtgaaaggtaacgcggaggcgcgctcgggggcgggggcgcgctcggggcactctgcctgttagccacgccccttacccgggggtcggtcactgcgcggttgggaggggtggggaagtgcgcgggagcaggtcggaggtgttgggggcgcgttgggtagagccaccctcctcccctgcggtccaggaaccgtccaccaagtaggaggaagcggctctgggtgggtgcggcggccactgcgagccaagctacggggccggggacgcgcctgagagccttgcgagtgttccgggggcgcgccttctcctggtctcctgggcctggcacccagcggaaattgggaagtgacgggcacaagccggatcatgaagcggggaagatttctccacttccccacttcctctccagacgtcggtcagagcaagggaagagggaaaaggtgggggctgacgccccaaggccgccctcctgttccctcccgatgaatgtgctcaagcggaaggtaacggggcccttggacgtttctcgggctggggtcttttagtcttgtctggcatgggtctactcatgggcacagttacacgtgggtacgagaggggccccttccgaatcactttggcctttcaatattaggtaggttaggcgtggcagctctgtgcttttctcctccctcaaacttggggtttttctttgggctcgattttacatctgtcaactggaaaccccagccttttgcatgtgcaagaaagcttgttttatgaagtccccttctgcgtagtctttacatgccaagccagtgccctagggcagtgtcattcttttataagcttggtgactttgcaggggggcatactctggctgagggggtcctggggaggggtctgtgagagctcttcattaaacagtggctaaacacggtttactgaatcagtagtagtcattgcttgagtagtctgattctcagggcagatcccggtgccttttcttcgagaaaaatgtgtcaccataatttaagcctgactagggacccagttgactttttcatagcttgagtttttatcccttaagctctttatcttttacattggcaagatttggtgggacagccgttgtgtatgtggccagtctctgctccacttgggaacagatcagagttaactttgccctgtcattttggaagatgcagcctgggagtatctgatgccctactcctggtgggttcatacctgctcataccctgtgtgagaagtttcagggataggaaataaatgtgggtgcaagtgcttatttatcccaccaagatatttcatttgctgtcctggaaaggcacatgtttggggccattcctagtcctttaagtgggggaaatataaagggtcatagtgtccactactaggaacaagtccttgttctgcattaatactgcattctattttcctcaactcaggttatacaagtccacgactatccggaatcgggctttcctgctgggtgctctgaggcaggctgtatggtgcatggatttttgcttttgtttagagtaaaagagtggtgggggagggtctcagattgggtacttgtccagcaaaagggtggggtatatgagtctcatttgtgagagttttgtgtttaattgacttaccaagtttcttttgtggttgttaggtagagtggctactaggttgagagtctagagtcaaacatctgaagggacagtctccctggaactcaggcttcttgctggctttcaggtggtagagaaagtcaaaaatttgcctgaaatttgcttgggacccaacaccaagtgacgatgcgggtgaagtgcataactgcacatgaatttttagaactcctggctgactccttgtgagagttagacggagttttgtgcatcttgttcctttgtaaacatttgattagcaaaaatgcattgacttactccgggagtggtggtcaactatttgcagttacattgttgtgtaacagagctcctgacatacttcgatgtaagagactgggaaagatttgaacatcatatcctccactgatgtctttttatctgtttgtgatgacggaaagtgagggttgaaagttgggagtgtagtagaagcgactggctctctaaagagcgtactcatttcttatgctgggaatggtcatttgattgagtctccttgtgttggctgacagggctttgaaaagcacagaagcttggtgttgcaccagacaaccagctctgttttatttcacaggaaaaaaaaacaacatagttgcttggttactccaggagcttagataggatttgtagaacagaaatctcaatagcaacagtggattgtaaccactccacagcttcctcctattgggtgttcaaagatgaacagcttccggaaacatgtacagacttgtggggagatctgaaagacaaaagaggaaaatatcttctcttcatttttgtgagtgactgtttcttcttcctatacagagctctgtagtttcaagtttaagattttttctttttctttttttttttttttagacggagtctggctctgtcgcccaggctggagtgcactggcgccatctcggctcactgcaagctccgcctcctgggttcacgccattctcctgcctcagcctcccgagtagctgggactacaggcgcccgccaccacacccagctaattttttgtatttttagtagagacggggtttcactgtgttagccaggatggtctcgatctcctgaccttgtgatccgcctgcctcagcctcccaaagtgctgggattacaggcgcaagccaccgcgcctagccctcaagtttaagatttttagtcttaagataggagaacttgtttttctggattcacttaactttgttactggaggacttgtgatgccaccagaccatttggagatctctgtaaaacattacttgatagtcccaatgcagtgatttccttcagagtttccttgaattagatctgtgggcaagaaggttcctggaatttttcagatctctggttttaatggtcttaggagtacttgggtgttagggcatctttaatctagctaggtctgtgctttgcacttactgtgatggggcttatcactacaggatgcagttgagttagctgggcaacctattcacacttttcccctccagtgtcaggcttagaaacttcctgatacaatttggttataattgtatcagatggatttttaaattttgtatttatttttatgttatttatatatttattatttttttttatgagacagagtctcattctgttgcccaggctggagtgcagtggtgagatcttggctcactgcaacctccgtctcctgggttcaagcaattctcctgcctcagcctctcaagtagctgggtctacaggccaccacacctggctaatttttgaatttttagtagagacagggtttcactatgttggccaggctggtcttgaactcctgacctcaggtgatcttcctgcctcggcctcccaaagtgttgggattacaggtgtgagccaccatgcccggcttggatttttaaattttttgatcagttataaaactcatttgggtagtcatttgaatcatacatgtgaaatctcaattttcagatttcaccacttggtctgaataaaactcactaaggagggaaacagacagtgggatgtccaaatgctcttgtaagcccatggaagtttttgtctcattctagtgtcaggaagttgtggatagaataatcaggactgttagaattgttccttaatattccctcagaatgtctggaggcccctccctgcaacaagtgcctatgagctccagcaactctgcttccccttcactttgggcctttctgcttgccatctccaggtggttttgctattcccgaggattacctcagcctctggttttatttttattttttatttaaagattttttaaaatatttattcattctttagggtctcgctttgttgctcaggccagagtgcagtggcgtgattgtggctcactgtagtcttgacctcctgagctcaagccatccttccacctcagtctcccaaagtattaggattacaggagggagccaccattcctggcccagcctctgcttttaaagggctcttaggccacatgctggttttttgtgttttttttttaagcttactctattcaaagtggagatgaaggatcacaggacaactttagtgccttatgcctaggcc

SEQ ID NO: 65922 - DNA, 3795 bp, Homo sapiens
ttcatcctttttgcccaggctggagtacagtggcacgatcttggctcactgcaacctccgcctcccgggttaaagtgattctcctgcctcggcttcttgagtagctgggattacaggcacatgccaccacagccggctaatttaatatttttagtaaagacggcgtttcaccttgttggtcaggctggtcttgaactcctgacctcaggtggtccgcctgcctcggcctccccaaagtgctgggattatggtgtgagtcattgcgcctggtctcattgtgttcttttatcgtctgtgccagcttctaagtttgcatggcattgtgttttgcttgagatgaaagataatattctatagggaaataaatctctggttatttctaggtttgaataatcataattccttattctgtagctgttcatatcttacaaggcacttttgtcttttctcttgaacctcttaactttgaggtaggtaggatagatgtgtcggaggaaatacatggtaagtttctttttattttttttgagacggagttttgcgcttgtcacccaggctggagtgcagtgatcttggctcactgcagcctccttctttttcttccgggttcaagtgattctcctccctcagcctctggagtagctgggattacaggtgccagccaccacgccctggtaatttttgtatttttagtagagacgtggtttcaccatgttggccaggctggtctggaattcctgacctcaggtgatccacccacctgggcttcctaaagtgttgggattacatgcgtgagccaccgtgcttggctagtttcttttctttttttctttttttttttttttgaaatggagtcttgctgtgtcacccagactggagtacggtggtgccatttcggctcactgcaacttccacctcccaggttcaagtgattctcctgccccagagcctcctgagtagctggaattataggtgtgcaccaccacacctagctaatttttgtatttttagtagagacagggtttcaccatgttggtcaggctgatcttgaactcctgatctcaggtgatctgcctgccttggcctcccaaagccctggcatgagcccctgtacctgcctaaatggtaagtttcctaagatcttataacaagtcagtgatacctgggtctggaactgagaccattgaatttctaattaaggatcccttttgtgctatgccacacttctgacttctacttattgattgcattttttccccattatccttagtcttgtgtcattgtcttcaaatccagggaaatgacttgttctgtaggagcagctagataaggcatcccagtacgaaagtttctaaaaatgaggacccttgtttggaggttattaagaatgtttcttatcttagtattgtcatctgggtagctctttgtttcttaagctgatgtgacagatagcatcctggtacttggatgctatctaagagtagccacaggtcgagaatggagctaagcttagagccttatttcctaggggcaggattctctccttcagattctgcctgtgctttgtgagtgtggacatgagaatttctttccattccttcattccctgaagttttctccttctgtgtagtagataagtatagctttgagaccggcatcctgtcttctcctaccacagcttattcaggtcataatgagagctgcaggggtaacctggttagcagagcctgttagctgcagtaattgcagcttcataccttataggtgagaaaccagatctttctggtaagcagtctgctctgtgaacagaagcccaaggtgtaaggtatacctctgtcccttaaagaggaaacagtggaggatgcagtgtggtctgggacagggggattgggcatgaactcagccagtgggcttagtttctattcccatacctcattggcttacacagggtccatcttctctgcttctaagcctaaatttttagtcatattacacagtcctgccttataccttgacttctcagggatagattatgtagcaaaggggcattggaagagctgtgattctggtcctgactctaacacactttgagtggggcaagccatataaaaactcttgagcatgtatgtccacctgttaaatggaggtaatgattctttgccctgcctacctcacaggattgtgaggcccaaatgaggtcctcctgtacctaagagtgctttgaaaacttgggaagtactgtgaaaaagcggagagatcatattggaatgttgtgaactgcttgcttgttgcagtctatctctcttgccttaattggacatgggctgagagatgggtcataccaaaacgtgagtggtcatttccagtgtttgagagttaggcctcaaaagtgagctaggcctcaaaggtgtttggtgagtttgggttgagaacactgaagaactgagtgatctaggaacgctttctgcattttgttctgctggtttgtacttacaggagatgtgaagatttttatcctgtgttgcagttcatctttgctccttcttctctcaccaggaagttgggtgagatggcagggtttgtaaaggggagaatgggaagaaggctgtaggcaaagatgactgcttgggacagtcagaagctttgttatatgggagctacattttatgacatactcctggagaggagggtttggaggccttggaggtagctggcaacagctgggtgctgttgtgtgtccaatttgggacccatcaggtagcatgccctgcccccctaattgctaaccctctgtctgctgctttatcagactacgcgtttgttcacatggagaaggaagcagatgccaaagccgcaatcgcgcagctcaacggcaaagaagtgaagggcaagcgcatcaacgtggaactctccaccaagggtcagaagaaggggcctggcctggctgtccagtctggggacaagaccaagaaaccaggggctggggatacggccttccctggaactggtggcttctctgccaccttcgactaccagcaggcttttggcaacagcactggtggctttgatgggcaagcccgtcagcccacaccacccttctttggtcgcgaccgcagccctctgcgccgttcacctccccgagcctcttatgtggctcctctgacggcccagccagctacctaccgggcccagccgtccgtgtcactgggagctgcctacagggcccagccttctgcctctttgggtgttggctatcggactcagcccatgacagcccaggcagcctcttaccgcgctcagccctctgtctcccttggggcaccatacaggggccagctggctagtcctagctcccagtctgctgcagcttcttcactcggcccatatggtggagcccagccctcagcctcggccctttcctcctatgggggtcaggcagctgcagcttcttcgctcaactcctatggggctcagggttcctcccttgcctcctatggtaaccagccatcctcttacggcgcccaggctgcctcttcctatggggttcgtgcagctgcttcttcctacaacacccagggagcagcttcctccttaggctcctacggggctcaggcagcctcctatggggcccagtctgcagcctcctcactagcttatggagcccaggcagcttcatataatgcccagccctcggcctcttacaatgcccagtctgccccatatgctgcacagcaggctgcttcctactcttcccaacctgctgcctatgtggcacagccagccacagctgctgcc

SEQ ID NO: 65923 - DNA, 4645 bp, Homo sapiens
agacccagctgaatagttacggggcccaagcatcaatgggcctttcaggctcctatggggctcagtcggctgctgcggccactggctcctatggtgccgcagcagcctacggggcccaaccttctgccaccctggcagctccttaccgcactcagtcatcagcctcattggctgcttcctatgctgcccagcagcatccccaggctgctgcctcctaccgcggccagccaggcaatgcctacgatggggcaggtcagccgtctgcagcctacctgtccatgtcccagggggccgttgccaacgccaacagcaccccgccgccctatgagcgtacccgcctctccccaccccgggccagctacgacgatccctacaaaaaggctgtcgccatgtcgaaaaggtactgtatgcccccccgcctctgcccccagctggggcttagggcaaggggctgaggttggcatgggagggaaactggaggcatcggcccctccctcggtcttctcttctctatttttgtgggatgtccagaggccgaggggagcagtgtctatgaactttcctggtcaccagggttcaggtggagcatagtgctcagcctggggtggtacctgctagtcaggccaggcacagtgtcacctgtctaggctagcccaagtgtcattggagctactgcctgcaggactgtggcccatatcctttcccactgtctcaaggatccttaagcctattacgtggttgtcctggctttggcagggatgtgggttaaagagtagtccctttggcattcactggctaaaggcaagtttacgaggtgcgtccactctgggaagttggggacctcgctttcatccgccgttctgttgataaacaaccaaggtctttctctgcagggcccaggggcggagatagtttgctgtggtgtgggaatgtagaccaaaatccaccttggctagttcagaggggaggacttcagtggagggtttgatttcccactgagttgaagccaggcttgatttttttggcctggatagggtgatgagccttctgacaaaaggagaccaatctcttggagaccactgtgatcacaccctccctgtccccattggcatctccccaatgcccacctggagtcctcccctcaattgtctcattcaccaactgtcttcttctctcgactaggtatggttccgaccggcgtttagccgagctctctgattaccgccgtttatcagagtcgcagctttcgttccgccgctcgccgacaaagtcctcgctggattaccgtcgcctgcccgatgcccattccgattacgcacgctattcgggctcctataatgattacctgcgggcggctcagatgcactctggctaccagcgccgcatgtagggccatcctgggatggggcaccacagggagggagggagaaaagaggtgggtagggttacagatccaggttataactactctggcccatacctttcctggttgtggtttttcatgccctctaccatgtgggccttccccaggagatgatcctgttaagtgttcggcagtaacctactttgttccttcgcctcagcagcaaatcttgctactggctctagatctgcggtttcccctctaccctgcctcccgtctccccagaatgggaatttcttttatgtttttatttttttcctggctcccttttatttttgtgcgcgatatttaaggtcgtctggatggggaagcaacctgcagctgaggtcgccggcgcctttttctttttagatgggaaggaggccaggaaagggtcagcttaaccatttcctatgtgccaagctgtgccagcagtccagggtaccctgactgtccctctgtagactgttgagactgagttcctgttgggacagtcagttggtatgtatccaagtccctgctgaccactaatgttctagctgatggtgagcggcacagtcccacttccccatctccccaagtaggtggtgttagaaaaccttaattttttttcccttttgtatggactacaaataaaacttggggcaatttgcagtttggaaacctggttgtcattgtcttgattgcattcagtgtcaaaggagccaatttgacatccaggaagacatgatagctaaagggaaggcagtcagagaacccaggactggtgaggaaaggggtttgaatgtcggaattagaaggattgccctgtggcccagaaggatttagctcatcgtcgtcctgctagcctgccatctttcagactttccagggcaggtggcctggtcctcagccctcaacttgagttagtcacaccaaaatgcagtaaatgatgcccattttcctctgcctgtgcttgaccattttcactgacttttctccagttcaggaataacctgtgttccaatgggatggttctggggtttggcctcttaggaagtggggaatgggctgctgtggtatttacaggctagtagatcctttaggcagtaggctggaatgagtgctggggctgggacccagaaaggaaccagtagtggagtgggggtaatggcgttgcctgatactgccctatggttggaataaggaagggcagagaaaacttgaagcaggtatggggcattctggccatagagctcgtattttgcctgttgagctgtaccatggagcatcctcctgtgtcctgccaacccctgccattatagtcaccggagactcctttacctatccctatctgttagggttttcagatgtcctctcgctgggtttatatttgaaggtatagaatctgggaaagggtggggtgcaagctaaccaaatagggatgctagggttgggtggggaattgaggactcttctgtgcttttattgtagggctggggatcgaggatctgggcaaaaaatatgacatttccaaccagggacaaaatggaggcttgggcttagtgatgggtaaatggaagactggttgagtgggatgataatgggagaacttactgatgctcttttgggaaaaggtgctttaaagactcgatttgggagcctactggggcaaggcgactggggaggtgtacgtgttagtcaagtggaggtcaggtgggttatcttctgcctccttcactggcttcatgtgaacttgcctgtgacagaatatcttgccctagatgtcctcttccctcttgccatcgtgcaaaagcattcgatcttatgaccgtgagttcttatttgtggatgctaactggggtaatctcagggagtactggggccatggctctttcccttgcttctctttctgctcactgctttgctttcaggtgcttagctgctcctttttatttctttgcaggactgggaaagcatgggaggaggattttgataagtttcttgttctctgcgtggtgatggggtggtctgagggccaagttaataagcctacctttggttattaccctggaaaattgagggttgatggtagggttatgattgtggcctgtgtatttgcaatttttctttgtcagtgtggctttctgtcatcttcctttttctccagtgagggttctgccactgtctcaatcccttggttcctgcaaaaaacagctaaatgtgctctcagggccagtggtgatgttctgtgttgcagccccagctcttgaaagtgacctggcccagatgagctctgcctgcttgtcatctttaggtcctgctgcccctgctgcctcagccctcaggctcctaactgctcaagccagaaggagctacaaagccaaatcatttgtcatttttctctggcagattgttttaaaatctccctcccctcttttattttaattatgccacctgtgttaatcctatagcctgcttctttgctttgtggattactgatttcaagttctataacttggggaaagttaggttgagtgaatgggaggacagacactgaatgtgtgttttggaaaaatggactctctatcttcagattattcagcttctccacctatcacctctacaacttggccttcattggagaagttttagttggcttattcctggaacaagaccacctagaggcttttagccttgtcagcctgccctcttctgaggtttggaccttgttttaaattgtgtgcatggtgggcttgagactctcttgtaatggaggtaatgggactatcactgaggggttcagcctatccaggtaggctaccgttctagtcatacccatcacttaaattctgccacagtctgcacagacggttggtcctccaggcatattgtcctattaagccaaataggtggacatcatgggatggatgaggtcatcatgaaaacagatttactggatttatggacctagtatatactatgtaacagatggaaaactgaattttacaatctataggtacctttgaaaggtcataaagggtaaaagtctatagttttccagaaaataattcttaaaactgggttttatgtctagatttaaatcatgtatctgtctgtagtgcttcaaatgtggccaggtgtggtagctcacacctgtaattcccagcgctttgggaatttgaggcaagaggattgctagaggccaggattttgagaccagcttcggcaatacggtgagaccttgtctctaccaaaagaaaa

SEQ ID NO: 65924 - DNA, 1056 bp, Homo sapiens
cgaactcccgacctcaggtgatctgcccatctcagcctcccaaagtgatgggattacaggcatgagccactgcgcccggattaattggccttttagttaaaaatattttttttaaggggcaagcattaagttcttttagtactcagtaaaatacaggtaggtgtatatcagtatgaagacacttgaactacaaacttctctacccaaagcttcattttgttccagttgtcaaagtggtgatcaaaatctgttagcttgggttacctctggctgttgggtacctgcttttctgtttgaggaagactggaacatgtactaggtgatgagtaaaggtgcgtgttttcagtactgataagtgtccaggtttttaacctgatagtgactgaagatccgaagtcatttccctcctttcggctatcaagaagttaactcatacattcattcattcatttacttgttaacttagtcaacaaatatttgagggtcttaccatgtgccaagtacagttctaacactgaggatataatatagaattaataacaggcttttttagaataagtataggatttcaagtggtagtaagtattcagaaagacaacatggagtcataggatagagttccaaggtagggttggggtgggtgatgtttttagatcggtggctggtgtaagaacctgaataaagaatattctagtctaaatgagcttgggataaggccagtatgtctgaagggagcacagctggtggtcaagggcggtggttgttagaaacatattgggaaattccggcaagaaccagattggggtaaggtcttaacggtgcaaggagaggagtttgaatttatttatttatttattttttgagatggagtttcactcttgtagcccaggctggagtgcaatggcgcgatctcggctcacagcaatctccgcctcccggttcaagccattctcctgcctcagcctctggagtagctgggattacaggcatgcgccaccacgtccacctaattttgtatttttagtagagacggggtttctccatgttggtcaggct

SEQ ID NO: 65925 - DNA, 11875 bp, Homo sapiens
gcgcaggcatttcagaccggtctgggcaacaaagagttcgtctctataataaattaaaaaaatagagaggcctggtggcacacacgtgtagtcacagctacttgggaggctgaggagttccaggctgcagtgagctatggatagtgccactgtactccactctgggtgacactgcaagaactgtctcaaaaaaaggcagggagattatttaatgcggttcattcaggatgagcttgtaaagtgttacatagctaactagacctagttgggtttcagaggtcaaatcaagtaattaggttttgggctgcatgcagaggtggttagtagttttgatgtccgcacactgggcttgaactgtgatcctgagatttatgttcccagtctccttcaatctggagagattattacttacaatgagttgatccttgttatactttggtattttggaagaaagttttatccccagacatgttgagacaagagatctaactgaaggagatgagaggatttctataccatatgcgttaccttctaatgctggccacctctgaagggcacgtggcagctgagacgaaattgattttcttcatcactgatcccgtggcctttacacaggctcagaggtgcatcagaatccacaatgaagtggacaagattagtgaccaacacatctgtaaatgttatattttctttttttagttccttagctttttctaccctaggataaattattgaccagttttctgcagtcagattcctgaatcatgttgggttttttttttttttagtttcactcttgtcgtccaggccactcttgtcttgcctcactgcaacctctgcctcccgggttcaagcgattctcctgcctcagcctcctgagtagctgggattacaggggcctgccaccacattgggctaatttttgtatttttagtggagatggcgttcaccatgttggctaggctggtcttgaactcctgacctcaggtgatccgcccgcctcggcctcccaaagtgctgggattacaggcgtgggccaccgcacctggccctcgtgttgggttttaaaacccactcttttttttcccccccaaactctgacttcacctttctctttatgaaaccgttctctttttggggcgggggtggtggtgaagaagctgctttggatggtggtgtgtggtacttgtgtcatcttcactcctgatgatccctttcctcataaactctgcactgcttttagcctgttttgttcgtgttataagttcttccatccagtccctgcactccaccttttaacccttttcaaaagctgcttcgcaaagggtcttgactaaagttgcttgcttaatgaatatgaagcagcctaaggatgagagaaaacgaggcagcagctggaccctctggagaatgttactttgtattttgtttacagctggttgtgactaagctctgtcctctaaagtcggttctaggggattaaaacagctctggctgatggcgcccaataaaataaaacaaaaaaacctttgctgctccagttttttctcagggtggggtcggggtatactttaaatctccatggtctcagaaaggtttcttcatcgcggaccctgggaggctggttcccagagggaacttgtcctcagcgtctcctggacagtgcagcctcctgccgggcctacttctggaaggccattacagaggtcctttcaccacctgtgagaggtttgattttgggggagctccgggactctcaaggctacagtgtggactgctggcccaaggagaaggttggtttcctgaagtggtgggtggtgggttggggggggtcttcgttgtttttcttccctggcatgtgcctgcataagctatttccacagcgtcctggccgcgagggggggtggtgcttgggaggttagagggagacacctagagtgaacggcaaaatggagcgcggaatactgtctggctgtgcacgtggaggtggcgaaatgtggaagcttaacgaagttggcgccatgaagctaaagactgctaccccggggctctagctcgctccgcctaatggcgggccgcaccccgccggcgaagcccacgtttgtaggtccgccctcacgctgatctcttgcccaatcagcgagttcggcttcgcgaggttggtgcccattggctttcgcataaaagctccgaggttacagacgtttccacctcttgccggcctcttaggtaattggcgtccgtggtaaccaatcaggaagaggatctgagggaacgccggccttttactttcttgagtggccaatccggttgtaggctcacctcccccttctactcagagcactgctgcggccgccgccattttagcgttttgtcagaagcgtccgcgccgcgaggaggaggccctgctggtttctgtgcgggtgagactccgagcctttccactgcctttcttgtactgtgttaaatcttctctcactcccttgggcttcgggggtgtcctggtaggtccgcagtctccacacccgtcactgagagccgacctcggtcctcggcattgcgcggtaagccgggagcagcccttcccccaccgccccctgagaataccttgctttttttcgcccaccctgtcccgcgcccgacatggctgctcttggagcctcgagatttccactgggataaccccctttcccttatatctgacagttacattctcgtttcgggaatttctcgggccgtgagacatcgtctggttaatgaatctgaagctcttttccgcggccgcgcatttcagtgttcggcaggagctaggacggtgccccgagagaggcgttcaccactccagtatttcctttatctcccactcctcgctgtctgatccgagtcgcgcgttcattacttccaaaggaaactcaaatgtagctattacaaggcccattttcccggaaatgatggctgctttggttcctacgtgaggaaaagcctgttgataatttcaggcaggcagtcagcaagcctagtagacttttgttttctgttgtcctcctagtggatagaaaagcctagtacccccatttcttcatatgctgtctttcatgcccatttctgttggaaggtatcggttcttaccaaaccctttgtctactaaggacctccctattgcagacgtcttcttattcttacaggttcatggcggctactatagcaggccttagttcactcccacttccatttgattattgtgtggaggtgtgtgtgcaggcgtgtgagagagaaaactggaaatatacattagagtgaaagtcgttgtcttttgtgaacggatgtgggcctgaggtcttttgtcagatgtcttgtttttctctcccaggctcttgtcaggatggtgaagctgttcatcggaaacctgccccgggaggctacagagcaggagattcgctcactcttcgagcagtatgggaaggtgctggaatgtgacatcattaagaattacggctttgtgcacatagaagacaagacggcagctgaggatgccatacgcaacctgcaccattacaagcttcatggggtgaacatcaacgtggaagccagcaagaataagagcaaaacctcaacaaagttgcatgtgggcaacatcagtcccacctgcaccaataaggagcttcgagccaagtttgaggagtatggtccggtcatcgaatgtgacatcgtgaaagattatgccttcgtacacatggagcgggcagaggatgcagtggaggccatcaggggccttgataacacagagtttcaaggtgaaccaccctctttgggtagagggctgaacacaaggctgtgtgcagaaaatggttggataagtaaaaggagaggtttggtaaagataacagctgttggctggctggtgatgaagaaataagtgtgggtgatggacttcttatgatgtagaatgcatgggacttaggggctttaccttaggcaaatgtctcctggagaaaagccactcaccttttatttggagcccctacggcttttgtgcttatcagtgcagaaacccttttctttgaaggctttctgagttactgggccttttttattttttatttttttgtagtagagcacagttcagagttcctcactctgaatttattgccctcagcacaggatcagaattctgcattttacgtgaagaacctctcaaaaacatgtcaagcgacacttataggaccagaatccttgttaagctgtcctaccttacacaaactctttaaagggttacagctcttgttgcttttatattatacctgtaccaagggattgtattttgagtttaaggccactctagaattacaaggctgattttaggacttcctggggaggaggcactggggttttaggggcggtaatgactgtcttttcattggtttggggggctggactttataagattttggtgaatagagcacttagatttgtgttatcttggagtcttaaccaaatgaatcttttgtgcctggagggcagcatgggtgatatgtggattgtcacttcatttggaagcatctcaaatccccagcattttgaatgcctacatgttgctcaaaggaaatgcttgttagagcattttggattttgaattttcagatttgggatgctaaaatggtacgtagaacgcaaatattccaaaatctgaggtctgaagcaacagtggcagttcaggggtggtgatcatggtgagttgctatctgaactcttctttcacctcctttgggttcccagtgtcaaaaagagtggtgtccttttttagcttaattaagcaggactgaacaaaaataataaaaaataaaaaaagccttattcaaattatggagtatttccgtgactccttgctatatttcaaacctgtgttctgacagtgtagtttgccgattctttttctgggtactacctttgttaagagtcattgctgcctttggcgtccatttcccttaaattgggcttttttagagctgagagtctgatcattatttcccctagtaatgggtgccctgtgtcatgggcattgctgtgcgttagtaaagaaaagtgacacaggtctctcaggtctagtttgctttcttttttttaattggcaagttgagaattattttgtcaacaacttaattgagagcaaaggttgctcttgtggagggtttatggtgtgatacctaatttttggactgtttcccacacttcagcccagtcagaagaggtggtgtctgcttgtagcagttaggtttaaggagaggacagtgtggtcttgattcaggacaaattatccttatataaaactctgggtgtctgaaccctaggtcccctgacactaacctatgcttagttatttttaccttattttatgtaatattggcgtttctcatttcttaatactgttctggtagaattatagatgtatattgatgagcagtagttattagggtggtcttttttcctttccgtttctcagtgttgggtatcttctctattgcttgcccacttaaaatctcttttagatattttttaaaatttaacttctttttctggcgttagaaccaacagatccttagattaaggcgtttattaatgatctttatgtctggaatgtgcatagttgcttgcttagttgcacttgttttctctggttttgttaggtgccaaagtggccccctgggcaaatgccagagacaagctagcactttaaggcacttaagtgcataattgcatatctactctcttttaataacctgcaacctaaacttccagctgtgtagacctccttgatattttgttccttccacccccgtttccctattgtgttttctggtctcccagaatctaacattaattttgcaaggaaaattgtgtgtttaccactttctctaatgttagaggatccatttgttgactctcccttgcttttgaccatttactcctttgacaggtgtatgtttaggtgcatcataaccaattgcattgggaagtttttgcaggatttggatctcttctgaattttgcttaccagtaagctggtagatcatgttaggtagaaattgcttctgtagagacttactaaaacttagttttaacttttctagaaaagtttctgcttttattacattttcagaagtaatacttttcatttccagaatgcaaattttaattttcaggaaaaatattaggtgtatgttcttagttacgctctcagatatgtagttgcaggagaagtactttaattctgcttaaactgagcagtttggtccactgactagtataactagttattctccactttcctcaggcacgttttcttccatgttttttacagtattctaaaatttcaggcatttgagaacaatctgtcctgtttttgccctgtttgcctttgaccctagtagagggtcactaaaattaactgtcagattgtaaagaatcctcgttaaagcaatgatcagaaccagcagtttaaagggcccagttaagggagaagtctgtccttcaacttgttgtgcccctctgtctccccagttcatgagggtttttccagagatgtaccttgagatttgcttgccacattcagctgtggattgagtctagatcattctttaatagtggtaatcattggagtcttttattcggttcttttaaattttttgaggagggtggagaactggcctttacttatattcctttgcttaatgaaaatccatcttgctagtaaggattggaggtgtcagaaaagacttgggcactgtttcttactttgacttcttttgactttgagccgctgtttggagatgatttttacctgtttggagatgattggagcaagagtagtttatttcttaagcatttaaactgttgttatagctgaaatatttcttcatctaagtggtcttttcctgaaatcaggtcattatactgaatctatatgttgagtcttttttttttttcctttttatcttttcctaaagatgagtcctgcattagaattgtctagataaagccattgctatgaccagtgtctggggtaggggctggggctatgactaagagtgatagcaacccttcttgcgtctgtttcttcaaggcaaacgaatgcacgtgcagttgtccaccagccggcttaggactgcgcccgggatgggagaccagagcggctgctatcggtgcgggaaagaggggcactggtccaaagagtgtccgatagatcgttcaggccgcgtggcagacttgaccgagcaatataatgagcaatacggagcagtgcgtacgccttacaccatgagctatggggattcattgtattacaacaacgcgtacggagcgctcgatgcctactacaagcgctgccgtgctgcccggtcctatgaggcagtggcagctgcagctgcctccgtgtataattacgcagagcagaccctgtcccagctgccacaagtccagaatacagccatggccagtcacctcacctccacctctctcgatccctacgatagacacctgttgccgacctcaggagctgctgccacagctgctgctgcagcagcagccgctgctgctgttactgcagcttccacttcatattacgggcgggatcggagccccctgcgtcgcgctacagccccagtccccactgttggagagggctacggttacgggcatgagagtgagttgtcccaagcttcagcagccgcgcggaattctctgtacgacatggcccggtatgagcgggagcagtatgccgatcgggcgcggtactcagccttttaaagcttgaggtgagaggggtggggtgttccctcttctggttttgccatccctcctgcagcctaaagggctccaattaggctgccctgcttgcttgcttgcttttgcagggttaggggaaggttactaggatggctcacaggctagagagaagtcctaactgcttaactttaaaatacatagagttccttggccctcatggctatttttcagggcttctggtagtgggagtcaatttgattctatttgtgcctagaaaaataaagaatgatgtgctggtgaatcttgggtcacctatgtactatactataattgaaccttacctggggacccacacgttcaggctcaggtgttttgtttcttagagcctttgttaagtttcctacgtgtgcgacattcctaaggtcttcaagtttcctattctgttttgtgctgtgtgaaagttctgatatgacccctgatgataaagtccataactgtagttaactggtcatcactgctcaggtcccagttactaagaagactaccaaaatggcatcatcttaatcttgaagcgtatttctgacattcctgaaccgttcaacccttatgagttttatagaacttatttgatggtaagttggggtagagagaaatacaaaacttatcttttataaagttccacaaggaagtctgggcatagatgctaacactcaccttctctgcccagctcagatttattccctgaatagagtgcccactccattgctatatctttcagtctgtcctataacagcccagcctgtcacttacttagggttttttttttttttaagtaactattcccacagttctagttttgacatcatctactttctcagggtatatgttttaagaatgcaggcacacctgttaattttactcctttggtaatgttgaaatccagggttgggagctttgccataagcaaatcactcccttcttcatcttctcactagctgttttgggcatttaatactcttgagccagcagctctaccctgagtccgctggctttttccactgtcatacattttgagccccatgatccatttggctctccttgaatatattctcttctgatacttgccagctttgggctctaggtgtttgagattattgttgtacttaagggtaaatctcaatgcccttagttttgaatagctcccagtatgtcccacacattaccattgatccttaattatagtaactgtgtgagtgatagataactgtcatctttgcagttagggcagaaggtatgtggctttcccagggtcattgggtaggcagtcactgattgggctggaaaagagacttgatgtgtagcttatacatgcccttctgcaccttctttccaaagttagtttcttccctagttggaattggatgtcctcaggtcttaaaacttgtgcagttgatgctacttctatctagactttgaatgatttttaactcggaccttggcagtaactcctagatagaaaatactgttaattttttttttttaaacctcagggagctaattggaacctttccatttttcctatcctctgctgacagcttgtgatgtggaattaccttctctgaggaatgctaatgttaacatcatcaagagcaaggaatgtctctttgcctacttttatgaaacaagatttgctattaatttaagaccttagtctgaggttgtttagcctccccagttactctctggccttcaagctcttttcattgttagagattactgtgatactgggggagaagggtacaagtaaacttaaaaggagtgtcaagttatcagactttgtaaagatgttgaagttttaaatgggaaagcccttttgagctttgctgtaaagccgctgtattgtgctctctttcaggtgggatgtgtgtgggctgaaattccgagctgcggttgtgcatgagaatacacccttcgtggtaccccatctccgggacgttctcggctctgtgcgttcagtccctcaggaaccgtggaccttaatttaccttgctaagttcagaccttctcttcctttcctttcctttcctctcctgcccattttcctgttcttctgtccttcaatacttctgtagcttcccattcatgttctcttctcccagcaggcctcattgtgtgcagaaactgtggtgggggctgtgctgtctcctccctgcctcctgcctcctgcggctgttggatttgggaatgaccttggtgagagtctcactgctccagggtctctttttggtccaaaggctagacctatagagttggatcactttttttctttccggtgaaataaatggtttttcaacttagggtatgtgtgctttgcgagacttcttgcttgggcttgtttgggggttcatttgtaccttgaaggggagggtataaagttttaagacactcagctttgggtgaacgtcactgtagttattttgtttattgtaagtaggacttgtaggtgccagaggaaggaggttatacagaagcccaggcaggcagccttattccaatgaagacttttcccactggtccacctttgttataaaaccaactacttttagtttacagatgtaggtcttctcttctagagaaacagtcaccaccttcccttaagactaccattccaatcacccagtcagtgtatctagcttaacttaatttccagggaaaaggaggggtttaggggaagaggaagtcagttttcgctcttcgtgccatgtgaaaaaatgaagctgtggctccaagagtactttgctaactaggccagtgacatgtgttgatgcctttcaccatctatttgtttagctctgccaaaatccaaagaatgcctgaatggtcccactagcacctcattacttgggtttacagcctttaaatcataggcatggagaaatgacccaacatatgaggctttagataccttgttgaatgatggggctgagtgcaagaactgccgcctcagcctcacgtttttcttgaaacagttatttgtcttccatatgtttggtctgtaccttcttgctccagtttctacagatacaggactgtgtcagagcatttctcagaatcattcaacaaatactgagcacctactgtatgccaggcattaccctttcagggaagttgggttatgatgatggggagataaagaagctggtctttacttcgatagtttctcagattttttttttaaattaattgtttcctcctgttagattctttctaatcatagatgaccaagatttgaacagctctatacaacatgtaatttattgaatatttttgtacgtgaagcctgtgctgggtgtttcgtgttctcatttaatcttcccagcaaatgtttttcctttagtttttccttcctggctgggttggttctctgccatttctcttggagggtcgtacatacctaactttggtttctttttctctaaaggacagacccaccactgaacgccatttttactcttgtcagtataccctttgatctgatgggtagggttggcaaatttcaaacattggagactaacagtattcattgattcaacaaatattttattgagtgatactctggaaggtggtgttttaagtgttggcgatacatacggttctggagcttctattctgagggagcagaaaatgcagaaatgtcaagtagagaattctgtttagatggggatggtcagtgaaggattttcagaagtgacatgataaacatggatatgatatatttttgcattacaaaactagttaaaattttaactccggccagtcatggtggctcacgcctgtaatctcagcgctttgggaggccacggtgggtggatcacgaggtcaggagttcgtgaccatcctgaccaacatggtgaaaaaccctgtctctactaaaaatacaaaaaattagctgggtgtggtggcacgcacctgtaatcccggctactcaggaggctgaggcaggagaatcgcttgaacccaggaggcagaggttgcagtgagccaagattgcgccactgcactccagcctgggcaatgagcaaaactcctcaaa

SEQ ID NO: 65926 - DNA, 2237 bp, Homo sapiens
tttcaagctgtggtgagctgattgtgtcactgtactccagcctaggtgacagagcaagacgaattatttttaagaggtgatttgaaaagattgactataactcactgattttcaacatcaatgtattatgaagttgtttttatgcttccaatcaagtgtatctttgagtggaagccacatagttggctctgtgtaattgacaaggttatgctgccactccttaggaataataaagtactttttcttgctttttgttttttagacatccagctctgtcacccaagctgcagtgtggtggcatgattgtagctcactgtaactttgaactcctgagctcaagggatcctcccgccttggcctcccagagtttttgcagggactatatgtgagccactgcgtctggtcaaaatgtagtttttcaagagtaatgctttaataaactgatttttttcccccatagcatttcactgttcattctgtctagtaaatgtctagctggctttgtatttcgctaggtactccctgattacctgcaattaggttaccatgtggcgaatacaaagatgaatagggcattgtgcctgtcctcactgtgcctccacaagctgctgcttgtctgggccttgggtgtacaaataactggtatgtccttggaagtcagttcggggtgggaatggtcatactattttgtattgatgacatgtgcctcggcctgattctgcatgggtcaaaggacctgtgagggcagttttcagggtgatcttggaatttaacttgatgttaaccctgttaactttgcctttaaagttttccagccaggcgtggtggctcaacgcctgtaatcccagcactttgggaggccaaggcaggcagatcacctgaggtcgggagttcaagaccagcctgtcaaacatggggaaaccccatctctactaaaaacacaaaaaattagccgggcatggtggtgggcacctgtaatcccatctgcttgggaggctgaggcagaagaattgcttgaagctgggaggaggaggttgcagtgagctgagattgcgccattgaactccagcctgggcaacgagagtgaaagtctgtcttaataataataggccaggcgcggtggcccacgcctgtattcccagcgctttgggaggccgaggtgggcggatcacgaggtcaggagatcaagaccatcctggctaacaaggtgaaactccatctctactaaaaatataaaaagttagccgggcgtggtggtgggcacctgtagtcccagctacttgggaggctgaggcaggagaatggcatgaacccgggaggtggagcttgcagtgagctgagattgcgccactgcactccagccggggcaacagagctagactccgtctcaaaataagtaaaataataataataaatttaaaaatgagccggtcatgctactcaggaggctgagatgggaggattgcttgatgccaggggcggatgttgcagtgagcagagatggcatcactggactccatcctgggtgacagtgggatcctgtctcaaaagtttcccaggcatcctcaaaattggggttgttttgggtgaatgctaaattaaaccaggctccttaccctagagctacacatcagtactaaagtagactcggggggggatggagtagtgagagtgagatcattgatcattggcactagtattaagtgctgtttcaaattacccaggtcagtttgctctcagtacttgtgtgttcttacacatgatctcattctgaggtaaaggaaattcccaggatgatggtgatgggaagtcccaggactccctttctgcagtggatttggagaacagtagtccaggttgtagcaagagaaagtacttttttttttttttttgaggcggagtcttgctctgtcacccaggttggagtgcagtggcactatctcggctcactgcatgctccacctcccgggttcacgccattctcctgcctcaccatccagagtaactgggactacaggcgcccgccaccacacctggctaatttttttgtatttttagtagagacagggtttcaccgtgttagccaggatggtctcgatctcctgacctcttgatccgcctgcctcggcctcccaaagtgctgggattacaggcgtgagccaccatgccccgccaacaggaggatttttttagtccgtttgaggtgctgtaacaaaagaccgtaagactggatggct

SEQ ID NO: 65927 - DNA, 2237 bp, Homo sapiens; identical to SEQ ID NO: 65926

SEQ ID NO: 65928 - DNA, 2237 bp, Homo sapiens; identical to SEQ ID NO: 65926

SEQ ID NO: 65929 - DNA, 2237 bp, Homo sapiens; identical to SEQ ID NO: 65926

SEQ ID NO: 65930 - DNA, 1279 bp, Homo sapiens
ccaccacacctggctgaaatgaggaaatttttaaaagtggcaaatggattatgaacatcttattcagaaataaaggtaaaaaacagctaaaatggcaaaagcagttgggttctggggaaggtggggccaggggactttttgaagccttaatatttgctttgttaaaccatgttcttgcattattaagttgtgtcatgctaagaactctattttgtcaagccagattatgatggcttaacatgagtgaaccttccagcttctcatgagatgcaaatctgacaggaatagggactcgtgttactttatggcaggtaaatagcacccttcagatacaaaattgggttggtttcgggcgtggtggcgcatgtcgtagtctcagctactacagaggctgaggtgcaaagattgagcacaggagttccaaggccagcctggccaacctagtgagacctgacctgtctgaaacatacaaccccacccgcacccccaccaaaacagggatggtgcttcctgtcccttaaggagacaagacaccaaaggagaaagtacgtagctagtgatgagtgaattgagcattgtattactgctctcatttttgtcttaagttgtcacaactaacagggaggctgagtactctgtccactgggagctggtggttccattgagggttgtgtgtgcctgctggtttgagttcctctgtccaacatcagaattgtttgtattcagatatgcaacaagatgggacttctcagtttcacaacgtaaggaagattgacaccaaactgagtttggggcttcctttgtacagttgaccattgaacaacaagggtttgaactgtgcaggttcactaatacatggattttcttctgcctctgccgcccctgagacagccagaccaacccctcctcctacttttcctcagcctactcaacatgaatactatcaggatgaacacctttatgatgattcacttctacttaatgatttttttttttttttttgagagggagtcttgctttgtcacccaggctggagtgcagtgatgcgatctcggctcactgcaacctctgcttcttgggtccaagcaaatctcctgtctcagccttccgagtagctgggactataggcacatgccaccacgcccagcttacttttgtatttttagtagagacagggtttcaccatattggtgaggctgttctcgaactcttgacctcaggtgatccacctgccttggcctcccaaagtgttgggattacaggtgtgacccaccgcgcc

SEQ ID NO: 65931 - DNA, 1279 bp, Homo sapiens; identical to SEQ ID NO: 65930

SEQ ID NO: 65932 - DNA, 1279 bp, Homo sapiens; identical to SEQ ID NO: 65930

SEQ ID NO: 65933 - DNA, 1279 bp, Homo sapiens; identical to SEQ ID NO: 65930

SEQ ID NO: 65934 - DNA, 1142 bp, Homo sapiens
agtgatgatatagaactcttttgcagaaaattttttttcttgtgccaatgacatagaaatcaagatacttttatttatttatttatttttttgagacagagtctcactctgttgcccaggctggagtgcattggcgtgatcttggctcactgtaacctctgcctcctgggttcaagcgattcttgtgcctcagcctccctagtagctgggattacaggtgcacaccaccatgcccggctaattttttgtatttttagtagagatggggtttcaccatgttgcccaggctggtctcaaactcttgagctcgggcaatccacctgcctcagcctcccaaaatgctaggattacaggcgtgagtcacgcacctggtatatgttaaacttcctatgttaaattggttgaaacctagcacagaaccaccagagattttgctgaggccagcaaaacctgcaaattttttttcttggctctgcatagtgccttgcagatcataagaaaatcccagcatctttgccttattttcccttttgtaaaacagagacagtcttgcttccttggggaatactgacgctaacatgagccttatgtacatcaccactggttggaatgtgtgcatggatggacaggttaacttctgtagattgtcagaccattcccctaagaaataagggaaaatttttgcttcacctgtcaagattaagtataaaatatgtgaggtaaatgctttattattgtaggtaaaatttcacatgtagtcagaatttacacatcaacatttccatataaagtacaataaagcttaagtagagttgagtccatcattaaatgtgttctatggggatctaaacaaagataaataagatgtccataatctagaagacatactttactgcaaaatgtcactgctaatcattaatatgtgatttgcttttctgctcaaagtactatgtatgaatattttagccaaagcctaatcctagcagaatattagcaccttgggaagacagacctcttttaatagctcataagtgaatttaattttttatttttttgagatggagtctcgctctgtcacccaggctggagtgcagtggcgtgatctcggctcagtgcaacctctgcctccttggttcacgcca

SEQ ID NO: 65935 - DNA, 1892 bp, Homo sapiens
cttcagtgggcttaagtgacctgcccacctcaacctcccaaagtgctaagattacaggtgtaagccaccatgcctgggcttaaatccttccttctatatctaaatttctgacatctattagtttgaactttgtagcttaagaactgggagagaataaaaagacaaacataaaaagatatttaagtgttagaaacatttatttgtcaaaaaatttttttaaaaaagggaggagtggagtaaaacaagggtaaatttcagctaatgctgtaccacgatcacaggtcggacataaaaaacaaacaaaacaacaaaacccccaatggtcctagcaatttcagaagagtaacttaagtgttaagagtccagagctaacagaagagtaaaaggctgcttgccactacatggtcattttaaagggaaaggagatgctgcaggtaggcagggagaaggattcaactcctagggaaagcaagataagaggggttccactgcacaggaaaaaggggatgccagcataatccttacctagggctgctcagaggctgagaatataaggaacagagtgaaaggctacagagactagtttcaggaggaaagaaaagtcaacttagaagaattaagaaagaaaacatagttggtcacaaactccttttgtttactgaaacatgaagcaatggaaacatcccggcaaaggggaccgcgcggagcaagttctcatatatgaccgcagcccgagggttcagtccgcaattatcctacctgaaagagagcacaacacaagaggcttacacaatgcctggagagcagcctggctccgcgtacaagcgccctgggtcctgtcctgtattccggggggaaaaaaaagaacaaaacaaaaccaagtcagactggatctaactcatatcccatgtaattacctaggagtctatcaatagctatatataggaatccacttatggctatatatataggacaagatgcaatctagctgaagaatgtgttggtgataaatacatctttcttatccatcttttaggcaagataacccctgtgacagaaggctactgttgctgtaacaaagggcatacatacattttcaagaactgcaatttaattttggagtccaggaaaagcagaagatgctgagatgtcatatatggcgaattgcactattctaaatgtgttttgttttaatctttcacagtaaacaagctttcagaaatgatggtcacaaggggtaggatatcaaggagcagccagtcattcacccaattccaacacacctacatgtcacactgtcacagagtgagagccacagttccagtagttcccctaattgaccaaatctcccttgccaaatcaaaagaaatcattcctagaattctctaatccttctattgatgatgggaactccagacaccaatggctgggggaaaaaaaaagttaactcacaccaagttcctctacttattacagacaaagggccaaatcttggtcttgatctgtgccaatcgacttcaaaagttgtgacgttcttggatcagttctgctagggtgagacccgaatttggatccccaacagttctggagtatttcatcctggcagcctcattaacatcaggctcctgggactgcaaccaactcagggttattcagtccatttgaggttcacacctggaaggtaagtttctttaaaagtcatcgctaaaaagaggttagttgaacaaccactgcttgcagtcaaaattcattttaaaatgtcctagcaataccttttgaagaccacaatatatgaatttaatatttaactttgaaacataagagacaggttatctgatagatttataccagcttacttcggaagcatgtcccaccccatgctagatccagct

SEQ ID NO: 65936 - DNA, 1016 bp, Homo sapiens
atgtatgtatgccctttgttacagcaacagtagccttctgtcacaggggttatcttgcctaaaagatggataagaaagatgtatttatcaccaacacattcttcagctagattgcatcttgtcctatatatatagccataagtggattcctatatatagctattgatagactcctaggtaattacatgggatatgagttagatccagtctgacttggttttgttttgttcttttttttccccccggaatacaggacaggacccagggcgcttgtacgcggagccaggctgctctccaggcattgtgtaagcctcttgtgttgtgctctctttcaggtaggataattgcggactgaaccctcgggctgcggtcatatatgagaacttgctccgcgcggtcccctttgccgggatgtttccattgcttcatgtttcagtaaacaaaaggagtttgtgaccaactatgttttctttcttaattcttctaagttgacttttctttcctcctgaaactagtctctgtagcctttcactctgttccttatattctcagcctctgagcagccctaggtaaggattatgctggcatcccctttttcctgtgcagtggaacccctcttatcttgctttccctaggagttgaatccttctccctgcctacctgcagcatctcctttccctttaaaatgaccatgtagtggcaagcagccttttactcttctgttagctctggactcttaacacttaagttactcttctgaaattgctaggaccattgggggttttgttgttttgtttgttttttatgtccgacctgtgatcgtggtacagcattagctgaaatttacccttgttttactccactcctcccttttttaaaaaaattttttgacaaataaatgtttctaacacttaaatatctttttatgtttgtctttttattctctcccagttcttaagctacaaagttcaaactaatagatgtcagaaatttagatatagaaggaaggatttaag

SEQ ID NO: 65937 - DNA, 1363 bp, Homo sapiens
tgcttcacacataaacacagactagctgcatggtggtctcaagagatctcaagtcttgctgacatgcatatagggtacaacttattacaggttcataacatttgcttctcaattcacataaaagagcaaattgctgtggctttgctttttaatttttttttttttttttaagagagagaggagccactcttgcccaggctggagtgcagtggctaactgcagtctctcactcctgggctcaagggatcctccagcctcagcttcctgaatagttgggactacaggcacaagccactgtacacagctgctttgttatcttctacatatataccaaagggataagttaggaacaccagaaactcagtagtaactcactttaaccttgcttctggggctccaattcaagtgatgctcaatttcaaggtacaaggaaaaccatgagaatataaagtcataatgccatttccactcagatgaaaagatttatctatctttagatactcaaaattattcttggcattttagcacttttggtacacatttcctgatgtaggaaatagtaaaatttcagagcctatggcattggctttcaccacctatgcaattttctacacatctgaaaattaccagtttatctaactccttaaatgttcctctcttcaacaacaaaaaacacaaacaaaaattgctggaagaaacaggaagcatccaggtccaaatgacagcataacagactatgaagaaacagggcttaagtgcccatctagaacaagatggtctagattacaataaggaccccatgggacagaacatcaaaacattcaactttcaagtaaatgtcttggaagtaaacatttaaaatttataggacttcctctggcatgtaggtatgatattagaagagtttcctttgacaaaggacaatgacccaagaagtaggtttttttttttttttaaataaaggagagacagtctcactctgttgcccaggctggaatacagtggtgtgatcatagctcactgcagcctcttttaactcctgggctcaagcaatccttccaacctcagcattctgagtagctgggatcacaggtgctccccatcacaccctgctaatttaattttctttgtagagacagggtcttgctatgttgcctaggctggtcttgaactcctgggctcaagtgatcctcccgcctcagcctcccagtgttaggattacaggagtgagccactgcctctgccttcaggtagcaattttattagcaaactataagcctaaagtaatagttaaaattctcactgtgatattcattactaacccctgaacctgtacccttcagcttaccactacagtacttct

SEQ ID NO: 65938 - DNA, 1723 bp, Homo sapiens
actgtggggagcatggctgcagcacgacgcagtgggctcctgtcccttccatagtaggaggaagtggtggctgcagcagcagccatagcagctgaagtggcagcagcgccagagtttggcaataggtgtctgtcatagggatcaacagaagtagagttgaggtggctggtcacagttgtgctttggacttgaggcagatgggacatggtctgctctgcgtagttgtatgcagaagccgctgccgccgctgctactgcctcataagagcggacccggtatcgcttatagtagtcgagtgctccatatgcatcgttgtaatacatggattccccgtagcccatggtgtaaggtgttcgaactgctccatattgttcattatactgctcagtaaagtctgccacacgacccgtacgatctactgggcactctttggaccagtgcccttctttcccacaccgatagcagccactctggtctcccataccaggggcagtccgaagccggcttgtggacaactgcacatgcattcttttgccttgagggaacagatgtaagaagatttattttaactcacttgacattctttttcctctcctccccaaatgaaagtaaattagttgtcataagacacatagacgcacacacctgtgaccctatttcagcaacctcctttaaaaagtagttgaagtttttttgtttttttttttgagacggagtttccctcctgttgcccaggctggagtgcagtggcacaatctcagctcaccgcaacctccacctcccggattcaagcaattctcctgcctcagcctcccgagtagctgggattacaggcatgcgctgccatgcctggctaattttgtatttttagtagagacagggtttctccatgttggtcaggctggtctcaaactcccgaccttgggtgatccgcccgccttggcctcccaaagtgttgggattacaggcatgcgccattgcgccctgccagtagttgaagtttaatacagatgagagctagaaaatttgattcctcagagaccagtcaatactttctacttaggccaggaatagaccagactccctcctgtttctgtctccacaactttcctttttccccttatacacaacaattggaaaagtttccacttctcactaagattgttattacttgtaatgattcaaattctgccaatacttccaaaatcaaccaacaaaacctcagttaagccagatttggacggcatcttgcccatctctcactgactgactaaggattaaggcctgagtatttactactgcttaaaaaccacatcaatagtccgtccatcttgtttcctctagctatttttgcagatgtcaccagaaggctccaatgatgggtacacaaaccatacctggcttgtcatctgcttcatctctagtatctctgggagttataagacctttcagatttcagtttagcccaccacccacccccgacccccccaaggctactgtggaaagctacctgaccaaggtctctcaacaagaagaattagatcttgaaacagtactgctttcttagggacagtgtcttgacatgtaatgaaatgactgtcatttcatcctgccatgtaacttacaatttttatagggattaactactagttagaaaaatgcagcatttgcctagagacctctaggaacccacacaaatgggccacatccattttggcttcca

SEQ ID NO: 65939 - DNA, 1049 bp, Homo sapiens
aactgctaggagacaggccgcatccactatcaccaatagagtcagcagatacccaaaatggcactaaatctctaaaagcattttgccatcccattgttttcagagatttaaatgctcctaattgttagatgttaggggccacaatgctaactgtgctttgaacagaaacacagatttctgccacaatttatatctcaaatgcatagttccctataatttagactaaaagattataaatgacttggctttcaaatatacatggtgacattaagctatgtgacagacacaaagtatactccaattgtgaagtcagagtgaccatgacagtctaaaaaggagccaatccagagacctaaaagtaacatttttaacaaaaaaattcaattaaatttgcactttacttttatagattctgggtccattttttggagaaacaaaacccagcaattttaccttgatgttttttaactaaatccaatcttcattcctgcttttatttagagggtgggaaatcaagtttatctgtggtaaaatctacctctgtgtagttgtgaaaaggatgcaggtatcaatttttttgttgcgtttgtttgatttttgagacgtagttttgctctgtcgcccaggctggagtgcagtggcgaaatctcggctcactgcaacctccacctcgcgggttcaagcaattccctgcctcagcctcccgagtagctgagattacaggcacctgccaccattggtgtggttttaaagcaatttttgtatttttagcagagatggggtttcaccatcttggccaggctagtcttgaactcctgacttcgtgatccacccgcctcagccccctcaaagtgctgggattacaggcgtgaccactgcacccggcccaattttttaacctagaactaaaaaaatctataataggggtgacgagtttaaaaaaattttttcaaacagtttctccaagctgggtgtggtagctcatatctgtaatcccagcactttgggaggctgaggtgagccaatcacctgaggccagaagttcgaga

SEQ ID NO: 65940 - DNA, 1051 bp, Homo sapiens
cctgcctcagcctcccgagtagctgggactgcaggcgcacgctaccacacctggctaatttcttctatttttagtggagacgaggtttcaccatgttggccaggctggtctcgaactcctgacctcaggtgatccgcctgtctcggcctcccaaagggctgggattacaggcatgagccaccacatccagcctagcctttaaatttaaataccctaaagtttttatagtaattgaaaaagactatgcctctctattattataccttaaggaaccagggcaaagaaaaatgaaagattaattcttctactctactacacttggacaaagtaggccaaaagcttaaaatttcctgggacttccaaaagttactgaagtttgttgccaacattttccagaaaaccagccctataagtgttttattttgaaagctgtaacagaaaagagcattaaaatgctgagaagtgggaaacttggggtcttaatttctgagcgcctatcaagtgccatgatccagaaaagactggggatgtagctaatacagagtagtattctgacttaatgcttgtttacatatagggaaaaaaaaaaaagacacctgaactctcacacattcttcccaattaagctgcctgattgttatttgggaatagcttctttaggtcttccaatacaaactatgtgtctaaggaaataagttgagttcactgctggctgtaaaaaggaaacagatcctgaaagagtaaagtaaactcagattccgctacttccttttagaagtcatacaatgcaaaaagcctcaatggcagccattaacatatagaaataaaggttcaaaagatgttcaagtggcacttttttgttggttcatttttgagactaagtcttgctctgctgcccaggctagagtgcggtggcacggtcttgactcactgcaacctccgcctctgggttcaagtgattctcctgcctcagcctcctgagtagccgggattacaggtgtgtgccaccatacctagctaatttttgtatttttagtagagacagggtttc

SEQ ID NO: 65941 - DNA, 1057 bp, Homo sapiens
attaataccacaagaggttgtcagaagactctagaactgtgctaatatggtaaccacatgcggcttagtaaattgaaattaacagattagataaaatttaaaattcagtttttcaagtgtataccagacacgtttcaagcactcagtagtcatgaggcctgtggctaccgtattaatagagacacagaacatttccatcatcatagaacattcttttggatagcactgttctacaagtgttttgttaacagtatcgtcttggacctcatgttcatagccacttttgtggttcctaagtcaacaccttttttgccctgagtgtcattaaaggggttgttaagaagtacttttgggtcttctattaaaactaaaaaacaaaatgagaaaaataatgggagaagaggaaaagttgaccagagaagggtaagaaagtttgcatagtggagatgggtagaggagcaccatcaagtatctccagcttcagccagtgatgccttggcctttagctgctctttaaagcatagggcaaaggttgcagatacttcctaccattaactagtgtgtgaccttggacaagtgttttaacatttctctgcttcattttcctcactaagattgtccccacttatggagttaatgatccctactgtacctccctcacaggattgtagtggggctagaatgaagaaatcgatgtgaaagtgttttgatagtaaaagctctttatgatgacaggtgattgctctttgcaaccatgagtgtttctattctggttagaaaattattgaaagtgtgatagcgaagctttccttattggtttgcttttcttacatttgtttttctttttcttattttggaatgttgttgcattttcagcttttaaaagtatcttaattattttcatttgatgggggaaatcatcatgatggacagtggagactggggaaggagggttttctcctgacaggtaatgagcaaaatgtaaaagaatgtaaagttgggtacaaactgcagaggtattctagtaatgtcatacagaatgcccttaccttttaaa

SEQ ID NO: 65942 - DNA, 1049 bp, Homo sapiens
aataattttctaaccagaatagaaacactcatggttgcaaagagcaatcacctgtcatcataaagagcttttactatcaaaacactttcacatcgatttcttcattctagccccactacaatcctgtgagggaggtacagtagggatcattaactccataagtggggacaatcttagtgaggaaaatgaagcagagaaatgttaaaacacttgtccaaggtcacacactagttaatggtaggaagtatctgcaacctttgccctatgctttaaagagcagctaaaggccaaggcatcactggctgaagctggagatacttgatggtgctcctctacccatctccactatgcaaactttcttacccttctctggtcaacttttcctcttctcccattatttttctcattttgttttttagttttaatagaagacccaaaagtacttcttaacaacccctttaatgacactcagggcaaaaaaggtgttgacttaggaaccacaaaagtggctatgaacatgaggtccaagacgatactgttaacaaaacacttgtagaacagtgctatccaaaagaatgttctatgatgatggaaatgttctgtgtctctattaatacggtagccacaggcctcatgactactgagtgcttgaaacgtgtctggtatacacttgaaaaactgaattttaaattttatctaatctgttaatttcaatttactaagccgcatgtggttaccatattagcacagttctagagtcttctgacaacctcttgtggtattaatgacaacatatgtacctttattatcggtataaatagtatgatatgctctacgatgcttgtactgaaatttcttcagaagcgggaccatcattcccattgagtctgatatatttagaaatttccttttctgagggtgaaatgaacaggtggagcagaacactccatggcatgtttttttgactctgcttgaagagactgcacaactttgatcaacaaaaagatactcccgcagatccagacttgccacccagatttataatatag

SEQ ID NO: 65943 - DNA, 2244 bp, Homo sapiens
ctggcttccacgttgatgttcaccccatgaagcttgtaatggtgcaggttgcgtatggcatcctcagctgccgtcttgtcttctatgtgcacaaagccgtaattcttaatgatgtcacattccagcaccttcccatactgctcgaagagtgagcgaatctcctgctctgtagcctcccggggaaggtttccgatgaacagcttcaccatcctgacaagagcctgggagagaaacacaagacttcaaaagtcaggggtgtggtgggaaatttcggtgcactgcagcattttcgtctaatcctccaaagttcttgcaccttcaagaccctcgtacagacattcattattcttcctcaatagaagaagggcggtttgttctcgagaagtgcgagctatgcgtgacatgcaaacaggaggtcgagggtcagcatgcatagcccagtctatcatctccgtgaagtggagcgcaatgaaataccagaattagctgcttcatgtcttaaaatgagggaagagaaaagcccaagcaaaggcaaggggcatcaatcgcagtgcgcctggtaacaaggttttggagggaaatctgtgtacctctcctgcgcgcactagcgcctttcaagatactctaaaaagaaaaaagtcccctttcccccaaaccggggaccaaccacctcgcccccagcggcccaccctccagcttcttcgccccaacaaagactcgacccgacccctgccccgcctccttccggagacccggccccgcctcctcccgttgtcttcccagacctcccgctgcaaaatgagaaacccaaatccgggccgtgcagtctgccggaggcccggcccgacccgcccccgagctccccacatcacacacacacgaccccctcgcacctccgggtggcggcagcgacggcggctcccacgtcagagagaaccttacaaaatggcgacggccgctcgagcctggacgcgaccgggccctttctcgcgcgccagctcacgcacgcgcgagtgcgcgctgcttccctccccttcccctcgcgggagccgagtgaccaatcccgaggctgcatacaaatgaccacgcagcacgggggcggggcctgttggtggtggcgcggcgccgcggaggtcagcccacccccagccccagccagccagtcaccaccctggaaagggtcgccactgctgcgtcagaggggctctgaacgcaaccactgcctagaaaagcggaggccttggggagtcgctcaccacaatgggtcctgctcttgggccctttgaggggggcggggagctaatgacagaggaatctccccgagggccctaaaaaggggcttttgtagcgggctggccggcttctgtggcagcttggggcaacatttcaaaaatacaggtgcgccacattttaagcaaaactagtcattgttttgtagcgctttaaacattattttaaagtttgtcattgcagaggtgttatttattgctacggaaactgagaaccaaggggcagaaagataacctggcagaactgggacaggcctaagaggcattgctacccaggctacgcttagtcatgttttgtttgctcgtgagtatccgtggtctgattctctctcactcattgtgtgtccatcacagtcctggtctgtggtgagcacgccagaggaatacttggtggagaggcccagcgaggtccctagttctgggtgggacagggtctcctcgtacacaccaagctggaagtctaggcaactgagtttcccgactgtctagcattcaaaattcagctgtggtccaagggcacctcctggcggtaaaaacaagcttaggcgtgccaggtgcggcggctcacgcctataatcccagcactttgggaggccaaggcgggcggatcacgagttcaggagttcgacaccagcttggccaacatggtgaaaccccgtgtctactaaaaatacaaaaaatagcccggcgtggtggcgggcgcctgtaatcccaactactcgggaggctgaggcaggagaatcgttggaacccgggaggcggaggttgcagtgagccgagatggcgtcactgcactccagcctgggtgacagagcaagactcggtctcaaaaaaaaaaaaaaaagaagtttaggctgattccccactgtcaccttccagcaaagagtagccttttatggagattgatggattgggtttatctcctagtagagcccgccagggaggttgtcagcca

SEQ ID NO: 65944 - DNA, 1124 bp, Homo sapiens
ctgagctgtttaatcacctccttggccagactcaaggcggtggctgtccccgaacaacacacctggaagccattgagagcagctggagatggagtggcagctggagttacagggtgggggtggggagggagggctcctgcgcctctgactgtcatctggcacttctgcccccagggcctgcttcagctctgagaggttcctggctggtctgaggggtgaggaaccagaaggcagaaggcgagtgccctcgcatggcaggagaatgaccctgaggcaggggcagccactccccacatggcctatgttgagggtgcggcactgtccacaccgtggtgagggacagaggcacgaggctggggaaaggggagaagtcggcgggggtgggagagggggttacctgggtcccaccaccagtctggaattaaacagcagaagagaagggctgcccttgggaacatggactcgtccccagtgacagttcctggtgatgggttgaccttggcaacagaccctagcagcaggcagttgtcctgacaagagggcggtccctgtcgactgtccctggcagtttcctgaacggagggagggagttggcctgggaccttgcccccaactacttgttcttcttaaagaagctgaagcgtttttctcgctctcgttctctgccgtctttgctgcggagcacaacaggcccctcagccccgacgggtgacactgggggcatggtcatggcccgggtcatgccccgggtggtgctgggcaccaccggctcttcaggctctccagaggcagaagacgctgtggcaatggctgcattcaccacccgtagccacgagctcatctctgcctgtggatggaaagaccctcaatcagcttcaaggacactgtgctgagttggccgcagtggacagcagggaagtgtaagaggaggaggcagaaagtgagctgactgtttcatgctattaggagaatgtggccggcttagacagggagtgcggcctggtgcggccgtcgcacacatccagtcttaccacaaaggacaagaccaggaaaaagagggaggacagggaaagaaggggagtctgcagctggaagcttctggaatggcacggacagagaggaac

SEQ ID NO: 65945 - DNA, 1036 bp, Homo sapiens
ccaaggatgaggtgagctgtccttcgtgttcctctctgtccgtgccattccagaagcttccagctgcagactccccttctttccctgtcctccctctttttcctggtcttgtcctttgtggtaagactggatgtgtgcgacggccgcaccaggccgcactccctgtctaagccggccacattctcctaatagcatgaaacagtcagctcactttctgcctcctcctcttacacttccctgctgtccactgcggccaactcagcacagtgtccttgaagctgattgagggtctttccatccacaggcagagatgagctcgtggctacgggtggtgaatgcagccattgccacagcgtcttctgcctctggagagcctgaagagccggtggtgcccagcaccacccggggcatgacccgggccatgaccatgcccccagtgtcacccgtcggggctgaggggcctgttgtgctccgcagcaaagacggcagagaacgagagcgagaaaaacgcttcagcttctttaagaagaacaagtagttgggggcaaggtcccaggccaactccctccctccgttcaggaaactgccagggacagtcgacagggaccgccctcttgtcaggacaactgcctgctgctagggtctgttgccaaggtcaacccatcaccaggaactgtcactggggacgagtccatgttcccaagggcagcccttctcttctgctgtttaattccagactggtggtgggacccaggtaaccccctctcccacccccgccgacttctcccctttccccagcctcgtgcctctgtccctcaccacggtgtggacagtgccgcaccctcaacataggccatgtggggagtggctgcccctgcctcagggtcattctcctgccatgcgagggcactcgccttctgccttctggttcctcacccctcagaccagccaggaacctctcagagctgaagcaggccctgggggcagaagtgccagatgacagtcagaggcgcaggagccctccctccccaccccc

SEQ ID NO: 65946 - DNA, 1159 bp, Homo sapiens
cacaggtcaggggagcaggttggagtgggcatccggggtcctgtgtccctcaccgcagtaagcttctccagcgcacagaatcgctcctcccaggccactgctgacttctggaaggcctcgtgccgcttgatgaggctctcaacttcgtcgaccgtgcaacccagctcagcgctgcgcaccagtggctcctggctgcagagccaggcctctgccatccctgcatctcttccaaacacaagcacctccaaaactggcaggatcgggggttgcaggaagatggtgggtcagagtggccactggcagggcacagtggccatggcaacctcaagaacagggacacagagaaagccactgccccagagctgtgccaggcagcacgaagattgggcatcgtgagtttcacacccagggttcctagtctcacctactctggaacccacagggtgcaggatgccccccactccccacagggcctggggcccccttggcagctcacccagctgaagccagtccatcttctcctgccacttctcagctgtctcctggcgccgtgcctgcagctgagacagcttctctgagatctgggggcggggggcagagatatgagttagcaccaggatgtgagatctttccacggcccctggggagtcatccagggggacaggtgatttctttctttctttcttttttttgagacggagtttcgctcttatcaccaaggctggaatgcagtggcgcaatctcagctcactgcaacctccacctcccaggttcaagcaattctcctgcctcagcctccgagtagctgggattacaggtgcccgccaccacgcccggctaatttttgtgtttttagtggaaacggggtttcaccatgtttcatcacagcccagccacacaacccatggaggccaggctggtctcgaactcgtgacctcaggtgatctgcccgcctgggcctcccaaagtgctgggattacaggcgtgagccaccatgcctggcccaggaccagtgatttctgatgtcaagaggcagacggttctggggagagatttccagaatgcgagaaacccgtgaatggcactgaggggagagaatgaaaggtttcttgcaaagagagaatgagaggaagcagaaagccaccaagaagtcagcgtt

SEQ ID NO: 65947 - DNA, 1217 bp, Homo sapiens
ccgtctcaaaaagaaagaaaacatctctggcaggggacatctagccactgcattcacacttttgatgacaagcccccttgagagcccatgatgtcttcaggggttcccagtggccaggagactcttcatgctgcgctaaatcagcctgttagtgcttcccaggcttgagctctaggctcacactcagtaagcatggatccttccttcaaccactagaacccatcagcccctgcctgaatccccttttcaggctaagtagcacgttctagcaatctccaaggtctatcacatcctagacaggcctctgaaagttcaactggccaatggctcttttccagatcctcccccagttaagcccaggtgtctagatgagacccaacagggcagagtgtggccagcccctgccttcatctttcccagcacccccactccctggctcctccccctgcttctttggctgtgagacaggcaggaggtgagagtggcagccaggactgaggcaggctgcggctccttggagtcccccgctctgcctgactctgacccggggctccgcaggtccagcaggtgcaggacgacggccaccggctccagaaggcctacgctggagacaaggctgaggagatcggccgccacatgcaggccgtggccgaggcctgggcccagcttcagggaagctctgccgcccgccggcagctgctgctggacaccacagacaagttccgcttcttcaaggctgtccgggaactgatgctctggatggatgaggtcaacctgcagatggatgcccaggagcgtccccggtgagaatcccagggctcagggcctccacgggttgtgtggctgggctgtgatggggctgtgggcagcaggtgatgctgtttctgcctccccccagggatgtgtcctccgcggatctagtcatcaagaaccagcaaggcatcaaggcagagatagaggcccgggcagaccgcttctcctcctgcatcgacatggggaaggagctgctggccaggagccactatgcggccgaggaggtgggtgaggcctgggtggccgggccattctcactgtgcagtgctgaacgctgacttcttggtggctttctgcttcctctcattctctctttgcaagaaacctttcattctctcccctcagtgccattcacgggtttctcgcattctggaaatctctccccagaaccgtctgcctcttga

SEQ ID NO: 65948 - DNA, 1045 bp, Homo sapiens
gttgaggtcgcggccagtcccgtccggaagctgctgctgcttgtgctgcacccgcgccagggcttggcgtgccccgtgcaggaagcgctgcagctcgtacgccgcggccagcacctgaccccgtgtgtccagcagctcaagcaggtcagcccaggcctcgttgagactgtccttccactcggccacggtggcccgtgcagcatggcccccagcaatgagcccattggccagcgcattggcgctatctacgcgctcctgaccgatggtgcttgtgtcccgggagaactctcggaatttgtctcggagcatctggtagaggaagcagatggacagaccatgccgtgatgttaggggatgtggtccctgcctgatggagcgagtcctccactccaaactcagaacccacctctccccgctgcatgggggccgggacaggtttcttccctgtggttaaggagtaggtgcagctgcttcccactgaccctgtatttgacagactccctccacccccagcaaaggcgtttcaaggtgcttgggacccttaggcttcagacaaggataccctaactatggtccatatttctgtacgactgagggtccaagcccccaaactgtcgggggggtggatcatactccgttttgttgaattctgttgaaaagtgtgagtgataatttcctgtttgcccttgtctcagctcagcttcatgtcccctttctgtacaattcttcaaattgtgtgtgtgtgtatgtatttagagatgatagggtcttgctctggagtgcactagcgcaatcactgcagtgtcgacctcccaggctcaagagatcctcccacctcagcctcctaagtagttgggcctacaggcatgcacggctgtgcctggctaataaaaaaaaattttttttgtagagatggggggtctcactatgttgcccaggctggtcttgaactcctggactcaagcaatcctcccatctcagcctcccaaggtgctaggattacaggtgtgagcctatgcccggcctcttcaaatcatatacctca

SEQ ID NO: 65949 - DNA, 1191 bp, Homo sapiens
cccaggtgtccccactcccactaatcagtccctgctgcttgccttgccctctgggcctccactgaccccctcttcctcttccagttgtgggtgacagagcggctgcccatggccagctccatggagcatggcaaggacctgcccagcgtccagcttctcatgaagaaaaaccaggtgaggcagaggctgaaggcaaaagagaagttcccaggagcctgcccagacttggacgtgttttttcttaagaccaggcccccctcgatgctgagtgtaaccctggacttcagtggctgtctttcctcaccttgggagggtgggtcctctcagtaggagatagtgggggctgggcggctgacgggtgttaccatcgcacccccaggctaggagagggagcagaggacccaggaaggagagaggcacaggggtgaagggtggtctccgggagcacgtggggctggggcaggactttcagcattttctcttctgtggccatgggcagaccctgcagaaagagattcagggccatgagccccggatcgcggacctgagggagcggcagcgtgctctaggtgcagcagcagcaggtccagagctggctgagctgcaggaaatgtggaaacgcctgggccacgagctggaacttcgagggaagcgactggaggatgccctgcgagcccagcagttctaccgcgatgccgccgaggcggaggcctggatgggcgagcaggaattacacatgatgggccaggagaaggccaaggtgagggccaggacagagcccagtgtatgtgaccagttctgccctcccctgacctgatgctggatgccactgtcccttcccccaggatgagctgagtgcccaggcagaggtgaagaagcaccaggtgctggagcaagccctggccgactacgcgcagaccatccaccagctggcggccagcagccaggacatgattgaccacgagcacccagagaggtgggtgcagcggcagcccggcccagcctgggggtggagccggctgcaggaacaggaaggtgcagggaatgtggagccttcagtgctgtgtgcacggagccttctagaaagctggaacacagggtgggcgagctgttgggagactcagagggacagggctccacagaacagaccggaggtcagagctacacccctaagtcccacagtgcctccct

SEQ ID NO: 65950 - DNA, 1015 bp, Homo sapiens
tcaagcgcatcgccgctcggcagcacaacgtggcacggctctgggacttcttgcggcagatggtggccgcccggcgggagcggctcctcctcaacctggagctgcagaaggtgttccaggacctgctctacctcatggactggatggaagagatgaaggtaccagtgaggcgtgctgggtggggtaagagtgatcaagagtcgagggggccccacagtgggtgcgtccgcccgtctgctcggccgatctctgtggagtgtgaaccagcacagggccctgtccccagttgcagggaacaaagtaaacagggccctgtccacatggggttcgtgtccacatggaggaggctgatgacaaaacccacggacctttccgtaaacaaaagagcaggggccataaaaccactgatgaaactggaacagggtggtgtgaggggctggtcagacaaggcctctgagaaaataccatttaagccgagaccagaatagtgccaggagccagcacagagagctctcaggagagaatgttccgggcagaaggaacagccggcacaggccctcggcctggatcagcatggtgtgttcaggatcagaaggaaggccggtgggctgtgagcatgaggagtgggggccatggactgagatttgggagggcacggccagcccactagggccttacaggcctggtcagggagtttggattttattcaaagtaacatggatcctttaaagtgatttgaaggggccaggcgcagtggctcatgcctgtaatcccagctctttgggaggccaaggcaggcagatcacttgaggtcaggagttcaagaccagcctggccaacatggtgaaaccccgtgtctataaaaatacagaaattaaccaggtgcggtggtagcgcatgcctgtagtcccagctactcaggaggctgagacagcagaatcgcttgaacccaggaggcggaggttgcagtgagccaagattgcaccactgcactccagcctaggtgatagagcaa

SEQ ID NO: 65951 - DNA, 1009 bp, Homo sapiens
acctggagatggtgctgagagctggcctctgtccccactgagctgcagggatcacagggcccatcgatctgagcatcctaggttcaggaggcttagttcataccttccgtcccactgcccctcaatccattgacttcttaaacattattctagcctaaaagtccatgatccatccccacatagcaatgctgtttcttttcttgcttttcttccccaaacaactgattttggtctccacggggaactctgggtaaaagcttccttgtgcttctggggtttgtgctctgcttggagggcccttcttgtttccaggagaaggggaaaaaaagatgagctttttggtgcccttttcatttgaatgggtaagttgtcattttgctctaaaaggagatggagagatgtcagccttggaggactgggcaggcccagggtttggggtaagtgatgcaagttatggatgaacttctgggaggcctgacccaaatggtcctctcttgcagacgtgaatgtggaccagccagatgagaagtcaatcattacctatgtggctacttactaccattacttctccaagatgaaggccctggccgtggaaggcaagagaattggcaaggtactgtccatgggcagtaggcataaaggccagaggaggcccggctgaggggtcttactgccctagtgcaagggcagggtggagctgcaggactgggccagggaccctgtggctgggactgtcacgtccctgtcttctgcctcccaggtgctggaccatgccatggaggcagagcgcctggtggagaaatacgagtccctggcctcggagctgctgcagtggatcgagcaaacgatcgtgaccctcaatgaccggcagttggccaactcccttagcggggtccagaaccagctgcagtccttcaactcctaccgcaccgtggagaagccgcccaagtaggtgtccctggggccccacccttccctgagctgtgctcccacgagaggaagcctaaat

SEQ ID NO: 65952 - DNA, 1507 bp, Homo sapiens
cctccactcagacacacccattcttcagcatcctaccctaatctgctgcctcaaatcccttgcacccagtgttttgtggtccctggcctaggttgaaaggacctcaggctatgcctgtccaccccattaccacagtctaaagagcagtttcctgccatttatctgagcatctctgataacaccaggagttcctgtccagggactgagggccctgcttgcttccttcctagatccaagacatcagtgtggagacagaagacaacaaggagaagaagtcagccaaggatgccctgcttctgtggtgccagatgaagactgcagggtgaggacaccctgggcgtgtggcactggagggtcagtgacccccaggctgtgctgggctccaggaaccatgagctggtgactgccctggagtcatagaacagagctcagccctactcaccattttctgaatctctgtttatagttatcccaacgtcaatgtacacaacttcaccaccagctggagagatggactagctttcaacgccatcgtgcataaacaccggtgagaagatggggttagcaaacgcagcagagctgctgggtcggctaatgacctggggtgcacatgtggagacagagatgagatgagctgcacagcagtcagacggaaggaatagcactcggagcagaaccagaacatgggggtgcagggctgcgcagagcacttgtgatgggaagcaggggaggtggtgtggggaggggctgtgagcagcagtgtgggtttgggatgcctacttctggacaaaattgggtcggtgacttagggataaagattggtgtgggtttcctcttcctcttcgagatctcacatgtttctgatcccttctgtcttgcctccccacccaggccagacctgctggattttgagtctctgaagaagtgtaatgcacactataatctgcagaatgcattcaatctggctgaaaaggaactgggacttaccaagctgctggatcccgaaggtggggccagagctatgtgaaaaagaggtggtagggtagagacaggaggtggaccagtggttgccaggggctgcggagggggaagacatggagtaaccaccaactgatacaggggcttctttggtgggggaagagaatgttctggaattagaaagtggtgatggttacacaaccttgtaaatatactgaaaaacacgtggttgctcacacccagcactttgggaggccaaggcaggaggatcacttgagcctaggagtttggtaccagcctgggcaacatagtgagaccccatgactacccctcccccccaaaaaaaatatatatctttacactgaaaaccactgaattatatacattgaaaggttgaattttatggtgtgacaatcatttctcaggttttttttttttttaacaaaagactgtaggtaggaagaaaggcagcccagtgacagaaagagccctggactgtgggttgtgtcccaggcagagcacagaggag

SEQ ID NO: 65953 - DNA, 1053 bp, Homo sapiens
gatgttttttacaaatacaggtttccaagcccctccctagacacaataagttagaatcttggtccagaactcaggatttttcaaaagctccccaagtgattcttttgagccagctcagcaccagtctgaggacccccttgtggcagccatagcttcccaggaccccttctcattttctcctgggcctctctgtccttctggttgggtcttcaggccggctgtgaaacactcctaccagtgtgtctatacatcagagaagacagaaggtgtgggttatggagaatgtcatgtttggggaaaatgttcctggcactctggttttggattcatgtagcctctagaactgtcatgatgtctatgtgtgtacaacatgtgccacccaccatgtttgcacacatgacaaatgccatccaggactgtcaccatgcctgtgtacataggacacatgcctcccaggactctcaccatgcctgtgtacataggacacatgccacccaggactgtcaccatgtctggctgcacataacttgggccacccagcactgtcaccatgtctgtgcacacatctgtgtgacctcgtgctctcattgggtgtttatctccaccactgaactgggctctcctgaagaggcagctctgcatgggatttgcctagcactgtgtctccagccagtaggtgtcaaataaacactgaatgaatgaagatgaggaagggcaagtgtaggctgcacatgacaaacgctgaagcccagaggaagggcgcctggtatatgtgcccagcagcggggcgtctgggggcagggatggcctggtggaggatggccctggtgggccagagggcagggaaggggctggcactggaggtggtgataagcaagtggaaaggatggtaacagccctcgtttcacagatgagggagtgaaggaaaatgcctcgcacagtgcctggcttttcctctttgaggatttcctcgtttccagatttctctttgtctgtttctgagctggggctcaaagcccacacatcctggagaaggacctcccagagtcaccc

SEQ ID NO: 65954 - DNA, 1061 bp, Homo sapiens
ttcatcaggagcaggatgtggtgagaggaagaattaggatacaaggcagcctgtagcccagggtataggatttctagcttaacatgtcagctgaaagagaggaaaactgccctggaggatcggcacggtgagcctagtctgcctccagcagcgcctggagtacattccagcaggaccccaagcctgcagccggcgggggttggcattcttctagcactaacagtgtaagctacttgggcctggccttgaggtcaattgctaagaataaggtatgatgagactgtaatctggattagctactgcaccaccctattgccagacttcaggaatctgtggaagagaggacgattgaggattctccagcttcctcatgacagggggtcatgaagctggggggctgctggccgactgaggaaatgtgagcatggagaccctggtcataggtgaggaatgatctactcagtggcaagaaaccagcgctggatatgtgtaggagaaaagcaaatagaaatcagtgggaatctagagatggcagcaggggacacaagctgagaacacagcatattgtccaaaaggccagggagctacagagccagaatgcttggaaaccaagacctagagacacaaaggtagcagagcctcagagccacatgctgaacaatgccagagagcaccattcacatggaaggctgtggagttgcaacatggtggccctgtgggggtctgtgatctaaggacaccagtgccagcttggttcctgatccatatcacagcatttctggaaactcagaacacacagcatgcatgcttcaaattcaatttggagagaggagcatttaagtggctgaggttttatttgggggaagaggaggttctagctccatactttctcctggtaatggtaggaatccgcagagacattctaacagttggacttccctggagggtctggctcccagttgggcccctttgtaactttaacaaaacccccaattctgcatttctcctgagccctacttcctaccaccagggctgtggtcttggcagtctctggttctgga

SEQ ID NO: 65955 - DNA, 1009 bp, Homo sapiens
ctcccacaactttaccctggccaaactcaggttaggcatcaatactgctgaggacgggggtgtggacccaacataaacccaatgtcttgagatgacctgaatggaaggcattagctgaggcaagggcatcctggaagtaaactctggagacaccaaaatttaagcaagactagctctggttggggaagcaggggacagtgctctctgatccacaccaaatactgctgggggttcccagggaactccttggacgttggcaatcaacccttagaggccacctagctctatgtttccattttactgatgagaaaacacacccagagagatgacatttcacgtgtccagatcacaccctgagcccgctgactccctgccccaatgtcctggactgcctgtgcctacttttcccttcagcctttaagactcacccaggacaaccttcagcccatctgccaggtcacaagggcaatccatagagagctgcatcagtgggcccaggaaaagaatctgagggcaagaaaacactttcaccataacccaccgcttttgcccagacctttgcccatgctccctgagactccaagcttgaaatcctctccagccacgatttccagaccatgcataccggaggaccctggggccatctcaaaagtcctgtctcccatcaaccaaaaaccaaaaacaagagtccacggcactgcccatcaggctgataacaaagaccagaagaaaaaatacagcaggagcactcaccatggtcagcaacaggggcagcagcgccgctgggaaaatgccctccagcctgaagcccatcagggtgagcagggatgtgcctggctgagccacaggaaagggggcatcagttttgcttcctcccctaaagacccctgagctctcaccgccgttgccctttgccccgcctccttcgcacctggatgcctgtgagttccctccagagcagcacgcacaggggtgagagactggacaccaccaggacgctggtgaagcg

SEQ ID NO: 65956 - DNA, 1892 bp, Homo sapiens
gtatgtagtgtgggggcaggaagggcgtgcaggtgtggtcactcgtggcctccccgtctccagcgttccagttctcctacacagctgtcttcggtgcctacactgctttcctcttcatccgcacaggttggtcctcagtccctcatgggtccctgggggcccacaggagcgggtgggagaatgggaatactgtttgttctaggaacaaaagttcttctactccagtccttgagacaggctgagccagagccctcagcctggtgaggtctgagaggtggaaaggagcagaggccgtggtgtgtgggtggatggctggggtagtgggatcttgatctcctgtttcaggggatgagggtcactagccctggaagggccagaggaggtggtagggctgctccctgagctgctgtctcttttccccaggacacctgattgggccggttctctgccattccttctgcaattacatgggtttcccagctgtttgcgcggccttggagcacccacagaggcggcccctgctggcaggctatgccctgggtgtgggactcttcctgcttctgctccagcccctcacggaccccaagctctacggcagccttcccctttgtgtgcttttggagcgggcaggggactcagaggctcccctgtgctcctgacctatgctcctggatacgctatgaactctcaccggctccccagccctccccaccaaggggtactgcaggggaagggctggctggggtccccgagatctcaggaatttttgtaggggattgaagccagagctagttgcgtcccagggaccaagagaaagaagcagatatccaaagggtgcagccccttttgaaaggggtgtttacgagcagctgtgagtgaggggacaaggggcaggtcccaggagccacacactcccttcctcactttggactgctgcttctcttagctcctctgcctctgaaaagctgctcggggttttttatttataaaacctctccccaccccccaccccccaacttcctgggttttctcattgtctttttgcatcagtactttgtattgggatattaaagagatttaacttgggtaacatggccttgggcctttgggaatcggtctatttgggatcttgtgtgaagactctaggcagctcttgggagtgtgcccaccacctgtcccagctaccttgaacactgacatctgggcggtgcatccaggcgggtagttccctggagtacaggatgggctgggagctctggttgctgggagcctgtggcttcctccttcctgaaccatgccccaaagtcctagtgtggttggctctgagactgcaggtaccaggtgtgagcccagctcatcctggggcctgtgccttggctgacgggtcagggagtgggaaccatggccctggccctgacctcagcgatggagcctccgacgtatctcctctgaggggaagatgactggcctgaagcctctgccaggacctccacagtctgccagtcttgtttttcacaagaggaaataggtccctgagtcaccataagtagaggcttttctggttctctccacctctgacctctgccccagaggaacccagaacacaggctgcagccctgagggcagcagggactttgccaagcaacacagtgactccagggtccttctcggcacctgcaagtgttctgcctgctctccatcatttttggaagggctctcgtttccctgcctgtgctcttttaaaattagattcctgaaagagtattagccctggattacttgaggtcaggagtccgagaccagcctgaccaacatggtgaaacccgtctctactaaaaatacaaaaaattagccgggcataggcggggcgtggtggcaggaggctaaggcag

SEQ ID NO: 65957 - DNA, 1015 bp, Homo sapiens
agccggcccgggcccgggtggatccccgcgcgcccctccccgtccgccctccacgtgcgtgtccgcggcgcgcgcgcccgccggcgcgcacccgctcgcctgtcgccgccgccaccgctaaccgcgccgggaaaaggtgccgggaaccgagcgagccggggccgcgggcccgagcgccatgggcccgagggtgggcggcgggcggccggtcatccccgggcctcgtccccgcgggagagcggccaggagtcggcgggggccggccgggctcgcagggaggccggcccgcgccccctgagcgacggacaccaggtgagggggccgccgggcgcagcgcgggggccggccagggaggggccacggactccacgggaggttcggggggcgccttctctggcgggggagggtatggcggggagtggggaggcggctggcgattcctggggacgcctgggaaaggaagttccgggaccctccctgctctcggtcctcctccgcttcctgcctcatgcctcaccttgtccccagcgcctggactcccccttaactgcttgggaaatgtgacctttgctctggggggcctggccctgcaggccccaaccttccctcatctctggcggccctcttgggcctctgacccagcccctccccgggccaggctcacagaagctggcttctgggactgtcctgggcccaagtgggcacctgcgccagccccacctgtgcctgggctgtggccccttcctacagggcgctcaccatggccccgccgctcctgctgctgctgctggccagtggagcggccgcctgcccgctgccctgcgtctgccagaacctgtccgagtcgctcagcaccctctgtgcccaccgaggcctgctgtttgtgccgcccaacgtggaccggcgcacagtggagctgcggctggctgacaacttcatccaggccctggggccccctgacttccgcaacatgacgggactggtggacctgacactgtctcgcaatgccatcacc

SEQ ID NO: 65958 - DNA, 1060 bp, Homo sapiens
accgtagccatctactctgagcaggacacgggccagatgcaccggcagaaagcagatgaagcctatctcatcggccgcggcctggcccccgtgcaggcctacctgcacatcccagacatcatcaaggtggccaaggtgagcccagtggcctggctgggcctggacagcagggaccagggagtcttagttgccgcgggggtctcttgaggctggcgtgctcagcgcctctgtgcgtgggtgggtaaacggatgcagctcagcaggttaggcaggggaagaggctggccgaggccttggaagggactgcaaggtaccgtcctctccctgacccccacctgcaggagaacaacgtagatgcagtgcaccctggctacgggttcctctctgagcgagcggacttcgcccaggcctgccaggatgcaggggtccggtttattgggccaagcccagaagtggtccgcaagatgggagacaaggtggaggcccgggccatcgccattgctgcgggtgaatataacgggcaagcaaggggtggccccgcagctcctggagagggtccagcagggaggggtggcagggattcccgcctgttacagagactcccccacacctttctcccaacaggtgttcccgttgtccctggcacagatgcccccatcacgtccctgcatgaggcccacgagttctccaacacctacggcttccccatcatcttcaaggcggcctatgggggtggagggcgtggcatgagggtggtgcacagctacgaggtgagtgaagatgcccagggctgggagcagggcagggcagcctgccgtgggggcaggggcggaccactcaagggatctggaaagtgggtggggttcatggcaggggagaggtagcgctgtggggtctgaggtctggctggcccctgcccgccctcgcaggagctggaggagaattacacccgggcctactcagaggctctggccgcctttgggaatggggcgctgtttgtggagaagttcatcgagaagccacggcacatcgaggtgcagatcttgggtgagtggtcctg

SEQ ID NO: 65959 - DNA, 1050 bp, Homo sapiens
cagcctggatagttaaaaattacatatttaaaatgtaatatatgtgtgagcgttcacagcagcgttattcaaatacaaaaaaaaattagctgggcatgatggtgcatgcctgtaatcccagctactcaggagactgagggtgggagaatcgcttgaacctgcgaggcagaggttgcagtgagccgagatcatgccattgcactccagcctgggcgacgagagcaaaactccgtctcaaaacacaaaaaaagagccaaaaggtggaaacaacccagatgttcatcaaccaatgaatggctaaacaaaatgtggcctacccatccagtggaatgttgttcagccataaaaaggagtgaagttctgacacatgctacgacatggatgaaccatgaaaacattgtgctaagcaaaagaagccagacacaaaaggtcacatactatatgacatttctaggaaatatccagaataggccatagagatggaaagcagattactggttgccaggggctgggggtgggtgggaatggggaatgacagctagtggtaccaggtttctttttggagtgatgaaaaggttctggaattggatagttggttaccaacattataaatatgctaaaaaccactgaactgtatagtactggtaaccagaatatgtgcatcattaggcctatatattaaacaattctagttggtcatgtccctagaccccggttgtgttgacttgccatgatttgtttaactgtttgcctactgttgaatacttggcttatttccaggattttgtgatcattgataatggtaagccttactttcaaagtctgataagctttttaaaaaattctgcttcctatgtgatgccaagcacttaagaagtactctataaatatttattgaattatctttgcttgctattcctgtttcattagtgtagataattactttctgttccagattatttcaaaagaaaatattccttaaactgttagcctttcagtaagagctgtacattttatatttgtaagtggtatatttcagatagaaatagt

SEQ ID NO: 65960 - DNA, 1009 bp, Homo sapiens
taaatgaagctgaatattacacttttcttaaactttcctataccgttttatgttttgtttgtttatttttgtttattttgagacggtctgattctgtcactcaggctggagtacagtggcacagtctcagctcactgcaacctctacctcctaggctcaggtgatcttcccttttcagactcctgagtagctgggactacaggttcaagccaccacacccggctaatttttgtactttttgtggagacggggtttcaccacattgcccaggctcatctcgaactcctgagctcaagcaatcagcccgccttggcctcccaaagtgctgggattacaggcgtgatacattttagtttttacaatagctttattggagtattactgagatataataagttgcacatatttaaagtatacagtttagtaagttttaacatatgtgtacccttgtgaaaccatcactgcagtccagagagtgaacacattcatcacctttggaattcctccctctgcctcctcactcttcaggaaaccatggaactgctttctgttactataggttagtttccattttctggaatttcacataaattgactcatacagtatatattcttttttctctgccttcttttactcagcataattatgttgagatatgtccatgttgttgcttgtattgatagttcatttccttcttttttttttttttaagacagagtcttgctctgtcacccaagctggaatatagcggcgtgatcatagctcactgcagccttgatcttctgggctcaagtgatctcccatctcactgagtagctggaactacaggtgtgtgccactacgcctggcatatctatctatctatctatctatctatctatctatctatctatctatctatctttagtagagatgagatctcggtatgttgcttaggctttttttttttttttgagacggaatctcactctgtcgcccaggctggagtgcagtggcatgatctcggct

SEQ ID NO: 65961 - DNA, 1001 bp, Homo sapiens
aatcccaactacctcaggaggctgaggcaggagaatcgcttgaatccgggaagcagaggttgcagtgagccgggattgcgccattgcactccagcccgggtaacaagactgaaaaagttctctgggttctaaaatcggtgttcttgccactcctgttttctctgggaagttcctggagcaatgagggtaatgctgttttttcttttgctttagatagtgtctgccttctggagagctgaccaaacactaagggtaagtcctgtgcctgaatccaggctggcgggatgcatgggggtcttcaccaggagcagctgtggatgccagcagtttggcatgtcaggtcttaagctcaatcaataaaaaaaggctgcgctctgatttgtggataatatccgtttaagcagtcttgtctgtttccagttgctcctgatttttacaggaaagtgacatctggctccctgctggccccatttggcagctggccagcctcagcagaaggccctggttctggaagggtatggtcagcttgggaagctgggcaggaagaatccctggggctgggccgtctctgagaagaccccttgagtcagcatggagagcaggcagctgtggtgtgaggtggttctgccagctggttgtaaagtcacttgacacgggtttccagagggtgacgctcaacctttgccagtcacggtaacaacggggaaaaagggacctgcccttcttcccctgcacattttacaggcatgtgccaccacacctggctaagtttttttttttcttttttttttttgagacggagtcttgctctgttgccaggctggagtgcagtggcgcaagctcggcttactgcaacctctgcctcctgggttcaagcaattctcctgcctcagcctcccgagtagctgggactacaggtgtgtgctgccatgcccagctaatttttgtatttttagtagagacggggttttaccatgttggccaggatggtctcaatctct

SEQ ID NO: 65962 - DNA, 1121 bp, Homo sapiens
gtccctctgtgtcacctccaaagctgcttagagtgacccctccctcccttggacctgctcctgctcaagaccccaccatggctccccactgccagcaggataaggagcttctccctgagcttggacacacagcctccacagcccaaccccacctggcctctcaagcctcagcccagctgtgtctccccagacactgtgacacctttgctcaggcagtttgagacccctctccctcctccatgtgtacagtccccctgctgcaaagccagctctcatgcttctacctcctccaggaagccctccctggtctctgcccctcttaccggctcctgccacagcccgtctcattggttgcctcagaagctcttcggagtcagtccctgtggtggacaggcctcccaggagctgctgggaattctccatcagctcatccttatccatgcttgatgtcccacgcttctgatcttccaggggtggggaggggaaggcagcagcctgggacccagcgggggtttctcttatgccctcagccttacattcaaggagctggggaagggggcgttgttgctgagtgatccagagcactggctctgtagcaaagacaggccgagcttgagtcccagctctgtgactttctggctgtgtggccttgggctagttacctaacctctctgagctcttttccacatctgcaaaaaaggggatagcagcagcacttactttgaagtgttgcaggctgaacaccagcactcgctgaatgtggaaggcccttctacccttcagaactcccccttggctctcttcttcccaccctgctcactccctccaccatcccccactttattctggccaaatggatacactggccaagttttcgcccccttgtgcccttttgtatatggggttccctgctaggaatgcttctcctgccgtgtctacctgatctcctccttctggccctgaagcctcagctgggtgtcaccaccaggaagccttccttgatactccccatcatcctactctctcctgccagagctggctcagtggcccctcctctgagcttcccaaggagtctgatgcattggtccttccttttttttttgagacctttttttgagtct

SEQ ID NO: 65963 - DNA, 1040 bp, Homo sapiens
tggttccgcgtgcatcccctgtcctctgctctttttttttttttttccatggggagtcttgcccaggatggagtgcagtgatgtgatctcggctcactgcaacctccgccttccgggttcaggcgattctcctgtcttagcctcctgagtagctgggattagaggcacctgccaccacgcccagctaatttttgtatttttagtggagacggggtttcaccatgttggccaggctagtctcaagctcctgacctcaggtgatccacccgcctcggcctcccatagtgctgggattataggcgtgaaccaccgcgcccgtccctggcccacattcatctgaaatactggatcctaagagcctttgccctcagcctgaactcctccacccaaagccttgacctcgcatttactgagcacctacctgtgccggacacttggcacatgtcatttcatgccatcctatgaagtatgttcaattcttatcctcctttgacaagtgaggaaactgaggcccaaagaggttggataatttgcccaaggtcccgcagctagtaagcagagaagctgggatttggacccaggcccttgggctccggagtccatacacacagaatgtccaaaagtcagaggtacagggctctttagaggccatcttatccaacacccccattcttcagatggggaaactgaggcctgagaagggaaggaacttacacagcaagtgagcagcagactcagctttacgccaggtggaaaccagagggcctctgctcccaagtttctttttgtctagcctgcccagacagctccagcctggctgccatctaactggagccccaggccacggggacgtgccctcctgccctggcctcctctccctgccaaaccattattgatctttcaggttgggacggaagggctgataatagggtgggaggggtggagagagaggaggtctggtggccccatcctggtgcttattaagccttttgatttgtcccttttgggggtctgcaggcacagacagatagaagagagga

SEQ ID NO: 65964 - DNA, 2392 bp, Homo sapiens
gggtcgcgctcctctctcctgacgcctccgactcccggtctccaaagccagaagagaaggtttgattcagcaactgtttgctcccttttcctggtcgctctgaccctctctggatactgggttgatccacggaaaaaccgaagacgacgtttgggatttaattattcctctcagctttggaatcttttacttctcacttggacaagaactcaagagcagaatctccggtgagtttccccctcccccccctcatttggaagtttggttgactgtgttatccaaagactgaatgcaaagtttctatctctttttccgatgggtgaaccattgaaacgccttttcctgggggagcccagcgagattcgccctttttcctctccggccctggctgctccatgcccaggcggtcgtcgcccagggggtgcaagcacggtttccctcccgacttcgggccagggcttcctccgggagggctctgcctctaactgctctgcaaactgtgtcatcgggtcctctggtctcgtagcagttttgaaaggatgctgttaacgtggctgtaatgtagtgacaaaaacggggggaacctgtgttctcaatggaagccattatccacgagaatatttagaaaaaagaaaaccctttcttggtattacggattgaccgtcgcgccggccggtcttttatttaatttttggacaagatgtattttccttgtatccttagatgcaatcgtttattttattactttatccaaaaagatcagatggaattttggtccttgatttgcacctctgaaatttgtttcagagttgtgcacatcttgtgttggggtggagggtagatttgggaatgataagatccggggagtctagaaaggaaggcgacgattgtgcacggccttacaggaggggtatgggaaattgttttggggtcatttaaatcctaattttttgtcctctttttacatagtcagtttgcccttctttcctttagtttctgattaccggtgagagagaactaatttggttaggatctggattagttcagtggtgcttcacctggtcagctctctggagataaaagtcctgggctttttttttttcttgctgatgctgccatgaaggagatccttgctagttgtaatcctgtggggagaaactggtggtgtggcccttccacaaggaactgaaaccaacatctcgtttcgtctaggcctccgacagttgtaatgtgattaatgttgaacatgacatggaaccacttgcccaagagcagaaaggtcccaaactcatgaagaggaacctgatttttcagagagcctttaacacttaccttaaatactcctttccgtgaacagaaagcacaagtttgagaatgagttctcatttctgcttatatcattattctttagtgttgcaatctggttcctaaggaggaagaggaaggcagccctggagtggtttctttacagtaatttcaacagaagagtgagagatggaacccgaagaagaaaggattcgttacagccagagattggttagtattttctccccccaccacaccctccagttttaaagtaggataactattttgtttccagttgtgaatatactgtgaatctgtgattaaaacttttcgggtgacttttctgtgcaccagaggagggggaaaggtgtattaatatcgaatttggcttttggccaaacatgttttatattttatatatttatcttgtttggaaatggagttatatgtagcctttagcttttatagaaaccattgtataccaaaggattttgtggattacaatgtgacaaagattcctgattttacagtactgacattgtaatacatctgattacgttagattagaatataaattttgggggcaaagctgtttgaggaaggatagttcaatacgttttttaagattttgttgtcccaggatttgtgactttgagcggggagaactatggattattttcttttattttataaattaacattttggtagctttgaagggttgttgggattgattgaagacaagtaggtagaatactggatgctgataaagttctgtgttttgggaggaatgtacgagatagatcttgttgaaagaaattttagacatgatttgaaaggattggcttatatctgtatatgaacacttggatcctttaagccatgctttcctcgtaaggtttccctattggagttttaagaattcaatttttgtttttcttagccaaagagagctttattagtagtctcacagtattaataaaaatctgaatttgtgtttgaagagtgggctatgaggaaagcgacagaattgtatgtagtatgtgaaatttgctgacctgaaaggcctagaagattactaaaggaatt

SEQ ID NO: 65965 - DNA, 1096 bp, Homo sapiens
agagaagagtaattgaaactgctttctgcatatcattgattctcaagtgtatttaaattatttttgtagtaatctatagtatttttggtttttgtttgtttactattagtacacattggaaagtggattccaggccaattagggaaggagattgattttgaaatgatgttagttctctggaaaccacttgtttaaataagggaatatcaagaggaaagggctggccatagttactaatcctttgagaggagggatctaagagttggaggatatgtcagacatgatctctcttctctggggaattagaggtgagttggagaaaactgtgggagagagggtcagcagacaaggtgaaagatcacttgagtctagtagtgtgagaccagcctgggcaacagagcaagaccccatctctacaaaaataaaattaaaatgccaaggtaaatggtgttaattctaaacattttggaggtgggggtggggtggagaatggagcatagcattcacctcttctttcatcctagtcttcagtctaaacctagtgttgaaggccaaaggacaatactcccatacacagtgtgagtgggagggagtatgtagtaaaccccccttgcatgcagtagagatgtgatattctcctttgcttggaggatatcatggtggatagtagaagcaggggttcagtttagtttgtaagttataccttggtaactgtatgtttgaccaattatgctgaaaatacagaactgtttcagcatacgttgctttaggagatacacatacatatattgaatcactctcttggtggctgattttttcagctttggttctgctgctgcttccaacagcctagagttgtgttgtacgctatggtagccactagccacaggttgctagggagcatgtgaaatgtggctactatgaattaagatgttggtgtaaactatacacaccacatattttatttattattttattttatttttaaatttaattttattattttattttgagacagagtttcactcttgttgcccaggctggagtgcaatggtgccatctctgctcgctgcaccttccgcctcccgaataagtg

SEQ ID NO: 65966 - DNA, 1068 bp, Homo sapiens
aggtaaacttgcagtataagcaacattttgaaagtgactgcttattagatagaattctcataccatacagtctcctcatttaaagtgtacaagtcagctgggtatagtgactgaagcctgtaatcccagcagtttggaaggctgaggcgtgcagatcgcttgagcacaggagttcgagaccagcctggccaacatgggaaacccctgtctctactaaaaataaaaaaatcagctgggtgtggtggtgtgcactggtggtgtcagctatgggaggctgtaggtgggaggatcacctgagcctaggaggttgaggttgcagtgagccttagtggagccactgcattccagcctgcgcgacagagcacaaccccatctcagaaaataaaaaataaaataaagtgtacaatccagtggtttttagtatattcacagggtcatacaaataccactatctaattccagaacattttcattgctcttgaaaaaacccatactattaacagtcacttctcccattcttcattttctctagcccctggcaactatgaatctagtttctgtctctatggatttgcctattctagacattttatttaaatgaagtcatacaatatgtggtcttttatgactggctttttttttatttggcataatgttttcagagtttatctatgtcatggcacatagcgttatttcattcctttttgtggttaaatgatatctcattgtataggtataccacattttgttaatgcattcatcaattgattgacatttgggtggtttctatcttttggctgttgtgaataacactagtgtaaacatttgtgtataagcttttgttttgaaaagaagaacgtatgttttcagttctttgggttatatacctaggagcagaattgttaagtcgtacgataactttgtttaactttttgagaaactttcaaactgtttaccagtgtctgcaccattttacattcccaccagcaatgtatgaggcttccagttggtctgcattcacatcagcacttgttattgtttatctctttgatgatagccgttctggtg

SEQ ID NO: 65967 - DNA, 1516 bp, Homo sapiens
gctggtctcgaactcctgacctgaggtgatctgcccaccttggcctcccaaagtgctgggattacaggtatgagccaccacacctggcccttttttttttttttttaactcttcagagacagggtgatgataatttctgtttagcatttataagatgactcactattagtagtcctatccccatattatttaagctctaaatttcctgtggaaatttagacttggaatatagacttggaaaacccctcaagcgttgcttctcaatgtgctctccatattttctaagagatgcttcttactaagcatatattttattgactaacagcataactatatacacagaataacaaacaccatttatactgtattacttaggatcctttttatggtccttttatcgtttttaattataccacttatctttctaatattttcctatggtgacagattttaatgtagagtatattcagcggggtggcttgagagatcctctgattttcaagaattctgatggactcggaataaagtaagtgttttcagcctggctggatgtagttgcaaaatggcctcgttacacccagggcaataaacagtggtggtattgataacccaaaacaatagtaattgaaaataatttcccactttgttttaaaagtatatgcttttcttttgatacacaagtgtttcatattagaggtaaatgagaaaatatagatgaaccaaaaaaaaaaaaacaacaaatttaaatctcctgaaatctaccacccttaggtagatcattaacattttattatgtattcttttttcctgtgcatatgtgtaaatatataatcacctatatttttaaaataatttcaaacctgattgtgaatattactgtgtctggggagtactcagtactttaagaaaaaaaactcacatttactagagcaattgtgttttccatatatacttactggtgtttgtttcatagaatgccggatccagacttcactgtgaatgatgtcaaaatgtgtgtgggtaagtgtcgagcttttggcctctgtctttaaggcaaagatttaagacttaggactgaattaaatctctgactgagatttaaggcctaggaacattgaagtatatatttgattagaaactacattttcattaggaactgagaattttatcaaagagagttacagaagttgccttatttaatacacattaaacctagaaagttggaacctctttttcctaccttcatacttccttctctccttgaagagtgtgccttctagggcaacctttccaagaaaccgaaaacttacatctcttagccaagaaagaagtttcattaatatccgtgattcccttccttcccctaaaaggagtagagaaatttccaggaaatgctcgccagtgctgcatttggaaacttgcctaagacttgaaactttataggctgagaagtagatacattaaaattgagtcttttaattattttattatattcaaaatttgggaaaaagaaagc

SEQ ID NO: 65968 - DNA, 1700 bp, Homo sapiens
gcactccagcctgggtgacacagcgagactgtctcaaaataaaattaaagaaataaataggctgggcatggtggctcacgcctgtaatcctagcactttaggaggccaagacaggcggattgcctgagctcaggagttggaggccatcctgggcaacatggtgaaaccccgtctctactaaaatacaaaaaattaggtggggtagtggcgtgtgcctgtagtcccagctactgtggaggttgaggcaggagaactgcttgaacccaggaggtgggaggttgcagtgagccgagagcgtgccactgcactccagcctgagcgacagagcgagactccgtctctaaaaaataaataaacaaacttaggtctctttgactccaaagctattgttttctctccactactattttatgctgactcttgtggccttatgcgttttgttgtagttgttatagttaacaagaatctgatatagattttcgtgtccatcctggtgtctttatcattctataaatatttgtggaataaatgaaaaggggactttgttcttcatgaactaggataattatcttcatgggctaggatattagcaacaggtttgcgaaatagccctgtttaacaaaagaatataaattcaaaatcagtctgttacccactaaattatggatacttcattcaaattatgagatagattaggtcaacctgcatcaaatcagtatagatcagtaagtaagagcttgactctagagtgagcctgccccggttcttttcctgctttgttctgtaagttacctaacatctgctttctcatgtatgaagtggagattagtatttagcatttagaattgttaggattaaatgagacattagataaaagagtcaacaactgactgtatagtaaacatgccttagggaataattattattaacattatccattgtctttcccattctttgtgatttgattatgattgttgagtgagaactttttccttgtgtattattgaaaataagaaaggacagtattttttcttctactttttaaaaaatattcttactatatttaaggatattagtggctcgatagagatgatcgatgcatcttttatggcagggagtcgtcgcatggtggatgtcatggacgtgaacacacagaaaggcattgaaatgaccatggctcagtggacacgctactatgagaccccagaggaggagcgagagaaactctataatgtcatcagcctcgagtttagccacaccaggctggagaatatggtgcagaggccctccacggttagtgtaatcattttcttcatattgtcattgtcaccaaaagggttgttttcggctggacgttggtaactgatgcttgttatcccagcactttgggaggccaagggaggcagatcgcttgagctgaggagtttgagagcagccggggcaacatggtgaaaccacatctctacaaaaagtacaaaaaaaaaaattagctgggtgtgatggcacatgtctgtagttccagctactcaagaggctgaggtgggaggatcacctgagcccaggaggttgaggctgcagtgaccggtgattgcaccactgcattccagcctgggtgacagaacaagaccctgtctcaaaaatttaaaataaaatgcgttgtttttatactgggaaattttataactttttgcacatatcaa

SEQ ID NO: 65969 - DNA, 1056 bp, Homo sapiens
cttttttctttcttatttatttatttatttatttatttatttttgacacagggtctcactctgtcacccaggctggagtgcagtagcatgatctcagctcattgcagcctcaacctcgtaggctcaagtgatccttctgcctcagcctcctgagtagctgggaccacagacgcacaccaccacacctggctagtttttttatttttatttttttgtagaaacgaggttttactatgctgcccaggctcgtctcaaactcctgggctcaagcagtcctccagcctcaggcccccaaagccttgggaccacgggcatgagccactatgcccagactcttcttttttttaaactgtcattattactcagctttcaactgatttccagagggctttagaatttggagttgtcctgaactcctaataaaaacccttccagaaagtgttgctatacttaaaaggctaatggagaggcgtagtgtattatatttaattttgagggaccaaatacctattggttgttgtctctctcctctgtctcccttagtcagaaataaattaattttacttccgtgtaagagagtcattcttttagttgttaaaagttttagccacataagaaaccagaatcagggtctggctactatgcattagaaaactgattggggctaactatgaaaagtacatctcctctcctgccttgccatggggagagtgatctccttattccccagtgatgccctgtggcctggtgaaggtttttgaaaagggactcctatccagttctccgtgattcaggaacactacccgatatagagtttgtaaacgggtaggtgaagtcatccctacaatatgggaggagatgggaacattctcaggagctgcatattcaaaacagtatcatttggcttatccttttgaaatatggcctctctaaaagaaagctgtatggccagatatggtggttcatgcctataatcccaagtactttttgggagtttgaagcgaaggatcacttaatcccaggagtttaagaccagcctggacaacatagtgagac

SEQ ID NO: 65970 - DNA, 1060 bp, Homo sapiens
ttttgaacagtggacaaatgggttggaataaagatagaccatttttttaaatgtggtaattttgtcatttatagcctcaaggcccctatcatgccacctatttctcttgctgatcacatggcagagtgaaatgttcttactgcattttttcttcatattggtagatttggagttaaatgggttggagtctgggaatggggatgaggaagcagtggatcgagaaccccgacgcttgagcagcaggcgttctgtcctcactagccctgtagcgaatggagtcaacctggattatgatggactgggcaaaacctgccgaagtcttccaagtctgaagaaaactttggctggggactcatcttctgactgtagccggggctcccacaatggacaagtgtgggatccccagtgtgctccccgaaaggacaggcaagtgcatctgacccattttgagcttgaaggccttcgctgccttgtagataagttggagtctctgccactgcacaagaaatgtgtccccacagggatagaagatgaagatgctctcattgctgatgtaaaggtaagggtttgatgtgttacatgacagctactgatccagctatggcagtcagcttccagattcagagggagaaaatataggaattttgggtgatctctggttcagtcagagagaagttaatatgcatgtgtgtttgttattgctgctcagtgttttcattactagaatgaggttatgtccctgttttgaaaatactaacatttatgtgttcattgaagacttataaatttagtcttaaacataggtttcaggctgaccccaaaaataaagtgacccaaagaaaatatttatataagaaatgttacattaaacttaagttaccttgagataaaactcaggacaaaagtgactgataggagtctcatcctaagcagattgagagaaatgaaattgttctatgctgggttaacgttgagtagctttagcctctttagattcaaatttatctagcatcaagacttaaatacattgggaaaagcatcattttaaaataattcatcc

SEQ ID NO: 65971 - DNA, 1049 bp, Homo sapiens
gcgtgacaccgcgcccggctgcttttttgttttgttttgttttgttttgttttgtttttgagacagagtcttgctctgtcacctaggctggggtgcagtggcgccatctcggctcactgcagcctccacctcctgggttcaagtgattctcctgtctcagcctctgagtaactgggtctacaggcacgcaccaccactccagctaatttttgtatttttagtagagacggggtttcaccatgttggccaggctggtcttgaactcctgaccttgcgatccacctgccttggcctcccaaagtgctgggattacaggcgtgagccactgcgcccggccaagatatccttaacatttctaaaattggaaagttgtattcttgatatatgttgaataaaaaggtaggacatgtaacagtatgtatagtaccatcccattaatgtaagaaaaagtgtatgcgtatttgtgcattgcagaggaatctaaaagggtacatcccagcctgctaatagcagggcacaataggatagtagtagtcaactggaagaatttgtggtttttttgttttttgagatgaagtcttgctctgtcacccaggccgaagtgcagtggcgtgatctaggctcactgcagcctccgcctgtcgggttcaagtgattctcctgcctcagcctcctgagtagctgggattataggtgtgtgccaccacgcctggctaatttttgtattttcagtagagatggagttttaccatgttggccaggctggtcttgactcctgacctcaagtgatctgcctgtctaggcctcccagagtgctaggattataggcatgagccaccacgcccagccacaatttgagtttttaatcagattgttgtttttgttggtatttattttggtgataaagtagttcttaatatatatgcatatataaaagaagctttttatataacaatatatctggcggcccagctcacttaataaagcaaattcaatattgttgaatacttttcgactttcctgttttctctaaacattttgataagcct

SEQ ID NO: 65972 - DNA, 1075 bp, Homo sapiens
tcttacaggcagaggagactgctggaattgggagaatgtgtgttccctggcttcctgcaccttgtttagaggcaggagggcaaagtgtgttgtgcctcagttgtttgacttggtcacggtggaactgctgcaggattgctgcgcagacatttctagtactgtactgtgggggtggagtccttgtcagaatcagaagcaggcatctgttttagatgtagttgatgttagccgtattttattgaatatctcaatattggctgacatgggccatttctgaaggttttttggaacacataggcagattctggattgtgggctgggagcaagtcagcgagggcaggtgaagcaggcagtgtgccggagagagaagataactcaagaggaactcagctcctgtgcctagttcatccagagaggcggaactttgggcgaccccctctacttgctgagaggggagagagaagtgtgtgtgcagtcagccagagagctctggcagtaacagtggtaacagtgagaggtgaccctgaggggaagggtgtggactgaaacaaggacaaatgtgggccaaggtgcctagtgtagcccgcagaatgagttaaagccttccctttggctggcgccttcagaagtctgccaccgggagccctcagggggctggccctaggttctcctattgcagtggtggtgggagggagacagggcgggggctgtggctgagctctcctccctggcagggcctcttccaatcgcgaggaagaaagcagttgctgaacacaccccctcccggctctgcagcagaacggctgggccctctgcctggctcgctcactctcgctcggctccccctcctgccatcttccgttgcaaagcatttctgggagctgcatgtgggtgacgcagcagcattgttcgcaggcacaggaagccgcggctgagctgaagggctcgagaaggagcccagagcgctgcacgctgctccctctgggtagtctgaagggtcagagctggactgccctgccctatgtgctctgggagattccagaatattcaagtaaatccggattttcccagaggc

SEQ ID NO: 65973 - DNA, 1673 bp, Homo sapiens
ggagttcgagaccagcctggccaacatggtgaaactccgtctctactaaaaatacaaaaattagctgggtatggtggcaggtgcctgtaatcccagctactcaggaggctgaggcaggagaatagcttgaacacgggaggcgaggcggaggttgcagtgagccgagatagcgccactgcactccagcctgagcaacagagtgagactccatctaaaaaataaaaattaaaaaaaatatatttgtttcaaaataacagtcaaccagtgtgattcacttaagtggcattttctcactgtagcattgttcgtaagtcatttaaattttattggtaatgccatgagaacttttgcccctaagattgttcctttcccccatttagaggaataaaggcaaatagcagactctgtgggtgtgtgtatgtgtgtgtgtgtgtgtgtgtgtgtgagagagagagagaaagaaagagatttgagattgagatttctgtaatcagccttagaagaaaagagccctgggttgaatctgcacattaggctgtaccattcatctcattaattctgtattagcaaatcatttttatgccacttggttcacatctgagaaatgaaggcaattacctgataatattcactaactggtgtagaaaagtgaagaagcaataataaagttttactgtcatatgtagaactgtatgagaagtaacacttgtcaccacagtaagttagttgtttcagtgtgttagtataattagtacacaagtaagggattgggaacaaaggtgagtttgaagtcctttctgctcccccaccaccaccatccgcccccagtagagatgggtcttgctgtgtttcccaggctggtctcaaactcctggctcaagtgatcctcccacctctcacaggcatgagccactgtgcccagcctcaaagttttgataatattgcagcagcctaagtttgagttttctccttcacctttgatttatttgttttccagtgagtctctatatgaagggcaaatacagacagttgccaccctgcctcccttgctactcaagggtactgaggcagagtctggatgctgttcagggtggttggctctttgttcaccctgccctgatttttccttcttttccctcctacccttagattttgctggaggagcttgccaacagcgatcccaagttagccctcactggagttcctatagtacagtggccaaaaagggataaggtaagaaactattttccttgatctttaggctgcttaagccttttgttagttgatcattaccattctggggaaaacaagaacaactagaggcagatggcttttggtgcattaatacaaactgacagaaaatcattattcagttctgttttgactcgtaggtcagggtaattggctatctttggaggtgacctctcttaacagaactatcaaactgggaggcctccctccagattcagatgccaaattgtgcatttgtgcatccgcttctatccttgtgaccagttactcagctatcttcacagatatgattgaaagccagttaaaataattacatagatatctaaaaggagcagagtttttctttgacgtagtgagatcattctctcaaaaatccccttaccttggactttgcagtgtggaatggaaaagagaagaaaggg

SEQ ID NO: 65974 - DNA, 1042 bp, Homo sapiens
gagcttgcagtgagccgagatcatgccactgtattccagcctgggtgacaaagcgagactctgtctcaaaaaaaaaaaaaaaaagcagccattgataatacatacacaagatgagttgtgtgtcaataaaatttattctagaaacaagcagtgggcagatctggccatagtgggccaagccccaggctaggtatgctaccatgtaatcttctaccctatccagtcttaaagcaacctgatatatttgacctcactgctttctctttccagcttaaattccccactcggccaaaggtgcgggttcctaccatccccattacgaagcctcacactatgaaaccagctccacggttaacacctgtgaggccagctgctgcctccccgattgtgtcaggagccagacggagacgagtgcgatgtcgaaaatgcaaagcctgtgtgcaaggagagtgtggtgtttgccactactgcagagacatgaagaagtttggggggcctggacgcatgaagcagtcctgtgtcctccgacagtgcttggcagtgagtgatctgctgggtaaagaattttggggaggggtggcagtgccaaaggaactgaaatacatatagtgtagagttaaagagacttcagagttggaaagaaaaggtttatactctctttttggctttattttgtaccttttttccccaggtttagatagaaggtatctagtactaaaaatccgatttaatctttaggctttacctaattttcaaacaagagattagcatttgaagggcaaatcattgctttctttcccctcttcaggtagattagaaaggaccggggaggccaagtataggccaactgaaaataaactagtctctggtgcccaggtggttgagtcctcctcttccccagtcatttttcctacccaaaacctccgttctctccaccctgcctccatgcttccaggtgtttagtagagaattataggacccaaatctcccatcttcagtttaagggaaactgaaatgataaagatctgagtcagttctcttg

SEQ ID NO: 65975 - DNA, 3721 bp, Homo sapiens
tgggattcctcaccataatcctgagtgaatctctctgtagcaacccagtttctcagagaggttcttgttatctgctttattattcacgtgggggttggagtggaagacgcagcctggtggagtcaaacttagactgtggtagagctagaagccaatggtgtttaccattgtcagactcaggatcttagttcaaatggtatatgtgggctttttccaccatgaaacagaaatacgtctcttgggtgaaagaggtaagtcagagacgcaattaaaaatggtcaggccaggtgcagtggctcacacctataattccagcactttgggaggccaaggcaggtggatcacttgagcccaggagttggagaccagcctgggccgactctgagggaatgaccccctctccaacgtgacctttcttctctctggtcccctgagagcaagggaggtccaccctgtcggttcagagggtttggaagaaaggaagcactgatgttgcttttctgggcctgttttgcagaagcggaaaatggaagagagtgacgaagaagctgtgcaagccaaagtcctgcggcccctgcggagctgcgatgagcctctcacgcccccgcctcattcacccacttccatgctgcagctcatccatgacccggtttccccccggggtatggtgactcggtcatcccctggggctggccccagcgaccaccacagtgccagccgcgatgagcgcttcaaacggcggcagttgctgcggctgcaggccacagagcgcaccatggtacgggaaaaggagaacaatcccagcggcaaaaaggagctgtctgaagttgagaaagccaagatccggggatcgtacctcactgtcacgctacagaggcccaccaaagagctccacgggacatccattgtgcccaagctgcaggccatcacggcctcctctgccaaccttcgccattccccccgtgtgctagtgcagcactgcccagcccgaaccccccagcgtggggatgaggaggggctggggggagaggaggaggaagaggaggaggaggaggaggaagatgacagtgcagaggaggggggtgcagccaggctgaatggccggggcagttgggctcaggatggagacgaaagctggatgcagcgggaggtctggatgtctgtcttccgctacctcagccgcagagaactttgtgaatgtatgcgagtgtgcaagacgtggtataaatggtgagcagggattcagggggtcaggaattaggggtatgggagtaggtggcaggttttccatatgagaacagcatgcaccttggcatctgaaagcctgtggggtcttatgaggagtgaattgaccctttttcccaaactttgggtcctgtttaaagatgtagcctgttgtacccgcagatgtcattagggaactggccatttgcctcctggccctgctctatactttcccatgtctcattgttatggggagggagactgatttgcgggatagatttgtagtctgtgataaaacttgagagtcttgcgggctgaaaatttcctcctcaagtcagctgaactcatcacatgttggttgagagcctatgatgttctagtcactcttctggtgctgataacacagataacctcacttaagcccctgactcaattacctctccattcagtgagagaagtgggcatgcttttcaagatgaatttgaaggtgcttaacatttttcttcagttttaatgctcatccccccaaacctggatcagaattccctcttccagcaagcagagtccagttttgaagcttccttaatgagagctaccatttcttcttaagttggacagacacttgggggaaaaaattgctagtgatgatgaacaaggagcttcccattgggcattgttggtttttccttaaactctggtatatatttactctaggatatatcctttttatctgggtcacacacatcctattacagtagtgtggtgtcctgaccaatggcattcactcaggaactttttagaaatgtcaactgtcaggaccctcataggcctcttaaatcagaacctcttgggtgggcccagcagtctgctttaacaagcgctcctccaggggactctgatgcatgctcgagtttagagcagcaaaatctgctgtattgtcagcagcttgcttctgccatagaagcttcatgtgccactggtaaaattgtttcagtctctaaatagaccctattctttgcaaacatgagtttatttcccaaatctgaattaatgtatagtgtatctaaattctccttaatatttctctgtctagggctaataggactgcttggctctacctcttggttttcagggcaaggcacatcagattcccgttatgtgctgtctctcttcccctgccaaccaggctggggggcaggggctataaaatattaaattgaagccagcatgttgtggtttgtggcctgtagatttgtagactgcagtggaaagccaggcctatccctttcagttctggtctggcctggctagaaaatgtcaggatagcactgaggcagaacttgagggtgagagaggactctgtaagcctgataaagagcctcttttgacctgatacagtaatgggctgaaggcagggtgaattgtggatgtgctgagtagcaccctgcatttcaggcagctgcgagtgattgacaagggagggaacggagcaggccttcttagctttagacagtaagaagtctagaaacttcaagaggctcccttatatacacttcagcaggaaccatgccattttaatacagatgaaggggctatagactgttgcttgctatgggtccctaacaactgttgtgttctcaaacactccagaataaatcagggtaaagtggtcaagttatatactatcaacatgtaggtttgcaaagcgtctagttgttgtagagttcaaggcaattttttgcctattctgtgaggcaaaaaatgataaggtgtgatccctgtacacttgtagaagaacgagcctccaggtactctgcttttcccagaagccataagcagcctgtgatgggagctccactgatcaagttaatgaaggcgagttctcttcccttctatcacaggtgctgcgacaagagactttggacaaaaattgacttgagtaggtgtaaggccattgtgccccaggccctcagtggcatcatcaagaggcagccagtcagccttgacctcagttggaccaacatctctaaaaagcaactgacatggctcgtcaataggctgccaggtaagtgagcagccctgccgctgtctttccaggggcccagaagaagcgggcaagaaaagttgcattattggcagtgcttcttagcatcactggagggcagtgtagggcagcagtcccatgccattgttgcttagcaagaggtttacccagggccatcttaagtgtcagtctcccaggcagcactctggactggcaggccaatcactgcaatggacagcaaagagaacggaatcagtgttgctgccagccctgcagttctcctcagcataaccactaaagaggaaatttgagtcagatgttactttggtcagctccttataagcccttgttctcttcagcattttgagctcttagaaagacaggaagtcactccttcttgtattgctctggtgggaactaagcaatcaatttaccactaaagctagaagatgt

SEQ ID NO: 65976 - DNA, 1038 bp, Homo sapiens
tcactttgctcagatcgttacggctctgagtatgctgggaaacagtgtattattacatgtctcattccatccattgcaggactgaaagacctcctcctagcaggctgctcctggtctgcagtctctgccctcagcacctccagctgcccccttctcaggacccttgatcttcggtgggcagtaggaatcaaggaccctcaaattcgggacttgcttactccaccggctgataaaccaggtatgctctggacctgacttctctgtgcttgtcttggggtagctttgtcttccaaacagacctcgtcttcagaagctaaggtagtctcagatatgacgctgtggaagaatagaagagcacaaaatgaaaacagaatgatggactgtgtacaagaatagggtaactataagcagataactacctacaaacaatggagtaagtccattttgtgagttggtggagtttggggcccagagagtgtaagcctgaaaaagtctgagaaggctttatggtggaggtggagtcaaaagctatttgcatgatggtctagaaaagtgtggtggtattggaaggggaggagcattctgcacatagccttttgctgtgtgcatgaggcataatctagcagcttgagaagaaagaaaacttgtctggtttcctagaaactgcctacacccagtgctcacaccctgaaggcatggctgggtgtgggcagttctacttaaccccttcaagggggcctggccagcaagtagctgttgctgcctggagccttgaagctggattagagaattgagagttttgatctaggctcttctcttgcctgtacaggtcaggacaatcgcagcaagctccggaacatgaccgacttccggctggcaggccttgacatcacagatgccacgcttcgcctcataattcgccacatgcccctcctgtctcgactcgacctcagtcactgcagccaccttacagatcagtcctccaatctactcactgctgtcgggtcttccactcgctactctctcacagagctcaat

SEQ ID NO: 65977 - DNA, 1043 bp, Homo sapiens
ttttgcctcccactgactgcccttttccatgtgtcttcattctgcctgaagaaggctttcccaggatgcacgtcctcagagggagcagcctatctcccccaagctggaggcggcagaggactgggccaagccccaacctgcctcccagccaggctcctccaggcctctggtttagcggagccccctgagcccaggcctgtgtctagccccagtggctcactgaactttcagggcagtcagggggtcctgcttagaagccagtcaccagccctctgcctgcagccatggaagggggtgtgcacgtgcctctgtgtgtgtggctgagtgtattctgcgcgtgtgtgtggagggagggagggaggggagcatggtgtctcccgctccaccgccctttgttgagccccatcagctgcccccttttactttgcattgaacggcctgtccaaagatcctctctctagggcagcagagagctttttgcactttaaaaaaaaaaagaaagaaagaaaggtcggaatttcttttgggtcaatatttttaagtgtgtgaggagatgctcagtagcagcagcctatggcaagagcttataaatgattgatgcaaatttgcactctgctccccctctgtaaggatactgatagcacaacctcttccccccaccccgccccgccttttggtcgtccatccctgtccctttctggccctcttcctgtagcccagtctcaggctttcctcttcctgaagccctacagagttagggaatggagcccaggcaccaggggtctaaagtgtgagccactgagaagagagacgccaactgcacccttgccacttccaaagcaatagaggcagagtggtcccctctttgccacctaggccagttttgaccctggcattaactggccttagaagaaactggatcctggtagggggtggcattttgtttgtttcttccaatctgctgaatcttttgactgcaccttacaaacagcagtctgctcccatgaccctctgcccacttccattggtctccaggccccaat

SEQ ID NO: 65978 - DNA, 1043 bp, Homo sapiens
acttctggttctacatttcatcagctaccctggcctgtgccagggagcagacgtgcccgccacgattctttgtgtcgtgtggcaactccttgtgcatgcctgagagttggcctcctcctggtgccccagcgggctggggatggggcctgtccacactgccgtggtcttatcttgtgactctgggtaagtctcttccctcactgggcctcggtcttctcatctgtgaaatgtggatggcgtgaaataagagctgtgactctgcggtgtccctcagcctttgaagcagccgtctaagctctggctgacgctgcaggggtgccccatgcccatggccctcaccgcccccctgtgccatgccctgctcactgggtgtttggattgactgaacgtcaggcctgggagaggaaaattggtctgcattttgaaaaggccgttagggcctttttttttctaagacatttgcaatcagatttctcaaaacaggaaccagactgactgtcagctgggggctgtccagggagcagtgacggttagtacagaaatgagttcagaaatgacaaacccacgagggaggaaacgggggagtcagcctctagggctcaaaacggctctccttggtggctgcagcctcgagaccctcctgcaggatggagttctgcaactgtgaggcggggccttttctggaactgtctgcgttcgggtaatctccccccagaatgcattgcttctgatggggcgccgccttggctctgcaggtgtcagaaccctgagaaacgagatggtcttcttttcctgtcccctttcccatccatggtagtgatggcggtgatagcaataatgataggaattattactgacttacctattttgatatctgtcatctcagttcttccagcaaccaacctgtgaagctggcaaggccatgccttgcatgtagtagttgctcaagaaataccaggactgtgtggcacccccatgcagtcctgagcagaaacaaggttggataggattctaggaggacagcaggaggccgagccaggcag

SEQ ID NO: 65979 - DNA, 1052 bp, Homo sapiens
attgggtcaccatcagcagcatggccttccgcaaatcgcccacatctgtgaaacggactggaggtgcgagcgccgaatgtcagtgcgctaaggcctgggaagggctactggccacccctacatgggggtccaggcctggggcattagggagcaggccaccctttgcataacgccttgccttgcacacccagtggggcagagcacgccgccccccgccccccgccgccccagtggtgatcctgaccatgtttcatgtttgcctgacacttttccacttgcagagtgctttttactctgttttgtccttttgacaactgtgagaggcaggcccagcagttaggattctcccctttagcagttgaagttattgaggctcagggaggggaggagtcgtgtcctcgtcacagaagaaagctggaatggggcctcgggtttctggaccacacaggccagtgctgtttctttgctgtgctttatcccctccacccacccctgcacaccactgttctcgcctctgtccacattttgcggtgtgggctgactggcaccccttgtctggggccatcggctgtcacagttcacaaggctcagccctcttcccgttggctgggatggagaactgagctgccgtggcaaagctactgcaccgaggggcagccccactccagggtcccgtcagatgcaggagcctgtcttccccatacccacaaggtcaaggtcagagtcagggagaggggctgtggcttgtcccagtgacaggttgccactgggaattgttcataccttgaggtggcccaccttggcagcccctccatggctggtgcctggggatgtgtcttggccaagaactggggctggcatcacagctctgagttccaaaggctagggaatgggagtggttaggcacagtgccacactgagttggcacaggggcctccccttctgtcaccctatagaatccaaggaaacagtccctttccccgaccttcttgtagaaggaggtagcgtaaggcagcattgtgtatctggaagatgggaggtctggcttctcc

SEQ ID NO: 65980 - DNA, 1028 bp, Homo sapiens
tcaccctggtgcccatcgccgtccagctaccacctggggaaacagatttcaggaagagggtagaaacacaggggccccaacccagaatccaggaatcttcacgttggcagcagccttagcagctgcctggcccaccccttgcctggggccgagaccacctttgccacctccatagccagttctgcccagggagcccaacccacaccatccacaatgatgggaaggcctctgagagaggcgtggctctgtgaccttacactgttgccttcagggtacctgctcttccgagacttctgcctgaaccacctggaggaggccaggcccttggtggaattctatgaggaggtgagacccagaggcccaagccctgctctgcctggagaaaggggaggaggttggggcggctttgtggaacccacaagctgcctggtgtgggcatccccattccctgctgggctctagatgacctgcaggaatcctgtcctccagatcaagaagtacgagaagctggagacggaggaggagcgtgtggcccgcagccgggagatcttcgactcatacatcatgaaggagctgctggcctgctcgcatgtgagtgtcctcagctggccctgtgtgctggcccagagtcacctgcagattgggaggggaagagaggaccctgctgagaattcatggccacctctgtcttccccagcccttctcgaagagtgccactgagcatgtccaaggccacctggggaagaagcaggtgcctccggatctcttccaggtgtgtgcctcccggtccctccccaggcaaggtcaccttggacagcccctggtcaacaagcctggtcagccaggggtggggcctgggcaaccacggtctctcggggctcagtcaccaacttccagcttcctcccttagccatacatcgaagagatttgtcaaaacctccgaggggacgtgttccagaaattcattgagaggtgagagcagggaagtgtgggagaggaagggggagggaggggccgctctcagaagg

SEQ ID NO: 65981 - DNA, 2417 bp, Homo sapiens
gccgtgctgttacccccgcaggctcctctggccccagccctccctgtctctgatttgtgtcacacgctggtcctgggtctagtctttccctcaagcgccccctgaggcagccctgggcccctgctctgagggtgggtgttgactgccgacctctgccccgtaggtacgccatgaagtgcctggacaaaaagcgcatcaagatgaagcagggggagaccctggccctgaacgagcgcatcatgctctcgctcgtcagcactggggtgagctgggtgggccgggctgccgctgaggctctggaaccccgggcgcccctgctaactgcccgccccctcccctcctctcccctcctaggactgcccattcattgtctgcatgtcatacgcgttccacacgccagacaagctcagcttcatcctggacctcatgaacggtgagtgctggccgggccctagggtgggccgggcccaggcacgggaggctggggcaagacactgagtgctgcctgtgggactgcctccctcaggtggggacctgcactaccacctctcccagcacggggtcttctcagaggctgacatgcgcttctatgcggccgagatcatcctgggcctggagcacatgcacaaccgcttcgtggtctaccgggacctgaaggtgagcgcccctgctgtccccaggctggacctccgtggctgtcctctccttcctctcgacatcccggccaccaggcccagaggagtggggctcctgggacatggccgccccgtatcttcccatctccgcccctgcccttcccaccgagccactctctgggtccaggttgtagctggggacaggagagaggacccccacctttgccctttctttgggtacccatcgtcctctccagtgaagcagtgacccagctggcatcttgcctggctgggccccatcctgagctgccccaggcagctcactgggcttccttcacagccagccaacatccttctggacgagcatggccacgtgcggatctcggacctgggcctggcctgtgacttctccaagaagaagccccatgccagcgtgtgagtgccccccaccctctccctccccaccccttgccactcccgcttatggcccccttgctcccacaggggcacccacgggtacatggctccggaggtcctgcagaagggcgtggcctacgacagcagtgccgactggttctctctggggtgcatgctcttcaagttgctgcgggggtgagtggcccatcccaggtgggcaggtgggttggggctaagagaagttcctccccaatccaggtgggatgccaaaggaggggagcccatagctgccttggtggtagggttggcaccgtccctgactttggccacagctcatccatgctgcctgcctccctttccccattcctgtcctttgacattggtttttggcctttcttgcccaggcacagccccttccggcagcacaagaccaaagacaagcatgagatcgaccgcatgacgctgacgatggtgggtgcaggtctcagtgcagggccgcagggggctggggggagctcctgtgggtgccaggccatgactcttgcttcccaccagccagcagagatctgggccactgacccctactctggcctctgagacagacctcctgccccataggctctcgccctccccgtgctgttggagcatgactgctgggcgagctaggatgctgtgccccatctgtccctctgcgggggcctggacccctctctcccctgagctgggatggggtcaagggctcttcctaagcccctgctaatgtcccactcctctctaaaggccgtggagctgcccgactccttctcccctgaactacgctccctgctggaggggttgctgcagagggatgtcaaccggagattgggctgcctgggccgagggtgagtaccctggcgccttgggcatgctgctggctgtgcccccatgaggacaagggctgtgtcccgtcacctggaaccccctccaaggtcccagcctccttggaggagctcataagttggggcatggccagccctgtccaatgttctcagagtggaggggctgccctgggagttggagctgctggaaccagctagtaactggcttccagaggggcccttgtcacagatgatgatgatagcagctttttatgtttatcaaacatttattaagcactgggcatagggttgcaaaatttaccagtgttaaaacccacaaccctacgatgtaggaacttctgttctcccatttgagagatgaggaaacagctcaggcttaaggaacttgcccaagttcacagagccagaaagtggctcaatcaggagttaagcccgggactcagggtggggctgagcccagatgactggcctctccccacagggctca

SEQ ID NO: 65982 - DNA, 1047 bp, Homo sapiens
ctaccggttttctgtgccaagccccttgctaagggctgaggaccatggataaggcagacatgactcctgccctccaggagtggagtccagagagaagccagccgagggagtgggtccctaactatgacaggcccagagaggggtctgcaagagcccttgtcccgaggcaagtccccagccagctctcagacctcacctctgtactttgctggacatctcgatggggcggccaatgttccgtgactccaggctgaagttggggtcgaagtactcctcaggggagatggctgtggggttggtggggctggctgcctgctgcacgggggcctgcgtgggtcccagggcggactcagccatcaaggtgacagagggtgccctcccgcccaggctcggccccccgccagccctgtctcggcccagccccggctcaccccggtgtgggaggaatgctgctgcgccatccccaggaaggactggaatggagtcttccccgctacggagaaggggtgggagctggtaaggggtcacaatgctcgcatcgcccctgcccacctccacccctggagcctactgtctgggggaagaggggtcagacgggaatggggaggcctcccagctcatcctgggaaactctggcccctaatcccaggccagggtgaccccaccacacggtgtgaccgggcagcaggcaggcgcacctgggtttacctttgctcctcgacttgtcctgatcagagaggtgctccgtgcgtgtgcgtgtcaccagctccacgttggtggcactgtacacctggggagcaggggacacggggagctgggggctcagagcctgctccccacactcagcctcaccagtgcagaacccaggtcctcctgtcccagagacagatgagatcttgctccccaaaatggaggaggtggcagggtctgaaccccaggaagtcaccaacgaggagatgcagccccagggtcaagaggaacacactcctcttttgatctcggtaccctgggtaggggcccatgatgtgggtgagccctgtgtactcc

SEQ ID NO: 65983 - DNA, 1073 bp, Homo sapiens
aagaggatccacaactccttggagaaacaccctcacgtctgttgccgcacacattcctctcagctccgccccatacccgtcactacagcctcacctcccacccctgtcactacggcctcacctcccacccctgtcactacagcctcacctcctacagccttaagtcccaggcccatgtctgcctgtccaagggctcaagactttctaactgggatgtggtagagggactgaaggtacctttgggggcaacagcaccctagtttcattctcaactctagccctgcacactcacctgtggcacggaatgaaaacagagcttcccgtgcaaaaagggtcacgcctcccacccccgccccctccctgcacctcctgtcctctcccagttcattcctggaaccagccaggccaggcaaccagtggcccccaaaggcaggcaggatcctcaggccccagccgcgggaggctggaagggctggcagatcgcttccctcatccacctccaccggtccaggtctttgctgctgtccccagacctcctgtgacaccacgccagatcacagggcaccaggccagagatagtcttctttttgtcctttctggcctctggctagtcagtttttcatagccttacagtatctggctttgtactgagaaataaaacacattttcatatttggttattttcaatgtgacgatgaagccatctgtgttgcagtcagacccttctctgctggctggggaaggtggccgccccttcctcccagcagtctcctcacaattccaaggtggctcgtgacagacctatttgggggagtgccgtgtttgggcgtggcgtgggaggaagattgggtaagagaagagaggaagtcagtgctatctccccatctcctggggcagggcctggtaaatatgacctgctcacacccacccgctcagacaggtcgggcaagggaagaagtcgtcagcgggcagcaggcatgtggctccactgtgagagctggaaggggttactcatgaggaagtgcctacctggacaggaccaagcctgttccaaaagcgaagcctccttggga

SEQ ID NO: 65984 - DNA, 1065 bp, Homo sapiens
cctaagcaccctggcacatctgcatggctgaactctcaccctcactgggaaaggtcagcctgggggtgtccaggccagggactgaggggcagctggctaaagtggctaaagacatgtgctcacgggtgcgcctgcctgtgcagctgtctgggtggccagtcacttccttgggctaagagagagagagtgtgtgtgtgtgtgtgtgttcatgaggagagccttggttcctagggcccagggatctggatggaattaggggctggccgggggtggggggctgttgcaggaaacgtgagctgtactcgttagctcctcacgtgctcagccggatttataaacacacagagaagacgggatgtaaacaatcagtgggcagcagccagaggcagagctggggcgggggccgggctgggggccaggactggtggggagggggagagggggacctaggacacagccccagtggccggggtccacctgcacaacatgagcctgagggaggatggatgagggctccaggaagcccaccacgcactctcctcaggaggcaggcgagctgtgttgggttcccaagctcacgactaaaccgcaggtgttcaccccacgctgctttccctcctgctgcctgagacacgggcatggctttgcccagagtggaagctgtcatagcaggggcagagccctgtccttctaccccccctttcttttctcctaacctcttctccctctggattcctgagaacccttccctctttctggttctgtgggccgtcggatccttctgttctcccctgccccccacccgcagcctgcaacgacacagttacctcagaactgaaatattcctggaaacaccggcctcgtctggttaatttcatgagccgtttttttctgcccagatgacttagttcttgtctatccaaaggcttctccccctgctgtccctgtgtagggagctgatctcccctagggatgtcccacagggctcagaatgggagagggtaagttctgagctgggttcctgactgtacctcttggccatgacaaaggcagagcctagaactc

SEQ ID NO: 65985 - DNA, 1036 bp, Homo sapiens
ccatctcaaaaaaaaaaaccagactgtgtgccaggtggggatgcatcagctggaaggtattccccttcccctgggcttccgggtccacgtgtgtaaaatgtaagggagtcctggagaaactcactgacccctactctccccacagtaccaaggctctggtagttcttggaagggcccagggcatccctgtattcctgcagggcctgcccgtgccttgcccctcaggtcctgtggtagtgcagaagatatatttatctctgccacccttgctctccagacccactttcaaatgagttgaattgatacataataattgtacacatttggatacatgcatacactttgtttctccctctccttcccttctgctcccctcgtcaccagcccttgccccttccgtggagccttgggggaggaggttactcttcccttccccttcccgggggatccatggaaatagtgcccctgtccctgggcatccggctcagtatgctggagtcatccttgacctcatgctcgccctcacccctacacagtctttcagttaagtcctgaccactctgcttcccaaacaggtggcaacttaacaggtggcaactttgccctcctcttccatctccaaggcctaggccaccatcctctcacctggatgactgtaacagctctcagtggtctcctgcctccaccctgccccctccaggccactctccatacagcagcaaagtgaccctcctaaaatgtccattgtgtcatgcctctcccgtgtttgcacactccagtggttgccataaaatccaaactctgccctgaacctgcaggagccgccgccacccatttctccacctgtggcctccccttgatcacctgcacagccatgccaaccctgtgggctccctgaaccctccacttccttttccacctggggattttagcacatccttagctgtccccaccacttggcatcgtcttaccccttctaacgtggcggtgcttctcttcctccaggctcagtgccgtcttttctgcccccaccagc

SEQ ID NO: 65986 - DNA, 1133 bp, Homo sapiens
ccaatccatgcaaaacacagggagggccatggtaaaagcatcacagcggggacctgagagggtggtgacgctcaagttcgtcaagaaaggtaagcacgtcttttggccgggcgcggtggctcacgcctgtaatcccagcactttgggaggccgaggcaggcggatcacgaggtcaggagttcgagaccagcctggccaacatggcgaaaccccgtctctactaaaaatacaaaaattagctgggcgtggtggcacgcgcctgtaatcccagctactcgggaggctgaggcaggagaattgcttgaatccgggaggtggaggttgcagtgagctgagatcgcaccactgcactccagcctgggtgacagagcgagactccatctcaaaaaaaaaaaaaaaaaaggtaagcaggtctttcaaggcattccaagcataaggaagagcatgaatgaggcctagaaggatgccagtgcccgaggtgacgtgggagcccttttcccagagttacatgctgggcccatgatgggtgtgggcctgcatgggacaggagagcttgttgcagagatgtgatgctaggctgaggtgtcttatcccatgcagtctttcctgtctgtcttccgctcactggcgatgctggagaagacggtggaaaaatgctgcatctccctgaatggccggagcagccgcctggtggtccagctgcattgcaagttcggtgagtgggcagccggccagccaaggggtgcctcagcagggaggtcggcgaggcccactgagaccctatcgcccatccaggggtgcggaagactcacaacctgtccttccaggactgtgagtccctgcaggccgtcttcgacccagcctcgtgcccccacatgctccgcgccccagcacggtgagcacacccctgccctcagctcagccccgggtctctctcttccttctttggggccccaaggggttgattttagaaggtacctctttcattttccctacagagtttctgtgaacctcaaagacatcccatggcccgctatgtgctcaggtccttacctggctctttaaaggcagacggtggcatggaggaggggcaggcgcctccttgctccattctccttactgttaggagcctg

SEQ ID NO: 65987 - DNA, 1081 bp, Homo sapiens
accaccctaaatgcagaccaaggaattggcccccgtctctcactacccaaaagagctctgagcagtgctggctcaaaagaacctggggaaacagatgtcaggacccaaagggatcttcagtcaccctgagaaatgagcaggaccttgggccacttgaatgcaagcagtgaccagcatggagcagggggagagcccactcctctctgagctggtcctcgccagggacgtttgcttcaactggagtccccatttccctggccccagacagcccccagtgctcggactgcccagaacagctccaccccatagctgattattcagcctccctccagcctcctgccctggccttggggactcctcgatcctgggcagtcaggaaaagaggctgccgttgaatggggaacacctctggaaggatgcccaggccggagaaggggtctgagcctctgagccacaggttatgggcagaccttcaaggttactcaagccagacaagagatttggtggcaggccagaaatgtgctccctagaggaggagttggaatgggtttgagcagccagaaagtcaagtcagacctttgggatggagaatgcaggctcctaacagtaaggagaatggagcaaggaggcgcctgcccctcctccatgccaccgtctgcctttaaagagccaggtaaggacctgagcacatagcgggccatgggatgtctttgaggttcacagaaactctgtagggaaaatgaaagaggtaccttctaaaatcaaccccttggggccccaaagaaggaagagagagacccggggctgagctgagggcaggggtgtgctcaccgtgctggggcgcggagcatgtgggggcacgaggctgggtcgaagacggcctgcagggactcacagtcctggaaggacaggttgtgagtcttccgcacccctggatgggcgatagggtctcagtgggcctcgccgacctccctgctgaggcaccccttggctggccggctgcccactcaccgaacttgcaatgcagctggaccaccaggcggctgctccggccattcagggagatgcagcatttttccac

SEQ ID NO: 65988 - DNA, 1734 bp, Homo sapiens
ggactctttgctggacggccactttgtcttggccacactctcagacaccgactcgcactcccaggacctgggctccccagagcgtcaccagccagtgcctcagctccaggctcacaggtgagggcacctccccccaactcctcctctctccatgtctgtgcactccagcctgagactgcaactcctagcttctgcacctccccgcaatgtgttctctcccgccccttctctttctatcaggccccagcccctaaccctatagtgctcacagctgccagccctgcagactcagccttctcggttagctgtactcagagacccctcccacccagggaagcatccccaaggccctgccagcttccttctctggctgaggccgcccctctgagcctcctcccaggccaaggagggaaagggctgctgggaggcaggagctgcctgggctgggggaagcaggtggctggaagggcaggtgggctggggaggatggcccagtgcactttcagcacaggaagttggggctggcccccagcccagcctgtccctgggctcctgtgctttccagctcctgtcccctgggaaggtgggggcttgggctccatgtggcccagttcataagacttgctgctcctccctcctagctgagctaaggtagcccccgggatgcctccctcaggcccctacctgaattctgatcaaagagattcctggcccaccccctccaggaagtcaccacttaacccctgcatcctctcctctccagccaaatcaggaagtcataaaaccaagagatctccagtggtcgggggccccagagctcccttcgagccctccaaggtggggccctgcctctgctcccccagtcccctccctgatactccgattctgcctacagcacaccccacccggacgactttgccaatgacgacattgactcttacatgatcgccatggaaaccactataggcaatgagggctcgcgggtgctgccctccatttccctttcacctggcccccagccccccaagagccccggtccccactccgaggaggaagatgaggctgagcccagtacagtgcctgggactcccccacccaagaaggtagggactggaggtggaggcaggggtgggaggtagggaagggagcagcctccagaactcacttgttctctttccagttccgctcactgttcttcggctccatcctggcccctgtacgctccccccagggccccagccctgtgctggcggaagacagtgagggtgaaggctgaaccaagaacctgaagcctgtacccagaggccttggactagacgaagccccagccagtggcagaactgggtctctcagccctggggatcagaaaggtgggcttgctggagctgagctgtttcactgcctctcgcaggccccagctggctgtcactgtaaagctgtcccacagcggtcgggcctgggccgttatctccccacaacccccagccaatcaggactttccagacttggccctgaactactgacgttcctacctcttatttctcattgagcctcaggctatactccagctggccaaggctggaaacctgtctccctcaggctcaccttcctaaggaaaatgtcatagtaggtgctgctggcccctggtgatccagcttctctgccaatcatgacctgttccttcctgaagtcctgggcatgcatctgggacccccgtggagctgacaagttttc

SEQ ID NO: 65989 - DNA, 3172 bp, Homo sapiens
tccgtgaatgcgaggtccaggctgtttttatctcttgagcctcagtttcctttcctgcacttggagcagttaaccctcagtgcctagcagccggttattaacatgttcacaacaccttccacccagggaaggggtgggaaagtctgttgggcttttgaaagagaaaaacaacttccacagtccttccggccccacatcctctgaacagggctgggcgcctcctctggggcgtaaccagcttggtcacgcccccgacagaccccgcccccagcccgccgccgaggccccgccccccgggccgccgcgcctcacgtccagcgggggcgctagagggcgggggactgggcggggcgggcccgggaggcctggaggcggggccgcgggccgggggcggactggggcgggcggaaggagagccaggccggaaggaggctgccggagggcgggaggcaggagcgggccaggagctgctgggctggagcggcggcgccgccatgtccgacagcgagaagctcaacctggactcgatcatcgggcgcctgctggaaggttggtcggggcgggggaggcccgcgtccgccgcgccctggccccctgcccggcccggaagtggcgcgcgggcgggcccccggggccagcttagactgggcggggacgggcagcgaggttccgtggccgcagctgcccccccgcggacgcgcctgagaggtccggggccagctccgacgcgcggagcagctccccccctctcccgggctgggggcgcacgggttgcctgggctcttggggcgagggagaaacccgggaagcccggtccaggaaggggtcctgcgctgtgaggtttttggtggcagccccctgcgcacgacagtcgcctcccgaggcgctgagggtagctgggggcttcccctgggaggcttgaggccgcggtcccgggaggctcagcagcaacagctgcctgtgggcaaggaggggccgaggaggcctaggcgcccccggaggtatccatggggccacccgtgtcgcccaccctcctcctgtcagggtccagggtcctgacaccccattgcgccccagtgcagggctcgcggcctggcaagaatgtacagctgacagagaacgagatccgcggtctgtgcctgaaatcccgggagatttttctgagccagcccattcttctggagctggaggcacccctcaagatctgcggtgagcccccggcccaggtccccttgccttcctaaaagtggcactggaccccacagagttcctggagccctcctcccttgagcgcagtcctggccctgggttcaggtctagaccttgcatctagcttacccggttccctgggtcacaggtgacatacacggccagtactacgaccttctgcgactatttgagtatggcggtttccctcccgagagcaactacctctttctgggggactatgtggacaggggcaagcagtccttggagaccatctgcctgctgctggcctataagatcaagtaccccgagaacttcttcctgctccgtgggaaccacgagtgtgccagcatcaaccgcatctatggtttctacgatgagtgtgagtggtctgagcgtctggggctgcccgggtcctgaaccgcactctttgccattcagtgggaccttcacattggcctgatatctgacagacacttgatagactgtgcgctccacgaaggcggggcccaggtccgttctcgtgcctgccctgcccctcctggcatggggtctggggaatggttgctgactgaagggctgcccggattctagtgctttcccccagggccctgcctggtgacactccccctacatttgctactaagcacttaggatgtttgcagatgggctctgctgtccagaagctgagataaaccagacctggacttggcccggctcatgggtgggggcatgcgaggagtgccaaccctgaggctggtccagattggaacttagtttccagtggactcgggtgctttagaattacttctggcaggaggccgaggcgggaagatcccttggacccagaagctccaagttacagtgagctatgatcttgccactgcactccagcctgggtgacagagcaagaccctgtttctttacttttttgagacggagtttcactcttgttgcccaggctagagtgcaatggtgtgatctcggctcaccacaacctccgtctcctgggttcaagcgattctcctgcctcagcctcccaagtagctgggattacaggcatgcgccaccacgcctggctgatttttttgtattttagtagagacgaggtttctccatgttggtcaggctggtctcgaacttctgacctcaggtgatccgcccgcctcggcctcccaaagtgctgggattacaggtcttagccactgcgcctggccagatcctgtcttctttaattaaaataaaaagtaactagaattgctcctggaaggctgacaggtggcaggggtggggggtggtttgcatcggtgcctgactctctcctcccagccacggctgaatagcccagggaccctggctgagggtggggtaggcaggcacctcacagccacctccccctgggcaggcaagagacgctacaacatcaaactgtggaaaaccttcactgactgcttcaactgcctgcccatcgcggccatagtggacgaaaagatcttctgctgccacggaggtgagggaggggatggctggggaggaggagcactggccgcatccctcagcacccggcagctctccttaggtctcatctgggaagtcactccttccaggaagtgtcccccataccccactgtgctgggctgcactcacttccttgatgtgtgtcctacatggagtgggcttgtctcctttctcccgggagctctgtgctcctgagggcagggatgcctttgtgcctgtttgggaacttgaaaaagctgaggggaaggggatgacttctgcctgtctaggcgcccaggagaccagtggcgggaccaggagggtggtgggaaaggtggggttcattggccaaggcttcctggagggaggatgtccttgtttgaggaagtgaccttcccccggccccccaggcctgtccccggacctgcagtctatggagcagattcggcggatcatgcggcccacagat

SEQ ID NO: 65990 - DNA, 1015 bp, Homo sapiens
tgaggctgccaggtccctgctctactcccgccttcaccctgtcttgtttctgcagcttctacctggctgagatcacgctggccctgggccatctccactcccagggcatcatctaccgggacctcaagcccgagaacatcatgctcagcagccagggtgcgcatgtgtgtgcgggcagctgcaggcggggtctgcaatctgtggggagggctgaggacctctgtgggtggggtggggccctggtcacgcctctccaacacccttcctcaggccacatcaaactgaccgactttggactctgcaaggagtctatccatgagggcgccgtcactcacaccttctgcggcaccattgagtacatgtaagtggcacctggctggcccaggggtcgggaggacagcccgaaggggcacggcctgactgacagttccacctggaccccagggcccctgagattctggtgcgcagtggccacaaccgggctgtggactggtggagcctgggggccctgatgtacgacatgctcactggatcggcaagtccagcccccggggaggaggaggggcaggggcagaggtgggagtagcccccctcctggggcaagggcagggcctggtgggaggcccacaaggctcctctcaccttcctcctcctccagccgcccttcaccgcagagaaccggaagaaaaccatggataagatcatcaggggcaagctggcactgcccccctacctcaccccagatgcccgggaccttgtcaaaaaggtgcagctcccttctctcttctccggggccctgccagccattctgcacgtgttcctgagtctctctgggctgtggggaagccagggccaccccggcctgtgcagtttgcctctgggaatgaaaggagcccctcccttgaagtcagggattgagcccaggtctcagccctgtcacagaccagctgctgccctggcccagtccttaggctgagtcctaaccagtgacacgcttgtgatgagctggccacac

SEQ ID NO: 65991 - DNA, 1024 bp, Homo sapiens
ggcagggccccagggcagagggagtgaccggggggcaagcagggtgagctgttagtgggtttggtgcattctctacctacagagacatccctttttccggcacatgaattgggacgaccttctggcctggcgtgtggacccccctttcaggccctgtctggtgagcagcagggctggtggccagtggccggtggcgggtggcaagtggagaacctgcatcttggtgccctctgacccctccccactctggtcggcccacagcagtcagaggaggacgtgagccagtttgatacccgcttcacacggcagacgccggtggacagtcctgatgacacagccctcagcgagagtgccaaccaggccttcctggtgagtgcgggggcctgaggcctgtgggaccagggcacggatcgtgactaaggatggcaggcactgagtgtcgcatggccctgcctccgccccccagggcttcacatacgtggcgccgtctgtcctggacagcatcaaggagggcttctccttccagcccaagctgcgctcacccaggcgcctcaacagtagcccccgggcccccgtcaggtactgagggacgtgggggtgtgtggctgggttagggacgctggcaggcaggatgccagctccagccttgggtgccttggccacgtctgtcggccagtgttggcttcggttgctgtgtctatcatggggacctcagttcctacaccccttgtggccaggctgcctggatgggagtttgtggagcccgcggcctgtgtgcctgggcaggtgggaaaggctgccttccctgactgagtgctgggagcctctggcagggcctaggaggctcttattctgccttggtttcccctgcagccccctcaagttctccccttttgaggggtttcggcccagccccagcctgccggagcccacggagctacctctacctccactcctgccaccgccgccgccctcgaccaccgcccctctccccatccgtcccccctcagggaccaagaagtcc

SEQ ID NO: 65992 - DNA, 1073 bp, Homo sapiens
gcctgcggaggtcctggggtgaggactggaagtggaggatgccaggagagctggcggtgggtggggggggcggtgagggttccacccgtggctcctccttgcatccccaggttctacaaactgcatgagcgcaagtgtgagcccatcgtcatgactgtgccaagaaaggtgaggccgcccgtccctcggctcacttggccctttctccagcaagcgggccatgcagttgtgaccagggcgaggcctgtgaatggaacatgacctagtatggtttgtgggcagtgagctggacagatgccagcttgcccttgtaccagccagctgttgggctgtgccagtcagggggcaagtggggatgagacagagggtgagcaggggccctgctctggatgagccacaggagaaggacaccaggcagtcagggagggagtggcagccacacagatcttcctgaaggaggcaggacccataacacagctggggtggcgccatccactgggggcaggccaggcgaagggcacagtggtgggaatggagagaggaacaaggagtctggctgcagtggggaatcccatgaagaggggaccgggccacatgtggcttggcctcagatgccaagagcctcggacacgcttccatgattctctggccagcatttgccgactgctctttcaacatgccaggcacattttggggagtggagctgagctgatagggcctgctccaggagctcacagtccatgggccccagaatcccataaagccacatagtggcccctgtgccttgcaggggaaggtgatgacaggggccttgctcagaagggtgggaaagcttccgagggagctgttgatggtgtccagaaaggaagttaaaggccagatttgagctttccaggccgtgggagaatgggttaacagagtgcaagcctggaggccaggggagggatgaggggaccctgatggggcctcctaactgatcctgacctccccggccccctgcccagtcggacctcttccaggatgatctgtaccccgacacagccgggcccgaggcagccctggaggctgaggag

SEQ ID NO: 65993 - DNA, 1964 bp, Homo sapiens
ggagcatttacctctcagatcactgcctgcggggtgacaggcggccaggctctgcacctgtgaccccattctgtaactgggtaaaccgagacccaggagggttacggtggcctggcccccggttgcatcctcccggctcaccttcagcagcctggggagggctggagttgttgggatgggccggactgacccaggcctctctgtcccgcagacatgtccttccgcaaagtggtccggcagagcaaattccggcatgtgttcgggcagccggtcaagaacgaccagtgctatgaggacattcgcgtgtcccgtgttacctgggacagcaccttctgcgccgtcaaccccaagttcctggcggtgattgtggaggccagtggagggggtgcctttctggtgctccccctaagcaaggtgggtcctgtcagggttgggggaagaggaggcacctcggccacccctactgggcctttctgcacaccttgaatccctcatcttgccgtttctcacactgctgggcaggtgttataacccagatttatcgccccaagtgttagcacagatggaaagtagcctgttgccatagaggcagggttagaggcagcaaacatttcctgctcacctggcaagtggggcacagtcacatctgggccacctgtgagccgggacgtgcatgtcattcccactccatggaggggaagaccaaggcttcgggagggatggagcccactgactgccccctcgtgcccacagacgggccgcattgacaaggcctacccgacggtgtgtgggcacacgggacctgtcctggacatcgactggtgtcctcacaacgacgaagtcatagccagcggctcggaggactgcacggtcatggtgaggcacaggactggctgggccagggtcgtgggtgtggccgaagggggccagcaataggaccagcagaggactgagctcggtggccctgtccctaccacaggtgtggcagatcccagagaacgggctgacctccccgctgacagagccggtggtggtactggaggggcacaccaagcgagtgggcatcatcgcctggcaccccacggcccgaaacgtgctgctcagtgcaggtctgcaccgccccccgttttgtgctccccccccccacggacccctccatacatcccagcagcccctccagggcccacatgacaaatgggaaagctgaggccctcagagttggagagacccgtctgtcccagggtggtgggcagagtgggcctcagcctggtgagctaatggcctcctgccacccacccggcccgagctgacaaccctcacctgccaggctgcgacaacgtggtactcatctggaatgtgggcacagcggaggagctgtaccgcctggacagcctgcaccctgacctcatctacaatgtcagctggaaccacaatggcagcctgttttgctcagcatgcaaggacaagagcgtgcgcatcatcgacccccgtcggggcaccctggtggcagtacgtggctctggagggcaaggatggctgtggataggcccaggaccttgagcagggcgctgcactgaccagcctgtccccccgacaggagcgggagaaggctcatgagggggcccggcccatgcgggccatcttcctggcagatggcaaggtgttcaccacaggcttcagccgaatgagcgagcggcagctggcgctctgggacccagtgagtggccagcctgagggggcaaacttgagacttgggccccaccctgggccaggcaggcagggttcaccctggggaggcctgtggttcctagcttctctgcctggaacttgaggctctcagggcctaggactctgtcagactttcctctcctgccccctgctcgcccgactgccccaccactcccccatggcctcccactgcctctgtgtctttgcccatgttgttcatgccaacggaagggccc

SEQ ID NO: 65994 - DNA, 1017 bp, Homo sapiens
ggcgcagggagggatggtgacttgcctggagatgcacagcaccgtctctcccatactcggtcattcacaccatcattgattcaccaggcacccactccgtgtccagcaggactctggggaccccaaatggacactaccatggaagctgacctgggtgccactggccacaggccccgcacagagcttgatgatgaggactcctacccccaaggtggctgggacacggtcttcctggtggccctgctgctccttgggctgccagccaatgggttgatggcgtggctggccggctcccaggcccggcatggagctggcacgcgtctggcgctgctcctgctcagcctggccctctctgacttcttgttcctggcagcagcggccttccagatcctagagatccggcatgggggacactggccgctggggacagctgcctgccgcttctactacttcctatggggcgtgtcctactcctccggcctcttcctgctggccgccctcagcctcgaccgctgcctgctggcgctgtgcccacactggtaccctgggcaccgcccagtccgcctgcccctctgggtctgcgccggtgtctgggtgctggccacactcttcagcgtgccctggctggtcttccccgaggctgccgtctggtggtacgacctggtcatctgcctggacttctgggacagcgaggagctgtcgctgaggatgctggaggtcctggggggcttcctgcctttcctcctgctgctcgtctgccacgtgctcacccaggccacagcctgtcgcacctgccaccgccaacagcagcccgcagcctgccggggcttcgcccgtgtggccaggaccattctgtcagcctatgtggtcctgaggctgccctaccagctggcccagctgctctacctggccttcctgtgggacgtctactctggctacctgctctgggaggccctggtctactccgactacctgatcctactcaacagctgcctcagccccttcctctgcctcatg

SEQ ID NO: 65995 - DNA, 1093 bp, Homo sapiens
caaagcaggccccagtgagggccggggggacagctggagtgctgggcaggcaggcacgccctgctcctgctccttccacccatcggcctctgcctcccaggtaagccaggcctcactggtcagggccccagtctcggggtgcctggggctctgatccaatagggaatggagacagcagagggggtcagcctgaggaggaaccctgagggtacggagggcaccaaactaaaggccaagtggctggagccgtgggccgtgggcaggggccagcccttcagggcatccgttccctccccagactataccaccacctgggctctcatcgccctcaaagggaaactccctccccgctgccagcggggaagggcgaggtggggctgcaggcctcttggatcccaggtctgggtgccctccaactcccctcaccctcaccatcccaccaccatcccactgcagagcccctccccctctctttagcagctccaggagacaaacaggggtcacctcctgcctgagctgtgggaagcgggagagggccgcggtggggtggaagatgctggagaggcaccaggggctcctaggatggccctcctgaccccaggctgtggggtcctgaggctcagagacctcatcctgagcccatgagtgacactcgctggaggggagggggttcccactgccccagactccctaccttcgggtcccctgggcccatgggaaccagagccctcccttcttggaatcctaaacactcgaaccccagaggagcaggcataaaggggccttgtgatgagcggaccaaacggtcttcaaactgtgttccctggaaccctggggggtaggggtactcttccctcccttaatttgagcacccccttttagtccatataggagttccactagaatactttttttttttttttttttgagacagagttttgctcttgttactcaggctggagtgcgatggcacgatcttggctcaccacaacctctgcctcccgggttcaagcgattctcctgagtagctgggattacaggcatgcgccaccacggccagccaattttgtatttttagtagagatggggtttc

SEQ ID NO: 65996 - DNA, 1097 bp, Homo sapiens
aggcgtgagccaccgcgcctggccagccagttccactcttaccgctgcctgtacctagatgctcccctgcccaccatctctgcccatgcacaccttccacaccctcccacaccaaggtggtttgcctcctgctccaggaagtccccctggacggatcctctagctggtagtgatctgaaccatctctgacccatccctgggccccagtcccaccgcctgcagggctctaggccttcccaaggctgagacctgagtgagaggccagcaaggatgccacccagccctgcccccctctgcccacctcaccacactccgcacctctcggaaggcgatgcgcagctctcgcacccccagcatgtgcgccgtctcctccctcagctttgggcctatcagttctacaaactcctcaaagtccacacggccgcccactgcagacccaggaagagtgtcacaatggtgagggcataaggtctgaagcccaaggagggacatcccacaggccaggcacccccacccccaggctctgcacctaggaagaaacacccgtgtccacgcctgcagcagataggaggctggaacccccgtccttggctgctggggtaccagggctgcttctgctcttagtggagaacccaagtgtgcaaggaagagaccaggctttggagccagatagtgcccggttcaaatcttggccctgctgctgatgtgcgtggcattggctgacttactgccctcccttcctcatcctaggagcagggtgaggagcctactccatggggttcaggttcatggccatgaagtactggagcccagtgggcagcaataaatgccacctccgaacacacccatgtggtccgtgcctcagttctaagatgccatcagtcactcaaagcactcatggtcacccaacagctttggggacagaaaagcatgacaccaaatgtccagctcaattgtaaatcacatccccattttgggaattttaaggaaaaaatgcaggagtcctggaatgaagtgaatatgagatttgtctgaggacaaaccagcgaaggggaaccacacagttcctgccatcagacactgagtcgcaaggcata

SEQ ID NO: 65997 - DNA, 1089 bp, Homo sapiens
ctgtcactcatggttgtaggagtccaggcggccaagcctccatccagatctgaaacccccacagcgtcagctccctcttacaaccccagctttgatttctttgtctttgatacatggagccatccctttctttctttcaagctcactttttttacacttgggttttttggttttttgtttgtttttttgtcttttatttttcctttttgtggagaatggggtctcagtatattgcccaggcaggtcttgcactcctgggctcaagctatcctcccgcttctgccccctgacagctgggcttacaggtgtgagccactgcacccggctcaagttcattaaaaaaaaaaaaaattataaacataagtagtggaaggggtccagccatcctctccattcatcatgccactggggggtccccactgaatgctgccagtgccagggaactccctacctcccagaggtctggagagacccaaatcttgctcacactgaggaacggtgggcagctgagagcaggtcttctccaggcagcttgagtaggaggaggtaaggatgagggtgggcaggtaacataacaagccaacattgaggccaggtgttttcagggatagaagtagtctgggggctgctgggtctccatctccatcctggaggctcctgggggaggcctgcagcctgggtctggctggtgtctggggccgcaggggcaacagatattccctcctggagcctcagtggcgggagagcatcatcacaaactctgcgggagagaagggcagggcttgggtcagtccacgtcagggatcccaggaggtgctgggctcagcctaggccctggaagcacgggagggttttccgggaaggagactcaccgtcaaagtctacggtgccatccccattgaggtccacttctcggagcatctcgtccagctcaggacccgccagcggctccccgagcagagccggtaccgcctcccgcagctccgccaccgtaattcgtccatccctgtccctgtcaaactaaggtccccgcaaagctcagcccctcccacccaaagctgcctcagcctcagccagctccactctttt

SEQ ID NO: 65998 - DNA, 1051 bp, Homo sapiens
tgaccgggctctggtccctcccgcaggtgtctccagcgccatcttcttcgtgccgggcttcctgttgttggtgcctggaggtgcgagcgggcaccggggcggaaggggcgggggctgtggggcggcactgggggcggtgttgcggggaggggcggggcttctgcgctgacaggccccgccccgcagtctatcacgtgatcttcatctactgcgcggtcaagggccaccggggcttccagttcttctacctgccctacttcgagaagtgatcgcggcgcagcgtggaccccttgcgcccatgggggcgcccctcttgccctgttccgttcccctcatctcaagggaagaggccctccaggaccctcgaaaccccagcccctagggagtttgctcaggaagttcggggcatgcaggcctggccctgggaaagccgcccgtcgcctgctctgtgccttaacttattctcgggccgtgcggctgctaggttgctgttattttgtgctaataaaagagtaattaattccaccagaggcaattgctctcctcctgtcctgccactgctagcccagcccaccagcctgaccacagcccccctcccaaggactgaccctgacgctgaagggcttcgagcaccaccgaacgcgtggcagccctgatgctgaggcttgcccaagggcacggggcatgttaggggcagagctgggcgtaggactcctgccttgccagccaggagccggccggaacagcctgccccacccccagcccttggatgactcaaccagcccgtctctgtctggtggccctggccgagggcacgcagagatgacgcaggcctgggacctggaggctggtatcctagttccagcctggctctggggccctgggctgccacagccagccctgaatgtgggccatgtcaaggcaatggcccagccccctccacccactgccctccttcccagtcccagaggttgggagaacctgggggcagagggcataggaagccgcgcctgacagacaccctcagtggtcaaagacttagaaatgcaga

SEQ ID NO: 65999 - DNA, 1010 bp, Homo sapiens
ctatccttcatgagggaaggaaggacatctggaggccacctgagccaagcctagaggatgtccagtattactaccagagaggtgttttgaatcgaattgaaattgagtccatttccagggaagagcatgggaatttgtatttcaacagggcaaccttgaggattaaccaaacctctaatttcatctagccgtcattagatttgaatttcttttgccgaaagtggaaagggagtggggaggcaggggtcctcctctggagggcagtgggtggggctgtggagggttgctgagaccccaccccacccccaggtatcatccatgcccgggccctagtcagagagtgcctggcagagacagagcggaacgcccgcacgtaacaggaagcgcctcggcctcagcgtctggacctatccggccactgcagagcacccgcttctccctggccttcatcccgagttgcactaaccatcctgggcttcctgtcctgtgtcccttggtgggtcccctccaggaaccaaggagtggccctccaggtggcagcactaaggacacccccccacaacaagagttagcagcgaggtccccatgagtcccacccatgacctgccgacagtgttgcccaccggaacttttgtggcccctaccgctcagcccttcccagcacttctcccactttgtcccgagcctccttctcccccagcaggggcacaggcctggcacctccctgccttgtgtcctgagccatagtgactcttttatctgtgtgtcttttgctaaatatgccctttttatattaataaaagatgatttggagttgtgctctcagctctgagcctttctgggtctggttcttcagctaagcctgggtgggccaggcagagacaggggaagaggagactatggatggggagggtgtgattaaatgaggtttgacttgcctctgtaggccatcagcctttggtgggacctgggccctctccgccccagccgtggcgctgagagccctgggc

SEQ ID NO: 66000 - DNA, 1946 bp, Homo sapiens
ccgggcgcggtggctcacgcctgtaatcccagcactttgggaggctgaggcgggcggatcgcttgaggtcaggagttcgagaccagcctggccaatatggtgaaaccctgtctctactaaaagtgcaaaaattacccgggcgtggtggtgagtgcctgtaatcccagctatccagaggctgaggcacaagaattatttgaacctgggaggtggagtttgcagtgagctgagattacgccactgcactccagcctaggcaaaagagcaagagtctgtctcaaaaaaaaaaaaatgcttactaagtggcagtggtatctatgatgctatagatgcttccctagccctagcccagcccctcctaaatagggagacccaagattctgtagcttctggcccaatccctcatggccccagagcactctgggcctcctgaccctttgtctccctagacagcacccaagaaaacctcatttggctcgctgaaggatgaagaccggattttcaccaacctgtacggccgccatgactggaggtgagacagtgcccttagtgtgttgggtcccggagcaaggtgtccccttcattgccttccctattctgtccaggctgaaaggttccctgagtcgaggtgactggtacaagacaaaggagatcctgctgaaggggcccgactggatcctgggcgagatcaagacatcgggtttgaggggccgtggaggcgctggcttccccactggcctcaagtggagcttcatgaataagccctcagatggcaggtgtgtgtgtgggggcggggcagatgtggctgtgggagagaccttgggggtggctggggtttccctgggcctttgggctctttccttagaaacttagcatgaatgaggtgggcacatgttcccaggccttaaatggatgggacttactctgtggacttccacaggggagacttatgtagcagaatcaacacatgattttgactcaggcagacttagttcaaatcctagctctgcctcctaatcatagaggtttgggcaatttcccagcctttgtgaaccttagcttcctttttgtaaataggtacagtgatatcatgcaaggattaaagagataatgttcatacagcttttggcctgtatgctggttggcacataaagcaaatgataaatgtcacctgctttacctccttttgatggtagagcttgaggaatgctctttgtcaccaagagtagaatctggctctcaggggcagacacaaggagagatgtttggatgagctgaatgaagacctttcttgtggtcatagccacccaaagacagaataggcagtgagctccctgtcattggtggtgagcaagcagagcccctgggacatgttgggagggcagtaaaggattggctgtcagaggagacatctttgaggcctccctgggtggagtggggtggcatggagttgaagacccagtcctgatggccctgtagcctgtctgacctgtgggcccctgcaggcccaagtatctggtggtgaacgcagacgagggggagccgggcacctgcaaggaccgggagatcttacgccatgatcctcacaagctgctggaaggctgcctggtggggggccgggccatgggcgcccgcgctgcctatatctacatccgaggggaattctacaatgaggcctccaatctgcaggtgggtagggagagatgtagacagatgagaaggtgttcagtgtgcactcacacacccctcacccagcacagttgttctgaggtgttagtacctggtctgtcagtggttgaactgggggagtggtggccagtcctgcatgcatcccaaatgggacttggctcccaaagcctccttccagggctcctaatgctgctggtgtaaattttttttttttgcttcaaaaatatagtattttttataaaacaagtagcaagaag

SEQ ID NO: 66001 - DNA, 2780 bp, Homo sapiens
tgtgtttagcaagagagcggaataattatgaatataaacaattcctatttggagaaaatacattatgttcattgcttggaactatgaataatacttatatctgtaggaaatatagaaaaataaaataggttaaggcaataaggatataggcaattacatttttattttaattttataaggacttttatttttcctttacagactagggtagttaggagacctgatagtagctacttcgtttttattttcctggcagcaaagcagcttacttatgtgttccttcttgcttatctgttccagatcatagtcaagttttccaattcgttttactaagctagcaaaattttttataccaggagcattaggagcttcaccgtgggaggccttcaagggcttcatgactcctgaagttataggctgactcctgggctgggggtgggctgggaaactcacacctttgtcctgcaggtggccatccgagaggcctatgaggcaggtctgattggcaagaatgcttgtggctctggctatgattttgacgtgtttgtggtgcgcggggctggggcctacatctgtggagaggagacagcgctcatcgagtccattgagggcaagcagggcaagccccgcctgaagccccccttccccgcagacgtgggtaaggcctggcgtaaccctgggtcagactgtgtcctgtgacacccgggatctggctaggctccctttggattgttcttagggatttctgagtggcttcccggctggggccagatagagagtaggctggcaacaacacacaggctcccccagggccgcctgctgtccctcctcctgcctcggtcccctccgcaccagtgctgctctgtggctccaccttcacagtgcctgttctgaggctaagggcatggggtgaacaaggcaatgggcatctctggagtttggggtccagcagggataagaatgataaggggatattagagcaggggctctgccatgggtgcaggaccctgggacacacctccctgccaggaaacttgccccaccccctagcagccaccagttctcttcccatttccctgaaggagtgtttggctgccccacaactgtggccaacgtggagacagtggcagtgtcccccacaatctgccgccgtggaggtacctggtttgctggctttggcagagaacgcaactcaggcaccaaactattcaacatctctggccatgtcaaccacccttgcactgtggaggaggagatgtctgtgcccttgaaagaactgattgagaagcatgctggtaaggcctggggccagccaggtggtgggggggtgcgcagtgggggcaggtgtccacaaagagagcctgggcgggagggctcaggagacggggctgggtctaggggctgactaagggcctgggctcaggactaggcaggtgtgccggccccagccctgaccatgcatccctttggggaccgacttggggccccagggggtgtcacgggcggctgggacaacctccttgctgtgatccctggcggctcgtctaccccactgatccccaagtctgtgtgtgagacggtgctgatggacttcgatgcgctggtgcaggcacagacaggcctgggcacagctgcggtgatcgtcatggaccgctcggtaagggttcacacaccagccctggtccctgccctcctggttgctgtctccctccctgggcctcccagaaaaccctcttgccagcactcaggtctcagttcctgcagcctgagataaagcaaggtggaagaggagggaggaaggctgctctgaggagaataccccggagtctgggcagcacagggggcccagggaggctggaggaggccagaacgctgggtgggctgggaagagcttctggaactgggggaggggctgctgctagggggctgaggcccaggcttctgtctggccgtgggtgcctgctaattgcccctcgtcacccagacggacatcgtgaaagccatcgcccgcctcattgagttctataagcacgagagctgtggccagtgtaccccatgccgtgagggtgagcatcgggcaggttgggggcttgcttgctgtggcttcatttaacctcctccccaccacgtggcctgcagccctcaagcgccgccccacatcctggctggggagatcatcaggccctctcttgtggctgtggctgcaggtgtggactggatgaacaaggtgatggcacgtttcgtgaggggggatgcccggccggccgagatcgactccctgtgggagatcagcaagcagatagaaggccatacgatttgtgctctgggtgacggggccgcctggcctgtgcaggtattcaccacccttctgcgtagcacggagggtgggtggcatcaagggcccagggtgttgggggatttttggactctgtttcacatggtccccccaccgaccccagggtctgatccgccactttcggccggagctcgaggagcggatgcagcggtttgcccagcagcatcaggcccggcaggctgcctcttagcccaccaccctggcctgctgtcctgcgtctatccatgtggaatgctggacaataaagcgagtgctgcccaccctccagctgccgctgctgtgactgtgctctttaccctttacccagcacacgatcctcaagggtgggaggggagaacagggtccagtctggcccatggccagagaaaggacagggtctcatctggcttgaaggagatgtttatttcggctccatgatttgggg

SEQ ID NO: 66002 - DNA, 1042 bp, Homo sapiens
cctgagtagaggtggcccagggcgatggggtgggccagctccactcagtttggtggattagggtcagggaagcttcatggggtaggcagggattgaacccaggcttgaatgccaagtgggagattgtcctaagcagagggaacaggtctagtgcatttgaggggacctgagtcagtcagcatggctggaggacacaggcaggtggacccgaacatgactaccaaaggcctatgcatggcaaaggggtcttcctctcacactcccctccccagccttcaaacccagcgaaggccatgcttccctgaccacctgccctcttccccagcaaaaggccaccgtggtgccagtgcttgctggtgtaggcccactggatccccagagcctcaggcccaactcggaggaggtgagctgggggatatgagggggttgggctgttccagtcctctgtctaccctctctgcctcctgcctgcaggtagatgaggtgtttgcactgccgctggcccacctgctgcagacgcagaatcagggctatacccacttctgccggggtggccacttccgctacacactacccgtcttcctgcatggaccacaccgggtctggggcctcacagctgtcatcactgagtttgccctgcagctgctggcacctggtacctaccagccccgcctggccggcctgacctgctcaggggctgagggtctggcccgccctaagcagcccctggcttcaccctgtcaggccagctccactccaggactgaataaaggtctttgacagctctagagctcttgcttctgctgtactggggccttgaccttgggcagaccactccaggtcgctggctggggctcctccttccagtcacgccatgccccacagcaatggacacttcctgggtgccaagtacttggagtcaattcatctcaccctcacaacagcccataaggcagggccaacactgtctctggctggtgagactgctttcagggaggagagacaccttgcctaagggccccacgctgggattggaaccaga

SEQ ID NO: 66003 - DNA, 1103 bp, Homo sapiens
gagacagagtttcgctcttgtcgcccaggctgtagtgcaatggcatgatctcggctcactgcaacctctgcctcatgcctcagcctcccaagtagctgggattacaggcacccaccaccatgcctggataaattttgtatttttagtacagacggggttttgccatgttgcccaggctggtcttacactcctgacatcaggtgatccactcgcctcagcctcccaaagtgctgggattataggtgtgagccaccgcgcccaccctaattttttttttttttttggtagagacagggtctccctatgttgcccaggctggtcttgaacacctaggctcaagcaatctgccccccttggcctcccaaagtgttggggttacaggtgtgagccactgcacccagctgacaaagaagctcttgaacaaattcatttaatgagattctctagcactaaaatagtcctacctcattgtaatgttttgtagagtatcttataaaacaatgaaaaaaaaccagtattttaatacatatttttctgtatatttccttctagcctttgtacatatgatcacatatttgtaaaaagttgtatgtatatatatacaactttacccgctttgtgtgatgatatgacaaaaacatttatctgaaaaaagtatttttttcatcaaatggcagagctcctgtttctggtaacccggggtatggcaagtaggggctctgggagatggagcagctcagcctcctgtgaaaaattctgtttctctaaaaaagaacaaattctcatgctgggcgcggtggctcacgcctgtaatctcagcactttgggaggccgaggcgggcggatcacgaggtcaagagatcgagaccatcctggctaacacggtgaaaccccgtctctactaaaaatgcaaaaaattagccgggcgtggtggcgggcgcctgtggtcccagctactcaggaagctgaggcaggagaatggcgtgaacccgggaggtggagcttgcagtgagccgagatcgcgccactgcaccccagcttgggtgacagagccagactctgtctcaaaaaaaaaaaaacgaattcccaaaactagtcccact

SEQ ID NO: 66004 - DNA, 2093 bp, Homo sapiens
gtggcgtggctttgtgctgagaggcggggccttgagctgggataaggcaagacctgggtctgtgggagtgtctcaggggcggggccctggtttgggaggcggggccgagctggggcaaggcccaggcacgtggtgcatctgaagggcggggctgaagcctggaggccaggcctgggcctggctggccgccccttcaagtaatgggttcgcaggtgctgggtttgtgcggagccgcttaccggcccacggaggagatcgatctgcgcagcgtgggctggggcaacatcttccagctgcccttcaagcacgtgcgtgactaccgcctgcgccacctcgtgcctttctttatctacagcggcttcgaggtgctctttgcctgcactggtatcgccttggtaagtacagcctgcaaaggattgcccgacaaaagacaagatagccaggtaaatttgaattcaagtaaacaaagaataatttttaattacatatgtaagtgtgtacatgtatatcccaaatatccccctcctgctttctcttccctctcttacccccgtcccccctttaccttgggcaagttattttaacttctctgaatcgaaatgggatagcacccacagagtgtttagttccttgtggggtacagcccacggtgtctagggacattccaagcattttcacacctgccctcagaaccttcccctgagccttggagcgaggtcaggcagtccagggagggcagggtgtggcctaaggaacacctcttgtggggagtaagagccagcccttctccccacctggctcttactccccgtatcgcggggggcccctctccccaccctggctcttaggacccccatcgcaggggggtaaggcacccccccgcgatgcggggagtaagagccaacccctcttttccccccgactcttaggacccccatcgcaggggggtgaggcaccccccacgatgcggggagtaagagccagaccctcttcccccctggctcttaggacccccatcgcaggggggtgaggcacccccgcgatgcggggagggctgagactgtggtctgggctgttccagacttcaacactcaccccttgtccccccgcagggctatggcgtgtgctcggtggggctggagcggctggcttacctcctcgtggcttacagcctgggcgcctcagccgcctcactcctgggcctgctgggcctgtggctgccacgcccggtgcccctggtggccggagcaggggtgcacctgctgctcaccttcatcctctttttctgggcccctgtgcctcgggtcctgcaacacagctggatcctctatgtggcagctgccctttggggtgtgggcagtgccctgaacaagactggactcagcagtgagtatagctgtgggcactgggggggggggggcggggcagggggctttatggctatctgtgggtggttggcgagacatagacatcccagggacagatatggggtcccatggtcacatagggtcctgtggacatggcagaggcaggtggggcttcctgtggacactccgggggtggaagggaagtcttatggacacactggggacagatgggtagggtgtggacaccctggagacaggtatgggggttccatgccatggacattctgttaataccccagagcgggcacagggccccatcaacactggagggtcagtgtgaagtctcgtggctacatggggcaggtgtggggctctgtggacaccccttagggacagtgtgaaaaacacatcagggattctcccttttcataccaggggacagggcttaccctggcatagttttcatgacacttggagcagatgttttggtctctgcttcacggagcatgtggtaggagcaagtggcctgttgtacacccatggcatagatacagacatgggcctttgtatagagaggagcaggcctgcagccccaacccagtctgctcagtaccagagtccaggccccaggtctgggctgctggggaacagggccctgtttgcagaaggcagcgggtgggcccatgttcagctccaggatgctccctgaccacagatgggcacacg

SEQ ID NO: 66005 - DNA, 1050 bp, Homo sapiens
ggtgctgccccaatacgtggaccaggtgagcagggctgccgggcaggtagagcgggaacaggcaaggctcaagggctgggcagcccctggcatggaagggcctgtcagtcagacccgagtccccacctcaatcctgcctcttctgagttgtgtaaacttgaccaagtcaccgcccctgtcagcctcagtttccctctgaggagcagcgagggcagcctgttgcccaggggttccgtgtctgcctccacctggccctggcatcagcccctccagcgccagctggactccaagctgggcctgccaatgccagccaaccttggggagctcccttctccccactttgcctccacccaaccctcctagagccctggctgggtcaggccaggcggggtggaggcagggcagggtccaggcagggcgggctgctcccttgtgttctcggagctggggtcccagaaggagcctcacccatcccgccttgcagagctgctttgctgtggtgctgggcgggccccaggagacggggcagctgctagagcacaggttcgactacatcttcttcacaggtgaggccgggacgagggtcgggacaggctggggtcggggaggacagctgctcaggggtcctgtccctaactctgggagtccacagggagactgaattctcctctctctctctctctggaccaggctgggagcagtcctggacccccaggaccccttaggaagggatggagtcccatgtccagggccagcccactgtgccaaccacagcgtcaggaaccatagcctctgcccccactgtccccagaccctcatacgtgaccctgctgccccccaggctcttagacaccaccctactggtgcccacagccctctctgcaggcagatgagggactgggcctcagtgtcctgcccagggtcaccctgctggccaggatggggacaggctggaatgtgcacacaagcccttggagaaatccacgccagaggtcactttttttttctttttttttgagacagagtcttgctctgtcacccaggcagtgg

SEQ ID NO: 66006 - DNA, 1485 bp, Homo sapiens
gtggtggtcaagggcatggattccagagtcagactgccgggggttaaactctggccctgctgcaaacaatccatgtcaccttggactgtgcctcagtctcctctgtcgtggggtgacaagggtacctccctcctaaggttgtggtggggattgaggggatgttgagacccctggacccagtaggtgctatgtgcagtgaactctcctcagcgtctaggttgggaggcagacgaggccccaggccagggcgttcagagcacagcctgggtggagtggggttggctggggggcttcctgcagtgagtgagctccaaggatatgcagttaataagacgaagagagtgggtgggggcaagagggacccaggcttggggagccttagaggtgggtgccatgcggtgtgttagggacctgggcagagctcaggctgtgggagcagcaggtggggaagccggggtggggccacggccaccaagaagggtcagctcgggggcctgggagctgggggaggctttcttgagggagcagcagggtcagatgtgcccacagacagccccgactctcctccagggcagggaggcgggttgaggaggctggggctggggctggggaggcagctaggtggggtcgggggcagccgcccaaactcgagccgagccaggacagcagcacaggcactgttgtgcccctggctgccctccaggaagggcatggacccacctgaggcagcttgcctggccctgccatcgttcactgtggtgctgagtgtggacaggtggcgggactgcctgtcacctgctcggggcctactgttctctgaggaggaagtgggctcagaaaggggagatgtcacctgggccacagggccttcagcgtgttgctaggaccatctctgaggcttcctgactcagaggccaggactctgcagtggcatcggggctgctctggggggtggaggattggcactcatccgggcctctcagggtggggaggtgttgtactgagagctggaggggggatggggttagaggagcagctgccctggagtaaaggacaccggcggcattgctgctgaggggcagacaccaggtcatgctgttggggagaagagcaaatagcatcgcagtgggcagtgtgatcatagttgtgtggtatttttaaaaattcactaaattgtgtgtctgtgcagagatggtctagaaggttccaccacagacttttttttgagatggggtcttactgtgttgcccagattggactcagaccctctggggtggggagcaggatgcgggttctggggtgaggcctccttgcctgtccctctacattgaggtggggctggggtgctttggcagaaatgtatgcaggtaacactattgcaatttgaccaaatggtaacagaagggcagggtagcaggcacctacccactcctccaaaaggcaggctggccagggtcatgtgcatgaagccgtcgttcccacaga

SEQ ID NO: 66007 - DNA, 1147 bp, Homo sapiens
gccctgctggaaactcttcaaggcctgaacagtcctcggtaccacattcctttccccagcttcaaggccctcctggaactgtcccccagcctgccgcgtgaccttgggcagatgatgtgacctgacctccgtcttctcacctatgaagtgggttgggggcggttggtcttgggaattaggggagcccgtacatgccaagggcaccccagagcccggcacttagccggcgctcataagagctcatcccacgacctgtgaaccccctaacaggcccactcctttggatcactgactgcagttccagggacccaacccagcaccttccccaccttcccagtgatctccgaccctaactaggccggtggcgcagagcgggcggcgcatgcgccctgagagccggctccccgctgcacctgaaggacacggaggccgcggatcctgagtgagccgaggggaagcccaggcgcagagctggcggcgccaacggggacaccacactcgcccccgacgccacgctgcccaagcccgactttcacggccaaaacgtgaacacccaccttgaagcgccgccgctacttgccttgccaagcaggccagtcaatcgggaggcggaggctacactgtaggacgctgccattgggccagcgggttcccccttttctgtattgatgcttcatggtgtggtctgattggccagcaaggctgctgaaagaggcgggattcagaaatatctttcttttgattggctaggagagaccggcgcttgaagtttgtagggggccgccatgttggtttggggaggccaataagtgaagacctccgagccgctggaggcgggacatccggggcgtggtttagaaagagtgctttcgccgtgggtgcagagggtgggcccgccgggttgggtggggggcgtgtgatgacggtaatggcgacgagatgctcaactcacgcggcctcttttaatcctcacagcagctctgcgtggagaaactacagtaacgtgttaccacgttaaggcgggaagctgaggcatgggagtatttagtaacgttcccgggccgtagagctgcggtgtgcggccgcctgatccacctgatctgtatgactcccgtactcaaccagcctatgtttcctaccagcgaat

SEQ ID NO: 66008 - DNA, 1025 bp, Homo sapiens
taaaatgattatggtgatggagactgactctgattcacaggggcagggtccatcattgccgaggttagcatgtgtgatctcagagctccctgggtgtgatggggagggggttgccaggtgtgagccatgggtacctgtgcctattgccagtccctggtgaaggcaaaggctcaagccccccacctaccccccttgattcctctttcaagccctgttgggcagggaagtgcgtctgggctccaatggccacccaagcacagggagaggtaggcacggacgggctcaggccagaggcggcctccagggtccttgctgaggctggggagaggtgtggtgagtgtacagcccctttgtagcccagcagttgcacctggaagtgagggccaggctgctctccctgaggctccagggagacagtgtgtgaggcctcttgccatggcctccctgcccgcctctctgcagagtatgtgaacatgcaggatcccgagatggacatgaagtcagtgactgaccgggcagcccgcaccctgctgtggactgagctcttccgaggtgcgtcctgggcatgaggggacagggaaggtgccgggtgggcacggatgcatgggggaggagggtgcccctgcccaccacacccgtgctgcccacaggcctgggcatgaccctgagctacctgttccgggaaccggccaccatcaactacccgttcgagaagggcccgctgagccctcgcttccgtggggagcatgcgctgcgccggtacccatccggggaggagcgttgcattgcctgcaagctctgcgaggccatctgccccgcccaggtgagcccctgccccaaccggccaccacgccagcccctgccactgggagagggaggccaggcagccctaggcccaaaccctagcccctgcttgatgtgcgtccccaggaagtccctttccccctctgagccacttccctcgtgaatgggaatgatgagggcttgttaccagagcacagagtcagtgagttggcagagtgaag

SEQ ID NO: 66009 - DNA, 1036 bp, Homo sapiens
ggctttgcctaggggctccttctcctcccagcctcctccatggcccaccgcttccagggagtctgccctgatggccctggcccagcaagccctaccctgactttcctaagtccctggaggctgcacaggatagttttaaagtcagaagcctcattccaatccaggcccccctgtgaccttaggcctgctcatggtctgtggaaccggtgtgatgcccctgcctccgggggtcacccgccgcgcacagcaggtgcttgcgggtgaggctgggctccttctcctgggccgtccctaggaggcagcatgcttgcctttcccaagcaattgccaatccatgtggtgtctttgggcccccaccagggcagagcagggctgatcatctcacgtcagagagaggggaaggggctgcccagtgagcccccacagggctctacatctccagctgggcctggctggagatcccagggtccctgaaggcccccgccaccgttctggtctgtctctgccctggcacccagatggaggagggagtgagtgccgtggctcaccgcatcccctgccgggacatgccccccacactcatccgcaccaaccgcttcacggccagcttccagggcatcgtggatgcctacggcgtgggccgctaccaggaggtcaaccccggtgagagccacggcatccttacccgtgtcctgggaggctcagctgccccactgggtgggtgtgagcctgagggggaggtatctccatcctgggcctggcctgccctcctgggatgaggggcacacatcccatcactctcaaggggctgttgggctctgcagccagtgtgaggctttatgtcggcccccagccaactcccccttgttgagtttacaagggagccggcacgggcttgtgcaaagaacagaggctgtgcggtgggcatggcccaggttggaagcccatctcgcctactttgagacatttcttagcttctctgagcctcagctgcctcacctgcaaaatggaaataatagcgcaaacctcagaggaa

SEQ ID NO: 66010 - DNA, 1956 bp, Homo sapiens
atcatcaccttccccttcctgtttgctgtgatgttcggggatgtgggccacgggctgctcatgttcctgttcgccctggccatggtccttgcggagaaccgaccggctgtgaaggccgcgcagaacgaggtgaggggcggggctggggtcctgatgagggtagcagggccaggcagcccctcaccacaccactgcccccccagatctggcagactttcttcaggggccgctacctgctcctgcttatgggcctgttctccatctacaccggcttcatctacaacgagtgcttcagtcgcgccaccagcatcttcccctcgggctggagtgtggccgccatggccaaccagtctggctggaggtgaggcccgggccccagcccggctgggggccccgcagcacccgcagccctgaccgccctcccctgcgttgccgcagtgatgcattcctggcccagcacacgatgcttaccctggatcccaacgtcaccggtgtcttcctgggaccctacccctttggcatcgatcctgtgagtcctgggatggagtgtccgtgggtggtgaaggcagctgggagtgggggctggggctcccctcggttcagccgtcctgcagcgctgtcgctgagcactcctgtgtgccaggccctttcctcagcacaagaggcagacaagcctcctgccctgcggagcctgcatcacagtcccctgagtgtgcggaggcaaagcgagaccagccaggaaccagtctcctgagtgtgcagaggcaaagcgagactggacaggaaccagcctgcagcttgcactgtgccaagcactgttcccaaccctctgtggaagtgattttcttttttcttttttttatttttggatatagagtctcattctgttgcccaggctggagtgcagtggtgtgatcttggctcactgcaacctccatctcccgggttcaagcgattcccctgcttcagcctcctgagtagctgggattacaggcgcccgccaccatgcctggctaatttctgtatttttagtagagacagggtttcaccatgttggctaggctggtctcgaactcctgacctcatgtgatccacctgcttcagcctctcgaagtgctgggattacaggcgtgagtcaccgcgcccagcctgattttctatttgaacctcgtaacaaccccgtgggcctcacattagtagtgtcctcacctaaagaagagactgaggcacagaggtcatgcccaaggtcacccaggctggcaccgtggcagctggcccatctgcgctctgttgcccctcggtgggtgggtgatggatgaggctgcaggctccgagggggaaaacagggtggtgagagagtgactcgggccggggacttcctggcagtgatggcgagggagcccctgagtccagcccacccctgctgccaccctagatttggagcctggctgccaaccacttgagcttcctcaactccttcaagatgaagatgtccgtcatcctgggcgtcgtgcacatggcctttggggtggtcctcggagtcttcaaccacgtgtgagggccaaggctgcccgggggacgggaggctggcaggccagagtgggccccagtgagcacacctccctcttgcccgccaggcactttggccagaggcaccggctgctgctggagacgctgccggagctcaccttcctgctgggactcttcggttacctcgtgttcctagtcatctacaagtggctgtgtgtctgggctgccagggccgcctcggcccccagcatcctcatccacttcatcaacatgttcctcttctcccacagccccagcaacaggctgctctacccccggcaggtgggctgcggctggtgggggccgggctcacacggcctcatggggaccccgcggtcacagggccactgggagctgcaagatcctcgtccgagaaacggggatgca

SEQ ID NO: 66011 - DNA, 1058 bp, Homo sapiens
gaccaggcagaggcgagggctgagtgaggccagcagtggcctgggcacaggaagacggtgagtgagaagccactggagctcctgtgcaggagcgcaacacctttactgcttcattcagtttggcttcacctgcttaaaactgtaactctctagaaggctgaacagcaaaagcctccctcctgcccagccgctcagcatccccaggcaccagcactgctcccagtctccaacgtcctccagggctcttcgcttctgggctagaagcagggaaaccagagtgtgctggggaagaagaggaggaggtggaggagggctgatgatggggccacatgctgctgggatgccagctgagagcagcggagcactgctaagctaaggggctgagtgggtgcagatggagccctccgtgggctccttcaggtaccaggagccctgcctgagattcaggacacatccaagggtgacagcttgaggttgggtttttatttttttatttgtatagtacaatctctgtggtagcagaaatatatgcacaaaaaacaattcaaataagagttcagagtaaaaaaaagtcagctaagactgtatcccgcaggacatttcatatatatggatttcacagctacactcgatccacgccccacaccacatacaggctgctgtctcccacaagaatgatgatgtcaggggcatcaggaaaggtaagggccgggaaaccgggcccttggagaaccctgcccaggggaggcccagcctactcacaggatccgacactccaggcagagcagagggcaggagaggcccaaagagctaggtcaagcagctggctcccctgggaggggagccgggagacagggaggtcctcacactgcccccgtggccacgcatggctgtctgcacactccatcaggaggaagggcaggggagaagtcacatgcagtacagtgaaactcatcagtgtcacacacgcccagcaggaggggagagctctgctccacacgctggcggccttggctgctccagagcaatccgctgctccagcttcagccatgggacca

SEQ ID NO: 66012 - DNA, 1034 bp, Homo sapiens
caaatccattctctcggctctgctgttcaaggacttgagccttctattgtaaaacataaaccatgttatccaaaccttttgcaggtaatatcttgttgctggaaggccgagagaattctgaaaaacagaaactgatgctcattgatttcgaatacagcagttacaattacaggtactgtgttacagtccagtgtttccatctcaatattgatttatcattacgatatgcttaattaacagttattagagaaaataagtcaaaatgccgctctgagttgcaagctgcttcacctggaatcagtggcttctcgtccagtggccggtgatggttgtggtgaagcagcacagccttctttgttcctagcagacagcgctagttggggacagccatgccattcagtccagactttggcattttcttttggcttcagaggtcattttcttctcataaatcctggtctaggagacacaatgttctggagtagtggttcaggtgcacctgtatagctttagtcagctgtgatgctgatcaaccacctgttgtctctctctgtcattaaagcagctacagtcctgctccctcagcaagtccagatggcaacaggagtggcgtgctcggaactcagcctttctttcttctgcagtcagggagcctccaggcatacggtttgcctcattgtgtgcactgtcttatgtcttatttcaggggattcgacattggaaatcacttctgtgagtggatgtatgattatagctatgaaaaatacccttttttcagagcaaacatccggaagtatcccaccaagaaacaacaggtaggagatgagtttttgtatacttgataggaaaattacatgtcaatttcatgcagttagaattacatcttcttttttattttttgaggcagggtctcactctgtttcccaggctggagtgcagtagtgcgatcatggctcactgtacccttgaccttctgtgctcaggtgatcctctcgcctcagccccccaagtagctgggaccacagacgcatgcc

SEQ ID NO: 66013 - DNA, 1476 bp, Homo sapiens
gtgttgcccaggctggtctcaaactcctgggctcaagcagtcctcccgccttggcctcccaaagtgctgggattacaggcatgagccaccacgcctggcttaggtttactcttcactgcttgggatcaggtgatttagtttcatgattcctgtagccatctttcaaagggcatgtgagaatagccgggccactagggatagtaggtagtctgtttctctttctctactggggaaggaatttggaatactgagatttgttcatatctgagcatgttagcttcagattttccttgttgccaaattaatggcagttttgaaagctgagtgagctaccttaataagtcctgtgtgtcctgctgctggaagtggaggccctgttcttattgcagcatggtaatttgttgacagtgctgtggtgacagtgctttctggagggagttgaatagaaggttgagtccaatgcttacagtgagctcttagctctcagtagcagacatctgccacttgctgagctgcaccctgggctaggtgctgtcccagagacctcatctgcattctctcctccagctctcctggcaactctgtgagagaattcatgtcctgattcccatttgatagaaatgggaacacacagatgtatgaggtaacttggatggccatgtagctttgaaatgagaattaaagccacaatttcaactgaggtttccctgagttgggagcattcactcttacccctgtgctgtacttctttgcattttcacagaaacctctctttagatttctgcagggtggcaggttgcatgaggaagctctggaggtctcagttgattgtgagctcccatgggcctcctgtaaaagggcagccaaacaagcatggcctcgggctgatttaggggaagtgcaggatgcagaggccaggaggaagtcctctagacactgtttctttgcccaactttgccctggacacctgctctgtgccaggccaggtgctgacaccaccactgggagcagctggagacggcccccctgtctctgtgacgcatctcctggttaggacctattctggaccccacatctcacctgcaacacatcagagtagaatgtcccagctgatggaggagctggaagtggggccatgtgataaactgctgaagacatggacttcagcattgggtagtgaatagacattcagtgtggttttagaggccagaataatagatgatagtgtagtagttcaataaaatttaaggaaggagttctcatagttaaaaagggttcaaaatgaaatagatctttggaggtggccggctcctcactgtagaaatgccatagcaattgctgggtcactgtctgtagggacacagtgtccattcttaagggaatttggggcattgggtgagacttaaatgcactacaaaaacacttctcgttcctaagactgtgtgatctcactctttttagtttacttggtaaatg

SEQ ID NO: 66014 - DNA, 1221 bp, Homo sapiens
gatcaaagcatggattttgaaggcaaaatgatgatagatcccacgttaattattaggacgaagatagaacagacagcatcatagagatttcagcaagacaacaaacattcaataacaggaaaaggtcgggtgtgccaactgaaaatagcaatctaggatgctccatgctagggtgctctttggactagaaagccgtagaccctggacctaaatcagtaattttcaagcttgttggacccatgagcccaatttagtaggcagaaggtcctttggatcctttgctttaactagacacactcaaccaaaagcaaatcaacccttaccagaatggatggtgttgtggcctttggtgagataccaagggtgagactcctatataggttgcgaaataaatagaagcaataaaagcactgatggatatttttctatttttggatctagtgacctaaattaaactcatattttaaatcttatcaatatagcatagtgcttgcaagcatgaatcctgcaaatgacacgatgtgtgactttggaacctctgtttcttcatatttaaaatggggatgatgataacagtagtgcccacgtgaaagaatactcatgaggatcagatgaaacactcctgtgagagtgcttctgatgcctggcgcttagcaaacactcagtaaacacctgatttgttgccatctgttttagggggctgaggccatggttctggagagcgttatgtttgccattctcgcagagaggtcacttgggccaaaactctatggcatctttccccaaggccgactggagcagttcatcccggtaagatttgttcataaacgcttagttgacatatgccacagacagaagatggcttctttgtctcattgctgcaagaacctgcaatgctgtgttttcactgttaacctcacctatgtcattaaactgtatcagaaatcatgaaaagcaacatttattttgtacttacatccgaacctctttcttttctgtaaaggtgtattcatccaaatttgaaatatatatgaaacttaccattttattgtcccctgaggctgtgtaccctgagactttgcccttttcaccgtgttcctctcaacttctagggccctgctttatagaacttgctgctagaacaccttggccctgctcagtctctgactgtagccctgtgggggccatgcctgttctttcccatcacccttccttggtttg

SEQ ID NO: 66015 - DNA, 1063 bp, Homo sapiens
tccgagtccagcacccccttgtcctgccatgcccagcccctgtttacttttgtgttttacacagcatgagggtggtggtggggaccacagtcttcagagcaccaggaccgtgctgccccctggggagcaggggagcataatgtctaagcagagacttggaggaggctttgcagacccttgcttaaatgccccggatactttctgtgatgttgggcttggagtaagatggggactgcatctctggacaacactaccataggactaaaaagttcttggaaaccttttgacaactaaatagagatactagatctttgttttcattctctaaggttttaagaaataaaacctgtctgatatcaaatcccaccctaaaattcattagcttgatagatagatgttatcagtttattgtcatatacacaaaaccacaaattaggaaagattgagcctcacaagatcacaggccataattgtgaggattatacgaatgatggttgtagacgataattgtggggggattaccggcaaatccatttacccccacaaaatgtaaaagtgaccaaaatactttttgctttaatgtggtctgatatcctttggaagtagcttttcttttttgttttcttcttactatagtactgtatcatttcctaataagtttgtcctcttggtttctcagtttttggtaacgtgaatgtgttttagaggtttctctgggatcatgttcctccacagcacattgcttcacagggggtgaattagaatcatctgaaagctttttcaaaacagccctgctggtgcctctcttttaatacttggagtaagacctaggaatctctttgcaaaagctcttttttttaaaaagagacttcggtggtggtggggcatctcactatgttgcccaggctggtctctaactcctggcctcaagtgatcctcccacctcagcctcccaaagtgttgggattacaggcatgagccaccgcctggcctgtaaaagctctttaagagattcaggtggacctctgggtaagcgtgactccttcactccaacagatggaaa

SEQ ID NO: 66016 - DNA, 4740 bp, Homo sapiens
aggaaagaaagaaggtgggaggaagccagtggcaatatatttttcattattgtgtgccttttaagtgtagaattcagtggttttcagtgtatttatggagttgggtgtcttaggcataattgagacattctgatttcttaggtcttgaaatttcaatgtttattttttaaaagtttttattatggggaatttcagatataccctaaagtagaagagtataatgaaccccagtgtccattcctcatcttcccctcacagccagtcttcttccatcttttccctcatttactccaccagggttattttgaagcaaattccagatgttatattattctgtaaatatttcagtctgtatctatataagatgattttttaaaaatgaccacagtaatgttcacattaaaaaaatttaataattacttaatattaaataaccagtgttcaaatttctaataaatgtaaaaagcttagttttgttttataacttatagaggataatttttattaacttgttagagaaaagttggatgtcatactaaatatttatacaatgtattttaatatctacttcaaatgaatttatgtcactgaagtaaaatcccacggattcctatatatatatacacacatatatatacgtatatatatgtgtatatatatatacacatatatacgtatatgtgtgtatatatatacacatatacgtatatatgtgtatatatatatacacatatatatacgtatatgtgtatatatatacacatgtatatacacatatacgtatatatatgtgtatatatacgtatatatgtatttttttttttttttgagtcagagttttgctcttgtcacccaggctggagtgcagtggcgtgatcttggctcactacaacctcttcttcccggattcaagcgattctcctgcctcagcctcctgagtagctgggattacaggcatgcgccactatgcccggctaatttttttgtatttttagtagagttggagtttcaccatgttggccaggctgatctcaagctcctgacctgagatgatccacctgcctcagcctcccaaagtgctgggattacaggcatgggccacccccgccggccccaaaatatatttaacttcctgtcttcctggacgaaaaagttattctcttacctttccatgaatatacacttggtttgagatttcctcgtcttacacttcttatttacaggacttagggagcctgaacattctgtactgaggaaacagaacagagggctggatattgcagaagtccatcttgccttcataatggtgctcttatggtataagtgatgaattcatctgggggtggagtgagggagtgggcaggggagattatcatggatttactaccacttatagtgccaatatgtttaaaaaaaggaaagactttggggcctcagccaatttttaactttggatgaagtaacttgcttttgcgagcgccattagataagggaaagggacttctgaaggctaaataacccattaactgtatctccctaagaagatacagttagagtaacaacagcataggaataaccatagtcatttagaattgtgtacaggtcaaatcccgttacaacaatttcagaagagtatctaacttatttgtcttaaagcttatactgcaaagtattaatatgtaatatatcagattatagaacttttttgttcttaagtttctttggagaaaaaaacacaaggacttttgaaggggcatttctaattaaccccacagccagcttccttgttaccaagaccctggatgggaatttgctatcactggttggctgcgtggcaccaggcagctcgttgggctcacttgcctcgtgctataccactccggagtgttcatttattcatgcagcctaaaaagtgtagtgggcatcgagatttgcttggtgctctgggagaagactaacatcaataaaagacgcagtccctattcattaggaatttacagactgcttggaagaggcgacccgcaaagcagagtctaaggaacgatgcggccacgagagtgtttggaattagggtgaagggaagctttccagcgcctaccacatcgcacatcaaaccatctgcaaagatctgaaagcatttttgtagtattttgatttttatagctttcattgtaacgggatttaacctgtaacatcttttcatcagagaactgcagattacacaaatgaaaatatcataaatccccatttgtactttctgtactttgtaccaaatgtacttaactgtatgctaaatatagtattgaatatgtatcagtgcaaacgttaagagccttttgcaaatagatttatgaacatggatacttattttgtttacttttatattacatgtactgtttatacaaaacatgcattaaaacgtctgtaatgttatttcagtgtgtgatggatgagtggttgctttaaatcactaggtttttgattggtgctagagtagctggtgttgcttaacgtggcattttttttcctgtccacactttccacccttggtacaggtatttttgataaagctgtggaatggaaaggtatgtttttcatggggtgttcaagaatctgttaccttaaatttttttaaagaggtttcctttctgggattccttttgtgtctggcttaagcagacttagtttaatttaacaagtaacatttttagaggcagtatttgagtataaaagtttgacgtgacacaagtttctgactttacttttccccattcccttattaaagatagtacgaaggattttaaagcatttggggtggggggttgctcttaaaatatatgatctgtaccatgagaaagaatgtagcccaagggttgtttatggtagttaatgatctagtgtgttgttattgctagaatcctggttatcataaatttgcaatttcattgaggaaagtgatataagtatttcttaatatattaatatatgaaataattttagagactttattaaatacacacagtcctctttatggtagaggaacagttcagcttgagctggtgaccggctgaactagaggggttactctgggaaagtggcgagtcggcagggcatgtctgcacagattttgtgccaggtttcctgcctgcacagcgctttcttctctgtccaagttctgtgctgaccacagctgtccacaggcatgtttacactccctgttcttgcaggttgacttgagagaaccacgtagctaaattggtgagagactcagcctgaccgcttgtctttagaaggcctgattggaagagtgcactctattgactttcctctaacaatgaaattgtgaaaggtacatggggcggctgtgagacgtgcagctatcgggtctcaccggcacatcccttttctcgtaaagcaatgaagcactttctaaggtgttggtactagtgctggaggctgctggtgcattagatgctgcccgtcacatcggtgggctgagaaaccttccttaaagacctgtgatgttttgtaaaccctgactgttctggtggttgcaaagttagtgtctgtttagtgttccccatctcaccagaagtgtttcctttttctcattcatagaggtcctgtaataaagagggatccgaacaagctcagaaagaaaatgaatttcaagtaagtaattcagtctttctgcatctgtgtgagatgtgaactagtgttagccacccttcgctactccagggcttggcagtgcctcttatctacccttggaaaatcctgatctatctttctacgaggaggggctcttggtatatctatcagaagccaccttacggagactgagtgagcggtgggtattcctcattcctcctgagagtgtagactgtggaagtttggtgtctttatggcaatcgaaacagcattcggatgttggcagatggcagccaggggagcattcgtgtgtggtacctgatgaggaggccctggctgccgctgctgtgatgcctctctcaccccctttctggtcgttcccacacttcccatcaggaagcgggtcactgcccagtggttttggtggccacccattttccatgggctaacagcaatgttttttcctatggatgatacccaagttggaaaagcttcttcctagacttagagaatgtgaccccactctctgaaacacacatgtgcagatggcttgaggccaagagcactgaccgatggagcctcagaggcaggggtctggggtgttggtctgcatgccccagcgtaagcaccttttgagcatctctgccattatgtgcaggctcacagagaagggtgcatgtgcacacatgcccaacatacgtgggtctaagatgtagatacacacatcgccacatcacttttaccaattgtatattgattattaaaatggtcaagaaataggctgaatgcggtggctcacacctgtaatcccagcattttgggaggctgaggcaggtggatcatgaggtcaggagtttgagaccagcctggccaacaaggtgaaaccccgtctctactgaaaatagaaaaattagccaggcatagtggtgggcacctgtaattccagctacttgggaggctgaggcaggagaattacttgaacctgggaggcggaggttgcagtagaccgagattgtgccactgcactccagcctgggcgacaggagtcgtccccaccaaatgcaaaaaaaaaagaaaaaaatcaagaaa

SEQ ID NO: 66017 - DNA, 4792 bp, Homo sapiens
tcccagcaactttggaggctgaggtgagaagatctcttaagcccaggaggtggagattgcagtgagccaagatcatgccactgcactgcagcctgggggacagagagagaccccgtctcaaaaaaaaaaaaaaaaaacccaaaaaaaactggatgggaaattagtagttttctatacggataataagcatacctctaacaatctgacagttgacatagacaacaaactgatttttgttagaaaaaaactatttctttgcttcttaggtgggaatctatattttcaatataattattcagttggtcgagtccttagttcaaacacacttttttggttgtagtttaaacttaggaaaccatgaagcctagagtctcagagttaagtatatttggtttcctagctctgcagagtttagcagtcatacttgttgccagttaagagtttcagatattaatggccattggagactgttggtcattgggagtactgtgacaacatgaggaggggaaccaaaatcaagaactccaaaagatggctatggtacaaaagaagcaaagtagagaacaggcttagaagcttctaagatgcgagccaggcaacagctgctgtgtgctttagaagctgagctgccacacactgtgccgaggattttaaattcctttccaaatattttcaaatcagctttaaagtttctattatttatttttgctgtgatctagctgtgatgaaattgctaatgtatagccagctctttagaatgaatctggcctataatggaaggagatatttatggtctacaatgagggttttgttcctatcacaacaaaaaaagccagaatttatgataaattgtcaggattgataaaaaattgtcaagatttgcattaattgagagatgtggctgagcaaatacagagcccccaataataaatcacatcatggttaaagagagaattaaatatagtatgactcaagtcttctgctttccttctttttgctctaccttatgggaaagcatacacatatcctatacatgtatgtgtacttatacaatataactggtatctcccaagccaactttataaatgcagctataatgtcctttaagatgggttagaattcactccttctttgaaaaatgttaattgaagtctactgcacaaataataggtctatgtattttttcagagtattttgcatttttccttaattatatgacagatttagtttagtatgtcccttctttccatttctcttccttgtttttagcttttgaacattttacctctgtgagaatcagaggtggtaacattttacacgttctttgatcagcaaatgatttacaggtgacttggtttaaaataactagatgattctcaactttctcatttttcttcatcttggcattataagatgtctgatttcctttatttccatagtgacactgaaatgactgctctttggtacagttctctaagggttaagtgccagaaagccaaggtaaaactttctgattgggttcagctccacagcttctgtcccacaaacatctgtctcttctagcccctatttctatctaagatgagacggaaacaaacttcctgactgtatcctggagtttttgtttagtatttgtgttagttttagggtgcttatgaaaattcctgtgtttggcaaggtcaagaatgggtccttttgaaaatatgaacaagataagacacacacaactatacaatattatttgtaggaaattattaaacataaaaatattggtctgatcttaatgcatgtgagtataatttagcgtctgttttacatagactgtctttaattttaatggaaatgagattattttcattagctacatagattatgaaaaccaaactcaactgtaaaactaccctgaactaaaggaggataatttaatagaagttttgagaagtaatagttcagcctttgcattgtggaaagagatagaattgctagaagagagcgtaaatgtataaaattagctataaatgtaacttgatttttttcctttctgatactgggaaggaacatgagctctgcaacgtccagtagcagccttttcagagaagcaagtttggctgattacaaataaccagtttgcttatttatcatgaattgtggaagacacaaatgtcagtacgtattgttcattcaatgtaacctgtgccagttggcggaagtctcagaggattgctttgtcccttcctctgtcagaacagtgactctgtgttaagccacttccttctgtgcatgagtggagagatttggcctcaccgttatgagcggtctcacaggcatgaacgtttataatacacatcaaagatctctcttgaatgttgtctggaaaattgtttttgtttgttttttgagtaatagaaggctaatattagtgcttgtttgagtactaaccataataaaggcatcaaggcacaacgcagatatgtattagcaacttaaaagagtcaaatttgagacactgtcctttttaaatctagaaaacaaatgtcttcctccctattttctcttagccccagtttaattaaaaattaagccacaataaaatatggaataactcataaatagttaatattaaactaccagctactgagaaatcagctgctaaaacctatttctttatgttactaaggtcacaccatgcaaagaccagcattgctggtactccttgaaggagtcatgtccctggtaactgaattctatgaattgccactgttttcctcattgtgttaggatcattaggaatttaagttgttctgttcactctgctttaaaaaaattcccttatacttttgagtatggtttaattctgtgttcctaaggcagtcaaaacttccttctcagaagtaaaacatttttctagtgttgtgcgttcccatttggtctaacctaatatttctttagctgatactctcccaagatagttgccaaattactaccaatagtccttccatacctgctttggtgccttcttttgataaccaaataaaccacagactactatgtctaatttttacatattcagagtgtctttgtcttgctggtattaaatgtttgggatttatagcatgaagccaatgcggatttctggtccatggaacgatggtttgaccgcagcccacccctctttgggaaggaatgtctttatgttgggtggagtgaagggcgttgggggtaatgtaccactttagctgtatgtgcatgtgttctctgctgcaggcttgtccatgcgatcgtgcctggagcactctggtttccaggtgacagacacgattcacggtatagtatgagacctctgaagttggagcattctctacagctttaatttctttcttttagttcttggattcaagaattgcttttaaaaaagaaagttgtaatgcttgttaagtagcaccagctacagtttgtgctgtgcttaaagaggtacagtgattaagatttcagaatgttgtgtaataaatatatcacttattttttttgtccaaagcaaatcagattcctttcttctgtttcctcagtagaaaatgacaaacatttaggaattttagaaatttatgggcctcaacttgataacttaattgaagtaatcaagttcttccttcatatcacttccagcattaaggagacaccatatatattttgatattttggtcagaattagaaacaaaccttcttctttgtccttaccagtcagtatactttcatatgtcttagctgggtacctgagaccttagggagctctgcagtgctgacttgatgtagtgaaggcacacttcccgtaaaagtgttgcttgcaagtcaacctttgggatacttagagggagggtattttatttagtcttggaagtctgaggagtgttgggtcagcaggttgccctagatcagacatagattttgagaaggtcctgaaataggcctttttaaaacctgggcttccactcacctgtctttctgctggcttgtgttgcctaaagtgttttagaagttctagtttcctacggatattcatcaagtcatccaattttgaaattattaatgtccaaaaagatcaaggtgttttaggctggtccttgggataattgaagacactctagagactaccataaaatgttagaaatcacttatctgtttaaattcttgtaattcatatgtgcttattaaataatcacataagctatactttaaatcattgcattgagatctcacattttaatgtgttctgtaaaatgttttcagaaagtgctaaaagtggccgggcatagtggctcacacctgtaatcccagcactttgggaggctgaggcgagttggatcactgaggtcaggagttcgagaaagaatgctgtaagaaaccataaaagcaagaaatacgggatgatttcattttttttcatagaaatcaggaagaagtaaggttagggtccatgataactctgagaagaaaacatattgccaagaaaatatactgcaaaatgttaattgaaagagtcacataactctttcaattctatagaattgaacacattctatagagtcatggttctcatgctttttcctgccccacctctcctgagatggaacatagcttcatcatcaacagggacttggcaggccagggattataacagatgccacccctgtattaaaaattatttctctcctagagggttgagtgtggtgagataaccagggtgggtattaagggtctccgaagccacaggctacacagtaaagaagttcatgcc

SEQ ID NO: 66018 - DNA, 1053 bp, Homo sapiens
attcttgtgcctcagcctcccgagtagctgggactacagatgcaccaccacatccggctaatttttgtatttttggtagagatagggtttcaccatattgaccaggctggtctcgaactcctgacctcaggtgttccaccctccttggcctcccaaagtgctgggattacaggcgttagccactgcaccctgcccggcctaactttttagactggttctttttgttattactgttttaaaatcactccttctccagaaccacagcaactaacattgagctagttacactggagcctgcattttctgaatgagctttgtgttttcagtttccaggcctttctttgcccctaccctctgcttggcagcctttcccttggtgtgtttcctttaaaattcctctttcaaggcttaactcagagagaaccagacatactgaatttctttcccctctgtgtctcatccttagcactttgtacatgcaggccttgttatcacaacccttaacacgtttgtgtgtgtgtttattcattccattctcttgttagattgaattcctagagggcatttcacgttcatctttgtatctccagcactaggatagtgcctggcacaccggaactggataagtgtagaaattgtcatttttagcttaagttggcctctttgctgtgtgatgaacggagatccttgtctgagtctcttcaactatgagtggtatagggaaaaataaaaattgtcctaacatgagagttgttgttaatgagctgaccacttagaaaatttgttcatttccagacatcacaacttaatactaacttctgtccctgcctatcaaatcaatagtatgttattagcattttctttctttctttctttttttttttttaagacagtcttgctctgttgcccaggcgggagcacaatggcgcgatctcggctcactgcaacctctgcctcccaggttcaagcgattctcctgcctcggcctcccgagtagctgggattacagtcacatgccatgtccagctaaattttttttttttggtatcttta

SEQ ID NO: 66019 - DNA, 1089 bp, Homo sapiens
ggggccgcggcggttgggcgcgcggggcggcggcggcggctgcggcgactgcggcgactgtggagcggggatgtgctgctggccgctgcactcgctcctctgccgccgccgcacgaggagcgccggccgcgtcacagcccgccctcgcgctcgccactgattggccgccgtccgccggcccggcgcatcataaccgccgccgccctcgccacaccgcctccccattggctgcggcgccgcccccaacccagagcgctgcggcctccgtgagcggggcctgggcgaagggggcggggcgtcgagggggcgccccggcggtcgcagggaagggggagaggggagcgaggcgcggggggcgccgggagagcgcctccgcggtgggacggagccggactgggccgagcgagggaggctcctgagcctcggaggaccccggggttggctttgggagctgaaagtttccttggacccctcggaagccccgtgacatcagaggccgggcctggcaggggcaggcaggaaacgtgtctggaggctactgccctctccgcgtgaccttgggcgagcagcctcctcctggggctcagtgggtgtgattttgtaacatttcccagcgctgccacaggcgcgtctcgccctgtccaacgcggagcccgaagaattactaagaaaccgaggtctgaaggagggaagaggtgacgggctcgaggccacacggtgggccaggctgggcccggctgcacgccggctaccggggcccagccctctgcacgcctcccgcagcctcagtttccctgtccgtggtactgaggatgctcgggcctagaagttcagggctggaggcccagggaccgtcgagggaggggcatcatccccgccatggggccgccgcaactgcccagagcacaggccaaaggtgcgtgccacggggctactggcgttgtggacgctgcccctgcctccccatcccccgcaggaaacagccttgtgaccgtgactaacgcacctttgccggggtagaggggcaagggcccctgctaccgtttgccacacactgccccatgtccctcactgctcccgtccttccta

SEQ ID NO: 66020 - DNA, 1038 bp, Homo sapiens
cagtggcacgatctcggctcactgcaacctccgcctcccgggttcacgccattctgctgcctcagcctcccgagtagctaggactacagacgcccgccacgacgcctggctaattttttttttttttttttttttttttttgtatttttagtagagacggggtttcatcgtgttagccaggatggtctcgatctcctgacctcgtgatccgcccgcctcggcctcccaaagtgctgggattacaggagtgagccaccgcgcccggccgcaaaaatcttttagagtgtgtacttggctgaacttgctccacgcaaaatggtcttatttaaggataaaaatgaaaggggacttttgtaaggctgctgtggcgacaggcctggaagttgacctgcagggaggtaggagagaccaaggcccctgggacggaggccggccactggatgtttgaaaggctgagaagccaagggcttcaatctggggaggccgtttggataaaggagccaaggactttctctaaaaataccggctcacagggaggtggggccatgccaatggcctgcccaggtgacaagccctttgtcccactgtcccctggcaccagtctggtaatctcaaaggaatgccagaaatctggccaggaggaagggacactaaagtaaggagtggccctctataatttgaaataactctttctggcatctgctggcttttgttaggaaaagcctcagacatttttatgggatcacagttccctgtgggaggaagaggttgcctcaaggccaggcatggtggcttatggctgtaatcccagcactttgggaggccaaggcaggaggatcacttgagccaggagtttgagaccagcctggccaacataacaagactctgtctcgccgggcgaggtggctcatgcctgtaaccccagcactttgggaggccgaggtgggcggatcacaaggtcaggagttcgagaccattccggctaacacggtgaaaccccatctctactaaaaatacaaaaaaaattagccgggcgta

SEQ ID NO: 66021 - DNA, 1040 bp, Homo sapiens
tgtgagctacacagactgtgctccttcacccgtcggttgttcagttgtgacatcagatagcttcaaaacaaaagacagctttagaactgcaaaaagtaaaaagaagaggcgaatcacaaggtatgatgcacagttaatcctagaaaataactctgggattcccaaattgactcttcgtaggcgtcatgatagcagcagcaaaacaaatgaccaagagaatgatggaatgaactcttccaaaataagcatcaagttaagcaaagaccatgacaacgataacaatctctatgtagcaaagcttaataatggatttaactcaggatcaggcagtagttctacaaaattaaaaatccagctaaaacgagatgaggaaaatagggggtcttatacagaggggcttcatgaaaatggggtgtgctgcagtgatcctctttctctcttggagtctcgaatggaggtggatgactatagtcagtatgaggaagaaagtacagatgattcctcctcttctgagggcgatgaagaggaggatgactatgatgatgactttgaagacgattttattcctcttcctccagctaagcgcttgaggttaatagttggaaaagactctatagatattgacatttcttcaaggagaagagaagatcagtctttaaggcttaatgcctaagctcttggtcttaacttgacctgggataactactttaaagaaataaaaaattccagtcaattattcctcaactgaaagtttagtggcagcacttctattgtcccttcacttatcagcatactattgtagaaagtgtacagcatactgactcaattcttaagtctgatttgtgcaaatttttatcgtactttttaaatagccttcttacgtgcaattctgagttagaggtaaagccctgttgtaaaataaaggctcaagcaaaattgtacagtgatagcaactttccacacaggacgttgaaaacagtaatgtggctacacagtttttttaactgtaagagcatcagctggctctttaatatatgact

SEQ ID NO: 66022 - DNA, 1032 bp, Homo sapiens
aaactactaaatcaggagaagaaagcgttcgtttgggccagtgtcacgacagattaagaagcttagagtggaatctaggtccctgctgtgaaaagctccttaaccgtgcaactacttacctcaaaaatgaatagatgccccataaattagaaaagaacttcaaagagaagcagtgtagggaatgcaggtgcgctggcagaatctgcagcaggagccgtggtgttggcgtttgtgtaatctaaacgtgctgtagctaatagcctgggtttgggcattcttttcttgaactctgctgttaccaaggcttttcacctttttctctttaaccttacagcttctaaccgaaaatcttcagttggcgtaaaaaagaatagcaagagcagaacgttaacgaggcaatctatgtcaagaattccagcttcttccaactctacctcatctaagctaactcatataaataattccagggtaccaaagaaactgaagaagcctgcaaagcctttactttcaaagataaaattgagaaatcattgcaagcggctggagcaaaagaatgcttcaagaaaactcgaaatgggaaacttagtactgaaagagcctaaagtagttctgtataaaaatttgcccattaaaaaagataaggagccagagggaccagcccaagccgcagttgccagcgggtgcttgactagacacgcggcgagagaacacagacagaatcctgtgagaggtgctcattcgcagggggagagctcgccctgcacctacataactcggcggtcagtgaggacaagaacaaatctgaaggaggcctctgacatcaagcttgaaccaaatacgttgaatggctataaaagcagtgtgacggaaccttgccccgacagtggtgaacagctgcagccagctcctgtgctgcaggaggaagaactggctcatgagactgcacaaaaaggggaggcaaagtgtcataagagtgacacaggcatgtccaaaaagaagtcacgacaaggaaaacttgtgaaacagtttgca

SEQ ID NO: 66023 - DNA, 1059 bp, Homo sapiens
atggagacctcgaaaggggacgtcgtcaggagacttgatggtgagttccatttaggggcttagagacagtcagtatttggtgacctggttctgtaagttaggagcgggtctggccagagttcgggaactgtcagcctgtaagtggtaatagccgtgcgagaatgggtgcttgtcacctggggcctaggactacacagacctgaagaagaacagtctaaggggccgatgaaggagggtgccagggatggagaagggaaccaggagagtgcgctctctttgacagccaagagaagaaaggttttctcaagaaaaagtggttatcagtgtcacattcagagaaatgaagaaagggaagggctgaggagtgtgtgctgggtttgacgacaagaagttgtcagatcaccaaaggctgtctcattggaggagcaggctggatccagatggcggggattgctgttgagaatatgacatagatgtgagtgttgtgtaagggtgcttgcaggtacgtcatgagagtggaatggaaagaggagaaatcaaaggttggaaaccactaagtttggtcataaattagtccttgaggaggcatagaatgagcaaaggatcatcgtagccacatctgagagagccaagcaaagggaagccaagcagtgcagtcctttcttcactagtgtctttatattggcagcacgtccattcagtccaccttgtaggcaagcataaagaaaccctttagccgaagagttccctattttttcttattttctaaatttcttattaaaaaaaaatttgctatcacatagttctgtatagttccagtggataataaatcactcgttctcaaattgaatcacattcaaagttcactactcctactattctaaaaagaggcgccaccttggtagcagcccacatgtgtaagtatgttcttgtttcaaactgtgaatccctttgctgtgaattctgctggtttatgtaccctgaagccatttatgagccagtctgtgcgtgcaggaccttctttgtttttgtttttctgagaggaagtttcactcttgt

SEQ ID NO: 66024 - DNA, 1609 bp, Homo sapiens
atttcacctatattcacttaactttctcaatgtggctgctaaaaaatttaagattgaaaatttggcttgcattatattcctagcagatggtgtgctctaaagagtggcaccatgattccggatcctcataacccttactgccactggtccctgcctgcttcatccagcagtcagaaagtttaattcattgccgcaagtatttgagtactttctgcttgcaaaacaccacaccagggcattcagagacataggtggcatagtccctgtcctggttgagtttccattctcttgcaggaataagataggtacacaagtaaccatggcacaaggctgtggagctccagggtaggagagaagatagccaggtggggatcccagtgagctaactaaagtatagacagctaggccttttcagtttctgatatttattgtcaggattattttattaaaagaagccttactatatttaattactagtaatttttaacacatcacatattttaaataggaaacgaaatgacaaaatagaattactggtgggttgtattgccgaactttcagaaattgaggagaacatgctacttagacatggagaaaacgacttcagtgtcatgtactccacaaggaaaaactgtgctcaactctggctgggtcctgctgcgtttataaaccatggtaagctgtgtttccaaggtgttggcgctagtgttggccattcctgctaactgctagaatggccttgtcaacctcagtcaaacctttatcttcctttaaaggagaatttgaaatagaaatgtttccacaaacttattaaaataaatgtatattcctttagttgaacttgagacctaaactcctatcaaaagttgtaaagttatatggaaagcttatttcagatttctataattgttcgtgtttcagatcttatcaacagttaattgactttatcttttggacatttttcagattgcagacctaattgtaaggtaagcattaaaaaaattttcttcaagtattttgtttttgcttcaggtgtgagtttcttactgagttacttttattttagtttgtgtcaactggtcgagatacagcatgtgtgaaggctctaagagacattgaacctggagaagaaatttcttgttattatggagatgggttctttggagaaaataatgagttctgcgagtgttacacttgcgaaaggtaaggtattaagtaaaatgttcagcctaaacattttttgttaacaacctgattatggggattaaactcacattatctctttgttgtttaaatgcagagatagtctttatgttctttagcatagcggctggtgcagtgtgtatgaacaaagtcaaatgctgcacagctatttagggacattggaatgtccctcaataaatttaaaatttccctttaaaatcttaatattaccagctaagagtgggccagaatacagatgtgcttaaggagagaatggttaatagctcacacacatgcacacacgcaatgccagaatggggttgccgctactcaaaatgtcaagtggagttcaccactgatagtcgtcttgcatattatcaagctgtgtcttctggaattttggttt

SEQ ID NO: 66025 - DNA, 1022 bp, Homo sapiens
actttgggaggctgaggtggaggattgcttgagcctaggactttgaggccacagtgagccatcatcacaccactgcactccaacctgggtgacagagcaagaccctgtctcttaaaaaaaaaaaaaaaagtatactgctgttcaattctatgccttttctcctaagtgtaagatatatgatcattaatgagaggttttaatgttaaatttggtaaaatttaataattgaaaaatccttagcttataactgatgtagaatagatagaagactgtttagtgaaacctatgagaaaaatcaaaaggcacgttaaaagttaaatactataatcgaatttaaatagtaagggaaccagaaaaaaaattcatgttagaaaacaattgtaaagttgtctttagcattgatcagattttttttttttgccattcccctaagcatactgctcacatgcacatcttaccctccagtgaactcacacagatactcctgtaacatgaaagagacctgagatcaagtaaaaattcatgttttgtgtttgtgttgagtatcattaaaggtatgtccaggcatgtctttttgtgaatacttcgaagtaatttatcatttgtacttttctatgtgtttgtggaaaggaaattgacctgcgtctggtgtagttgagaatttgttgggcagcagtgctgggttctactcgtgagactgctgcaggtggatcatgtggttttaggcatgtggcctcagtttcatttgcaaattgaaggagttgcactgatgatcttaaggcatctttggctctgaagttctgtatttttgccctttatcgtagggcctttttagtctgacttgtactaatgcataattcgataatgaggtggtatcatggacatcctttttctcattccattagtagtgagtgtgatgtataatatcctcatttccaaaggtcattataaattacaagcatcccccactattcagatcaatcggttcccaaattcagatagtaagagatacatttacatta

SEQ ID NO: 66026 - DNA, 1898 bp, Homo sapiens
tcagtgctgggtaaatcccttggggaagtgatgctgcccatcttggagcagaatcccaattccattttctcagagcctgattgcatcatttctgtgaatactcacgaaagtagaaggcacaaagccttgcacagtagtcctcaggaattccacttcgttttcctactcagatcatctgtattactcccatccagagatttaaccaatctattagtttaaaaaaatttttttaacacagatcctataagcgctctgaaggcttgccttctcaaattaactaacctattcccatcacctcccactccataattttaacttacatttgtcttttctggcctgcgagtcagtctctctctctctcgttcctgatattgccctctgccatctgtttcttaaagcaaagccccgtcttcctcacaagtgcgtgttttaagacattgtgtccatttagaagttctctgttgtttctgagcaaggctcacagatcagcaatagcccatcctttccacgagtttagactcataaaataaaagtatttgcttactgggcacctatagtccttgcctgagttggtaactccctccacagagtggtccctgtcatgcctggctctgcttctcacttgttgctccttttgtgatcctgtgctgcttctcctcctcttgacctatacatgttaaagtgcccccgacacccagtccttggacttcattgatctgcactgagtcctagatttcatctgattccatggcttgaaatgccattaatactttgattttatttgaagataaaaataccagatttttatcttcagcttggagctggactccagaccctggtatccagctgccaactccagttggatctgtagtgggcatctcaaaagtgactaaaaccaaaaaagacccccaaaaaggaagaaaaaatgaccaaaaccaaattcccacaccgcagtccttgcggaagccaatcttcctatagtctttgtcacatccctaaatattaattccattcttcatttgcaggtatttttgagtcctctttctcctacacctgcattcaatctgtcagcagttcccgactatcagcggaaccttcagaaaagatctcgaagccaaccacttcttgccacctctgctgctgcagccactagttctcctctggctagcagtagtcagttagtaaatagactactactactaataacgtctccctgcattctcttgtcctagaaattattagtagcttcattagaactgcttttttaaagtaccatgtagcaagctgccagcatggtcctttaaaactgtgggttggatcgtgtcactcctctgctttccctctcactgggagtaaaggcccaagtctcagcagtggctttgaagcccttcttccctgtggcagcctctctgacctcatcctcccactcttcctccatatttgccccagccacgccagcctctgggccttgtgtttgcccttccctttgtctactgcatgcttcttgcctgatgcctggctgtcccttcacatcccttgctgtcttagaaaacagccactatcaccctccttctccacctgaaacactccctgccaccataaatggcttattccccccaaaaggtgccgacattcattcgttaatttattatttcctagtgcttttttccattagaatataagcacagatgagggcagaagccttattttgttccatgctgtattctcagtgcctgcaacagtgtctggaatatagtggatgtctaattttcctgacatttttatattgggaaatcagaacaggatttgtaactaaaaaaaaaacaacgcaattactttattacttttgcaccaagctaatacaccatttaagaagtggtcagtaatggccgggcgtg

SEQ ID NO: 66027 - DNA, 1064 bp, Homo sapiens
aaatacaaaaattagccgggcatagtggtgcgcgcctgtaatcccagctactcaggaggctgaggcaggagaatcgcttgaacccgggaggcaggggttgcagtgagctgagattgagccactgcactccagcctgggcaacagagtgagagtttgtctcaaaaaaaaaaaaaaaaaaaagtgtgtcttagctagtagggaaggcaggtgttaccagataattacacagagtagtgagtatggttgtaataagcaccatgctgagaaacgttaagggttaaaatgtataacaaggaaatctatatagctggagaagtggggttgggcagggactgaggagcagtgtggcggcaccccaagtgcaaaggccctgtggtgggaagctgccaagctgtttccctttcctttgtgtaagtatctttaatattttgttacaaaagtcacagatgtttattttgaaaagttgaacatgtagcaggtaaatattgcttgtgatgtcattctccattgtaatctcactcactgttaaccagtggtgtactggattgttttcttaccaaattataactaaatcacttgaaaaatgttttctttgcctttctaaataaagatttatgaaagtcctctaacaggctagaacctgctttttattatttctttgagacagagtcttgctctatcacctaggctagagtgcagtggtgcaatctcctggactcaagccatcctcccacctcagcctcctgagtacctgggactacaagcacgcaccaccacacccgactaatttttttttttttttttttttggtagagactggggtctgaccatgttgcccaggctggtcttgaactcctgggctcaaggaatccacctgcttcggcctccctaagtgttgggattacaggcgtgagccaccacacccagccagaacctactttttaaaaatgtgtattgacttttctttttcaaccacttggggattgtttccctgccactggataatttctctaagataaactgtttgcagacaagttcagcatgtcaactggctagagggttct

SEQ ID NO: 66028 - DNA, 1061 bp, Homo sapiens
ttttattgtaagttttaatataaatagaaaaatgttcaattacaatgctattcaggaagatcatggttatctggcctagcaagtgtgtgagtaatcagaggtgtaattaagaggctggctctattttcaaaatctatataactcagtagctgcattttataccttcagttgaaggatagtgtatgatttaaactttttatttatttatgtttttaaaggtgaggtctcactctgtcacccaggctggagtgcagtggcatgatcatagctcactgcagcctctacctcctggactcccatgatccttcagcctcagcctcctgagtagcagggactgaagttgcgcagcagcacaactggctacttgttttttttgtttttttttttggtagagatgagggtctcactttgttgcccagtcttttaaaacttgttttaaatacactgttttaaaagttgtttaaaatcttttttcctgtgacatgttggaattttatgtatttttggagtgtggtaactgtaaagcgtttctactttggtttagtttttcataatctctgttatgtggtcactgtaacaaattccataaacttagcggcttaaaacaacagaaatgggctgggcacggtggctcacacctgtaatcccagcactttgggaggccaaggtgggcggatcacttgaggtcaagagttcgagaccatcctggccaacatggcgaaaccccatctctactaaaaatacaaaaattagcctggcgtggcagcaggtgcctataatcccagctactcaggaggctgaggcaggagaaattgctggaatctgggaggtggaggttacagtgagctgagatcgcaccactgcctccagcctaggcaacatgtgagactctgtgtcaaaaaaaaaaaaaaaaaaaaaaaaccggaaatttattctctcacggttttcgaggccagaagttcaacatcagtttcactgggccaaagtcaaggcgttggcagggctgtggagggaagctgctctttgcttcttccagcctctggtgggctgcagcattccct

SEQ ID NO: 66029 - DNA, 1038 bp, Homo sapiens
gtttctgagctttagcctccttgttgtagtgctaatacctgtttcacctgatagggttgctgagctagcgaatcccgagtcctgcatgttaggggaaccagtagaaaccgaatgtgtgtgttgtgacacctgtgtttctaccttgtgccacctttataggaatgcctggtcagcacatctctaatggcactcggcttgcttctcaggccttacgcaaaaggcccattcagtgaagggtcattctgcttcctagtctgtacttttctaccctgttaactttttttccccttatgcatctgtttggttttcttccctgactcaacgactgattttcctgaaagtagaagctctcatacgccctctagtgttccctggacatgaccagtattccagcaccacgaacagtgcctggcagctctgggaggttcttcataagtttgttgaactgagtggattctaggtcggcccgatgaattgttttgcctgtctgatttgtataacacggttgaaatgtatgatacattttaatggtctctgaggagtatttttattttcgaggcaatgtttatgttgcatcatatggagaaatagatatttttagtaagaaaaccaatctgattttaggaagctgcagctttcctcactgagaagtaaaagggggcttgatccttcagccagtgagccagtggcaccataggaaaccccccttcactttcccccttggaaaggaaacaaaaccagacgtcattcagggtcctggagggtttaaagcaaatatttgtttggtgcatataaataagtaccaggagggcttttgacccaaaaaaggtattttttgtttgtttgtttttgagacagggtcttgtagcctcccaggctggagagcagtggcataatcccagttcactgcagccttagtctcctgggcccaagcaatcatctcgccttggcctcccaaagtgctgggattataggatgagctgccatgtctggtcttgtttttatatttacaattttgatttatatttccctgatcat

SEQ ID NO: 66030 - DNA, 1360 bp, Homo sapiens
gatcatttccaagtgctctcgcgcctttattttcatctgctttcccaaacaccctgaactgctcatgcagtgaactttttattctcgcagcaaatgccaggggacagtagtggggaaggtggaggtggatggagggtagcggactctgacagggagagacgcgtgtgaaggaagtgtcccggtgtctgcgtgtctttcagcagagaatttagtgggtgggggatgttggtgatttttctcttgggttatttaaaaaggaggttgaatctgattttcctttacctgattatcagtttgtgggtttatagggcctgggttcgtggccaggttgtgtgataaagagatttgtgtgtgtggcatctaagcagctccctgtccacaggaatgcccttcccatggcttacagagcaaatcctttcagataaatcgccgtggtcccattatttcgtgtttctgtgtaccatgtatgagctttacattggcaaatctctccattggcaaaatccttctccgtggtcaggagttccccgactatgtcagccttagaacgctctgatggttaagaatcttcctcacacttttgacgatagggaccatgtgtcctccctccgctccatcaccctgttagctacaatactgcatgttaagtaaatgcagggggtgatccattatgtgtctggatggggttgatttggggctagccggtctccgaatgagacagacttgaacaccaggccatcttctagggccgtatgtcaaatgatgactgctgtatagaagtgtaattttaggaatagttgaaggaccatggaataagaatcaattcttattccattctctgctctatcactgtttgtataagtcattgatagggcctagactccgtctacaaaacgactctgaggtcacttccaatccaaaattgtattaatgcttcatcttttacacttcactgccatcctattttctcctaataattattttaatcatattttgacatctctctaatcaccttagttcatctgcatgtttcatgtagttttacctcctttttttgaaatgtcattatgagatagttaatcagttgggttttagaattgagagactagggtatcagtgtccccccccccaaagcttgattgggggcctgtatgactcctacaatgccagttgcatttctataagctgtcttagtttgtctgttgtaatagcacactaaagaaaacagtaccggccgggtacggtggctcacgcctgtaatcccagcactttgggaggccgaggcgggtggatcacgaggtcaggaattgagatcatcttggctaacacggtgaaaccccgtctctactaaaaatacaaa

SEQ ID NO: 66031 - DNA, 1104 bp, Homo sapiens
ggcccgcggccgcacgaggggagcagccccgccgctcgcgattgggggactctgttttcccttttctccaatgggcagccgtgaaccgtctcgcccaatctgctcccactgccgcgctgaactttttgtttttgttttggcccgagcgcatttcggagccctcccgagctcgtcctgcagcccaccctcctccccgacggcgcccctggccgtggcccggcgaccccgcggccgctgcgtcccctttgtgctttatccgctctccctgcgtcccctggtgtgtgtctgtccttccacgtattcgcggatgatgtgcaccgttgtcacctccgccttggaaggaggaacaatgacaactcgatgcaacttgctggattaagatagaaacaagttgggtgctgagaaattcagtctatttgggtttattggacccgggtctggaacagtaacttaacgatttattaagtggtggaactttcggaatactggggaggtgaacatgtgttctttgaagttaatttttaagaatttgccaaatgaaatttacctggagtggggggagttttccttagaatagagggcaggtgaattaatttgattgattgtggttctttgtgatgtggacctttttcgatttaaaccagtttgatataaagtgtagttgaggatggccatacaggtctgaactttgctgtgtaggatctttagaggaagcagttgccagctataacttttttcctttagtctttaatattgagaacacgcctataatattgataattagtagtaaaaagaagtattttcaaaagaggaggaaaccatttttacctgaaataattacagataatgtgtgcatgttgaaatacataaattgccgcttgctgtaaatacagatttattgtgtatctgaaggtttagcaatttgaaccagaggtgtggccctgtccctcttggagcgccttatattcccaggttagagtccacaaacgctctaatcccggcttgtgtgggaactccagcccatttttcactttgtaatctctaaacattcgacattctggtccctctcccaagctctggctccaatagcttcccatacctggt

SEQ ID NO: 66032 - DNA, 1061 bp, Homo sapiens
gtagagactgaagccacaccaggtactgattccactgggccaacacccaggagctcagggggcactaagatgccagccacggactcgtgccagcccagcacccaaggccagtacatggtggtcaccactgagcccctcacccaggccgtggtagacaaaactctccttctggtggtgctgttactcggggtgacccttttcatcacagtcttggttttgtttgccctgcaggcctatgagagctacaagaagaaggactacacccaggtggactacttaatcaacgggatgtatgcggactcagaaatgtgaggggggcgggggcctggcgggaggcctggccccttcctcgtcctttccttttgcctttgagaccaaaccaagtgcttccaaattcttttggtgcaattgaggagatatgccagatgcttaaacacatttaattgctgtcagattaattccatgatcactaaagagttgctgcttttttcatatttatttttgtaaatgattctgtgcccaggagcagctgggggttccacctcagggtggggcgggcaggaccccgtctccccaggtgtcggagcctgacctgaattaaagtactgactgctcgccacaatcgtgtgggtgcatcctgctccttggggagccttgctttctgccgtgcacgtggcagggttttgttctgtgaatgtgcaccatcactccgcaccctggaggttgactgtgtcgttgccactgacttgggtttctccctggtacccacgcccgccctggtgcttgctgggaggctcctgggccccagaggaggccacagccagcatctttaatcctttttctgacctgttcgatgaacctcctggagccagccttaggggtgaaggagctaaattcaacacatcacccccgtggtgtggccagctcggcctgaacctgcgcagaacagaatctgatcctgccctgctcatgaggtggggtcactattgctagtcctgaatagtgcaagtcccttgctccaggtaacccaggaccccagggccagtcctgggattcgaccc

SEQ ID NO: 66033 - DNA, 1318 bp, Homo sapiens
tatctgctttgtaaacctgggtgtgcgttcagtgggcttttaatggtgaatcacacctgttgtgtgagacttttactctgatgttttgggaattggatcaaatagtgaaggtctgaagccttcaatgggcagggggttcatagagggcaaaggagttttaaaatcaaattgacaagggctttttcaatgagctgcatgccaacagtgggaagagagatggggaggaagcatgttcgcacatcacctcccccgactctggctgggctgaggagggggccccacaggcctgggtggaagccgatccctgagcaatccccctgtgcaggattgaacatgattgtctctctttttctcctttttctgactttaaggcaactttgtccctaacaaaatgtggaagggattagtcaagaggaatgcatctgtggaaacagttgataataaaacgtctgaggatgtaaccatggcagcagcttctcctgtcacattgaccaaagggacttcggcagcccacctcaactctatggaagtcacaacagaggacacaagcaggacagatgtgagtgaaccagcaacttcaggaggtgcagctgatggtgtgacctccattgctcccacggctgtggcctccagtacgactgcggcctccattacgactgcggcctccagtatgactgtggcctccagtgctcccacgactgcagcctccagtacaactgtggcctccattgctcccacgactgcagcctccagtatgactgcggcctccagcactcccatgacacttgcactccccgcgcccacgtccacttccacagggcggaccccgtccactaccgccactgggcatccatctctcagcacagccctcgcacaagtgccaaagagcagcgcgttgccaagaacagcaaccctggccacattggccacacgtgctcagactgtagcgaccacagcaaacacaagcagccccatgagcactcgtccaagtccttccaagcacatgcccagtgacaccgcggcaagccctgtaccccctatgcgtccccaagcacaaggtcccattagccaggtgtcagtggaccagcctgtggttaacacaacaaataaatccacacccatgccctcaaacacaaccccagagcccgcccccacccccacagtggtgaccaccaccaaggcacaagccagggagccaactgccagcccagtgccagtacctcacaccagcccaatccctgagatggaggccatgtcccccacgacacagccaagccccatgccatatacccagagggccgctgggccaggcacatcc

SEQ ID NO: 66034 - DNA, 1153 bp, Homo sapiens
tcggggcccaagtgcttgttccagggccggcctgtccaggcaccccctctccccctggaggttcctcctgtagatgcccaaggccaaggccgggccctctgggagagcccagaagggctgagtggggttaaccaagtgctgtgtggagcaccctgagagagtcccctccaaagcagggccccgtgtgtttagctcccctcttcagttccaagaaattcgccggtgaacccgatccagcatttgttcagcactttcctggggagattcacctcgtgcttcctgtcgtttttggaacccgtttaatttcagccgtgctgtgtcactgctcaggcatttagtagaactcacacacacgggtgggggatgtaggcaggtgaggcctctgagttgctttctcccttgcagcgacgggttgcagggctgatgggggtggaggggtttggggtcagacccacctgggtttacatgctcagtggctgtttgacttcgggcaccatacctagtttctgttatctcaccccgttcctctcccaggctatggggagccctaactgccctgtgtgagacctttagccccatccctggcagagctgcagtgagcgcagttgtgtgtcagcgtcctcgatctttctggccccagccggtctagaggctgttattacaatagtctggatttttcctgtatgaccttggacatccagtccactgacaaactcactcactcaccgctgcagccctcgggggcaggagtagttagttagcactgtggacagagcccctgcgcccagggtctgattccagcctggccgcttcctgtgctgggaggcttaggaagctgatgctacctttgtgtgcctcagttttctcacctgtaaaatgggaatagaatccttcctaccatgaattcagtgagttaacgtgcacctggcccggtataatgctgttgctgttttgctttggtgtctgctaccgagtgaagtgctagggttgagtgcgatagaatggcagataaggccccgcccctgcgggcagagcttcccatgtagaggggaggacagggaaagaagctttgcagctatgcagaggtgggcccacgggtgctccttcaccctcggggtgtcctgcgagaggcccttagaggccagatcatgct

SEQ ID NO: 66035 - DNA, 1255 bp, Homo sapiens
gccagatcttcctctgtctaggaagcctgcctggttcacccacagccgtgtcttcttcctctaggaagcctgcctggtccacccatagtcaggtctacctcctccaagaagcctgcctgatccacccacagccagatcttcctcctccaagaagcctgcctggtccaccaacagccaggtgtacccatagtcagctcttcctcctctcggaaacctgccaactccacccacagccagatcttccccatctagaaagcctgcctaccccacctacagccaggtcttcttcctccaggaagcctgcctgggccacctgcagtcagcttatccatccccaggctccaggcattacctgtccatgcattcatcccaccttttcttcttgggtggttttgtgtgtgcgtgtgtgtgtgtatgtgtgtatatcctgcccaactaacctgcaggctccttgactctggagccctgatgtcttctgtttctctgtctcttccatcatgctggcactggacgcaggatcattcctgactgattaatctctagcttgtgtccaggctgcagcttgctccgatgagcagttggaggcctagtgtaatgcttggtgaatatatataaggcatggactgaaaatgttgcttattttggtatagtagcaaaggattgggttaccttgaattgagtcttgtttggtgtaaccatgtaaataaacagtgtaaaatataggctattggaatggaagcccagacatctgttatgaattctatatataaatattggatatgcttacatgggttaaaatgagattgttggcacttgggttttcaaactcctgattctgctccgggtaggactgatcacgggtcctgggactcaaggcaggaggggccacgagctggcctttctctgacactgacttgccagaagtgggcgttcctgggagtggcagacatgcacccactagagatagatctgaatcaccccctcacattctcctaatagtgccaagaacccacagcagagtgcggggtgtactgagtttgtgctgagcaggggtgcctgaatcccggattgaagaaagtgttctacgcccgattaaaccaactgggaatccaggcaaaagaagacgttcccaggggaagccagcctgcccagtgtgcatggtgccttttaaacaaattatctgcattcccattgggatgaagttcacttgacaacattactcattggtttttttgcttttgtttagttttttttt

SEQ ID NO: 66036 - DNA, 1224 bp, Homo sapiens
ccaacaaaggggatgtggcttctctgcagaacaggacagggcccctgtagcctctggaggacgatgtgggaggttttgggcatggcaggaagggtcacccatatctgggggaacagacgtaacagttggtaaacaaacaggtgctgtcaccgaatgtgggaagaaggctgtttgctgcgctgcaggagcctctgaatgatgcgggccggggctgcccaggcaacttcctgacaacgccttaggggtgggaggaaggaactggaggtcttgggcatgggcagggcagtaccaggagtgctctgggcatagtgctccatcccagggctgtgtatcttgctggcttagccagtggccctcacggtttgcttctgccccacagcctcgccgctcctgctatttgccaaccgccgggacgtacggctggtggacgccggcggagtcaagctggagtccaccatcgtggtcagcggcctggaggatgcggccgcagtggacttccagttttccaagggagccgtgtactggacagacgtgagcgaggaggccatcaagcagacctacctgaaccagacgggggccgccgtgcagaacgtggtcatctccggcctggtctctcccgacggcctcgcctgcgactgggtgggcaagaagctgtactggacggactcagagaccaaccgcatcgaggtggccaacctcaatggcacatcccggaaggtgctcttctggcaggaccttgaccagccgagggccatcgccttggaccccgctcacgggtaaaccctgctgcgactccacctgggtccagggggcggggagtgtcaccatctctctctcgaatttgcatgagcccaagttgtttttcagaaaaagggtgtgactctgaaaatgaacccgtgggggggttggctcaggcctgtaaccccagcactcggtgtgactctgaaaatgaacccgtgggggtgttggctcaggcctgtaaccccagcactcggtgtcactcttaaaatgaacccgtgggggggttggctcaggcctgtaaccccagcactcggtgcgactctgaaaatgaactcgtgggggggttggttcaggcctgtaaccccagcactcggtgtcactcttaaaatgaacccgtgggggggttggctcaggcctgtaaccccagcactcggtgcgactctgaaaatgaacccgtgggggtgttggctcaggcctgtaatc

SEQ ID NO: 66037 - DNA, 1029 bp, Homo sapiens
attccatcctgagtgttttgaattgccttttagaggttcatttacagcattttcatggtagcaaaaaaatcagaaataacctgaagttctttaaaaaacttacagcagagtacactaggcaatcatcaaaagaacaaggaatctttctatccacaagaagggaaggtgcccagaatttactgttaactgagaacaagttggaaatagtatattttgattgcccagcttaaggcaggaatacctgaaaccatacctgttggttatttccgatgggtgagattttagggcaagttcactgtctgttgtttcatgtctgcatctatgcagacaaaaacaaaaaacagatctgtgttagctgcttctcttgccctgcccccgtcacaggtacatgtactggacagactggggtgagacgccccggattgagcgggcagggatggatggcagcacccggaagatcattgtggactcggacatttactggcccaatggactgaccatcgacctggaggagcagaagctctactgggctgacgccaagctcagcttcatccaccgtgccaacctggacggctcgttccggtaggtacccacgcagtcctggggcacccctttcccctttgtccccagggcttttgaaggcgttccttcttaactcaggcctacagactcttctctgaaactctggggccctgaggaatgcaggacttctcagaacttggaacagcgtcagggtctgtgtggcatttgccaccagcccttgaatatttctatagcaaatgtggcacgttcattctaagtagggcagaaaagactatctgtagcccacacccatgcacagtttttttttttttaactttgtttttttgagacagagtctcactctttcacccaggctggagtgcaatgtcataatctcagctcactgcagcccccacctcccaggctcaagcgatcctcccgcctcagcctcccgagtagctgggactacaggagtgcgccaccacacctggctaatttttgtatttt

SEQ ID NO: 66038 - DNA, 1099 bp, Homo sapiens
gctgtgtttgggaggtgccctgtgcacgccgggagaaatgtacgagggcgccagctcctggggctcttgacctggcctcacttgtctggttgaaagcaaatgggaagcctggcatggtggcgcacgcctgtaatcccagcgctttgagaggctgaggtgggtggatcacctgaggtcaggagttcgagaccagccttgccaacatgatgaaaccctgtctctactaaaaatacaaaaatcatctgggcgtagtggtgggcatcagtgatcccagctactcgggaggctgaggcaggataattgcttgaacccgggaggcggaggttgcagtgagctgagattacatcactgcactccagcctgggcgacagaccgagactccatctcaaaaaaaaaaaaagaaattaattgggtcagcagcaatgactgacgggggaccctcctgatggctcctccaccccgcttccctgactgcaggcagaaggtggtggagggcagcctgacgcaccccttcgccctgacgctctccggggacactctgtactggacagactggcagacccgctccatccatgcctgcaacaagcgcactggggggaagaggaaggagatcctgagtgccctctactcacccatggacatccaggtgctgagccaggagcggcagcctttctgtgagtgccggctggggcgcgggggcgagggtgcgggggctggggggagcgggggcgcggggcaggggagtgggaggatgcgggggcgtgggggtgcgcgggcgtgggtggggtgggggggcaggtgacccctccctgcagaagcccatgctctggggggccccctctctaaaggggtacctgctgcaatggagggaggtgtgtggctggctgggggacacgggcctgcagaggacccctctgcagagctcatgggggctatttcaggctcagcagtggcaaggggatttccaaggaaggttgcctcgttttcaaggcccagaagaagttgtctgtgtgtgtgtgtatatgtatttatatacacatacacgtatgtgtgtatatatatatatggttatttatatatacatatatatgtgtgtgtg

SEQ ID NO: 66039 - DNA, 1020 bp, Homo sapiens
ggcagcctttgcagaggggtgtcctttgggggctccgaggagctggggagggtgttctagtcataggagcttggtgggaggaagcagatggggagatgtcactccatgggcaggtcacatctgggtgtgagggtggccaggaaggtcacggctggttttggggaaattgcaggccgtctggccaggctgagggccccatgtggacgggccagcgatgaggcaggtggaatggtgccagcggggaggtccctgatgccacttgaggccgatgtttgggcagagggacacactggaggctgtcacgggggacgaggcaggatgtgactcattcagaaacaagtgacggtcctcttctggaaccttctctcactctgtcctggttttctcagtccacactcgctgtgaggaggacaatggcggctgctcccacctgtgcctgctgtccccaagcgagcctttctacacatgcgcctgccccacgggtgtgcagctgcaggacaacggcaggacgtgtaaggcaggtgaggcggtgggacgggacggggcgggcgggcggggcggggcctggcgggaatgggttgcggccgccgggggtgccccagaaggaacctcggcaaacccgttcgaaatgatccacttggcgggtgtggtgattcaagtctgtggtcccagctactcgggaagctgagttgggaggattgcttgagcccaggaggtcaatcctgttttgttttgttttatttttgccccagatattttccacttttttactctccgccttggtcctcaggcacttggtgcttcctgggactgtgttgcagtgaggcatggctcttctcctctggggcaccggctgaggatctttctttccaggtgtcggttcggggcgggcccttcgggaaatcacacacgttcaggatgcagctcgccttcggggatgctcccgggcctgggatagccagtctggcctctggggctgaccctggggcctggcaagcgagggggtaacgagaggtgtca

SEQ ID NO: 66040 - DNA, 1034 bp, Homo sapiens
ggacaggccctgtggtgattagaggaggctgcctgcgctcacagggggtggttaggctacccagaggaggaggcccctgcaggctggcagggggcctggtggctctggccccagccctgggctctgtggcatggagctgacaccacagacacctgtggggttggaccgctggactagcagcgagccctgcccttccagttggatagcttttccattccagagccgtcagggccgcagggctgagcacgcagctccacgctccctagagactcagccgtcaggggtcacctttctctagtcttgtgggaactgtttttgccctcagccgtgagaggcacttttacacataactcagttggagcatgactggcacgcaggagaaaaacattttgtgtcatttataggccctgcttgggcgagactctgggccgggaacgtccacatgcagccagtgtggggactgttttactctgagcctgaatctttctgctttggttccagatgccgtgtgtagggtgttctgtcaaagggaggaaaaagctcctcaatgagacagaaagatgcaactgggagtctggttttgcatgaggacgtgagcgtttcagttcacttttttttgtaagcatggttccccagtctgacctcagagctgcctggagatgggccccacccgcttcccgttaattaacaggctggtgctcggtgtggatgctggctcctccgtctccctgccctgggcccttttgaagctgaagtgttccaggggcagctggtgtggaaatagagttttctagaggttttagagttgagaagaaacctaaactcttcttagaagcatttcaagggtttgtcaccaggatggctctctgcaaatttgaggtggttctagaagatcttcccatatttcttaatccagagggagatggggatgggcgagaaacggctttgtccttaaggaagtcatgttctggttggaggacaggcacggcctagcattgaagctggtgagtcagagccggacctgtgagcggggc

SEQ ID NO: 66041 - DNA, 1414 bp, Homo sapiens
tttatcttcagtggcgagctttgcgcttgcagggtgcggggcctggtgggacgcccacgttgcccagacagaacccttgtgcggctgcgggcactccttgccctttccgcatttggtgatgactccttgtttcgtttcactgaccgtgccctgtgcctctgctctccctccccagttccgtgtgccctggggtcagtgatagaagacacggcccctgggccccaagtctgctgagctgacacctcgggctgccgctcacctgcagagagacactagaaggctccgactcccttcctggcccccactctgtttttctaccttttaccgcctattccaatggaaatgcacgatttgtttctccctgtgcacatctgagtgtggacctccctgcccctgctcgtgctgtgcccaccacctggagcacccttcccctgccccctgcccccggccacagcgcccctccatccagaccccactcctgcacacggctcctccgcccgtgcgcagccctctgagagtgtggcaggtgcaccaggctctgctctagggagcttcttcctcttcctgtgtcccacgggaccaacatcgggacccaggaaacaggctgggagagttcggtaacaccttcaagagggtttgagagctgaggttctttggtcttcagtggagctggcagtgactttcttgactttgtcaagagaagccccccgtctctgtgccacctctggggatctgattgaacggaaatcagagcatccgagttccagcctcagccctctgctgtgtggctgtgaaatgtaggccctgtgtgccttgctgacctgggagggtcgaaaggacggtgtctggggaaggatgcataagttgtagagtgccctgcacttgtgataggtggggccgcgtgaactgctgatagccatcttctgtcagttggggcagtggcattgtcacatggttccattctaatccgttattttggctactgccactgaggcggggtgggtgacaaaagtaacgtttcttgggggccactgcagcggtcatggtcctgagccctatacccaggcacgcgtcctgggagctgtgtgaggggtcgtccgtggctggccctgcttcttttttttttttttttttttttttaattgagacagagtctctctctgtcacctaggctggagtgcaatggcgcgatctccgctaactgcaacctctgcctgctgagctcaagcgattatcctgcctcagcctcccgagtagcttggactataggcacccgccaccacactcggcttattttttgtatttttagtagagatggggtttcaccgtgttagccaggatggtctcgatctcctgaccatctcgtgatccacccaccttggcctcccaaagtgctgggattacaggcatgagc

SEQ ID NO: 66042 - DNA, 1399 bp, Homo sapiens
gaggagggagcgatgaagtggcgtcgagctgggcaggaagggtgagcccctgcaaggtgggcatgctggggacgctgagcagcatggccagcagctgggtctgcagcctggtacccggcgggacttgtggttggggctggtttgtggccaggagaggggctggcaggagacaagggggactgtgaggcagctcccacccagcagctgaagcccaatggcctggctgtgtggctctcagctgcgtgcataacctctcagtgcttcagttctctcatttgtaaaatgaggaaacaaacagtgccagcctcccagaggtgtcatgaggatgaacgagtgaccatgtagcatgggctgggtgcgtgtcacctaacatcaccagcctttgcaaggagagccctgggggcctggctgagtatttcccttgcccggcccaccccaggcctagacttgtgcctgctgcaggcccttgacccctgaccccattgcacctgtctccacaggagccgaggaggtgctgctgctggcccggcggacggacctacggaggatctcgctggacacgccggacttcaccgacatcgtgctgcaggtggacgacatccggcacgccattgccatcgactacgacccgctagagggctatgtctactggacagatgacgaggtgcgggccatccgcagggcgtacctggacgggtctggggcgcagacgctggtcaacaccgagatcaacgaccccgatggcatcgcggtcgactgggtggcccgaaacctctactggaccgacacgggcacggaccgcatcgaggtgacgcgcctcaacggcacctcccgcaagatcctggtgtcggaggacctggacgagccccgagccatcgcactgcaccccgtgatggggtaagacgggcgggggctggggcctggagccagggccaggccaagcacaggcgagagggagattgacctggacctgtcattctgggacactgtcttgcatcagaacccggaggagggcttgttaaaacaccggcagctgggccccacccccagagcggtgattcaggagctccagggcggggctgaagacttgggtttctaacaagcaccccagtggtccggtgctgctgctgggtccatgcgtagaaagccctggagacctggagggagccctttgttcccctggcttcagtttcctcatctgtagaatggaacggtccatctgggtgatttccaggatgacagtagtgacagtaagggcagcctctgtgacactgaccacagtacaggccaggcctctttttttctttttttttttttgagatggagtctcactctgtcgcccaggctggagtgcagtggtgtgatctcagctcactacaacctctgcctcctgggctca

SEQ ID NO: 66043 - DNA, 1380 bp, Homo sapiens
gcccagcctgtttttgttttttcactgataaagttttgccgggtgtggtagtgtgtgcctctagcgatttgggaggctgaggtgggaggatcgcttaagcccaggagtttgaggctgggctcaagtgatcaggaggtgaactatgatcatgtcattgcattccagcctgggtgacagagcaagaacctatctcttaaaaatatatatttaaaaagtattgggtgtggtggctcacgcctgtggtcccagctacttaggcatctgaggtgggaggatggcttgagcccaggagtttgaggttgcagcgagccaagatcgtgtcactacactctagcctgggtgacagagcccagaccctgcctctttaaaaaaaaaaaccaaaaaacatgtattggaacacagccatgcctgttcagtcacgtgctctccatgctgctttctgctccagagacccttatggcctgaaagctgaaaatattttctatcctttacaaaaaagtttgctgacctctgtcctggaaaattcatctcccaagttctcttccggcactggcgttcctgggtgtcctaaatttggcccctgttatttctgaactctgttttggctctgttccctcccaggagccaggacaggcacgttctctgcatcttgtcccctgacgcccagaggcttggctcggctcaggcattcttggaaatatctggctccaggaaaggcagaggcctcctgagtcggcccagagggaacctgccccaggtctgggggaggcctgacccagcagagtggcttttgccgatgggttgggccggtcaagatgtgctgaaagttgtcctcagaaggccactttgggattccttcctccagtattagagcaactgagagctgctcattgcaagcctgatgttttcccagttggccgggtccaccgggtgccctgggattctgcgatctgggtggaaagtagggggcttgggggagtgtcctgggttctggaatccaggtggcaagtggtgaggttcagggagtggcttctgagccaccataggggtctctgtgggaggctctgcccatccaggagattccgcaggccctgccggcccagagccagcgtcttgcgcttgccgaggctacagccagccccagccgggtggaacagcccgtcgcctcctctcactttgttttggggccacctgggagtgtggagcaagggtagagagggaggaagtggctgccggccgctgcccagcacccttgtttgccttgggccctctgtgggctcctttttattgctcttcaatgaagccagggaaatggacttccttgcctcacttcagttcaacatgtctggaagtttggtattaaaattaagaaagtgtgga

SEQ ID NO: 66044 - DNA, 1208 bp, Homo sapiens
tcgagaccagcctggtcaacatggtgaaacccatctctactaaaaatacaaaaattcgccaggtgtggtggcgggtacctgtaatccgagctactcgggaggctgaggcaggagaatcgcttgaacctgggaggtggagcttgcagtgagccgagatcttgccactgcactccagcctgggcaacagagtgagacgctgtctcaaaatctcaaacaaacaaacaaacaaaaaacaaacaaacaaagcgtcatttatccagcacccctggggaaccatgctacctggtgttttatggtacctggcaaggtgcaggtaaagttgcggctcttgggcattgaacccgtcttgtttggggcagctcaggccccaggcagggtccgggttggctctcgttggtgtggccctggcccatccagacctatatttctgccgtcctgcaggtgatcaatgttgatgggacgaagaggcggaccctcctggaggacaagctcccgcacatttttgggttcacgctgctgggggacttcatctactggactgactggcagcgccgcagcatcgagcgggtgcacaaggtcaaggccagccgggacgtcatcattgaccagctgcccgacctgatggggctcaaagctgtgaatgtggccaaggtcgtcggtgagtccggggggtcccaagccatggctcagccatgcagacttgcatgaggaggaagtgacgggtccatgcctgggcataagtgttgagctcaggtgccccgacctggggaagggcaggacaggaaaggtgacagtatctggccaaggacagatgggaagggaccaagggagctgattagggagtggttatggactaggaatgtcggtaacaatggttagaaagtgactaacatttgttgagcacctgctgtgtgcccggccctggccgggagccttcgtgcccacagtgaccccgtctgcaaatgtagttccttgccctactcgcactggggagcaggacgcagagccgtgcaactcacaggtgccaagctcaggactccctcctgggtctgcctgggctgggctgtgcttgttgcccctgtggcccacgcatgtgcaccttccacctgaaagccaggatcttcaggacgctccccgaggaggtcgttgtctggcacaatgatttgtctcttcctgaaaaggtgacagagttacactggagagagcag

SEQ ID NO: 66045 - DNA, 1454 bp, Homo sapiens
cactaaattaaagccaattttaacagcactttggttgatgagtgaaattaacagactggccaaaaataaacgaacggtctgtactatgtgaaaaagaggcagctttggccatgctgggccaatgtgagttttcagggttgctgggaatgtctgtgaatcggaggaagggcctagctgggactctcaggagccaaggccctgaggggcaacttgcctggtccctgccctgaggcgttcactgctttcttcctgggccagatcgcaggcccggaggctggaccactgggctggcactcttgccgagctgctccctgacttcctgaccatgctcctttcagcagccttgctgcactttagtttccttgaatgaaaaatggggatgagaatagctcctacctccaaggtgaatggagtgagttcggacaggtgactccctgggaccagtgcctggcgcctgacaaggtccagtcagagcccgcactgctgttactgatacccttggctgtaccaggggagaacttggttgccattgccaggtgttctcccaccacccccactactgtccctgtttgatgtgtggcgggaataaagctgtgcacattggagcttttggcacatcctggctttcaggtgaaaggtgcgtgtgtgtttgagggtttagcctggccaacccagccatgaggtcggacctgacccgggggtgagtcctgagctcggcacccctgagctgtgtggctcacggcagcattcattgtgtggcttggccgcacccctttccctgctgggctgttgatgtttagactggagcctctgtgttcgcttccaggaaccaacccgtgtgcggacaggaacggggggtgcagccacctgtgcttcttcacaccccacgcaacccggtgtggctgccccatcggcctggagctgctgagtgacatgaagacctgcatcgtgcctgaggccttcttggtcttcaccagcagagccgccatccacaggatctccctcgagaccaataacaacgacgtggccatcccgctcacgggcgtcaaggaggcctcagccctggactttgatgtgtccaacaaccacatctactggacagacgtcagcctgaaggtagcgtgggccagaacgtgcacacaggcagcctttatgggaaaaccttgcctctgttcctgcctcaaaggcttcagacacttttcttaaagcactatcgtatttattgtaacgcagttcaagctaatcaaatatgagcaagcctatttaaaaaaaaaaagatgattataatgagcaagtccggtagacacacataagggcttttgtgaaatgcttgtgtgaatgtgaaatatttgttgtccgttgagcttgacttcagacaccccacccactcccttgtcggtgcccgtttgctcagcagactctttcttcatttatagtgcaaatgtaaacatcca

SEQ ID NO: 66046 - DNA, 1175 bp, Homo sapiens
ttcatttaaaaacttgaatgctggtgatctggtccagaatgtgttcagtagctgctgccagtggccaagcatctcgggagatgtctacaaaacacgctggttctggcctggcgtggtggctcacgcctgtaatctcagcactttgggaggctgaggcaggtggatcaactgaggtctggatttcgagaccagccttgccagcttggtgaaaccccatctctactaagaatacaaaaaaattagccaggcgtggtggcatgtgcctgtaatccccacctacttgggaggctaaggctggagaatcgcttgaacccagggggcagaggttgcagtgagccgagatcgcaccattgcactccaggctgggcaagaagagcgaaactccgtctcaaaaaaaaaaaaaaagatgctggttcctaaaatgtggcccttttcctcctcacctgctgccagaccatcagccgcgccttcatgaacgggagctcggtggagcacgtggtggagtttggccttgactaccccgagggcatggccgttgactggatgggcaagaacctctactgggccgacactgggaccaacagaatcgaagtggcgcggctggacgggcagttccggcaagtcctcgtgtggagggacttggacaacccgaggtcgctggccctggatcccaccaaggggtaagtgtttgcctgtcccgtgcgtccttgtgttcacctcgtatgagacagtgcgggggtgccaactgggcaaggtggcaggctgtccgtgtggccctcggtgattagagctgtactgacgtcattagccttgatggtggccaggactggtagggccctcagaggtcatggagttccttcgtggagcgggtgctgaggctgtatcaggcacagtgctggctgctttcacctgggccgtctcaccgaagtgtccatggagcctgcgtagggtgggtatctgtgtcgattttacagatgcagaaacaggctcagagaaaccgagtgacttccctaaggtcacatacccagttagagcagagctgggccaggaagtgctgtctcaggctcctgaccaggtctccttgctttgcactcttgccaaaaccatgatccagaactgactttgaggtccccggacctcaggctcctccgaaatggcctcttggaggctgctga

SEQ ID NO: 66047 - DNA, 1216 bp, Homo sapiens
ggatggcaggacaacagaaagaggtccaggttttagagcaagggcaggtcaaacttagaaaattctggaatgaggatgtgcatttcctcttctggatctgctaaaagaagagggaaggaggggctgctgggggaggagcccagagccgagtttacatccggatcccgcaaggcctcccctgccctgaggtcttgttttgtgatgtgcttgtgtccatcctggtttctgccgtgtccccaacatccggccaagcttaggtggatgttccagcacacactcaccctgtctgtgcatctgtttttgtgtccgtaagtgggtatttactcgccttacgagtgagccactgtgggaattcagggaggtggcgcagtgaccacccctggagggatatgtgtgtggcaggggtcgagggtctcgcccttccctgcttcctgcgcgtggctttctccaggacggggagggctgagctgaagaggtggggacagttgcgtccccccgccacccactgtcctgcggtgagagcagactcactgagcctgcccttctcccttgtgccttccagctacatctactggaccgagtggggcggcaagccgaggatcgtgcgggccttcatggacgggaccaactgcatgacgctggtggacaaggtgggccgggccaacgacctcaccattgactacgctgaccagcgcctctactggaccgacctggacaccaacatgatcgagtcgtccaacatgctgggtgagggccgggctggggccttctggtcatggagggcggggcagccgggcgttggccacctcccagcctcgccgcacataccctgtggcctgcaagttccccaacctggcaggagctgtggccacacccacgactgcccagcagcctcaccctctgctgtgggagttgtccccgtccacccctgggtgcctttgctgcagttatgtcgggagaggctctggtgacagctgtttcctgtgcacctgctgggcactaggtcccagctaatccctgtgccaggactctaatttcaccctaacacacatggtggttttcattgctggggaagctgaggcctgagcacatgacttgccttaggtcacatagctggtgagttcaggatcccccagagataccagggccagcactcgatccccacccagccctgaaccccaccatgtgctgggattgtgctgggagtgtccacacg

SEQ ID NO: 66048 - DNA, 1066 bp, Homo sapiens
gcttgagtcctggaaggtggaggagacagggatgtgttgggaagggccccatggtcttggatcccttctcgactgtcaatggggccttcatgggagcgccagtctagtgatgcacagctgggtgcccggcgggtggctgaggaggcctaaagtccgaggcggcaagagctcttccagaggctgttgtcctaatcgctctggcatactcaggcgggcacgtagttaggagctgattggagaggagagacccccacaccaatactgggatttgactttcaggctaaacttgagaagtgtggcctctgctgtcctgccagagctctccagccagtgcccagggctctccagccagtgcccgggggtctccaccagtgcccgggggtctccgccagtgccaggggtctccgccagtgcccaggggtctccgccagtgctcaggagtcttggtttctttgtcttacagccctttgttttgacctctctgagccaaggccaaaacccagacaggcagccccacgacctcagcatcgacatctacagccggacactgttctggacgtgcgaggccaccaataccatcaacgtccacaggctgagcggggaagccatgggggtggtgctgcgtggggaccgcgacaagcccagggccatcgtcgtcaacgcggagcgagggtaggaggccaacgggtgggtgggggtgctgcccgtccaggcgtgcccgccgtgtcttctgccgaatgccagcctctcacaggctggggagactttccaccctggggatccaatgggtggctttccagggtcccaaaagcaaacacaggctctttcacagcccctccaggaaagcagaaagccccaagggctggaagggaagggggagctctgctgagaggttacaaggcagcgctggccgacgggagttgcagttgataggttttgtatcatccttgttaaacttgaaccctgtgcagaaatcccttccacggcatgggggctgcctgttgactcgctcctgttccaccacagggagctcctgggcttcttcctcccagaggcccccgacgct

SEQ ID NO: 66049 - DNA, 1469 bp, Homo sapiens
aagaggctgaggcaggagggttgttcgacccacggagatcaaggctacagtgagccatgatcgcaccactgccctccagcctgggtgacagagtgtgaccctgtctcaaagtaagtaaataggaggagagacaagtgggcagttcagactgatggtatgggcacagtagagactggtgcagacaggctggcctgtgatgtcaagcaacttctgtaattgtttccggcatccatttgtgtgtcaatttccgtgtcagtaggaagactctgtaggctgccaagaggaataagtgggaggatcctcccagagaggccgggcctgcaggagggccagttctcatgagttctcatttggcccctaccctccaggctgtggttctgaggtgggagacagagcctgacctctgtttgtcttgttttgtctttgcagcagcccacccatgtgcccgtgacaatggtggctgctcccacatctgtattgccaagggtgatgggacaccacggtgctcatgcccagtccacctcgtgctcctgcagaacctgctgacctgtggaggtaggtgtgacctaggtgctcctttggggtgatggacaggtacctgattctctgcctgctaggctgctgcctggcatccttttaaaatcacagtccctgtggcatccagtttccaaagctgattgtgtcttcctttgccctcctttcttttctactatgtgcattcggtgctatgaattttcctctaagtactgcgtttcctgcatctcacaaattttgttacattttcattttcaggtagtttgaatatttttacacttctcctgagatgacatctttggctcatgtgttatttagaagtgttgcttagtttctaaagagttggggcttttccagctgtctctctgcaactgatttctaatttaattctactgtagtctgagagcttattttatatgatttctgttattttaaatgtgttgggtgtggtgtttttgttgttattgtttttgtgtctttttgttttgttttgcttcgtttgttttgtttttgagacagtgtcttgctctgtcactcaggctggagtgcaatggcgcgatctcagctcaccgcaacctctgcctcccgggttcaagtgatcctcttgcctcagcctcctgagtagctgggattacaggtgcacgccaccatacccagctaatttttgtatttttagtagagacggggtttcaccatgttggtcaggctggtctcgaactcctgacctcgtgatccgcccacctcggcctcccaaagtgctgggattataggcgtgagccactgtgcctggccattaggtgtgttttatcacccagcatcatgcagtttatcttggtgaatgttctgtgtactcttgaaaagaatgtggattctgctgttgttgggtggagtgttccagaaacatcaattagatccagttggttaatagtgctcat

SEQ ID NO: 66050 - DNA, 1095 bp, Homo sapiens
cttcttctgtagcagtcccacacccgcaacaggtgtggctgctgaccacctgctttctgcccctctggtcctgaggagggcgcagtgggcactcaggcgtggctgagcagatgtgtgttgccgggaggaggaaggactgctccagtcagggctgaatttcccacccggagcatttctgctgtatttggtgtagcgcctgctgcttaaagctctgattcccagttggcaccctttcccttctgcattgaaaaacatacggatgcatgtcttcttgcagtgaatgtgtattctcccagcctctcttctgggttggggctggaggtggagcggcacacaggagccgcagcgatggaggatgtgcgggtgcagcaccccgtacagcagggatgccaaacccgcgctgagtccctctcaacttctgctttgaagcccagtcacgccattgcctgggttttgctgggcggggctgcgtgtgatgttctcctctgtccctcccccagagccgcccacctgctccccggaccagtttgcatgtgccacaggggagatcgactgtatccccggggcctggcgctgtgacggctttcccgagtgcgatgaccagagcgacgaggagggctgccccgtgtgctccgccgcccagttcccctgcgcgcggggtcagtgtgtggacctgcgcctgcgctgcgacggcgaggcagactgtcaggaccgctcagacgaggcggactgtgacggtgaggccctccccgtcaaggctctgccaagaccctggccctgccctccgggatacgagcttggggctgcctccggcctcacaggagtaggggctctgaaaacctttgcttgcagggagattgccaagtctgtcttttaggcccaacaaggaaaactctgcagttccacccatcctgtcccaccaggtagtgtggcttgaaggcagactgtgagggtctatctcaccttcctgcattaggtcaggagtttcacagaaacctgaggcacattcaggggtgggctgcagaggtccatggctcacaccctggaaaatccgcccccaaaagacagtgctgtctccactgaccagtctgtggg

SEQ ID NO: 66051 - DNA, 2020 bp, Homo sapiens
ccctcccctcccctcccctcaagctctgctgagcaccactgccttccacagcccccactctcgggaggcgaggctcctcgtggccattcctgtccttggcacccacccccccaccaacctggtagagccttgggcggggtctgttactccttgcatggcgtagacctccccacagtaggcacctgacacatacctcctggggggcaggcaggaggtgcgttgaggtctcagccctggcagtccctcccctgcgtggcataggcctcgccacagggtcatcgagggtgggtggagactgtactagaccactccccgctggtcctagaaagggtcccatctgtctgctctctgtttggagtccagaccttggttgctgtgccctgcatggtgggctggggggcaccctccagcctctctgagtgcatggcctctccttgcagccatctgcctgcccaaccagttccggtgtgcgagcggccagtgtgtcctcatcaaacagcagtgcgactccttccccgactgtatcgacggctccgacgagctcatgtgtggtgagccagcttctggcacggggaaggggcgtccgggctgggttcccccaggaacgtggagtttaggggaggagacgtgcctttccagcggggctgggggctgtgtgggagactcaggcggctgggaggctccttgcgggaggcagggaagcctttcccagggcagcggccaggaggacagactgtgagctgtgggctcggcggctacagagtctgcctcagtgggcggggctgatggtgtccaggtgcctgcagcacgcacccacccacgggaccttgctgagcagcgtctgtcaggcagcaagattacccgagggctgcagtggtcctgttccctggcagcttactgtctggctgaggaggagtgatgttcacatatgcacacatgtcatgtgcacacacatgtacatgacaacatcccacatgctcctcaaatagcatgacctgtacagtcacggatatagggcctaggggataggaggccaagacagtcagggaagactttccagaggcagtggctcctgaaaggctgtctgattcaggcaggaagggagctgagttcagataggaagtagcaatgagtcattgtgtctggggacatggccactccttcgctgcagagggacctgggctgagagctcctctcttatggctgcagtcgggagagaagtctgttggggggagaagggggcttcctcaagggactccctgtgccctttggcaccttcgtgccaggtcaggcttgaggcctgaaggcagtggtgggggccaccaagggtcgcctcctctgctgggcaagttcccagtctgacgggcctgtgccgtgggccccagctgtgggggcgctgttgatgcgcagccaggcctcgccgccagagcccgcacgcttccattccgctgacttcatcgacgccctcaggatcgctgggccggccctgtgggagagtgaatgtggcttttgccaaagttgagtctggagcctggaaacttccctatgggcagccttgatagtggagtggcccaaggagcccacccagccgaccctgcccctcccgtggctggtgggcggcaccaggggctgcctggctttgctcgttcaccaacatcacctgggctggccagggcgcgctcacttctgccaccaccgagggccctgggcgaaggagtgaataccaggctgccttggcagggatgtgttgagggctgtggggagtcggacagcggcgggggtcagaggaggaggagggtgcaccgtgcaggctgaagggccacgttaccctgaggttggccaggctccccaggcctagcctcccagctcccccactttctccccaccctccaccagtggcaaagccagccccttcagggcgcacggtgtctgcccccaaggagggcccattccgttggggttaatgttggccacctctttctgtttgtctctggcagaaatcaccaagccgccctcagac

SEQ ID NO: 66052 - DNA, 1026 bp, Homo sapiens
cagccctgagttccctctcccctgtcctgtcccactgtcaccccaagccggcctcattgggagcctgttggatggcagggtatagatgtaacctgattctctctggggagcggggttatctggcttctcaagagctcctaggagcccacagtggtggcaccatcacagtcgcagcagcccccagagaacgcggccctgtctgttcctggcgtgctctgtgctgccccgcctgggttccctgccccagtcgcaggccccttggaggaggtaccatgtgtctcccgtttcacagatgagccccggggagctcactctagtagtggccagagaggcctgcggctcagggagcggggcacatttccaacaggacacaccgccctggtctgagtctcgtgggtagtgggagcagaggagagcgccctatgtctgtggggcggcttggctgagcctggaagccacctgacctcccccgtcccttccctgccaggcatcgcatgcggaaagtccatgatgagctccgtgagcctgatggggggccggggcggggtgcccctctacgaccggaaccacgtcacaggggcctcgtccagcagctcgtccagcacgaaggccacgctgtacccgccggtgaggggcggggccggggaggggcggggcgggatggggctgtgggcccctcccaccgtcagtgctggccaccggaggcttcccgggttcctgggggctgtgccaccgcctctgaggcatgcttgctttcttcccttttcaaacccttctgcttccttctttaatgacattgttgattgtggataatctgaaaactacacaaaaatataaagagccaaaatctcacccaaatccacctcctagagtggctgttgggctccgtcagcatccaggcggccgtctgtgttccgcacggcccagcccatcgatagccgcctgcaccaggcctgtctgccctctgtgagcctccccacagggttccctccacaaacaccctgttctcccacccagggctggctg

SEQ ID NO: 66053 - DNA, 1326 bp, Homo sapiens
cctgttttgtcggacactgtttctagcaccttccaggcagaatctcatgtatccttcactttcgaaatgggtactatttcatccccacttttatcaatgagaaactaaagctcgaagaggtcaagtaagttcctggccaaggtcagctagcaggctctagaggcctcgttctccttagaggcagccttgccagggcccaggcttggcaggctgcagggcaggtgcgggcatgcccatggtagaggtgggaccattgaggctcagagagggtaagtgatgagccctggcgacacagcggggtgggtccagagtccggcctgcatcttctggagctggccagtggacaggcctttcccgttcacagccccggggctgctgtgcccaccagggcggatgtgcctaccgaatcccactcctctgtgtgtgtccctttcaggccctacatcattcgaggaatggcgcccccgacgacgccctgcagcaccgacgtgtgtgacagcgactacagcgccagccgctggaaggccagcaagtactacctggatttgaactcggactcagacccctatccacccccacccacgccccacagccagtacctgtcggcggaggacagctgcccgccctcgcccgccaccgagaggagctacttccatctcttcccgccccctccgtccccctgcacggactcatcctgacctcggccgggccactctggcttctctgtgcccctgtaaatagttttaaatatgaacaaagaaaaaaatatattttatgatttaaaaaataaatataattgggattttaaaaacatgagaaatgtgaactgtgatggggtgggcagggctgggagaactttgtacagtggagaaatatttataaacttaattttgtaaaacagaactgccattctttcgtgccctgtgtgcatttgagttgtgtgtccccgtggagggaatgccgacccccggaccaccatgagagtcctcctgcacccgggcgtccctctgtccggctcctgcagggaagggctggggccttgggcagaggtggatatctcccctgggatgcatccctgagctgcaggccgggccggctttatgtgcgtgtggcctgtgccgtcagaaagggccctgggcttcatcacgctgttgctgttcgtcttcctcagattcttagtctttttttttttttttttttttttgagacggagtctttctctgtcatccaggctggagtgcagtggtacaatctcagctcactgcaagctccgactcccaggttcaagtgagtctcctgcctcagcctcccgagtagctgggacta

SEQ ID NO: 66054 - DNA, 1904 bp, Homo sapiens
tgtggcttgaagtccctccctcttaaagaagcccattcactgtttacttggaggtgtttcctgttgaggtcctgctggctgtgatcacaatttagactttttaattataggtgaacgggatgggtctttggatgtacctccgtgccctgacgtttcaaccgcgtgacttaatgtcattttcctggtacttcacgttttctctgtggggctttgggtctgttttgcttttatgggagggggtgcttgacaggcgttccctttcatcctcgcagcacttgttgacggggtggtgtcctttattcgtgggacgtttactttgattttgtcctcaaggtcatgttgcagataggcttcaagggggacagggactccaggtttccaaccaccgaactgtgcctcaagtagcaagtgtatgagacccagttatggtggtggttgggttttcctcactgtggagtggagtcagtgaccactttttagctctgtgaccttgggcaagttacccagcttctctttttttttctctgtagtatgggaataataataagtgtcccagccataagtttgtcaggataattgccctaatacatgtaaaacagctagagctgtgcctggcacatacagtcacctcagtggctgattagtggttaggctagttaatggctattattgtttaatttaaatttgatttttaaatgtttaggtactattgggaagtcagatgagcatttgagtcccgactcttggtgactgcctttagaaagctctgtgtaagactcagttgggctgaaaaagtaaaactataagttattttaattttttcaggacagggtttttgaccattccttaaattaggaacatttaccggagtaattaatgagtagtagcgcctcataatgtttaaagagatggttaaatacagaaaagcccatcacaagcttaagtcgggctttgttcctcatgtgcttttggatactagtttctgggtgactgccacccgaatcagtaactagggtttcttagtgtaagtcctccttgttactgaaaactgtaagggtgccgtggattgcagtattcttcagcaaagatagtttgggaaatagcttttgtcctggagggatactttggaaggtattctccacttcagcatgtctggtcagggagtctagaacattgaacaaaatgcctgcactcagtcagaaataaactcacaatcctttaccgcttgcccgatactctcctccatggtgctcgaaaccttgcgtgcaccttcccctggtattgttgtgtttacttgggacttggtttgctgtattggagatgtgtgttttgatggactcagtcttaagtagagatgagtatcttgctggtggaacttaaggacaggaagaagattgttttcggtttagaactctagcctttgtgtaaagtatagcaaagcaaagtcaacaagcaaaaagttgttagtttcaatgaactaattgagaatttgagaatcagaccatagctgagcagaaaatgaatagaagtaacattgacaggatgaggttgcctagctttttaagataaagctttggccgggcgcagtggctcacgcctgtaatcccagcactttgggaggccgaggctggcggatcacttaaggtcaggagttcgagaccaggccaacatgtgaaaccttgtctctattaaaaatacaaaaattagtcggtcatggtggcgtgtgactgtaatcccagttatttgggaggctgaggcaggagaatcgcttaaacctgggaggcggaggttgcagtgagccaagtccagcctaggagacagagcgagactcagtctcagaaaaaaaaaaaaaaaaaaaaaagatagggctttgcacctatttggtagattatgtgcttgttaca

SEQ ID NO: 66055 - DNA, 3118 bp, Homo sapiens
tggttaacgtctggaattttatttttggtagtagtatgtgtcagttttttgtcactgtatagtagttgaggagttcttttttgttgacatagagatacacagggtttgtattgcctttggacaatggacaggtctcatctgtctcttttgtctgcaagtgagaccctgccccttctgagtaaacaacactctgtgaatgactgtcccttttcactgtggacttcttgttattacacccttagatggactcagcagctatgagatcctcccatcataggtatggtattttgtaacaaaagtacagaaacacctccaaggtgcagtgaatgatctcaaggagagaaatggagtattataggatcatagagaggcctcgaggtctaaccagctgctctgcggaagtcagggtgatggtggtttcagtgttggggaggttacagagttagtgttgatatgcaaattttcttcctccaaatttggagtatgttatatatgttttaatgtatataactgtgaatatgaatataacattagaacatatataacataatttctgctggtggagtagagatcataaatttgaggtttgcagtttgctttctaaaacatcttttaagtttattcttttctggcacacaggacgttgtagggtaactttgctgtggagtctcacattttatatagaatcattttttcaacatagtgtggataatcacatacgccttgaaggatcaatatatgttaacagatgattggatctttttgattttgcacttaatttctttacaaattctgcattataaccagacagctctattgagggtttgcagattttttctgtaaaggaccagttagtaaatattttaggcattggaggctaaatggtctctgcaaggactcatctctgcttttgtagtgtgaaagcagccatagccaatctgtaaacaaatgaaggtggctgtcttccaataggactttacttataaaagcagacagagagttggatttggcctgtgggttgtagtttgtcaatgcctgctctaatctgttttgtctttgtttatctttttgagatagagtcccaggctagagtgcagtggtgtaatctggagtgcagtggtgtaatcccaggctagagtgcagtggtttttgtttatttttttgagatagagtcccaggctggagtgcagtatagctcactgcagccttgactgacctccctggctgaaacgattctctcacctcagcctcccgagtagctgggactgtaggcacatgctactacacccaggtaattttttttttttttttcttgtagagacaagatcttccgatgttgcccaggctggtcttgaactcctgggctcaagcagtcctcccaccttgttttcccaaagtgctgagataacaggtgtgaactaccatgcctggcctctaatctgtttttttattttaacttgtaattggactatgaattcaaagagtatatatcagcatgtgcccagatattaaacattagaactgacacttgtgtacccactaaccagcttaggaaatagaaggttgccatacctttggctccctgtgtcctcgtctcaccacttccctctttctgacctccccaaggcaaataccttgtatgtatcatttttctgctttactttatggtgttgcaaagtataaatgtatccttatataatgtgacttcatttttgcattcctttagacaatgtaaatggagtcactttgttctttttttgcccccactcaacattgtttctgtgatccttttattcagatgtttgagtacttaccatgtcttaaacactgttctactgctgggcatgttaacagtaagcaaagcagatgaaaagtccttgttttcatggagcttacattttggtaggggaaagacagttaacagataaatgaaagatacagtagccatatggtaatacaaacagggagaaaagtaaaccaggagaggtggggtgtgggggagtgcttgtctgcagattgaaatacagcagtcaacagaaggagtggagggacccagccacaaggctgtgggtggcagtggggtaggggcagcattataggcggagggtcagcaggacaaggtgctaagaaggaggcatgtctgctgtgttggaggggcagcggaggccagtgtggctggagtgaggagcctgagggagagtgggaggagggtaggccagatggatgggggagatggggggagggcgtaggtcacactggccattgttaagattttgtctttttctctgagtgagatgggtaagtcatttggtgttttgagcagaggtgtcacatgatgtggtttctaaaggtcccactgtcctgtgctgctggagggaggttggacgctctggcagtgatccaggagagcagtaatggcagctgggactgaaggggagcaggggtgggagtgagaagaggttggctgctggatccttcttgaaaaggaagagcagacaggatttgctggcagattggagtgggtgtgagagaggagtaaaggatgataccagggatttttgtagctggtgggcgttgccatgtataaggaaagggaagacttgggaagaacagcgtgtggaagtaagatcaggagttgggttttgtgcatgttcagtttctgaagcttttggagagcagattggagatatgctggattggggtgttcactgctcaagggagagatctaggctgcagatagaaataggagtctttgggccgggcgcggtggctcactcctgtaatcccagcactttgggaggctgagacgggcggatcacaaggtcaggagatgagaccatcctggctaacatggtgaaaccccgtctctactaaaaaaaatacaaaaaaattagccggcttagtggtgggtgcctgtagttccagctactctggaagctgaggcaggagagtggcatgaacccgggaggtggagtttgcagtgagctgagatcgcgccctgcactccagcctgggtgacagagcgagattctgtctcaaaaaaaaaaaaaaaaaagaaaaagaaataggagtcttcaatatttaggtggcatttaacagtcccgaggttgagtgaggc

SEQ ID NO: 66056 - DNA, 1602 bp, Homo sapiens
ctggagccacattcttgggaaggcagcaggaagtgggtgggtgcccatgtggagagttggcatccatgggctcctccctggtaggaggagggagagcagactaggggagatgggatagtgggagcatgtggacgttggcttttttttttcttggtgaaatggaagagttctcagcagtcagtgagaatgagggggtgtcagggctggcggggtgtgaggagagaggaggaagtatgacatactctgtgggaaagtaagaatgtgtgtgaatggaatggcctacctgagggtagcagtcctgagttgcagtgaagacagcacgatttgttatttttcctggaaggagagtaggcattgcttcatttaactggggttgtggtttccctaatcagaaatagcaaagcaagagagaggccaggaagtgatgatgttggtgggacgtggtggtaaagccgggaagggaaggcgtgcagacggagaggtttgcccacattggtgcgtgtggttgtggtttatccttcttcacttctctgttacattgcagactgaatatgtctcattttcttctttgtcctgccattggagaatataagtgtttctagtaagaaggaacgctgccttaaacaagtgcagatgcatttctccagggtaccacccatgtagagaattgcagggtagtgcgacatgtacatcttcaactttactagatggtgcaaattgttttccaaaatgattgtacctctttacctcactaccagcaccgtcctacatccttgctagcccttggtattgtcagactttaatatttgcaggtttggtggatgtaaacttatatctcggggtttttttttttttaatgacaacattattgagaagtaattcacagactattcaattgatcaatttaaagtgtacaactgatggattttaatatattcacagaactgtgcagttatcaccacaatctaactttgtaacatttttgtcaccccctcaacgacaacaaaaccaccttgtacccattggactattctggacattgcttattaatagaatcatacaataggtggtcttttgggaccagcttctttcaacttagcatgttttcaagtttcatccatgttttagcatgtatcagtatcagtccttcattctttttagttgctgaatagtgttcaattgtatggatataccacattttatttatccattcatcagttgatggacatttgtttcctttgaaatatatagttgattttcatccttggcatagtttccgggcatacagctcctaaaatctttggactttccaaaatgataagtgtctttttgtatgcgaatgagttgactgatggctagctgacctaggtagcttcaggttaggggctggtcactggaaagaccatgattagagggttgggactttcagctccacctccagccttcagtgagaggagatttgctgaacattgaattgatcaactgccaatgatataatcagttgtgcccaagtaatgtcactgccataaaaatctggaaagactgggttctagaaacttctagaacacatggaggttcctggagggtggtgtgcccatagag

SEQ ID NO: 66057 - DNA, 1436 bp, Homo sapiens
tggttaaatcagcagtaaaacaaaggaatgtctatatcaggtaaagcattatattcttgaagaaagtagaaattgttttttttttcttactatgctctaagtcaggttctttgagagttactttttttcattaaaatttttcaagattgagaaatatacaggtgggtctggtataggccacacaatgtatatagaaaggtgcctttgaaaagagctgtgtagagcttgtccttctgccctgaccctctactttttcacgtttcacttaagtcagtaggctatattcctttctccagatacctgttaggattctttcgagtggattctttcctatttcatatatgtactgagttatacgccataggaaaggatatcttacaatatctttatggatgaatgcacacttcagtttaccttattgcagctaaaagtaagtgtaccccctgtcaagagagcatcccgttttacttggtttggctcattgacaaagtaagcaagctcctggtacaatttgagagccctgaaagcagcaatggggattctactatagctgtctagtgtaggaagattttcttggtcaagtttttgttgggggaaagaacagtccaaacctttgtgagctgtgtgttctcatcccagctacacgcacctgactgtatagaactttttgcagtttggccttctttggagatagcagtgtgtttttacgtgtggactaaagcaaaaatgaaaaactaggcacgtgccagtagaccaaatcagcctcctagcagagcacattgacattgtacaactttacagcctctgtcattggggtctggtttcaatttacttcatttcttaagagtttaaactggtttttataatttttccttatttctttgagtatcttggtttcacttatttgttcttttctatgtcttcttagatctaaaggaatgaagaattttaggatttgaagtgtcttaagtaatcatttagtctaaacctctcatttacagataagaaaacaagctcagagagatgtggtgacttgctcaaatagtgacagaacttcctcggccatatggaggggtcatataatacccttgtgtcttcagtttgaggtacctcccataattttaaggggtatgtggctttaattacattactactgtttgaatgaagaatattaatttatatgctgcactagttcatttagaatcgtggacacaatcgagttgaactcttacattttttggttgagaaagttaagacctagaagatgagaatttattcatctaagattacaggccataaacatttattctgtgcctagatttttaaaaattgaattattgttttttatttatttagagagatagggtcttggtatgtgtgtgcttagttttaacgtgagtcagagcagtgctgtctagtagaactttgtattaggt

SEQ ID NO: 66058 - DNA, 1020 bp, Homo sapiens
tgtgtgttttttaaatgtacttatcactaatttagcctcagacttttagccagttacatattcagatcttccctcatctttatccttttgaaggaatctttctagtttggactgctggctctcccattctgtgaccttgggggttctttttacctctttctccccattggatctcctattcctgtgttctgtgttaccttgttgctctccttagttttagtggagcatagttgccagtagttttcagtgagaaaggtgtataggagctagacctgttgagactgtgtgtctttctgtgtactcgtggttgataaagtttgactgtgtatatgcttttggattggaaatagttttccttctatattagtctgctcagggttgccataacaaaatatcataggctgggtggcttaaacaacagaaatttattttctcacattctgtaagctagaagttcaagatcaagcttcttgacaatttggtttctagagagtggcctctttctggtttagagacaccatctcttctcacatgtggtgccaatcatcataccagatgacacagtctggagcaccataatcccaaatgttggaatacctaaagatcagaatccctgaagatcaaaatccttaaagatcataatctctaaaatcctgaaaatcacaaaagattaaaatcctgagtgttgaagccctgaaagccaattaccggggaagggacagtatgtttttggttgtgcgtaggatagttgcatcacgttagacggaactattaccttgttattgtctttattcgtaaattaagtatggtttaaggagatgcgtgtgggtgccaggttgacaataggtggacttgtggactcagttttagatgacaccttaactaaggagtacctagaaacctggtgaaacattaggttttgggtgtgtctgtgagagtgttttcagaggagatggaaaaattctcaaacagcatctaaacgcacttgcttaatcacaaaacgtcaggtatgaatgtctg

SEQ ID NO: 66059 - DNA, 1099 bp, Homo sapiens
aatgtttaacattatttattatcttacttgagggaaaatgttgctatcacaatgtagtatgagttttatgggggaaaggcattagatgaacagcattgttttggaaatgccttgtagattgcattcttagaggatttctttttttttggccctgtcaggcttcactacttagaggaattctaattagttcaatgtccacagtttaagtcattttccacagtattaagctatatatgaagtgcataccttgaaagataatttctattcttttcatgtgcagtgtttggttaattgacactagagactgaatttgagtacagctagaacttcagtgatcttaatgttctactcacgcttcctgataaaacgtattaagtggactgccagggggcatttaaaggaaggaaattgtaaaattttagtattttttagtaaaagtgtggtgcctttatagtggaccctatgttggataagaatagaattgatgttttcagaagacaaaggtaagaatatgtatttttcttcttcactcattgatagtgctattatgacatctgtatttacttctgagatactgtttagggtaggataaaagctaaggtagagagatgacagtgctttttttcttatgttcatatagaaaaattttagtgattaactagaactttttaattccctgtggtatagttctgtgtggcccaagaccctgacccagtatgctttaatggcagctatcatcacaccaaaagagaacatatgtgattatctgcttttttttttcttttacaggagagcttgtttcatatccatatcccactgtattcctgctaatctgctaatgcagtaaattggaggaaaactgttaccaggataacctgtaatgggcaaggagccacaaagaagaaaacatttcttttaatttttaaacttggtttgaaaggtaagaccattacgattagcaggagtttccttccattaatgacatcaaggaaagctgtggttctattgtgagaccctggagtcttagcaaaccaggtggagaccagtctctctgagctaggtacaatatgattctgtggtactgtggtatttttaggaa

SEQ ID NO: 66060 - DNA, 1048 bp, Homo sapiens
tgattttttgtactttctgtggtggagacaagatctccctttgttgcctaggctgatcttgaactcctggactaaagtgatccacctaccactgtcccctccaaagtgctgagattacagatgtgagccactgggcctggctaacgttggcttttatcataccatcttacctctattcacacaccctcacctccagcatgcacacgtgcatctggaaccagctgggtgttccttgcctctcctcggtttccttcatctcttaagaagacaactggcaaaaactcgactaccattgtgccatccttattacttgcctttccccacacaacccctcagtctcacttcaatgaaacttgttcgtagtagaaataacccatgctttgcatatacttggactgaagtttttgaaattgtggaaaataggcacagaaattcctgtacattcaaggtttcataatgagaatttgtagaggaacacgttactgtagttgctttaatttgaactagttgacaaaagtaaggctggattttttggttggtggttgactttaaaaaagtgaagtgaatgataaggttgtacatcttgtcttgctgttagcatcttagcagtgtatttggagttagtacagggtgtatatatagacatttgccttctgagggttgtgtatttcccagacagcttagaattctaaaggcaagtataaatttgtatcatttgacaccaaagtacagctccagaatgaagaaaaagtggaaattagacttggaggaggcagaatgctggtgacattggagaagtaatggtcatttagtgtgaaatcttgtagcggataccttggctttgaacgtagaggccattgcaaggcatcattttctgctccggtgggcccctcttcattaggctcacccctctccaatctgtctttcacattgttgacagttaacgcattcacactccagatctgctcttgcagactccagtgtctgtcttagcaccgtgaccagtctctacagtgccccacctcaggcgtcttaccttcatcccctt

SEQ ID NO: 66061 - DNA, 1001 bp, Homo sapiens
aagtgggtgttaatgggacttttatttcctgtggaacaaaggacactacacttttctgcaaaagaccaagtagtaaatattttaggctttgtgggccgcagatggcctctgtcatatattccttttttttcttaaaacaacccttaaaaaatgtcaaaatcattcataactggcaggctgtgagctggatttggtttgccaacaccttcttatttcatcacaactaattaccactcttctttagaaatccagtgtttaatgagtttcctttataataaggttgagatttgggaagtcagtttttacttgaggcaaaaaagttgtatcttgattcataattcagaagtgtcattttatctaggttttaggcatagcttctcacctgattggtgaacgtataccctgtttattattagctaaaaataagtgcttgatgccagattcactttttttctgatttatttcttagtatttttcatactttgcctttaatactaagtgtggggaagagtagtaaaaatatattttaaaaaaaggttttgtgatttttaagaacgtagaggtgcatgagctgtattattccaccagaagcatggtgggtggcactggcattgttattctgtgccctcagacagcgaaccacttctcttcctctggggaatgaatggaaacccaactttttccctcttccattgaagttatcttttggtatacttttgtctttttttctacttgttagttgtattagtatcaaatggcataataaagttactttgtttgccatttcccactcatctgaaaatcacaaaaagcatttatttctaagatttatatccactgaccttttccccaaagttattttcctgttacttgtatttcatctttgcccttatttctttaatatttgtattagaattagcttgctcttgtttccttcacggcaaatgtgttacattgcccactgggtggcttctgcggatgcccctacccacccctcgtct

SEQ ID NO: 66062 - DNA, 2172 bp, Homo sapiens
aaaagcataaaatcaggatgtattcctgtctgatctcctaaagtgggtgggttttttttgttttgtttttttctttgttttttgtttttttgtggaaacagggtcctcaccctgttgccctgctggagtgtaggagaacaatcatggcttacaacagcctcagcctccttagtagctggtactacaggagtgtgccacaatgcctggctaattttttgaatttttttttgtcttatagagatgaggtctcactatgttgtgtaggccgttcttgaactcctgacctcaagtgatgctcccgccttgtgcctgccaaagtgccaggattacaggtgtgagccactgtgtgcccggcccaaatacatacttctaaaaatgtgtgctatacatggattaccatcctttgcagcctccttccttttacctaggctcttttaaatagcatgtggatattcatgcttttttggagataatgataatggtacacctcactaagtgggtagtgaagctccagcttatatgtaggttttcgtttgggggttacagagagtcagtatgtattaacaaactctggtttaggaattctgcagtgagcatttagacagataggaaaggtctttgaatggtctctactgaggtcttttcctgtgatgctatcatcctgtcatgtgtctcaaaagtggcatttgagatcatcccatcatgaatggcagcctgtagatcatgtagtgaaccctctgttttatatttccatttgtaacaaataagtactttttttagctctataatttgaagtaacaaactctgttttccttgttgaggaaggatgggcatgaagctgaggaatgaatatgtatgtggcgtagtgattaggtttcattgtcatgttttcctagtaaacagaggagaatcagtttctctaactcctcaagaattagttttcagtttttagtagtatattaagaatggcacagattttaccagtttattgcttcaggcttttgactatgaaagtactggtttgcagtgatcatttagttctttagtcttctgaagccttctagatatttaggcctcactgcttatcacttgttgctgaagatattctgtttttcacccttaagaaaagggtgacttttctcctttcccagcatcacttcttaatagtatggatgaattacttttgcaggttaaaatcatcccaagttttagctttgagcattttcaagtcaaaattttttatctattaaaatattttcttttctgagaaggaaaaaatcctgccagtaacgcattaaaaagtattttataggttcagtgtgaagcttatttaacttatgtgagccaagttggcattttagattgtaaaactgaactgaaatatgaattatggaaaattaatttgtaaagttgaaattttatgaaatactttctgcattttgtttagaccagcatgttttggaaatttgatcttcactcatcatcccacatagacacacttctagaaagagaagatgtaacactgaaggagttaatggatgaggaagatgttttacaggaatgtaaagctcagaaccgcaaacttatagagtttctgttaaaagcagaatgtctcgaagatttagtctcattcattatagaagaaccacctcaagacatggatgaaaagatcagatacaagtaagacaattcaatcttctctgtagagtgggactaaagtgaagtgggggtagaatatacagctcttgttcaaggattctccagtgtgactgttgccatttacagaagggtaagatagtcaagaatgacaggctcggtggagcgcaaaatccattctagcagtaagtccagggaatcacaagagtttaaaaatgagcgttctgaatttcattcaaaggttttctggaaaggcagcgtgctttgtaaacaatgatgataaatatctcaaaatagtaagatgattaaaatatttactttgcaaataggaagatggacatgatgtgactatgcagaatcgcacagcagatctaagtcagagcttggggttgtgaagagcattgcttatacaatacattctgacctttcattcactgaaagtaaaggaatgggtaccatgggtaactacagtggattttgtctgctagtttaatctgcttacaaagagaacgacag

SEQ ID NO: 66063 - DNA, 1119 bp, Homo sapiens
acatgctgtacaatttgtgcagttaaggcaattatcacatggtcctgaagtgacatacatcctcctcaactgacaggattaagagattaaagtaaagacaggcataggaaagcacaagggtattgatttggggaggtgataagtgtccatgaaatctttacaatttatatttagagattgcagtaaagacagacataagaaatcacaaaagtattaatttggggaactaataaatgtctatgaaatcttcacaatctacgttcttctgccatggcttcagctggtccctctgtttggggtccctgacttcctgcaacctgtgccatagtctgactttgttccttaggagtgctctgcctgctctgtggttagggactgtaggaggacagaagtggaagtacagttggctgcagtgatcagcagagaaaaacaagatcttagtggacctgattgttgagaagcggtcagatttccagaggcactagatgaagttagaactgaaggggtttcctctaggtatggaatgggagataaagtgtcaagagtgactatgaggattttggcctgggcagttaagaggatggagtggctttatggcagtgaaataagattgcagagggaaagggcaggagtttgggtctggccctgtcacatttgaaatgcctgttagacatgaggtggagatgaggcctagtggtaggtggacagaggacatgtaaagccacaaggctgaatgagatcgcctgcagagctgatggagctagaagaaagcttctgaaactggagatgggtagtgtgggctggcctgggttccactgagggatggaggagtgattggatgcaagaggagaacctgggggctgctaccctggaaaccaagggaagtctggcttcaggaaggaggggggacagtgggttagcggtactgctcataagaaaccactcagtttgtaacatggagatcatgggccccatcagtacaggttctttggaggggcccaggtgaaagcctggaggcaagcagagacaactctttgaagtgatttcttgtaacaggagcagagaggaagtggtaggtcgaggcagatttggagtcaggggtggtgtggggttttgttt

SEQ ID NO: 66064 - DNA, 1046 bp, Homo sapiens
gtagcccaggctgatgtcctgttccccccttcattatagtaggatgcttactctcttaagatgtaatatagacttagtaccatttacaacccatctaaagataaaggctggtccaggtccctacagagtgccttaagtcattacaaggtgctgcatgcagtgcagtttcctggaaaccagtgtcctccacagttgtccgcaagctttgctgcttcccatgccagaggaggctgtagcctgatggctcgtacgtccagccgctttcctcgctgatcgtggagaaggcccgggccctgcagcatgacctctctgggcttctgagtactaggtgcgctctagtttcttcagggaaaatgtattcttgttaaagcttggtttaaaaacaattttttagatagtagaaaatttattttagtctggaggtaggttgaacagaatggattgaaatgatttcctgatttccagtaaacgattttatttttttcacaaaatcttgggaagcctttctgatttgtgtttatctttatgtaattaaactgttaataaagatgatgatgtaaatatcctgttcttctaggtatccaaatatatcttgtgagttgctcacttctgatgtctcccagatgaatgatagactgggagaagatgaatccttgctaatgaaattatatagcttcctcctaaacgattcccctttgaatccactacttgccagtttcttcagcaaggtgctaagtattcttatcagcagaaaaccagaacaggtaaatatgattttccaaaaggtaagtattagggctgatcatccccttgaggtgatcccccagtacttgttgctttaagagttctaactttgccttaagttcaggttgtataagagaatgtattttaaaccttaaacattctaagcactcacatactatttgtatgttaatgaatatttctaatatggcataatctcaaatttcacttaatttgttagcatactttagtttcctcttttgagaagtgggtagaagatgagaatattgggtacccatttgtga

SEQ ID NO: 66065 - DNA, 1365 bp, Homo sapiens
ccgattttcagtgtacacataaagagagagaatacacttaaaaccttgccagttatgttctgagacaagagcccttcggccttttgcttgttacacttccctgtcaggactgtatgaatgatagcaagaggattcagtggctgtgagttaagatcaaacttggcatttctttatcctttgccaattaggagtgtaaataaaggttttctgttatgtgatagtattagtaggggtgtatgcaactgtaaggacaaaaattgagactcaactggcttaaccaataaaggcatttgttagctcatggaacaggaagtcggatggtggggcatcttcagtgctgcatgagtcagcaccccagcggggtcatctgtgccacaggtccctgttgacagtgctgtactgtccaccacactagctgggatttattcctttgggctccaggtttggtgtttctggcactgaattacggaatacttgggacacatgtgacttttttcgtcctttctcctctactgtccttttaaaaacttgtgggatccaattgtgagtgaattatttatgtgtcatatcatttcttgaagttttatatcataatgcttgacctcattgtctagagaagcaatgtgtgttggttaatcctgtatttatacctaattgtatgaagcagttttagttgtcatttctggctattagacttcatgtggcataatggaaagattgtggcttttgtggcatacatatccaattttaaatcccaggcagccaccttttagctctggaagatagtttctgagccttggtttcctcatctctaatggggtgtggcggtgggggtgagttatccaaccccccacgccccagagcttttgagaaatttcagtgagatcctgttatatagcagctgcgacactccccctgggactcgcagagggtttgggaatagatgacacgtgcgcatggacagaggcagaggcaacaaggctgtatgggacacagggatgcatgggacagagtcatctccctggtctcccagagcagaagagaccagcagcaggggcctgatttccgtggccattctcacgttccttcagggtagctctctgcctctccaccagctgcccttcttgtgctaagctattggagtaaattggtgaagtcaaaatcaaaggcgatgtttgtgtagccaggtgagttagttattttgactagagtagaaatctttgttttgaaatttttttctcatgcttgttagagtccagttaggattttgaatattacttattttagtgcaaaatctaacagacatgctttatgttcataaactgtaaaatggtatattctcttgctctttataggcatattaaa

SEQ ID NO: 66066 - DNA, 3526 bp, Homo sapiens
gattctcggagaatttgtgtgcacattttaaaacagatattaaaatatgaagttgggcctctacctctgtggtgcctacctaatagcttcacattttcctttgtttggtgttttcgttgagcagccagagagtgtcagggtttcttctctgttccttaagcaaattgtgtttgatttctgcccccgctgcccgccctagtctcctttagctttccgggctttttatgagcagaggaggggtggtgtcctttctaggtagtgagctgccttgttgatgatggtgttttgggcttcttatggcattaatgttaagccagatgatttttcctttattttttctgaattcggattccttttatgttttcattcactgtagcatttcatacatggattaaaaggagatggccatagctctttgccagcacatgacagggcggaaaaactctgcctctgtgcttcctccagcccccacgtttcctgcagtgggtttggttttgtaatctaaaagtcccatttgttcatcctgtgtttttcttaacccagagacttggtgctaaatattgctcttctcaatctttctgaagcttggaatgaacgtgctcttacagaaaatgtataaattccatccttcttaatctcccagccctctcttcttaagaactaacctacaaacccttttagtcctaaatgtctggaggtgacctcatggctaagaagctgatatatagaattttagtgtgtgggtattgtaatttggggagttgttggtactgttggccattgttaaaacaatatattcactggcattttccttgggggacttttaattttctgtagtgttcaaagtccagagaaacctgtaacattctacttaaaatgtgatggatatttccaagtatgttaatctacattggggcttgaacaagagccactcattgctatgattacttctacaatgtgttttacagtggttaaatgaggagaaaattatccagaggcttgtggaaatagttcatccatcgcaagaagaagatgtaagttcacttgtgtgactgtaaacttgattagaaaaaaaaaacaaaaaactgtttattgggcacagagcatacttatattaaatgtgaacatgatcagagcatacagggagaatagcagcgatctagtgttcttaaagttgatacttttctaaacaatattacattttgccaatactcagaaaatttccagaagtgtacaacagcaggcccttgttatagcaccatctcctttctagagccggtatttcatgctgaaccagctggtttttgtacaaacctcctttgtttatgctcctttttactttttttttcccctttgagacggagtctccctctgtcgcctaggctggaatgcagtggcgcgatcttagctcactgcaacctccacctcccaggttcaagcagttctctgcctcagcttcccgagtagctgggattacaggtgcccgccaccaccctggctaatttttgtattgttagtagagaccggggtttcaccatcttggacaggctggtcttgaactcctgaccttgtgatccaccagcctcggcctcccaaagtgctgggattacagccgtgagccactgtgcccggcctcctttttatttttatacccatctgtagcagttgatgtggccacatttgcatttgttttatccagtctgtttacagctttgcaggcagtgaagtgggatgttggtcaccattgagcccctacagtaactttgttatacttcctagccgtggctgttaagctctgacaggtttggccttagtcctaggtgctaaaggttgacttggttacaggattgaagctagatttggagtttgcagattgaactctgtgctgagggaatgcctgttgggaccagtgggtgtgtgtgtctctagaagagatctataaggttaccaccttaagtatcttggccaagccgtataaaattggcagtagtcatccatttttacctacagacatgatagttctctatggttcagcctaatatctacaaaggagttggtttaagggcaattcaaagtttgtcctgaagctgggagaatctccttgtgtgtctctaggttgcaggttagatgggagagcgagcacagcagaggagctgtgcaggaagagacatgcaatggaggctcctctctctcacagaaatacattttctgtgatagtagagcgaaaccctttcactctgatccattcagaaacttttcatacctggactttattaaagggactgtcacttccccattatccctctttgggagaatgcaaggtatgctcctttgcagtagttgttactgttagcagagttgacattgtggacacatccagtgcagacatggattgggaatgtgggagcccctgcttagaaggtgctctcaacctagctggggtgataagccctcctcctgtgggcaggggagtgtggttctaggagcaggtttccctgtgatgacagtgtggcctgtgcaggccgtggagagccatgacaggagtgtggcctgccccgttgacagggaggagtttccatgaatgaggcttactccttgctaggttcatgttcttgagcagaggaacttgattgctcaatgggctaggaagaggattgctcagtaggggctgtctgaagggcccaggagaaattgataatggagaagtccaattctgcaacaagttttttgagaaggacactgcattgtggacatgagtaccttctctgcatgacttagaagaaagttaattttggtttttggacagtcctgttgacacttctgttttgtattaagtgatgaattccatgttaaaattatactggccagttgatagttaccaaggaaatgctaggctcctgattccagtcagtgggtttggatatcctaatctgtgctctcctctcttctagaatatgagtgttctgcctgtattgggagcacattgctcagtctttgagttatgctcagtttcttaatccagagaataaaatgtgtttgggtgctgagattttagagcttttctgtaaggtcaatacactgagagaaggcttaatatttcttatccattggcattttccagaaaactgtatttgcttttactttttttttttttttttgagacggagtttcgcttttgttgcccaggctggagtgcaatggtgccatctcggctcaccgccacctctgcctcccaggttcaagcgattctcctgcctcagcctcccgagtagctgggattacaggcatgcgccaccacgcctggctaattttgtgtttttagtagagatggggtttctccatgttggtcacactgggctcgaactcctgacctcaggtgatctgcctgcctcagtctcccaaagtgctgggattacaggtgtgagccactgcacccagctgtactttcacttttttttaattcaaaaaaagtatgtgcatccttctatgctgataagagtgtattttggggatacacgttgagtat

SEQ ID NO: 66067 - DNA, 1971 bp, Homo sapiens
cttttttcctttagcgacattcaaatgcatcacaatcactttgtgaaattgttcgcctgagcagagaccagatgttacaaattcagaacagtacagagcccgaccccctgcttgccactctagaaaagtatgtgtaaaactctgttcttgttcttctttcatattgatgctgttccatgtgttaccattgtgagtgattggtaagtgttccttatgtgggaatcatgtgccttgaaaataaccttgggtgggtgagaaggtagggaaacctgcttcttttatctcagtagaagtttggcagggtaagaagataaatgacatttatatctagactttgagttttccaattatttgtaaaatggaattctgtagagccatcctaagatgtggtagtcatttagaaataactgtagtcacagcttccaagggtcttttgatgaagaatagtcttgtgtaagtacgaatgttgtgcattttattcagcagcttttgtcagatgatgtttaaggattcattgtatctttgcagccgattagggacagttatctcatgtttaggttgaagacagcttggggatggggtgctgttttttctagattcacatgtttttaaaaagaatgtttactgtcaacatgggcatgtatatttgacctgcattcaaacagctgaacgttattttaatagagaataatcaggccactcctcactatgggagaataattgggaagtatgcatacagctagcattgttaagtactaatggcaatcttgcttcggtttacttctattgttgtttttaatgcttttgtcaatcctttttattcctgctgtatattgaggctgttttgcatctttggcttaactacctataatgccgttttattaaaataaaatgtattatttcctggacatatgtaagacaggcagggaatacattacagacaagttaatgtgtcttcaaccctgtctttgcgaagtggaattgtgttttcctagcatgtagaatacgaaggggttgagttctctgaagtagcaaaactacaaaagattgccggcttctgagtaaaatggcatcttacctgtcccattttagtaattcttgcactatggcatatatagtcctttaaaacatataagacaccccacattcaaatactaattgtgatattaattaggttgaaccttgtaaaattgccatttcagtaggttagaaatgttgaatatcagcagtttcatatggctcactacagtgctgcccagtggaaatagaatcaaagccacatgtaatttaaaatgtttttgcccaaagtcttggaaatccaatgtgtattttacacttagaacatgccggtcagacgagttaaattttgggtgcttgatagccacatgtagtgaatggctcccatagtagacagtgcaggttctgcctgaatatcagactgcttagtagtcattgctaagttcttcgtgccactccaagccttccgtccacacagctttatttggacccaatgtgtaacctagccaccagagcccatgtgcgcactagcttttatatttcaagctgtgttttagtcctagatcaggtagctaatttctggatgaagataggtaaatgcctagaatttacatcattaaattagttggagtaaatgtgttcaaatacatggacctgatgaatcaatggccctgttgccaagtaaaacctccattgcatttaacagtggaaagaaaatctgtcatagtgcttcccacagtctgtttgagaataagaaccaaccacttctaatatttgacacactgcacatctttttagtgtctgttgattcagacaatacacagtgagaaaagacttccattttagtaaacttattaatcataatagcatctgtatatatttgatatattatgtgataatatgtaatatctatttgataaatcatagttatttaataatgatgatattacatat

SEQ ID NO: 66068 - DNA, 1643 bp, Homo sapiens
cgaggcccggctaatttttgtgttttttagtagaaatggggtttcaccatgttggtcaggctggtctcgaactcctgaccttgtgatccgcctgcctcggcctcccaaagtgtggggattacaggcgtgagccactgcacctggcgtccatttcttaattcacatggatttcgaaaattactgagaggctaagaaactaaagttttccttgagaatgttcatataaattcaatgaactggtttatgttaattgttatcttactatgtatgagagaagtgtaatggaaagagcctgcagataatgctttttggacatttaatttagtcacatttatttcattgctgccattttattttgctttttcaaattttatttgtagagtaaaatgcaacaactgatgttttcttttttctgttttagatctttgctaattacacatttatgcttttgtaggaaaacattcatgggttctaattagcctttctgaacgttttcccttctttagtgagggtgaaaggttctatgtcttcttgccacccccagccccagtcatcatcatcatcagagtcttggtttgagtaggaggtgacttggtcttgagattctgttggctctcgacaaaattggcaaagacaagcatggcccaggttattttgctgagggaaagagatagaagggtgagtgagtgagtgtgtttgtgtgcgggtgcatgtgtgtaatttataaataggatcaattgcctactttaataagtatatagaaataaaatagtaaaacaaatatgcccaagtatgaactcttcagtgatgcttgtcttgtaccgtcgtctttttttctgaggttgttggtgataagtgatactgcagttagtgattattgatttgtttccctaggcaagaaattatagagcagcttctatcaaatattttccacaaggagaaaaatgagtcagccatagtcagtgcaatccagatattgctgactttacttgagacacgacgaccaacgtaagcttttcttatatcttacaaaatgaaccatgttgttttgctttcagatttaagagttaaattcttagtggataagctgtaatagcgtacctttgaattgcagttgctgattcttcttctgctatataaaccatagcctaattttatatgaataccacatattgggatgcagttgaaaattatgttttggtgacactatttattggcagtatttagactctagtcatatatttttttggtagtggtagttaggaaaatgcttactataataaatgctataatcaaaaacatgtataatggctgaaaaacagagaagcttatttcttgctcatgataattaaaaataggtgttcctggtcagtgggtagctctcctggccattcagaacgtctctctgtcttgtgattcctttcattcctttctgcagatacttaggccttcaggtggtgttttcctgggtttcacatttgagggcacttgagcagaggctgtcttaaaatgcatgggcaggtggcttgagctttgaggacaaatttcttctacatgttttataatcaaaaataaagtcttgcttttcacatgtgtggccttcgcccctggaccagccatttcatgtgtgtcatgttattctt

SEQ ID NO: 66069 - DNA, 1033 bp, Homo sapiens
tttatgttttgtagcgatggagtctgtgttgctacattcagaggggagggggcgatgtgagactgcatctgtttacagatgacaggattgtctttgtagaatatcctaaagaacattaaagaaaaaaaaaaacgcatactcctagaactaacaaatacatttagcaagattgcaagtatgaagtcagcactcaaaagttaattgcatttctatgtactaggaatgagcaattggaatttgaaattttttcgaagtattattttttatagcatagagaaaagaaaatactaagatacaaacctaacaaaatgtgtgcaaggcttaatgccccaaaactatagaatattgatgaaatcaaagatgacctacataaatggagagaaatactctgttcatggattagaagactcagtattgttaagatgtcacttctccccaaatggacctgcagattcaatgcaattccgaacaaaatctaagcaggattttttagaaatcaagtgaattctaaaacttgcacaagaatcaaagtacagtagccaaaacaattttgcaagagaaaaggactcacactctgattttgagacttaatacaaagcgacagcaatcaggacagtgtggtgaaagaatagacatacagatcactgggacagagcagagtccagaagtagacccatccccatgatcaggcggtttttaacagaggcatgggggcagttcagcggagaaaggacagcgttttcagtaaatcgtcctgaatggttaggtattctatgcagaacgttggactttgatatatattttgcagattatgcaaaaattaactcaaaatggatgatagaactagacataaaactagtagttctagaagcaaacaggagaaaatctttgtctcagagtcatgtacagattgtttagatacattgccaaaacccaattcataaaacagaagttgataactcagactacactaaaattttaaaattctgctccgagactctgttaagaaaattaaaagataggtcacagactg

SEQ ID NO: 66070 - DNA, 1024 bp, Homo sapiens
tcttcagagatcttttttccaaagaaggtgacatttgcaggccctacgtattagaatgtggacgtatgttttgggtaggagagcatcattcagcccactacttagctaaaccagacagacagaatagacagtactcagtgcagtatgcagggcaactggaagtcacacacattactgttgggaatggaaagtgatacagccacttcatagaaatgtttgtcagttcttagaaagttaaacattcataatgtcacccagaattcttatccttgagtatttacccagttctcattctacctgtaattgttttcctgcaagaagtaggttataatgagtatagattgaactttatgtagaataattttaaaccttttaaataggaaataatgttgattatctaagaaaaactgtatggaacaagtataggcctgttcattaataacaccccaaactggcaggcaatttggggtgccctataatccagaggttggatccctttcgctttccaaatttcctggtcacttagagacttgttactgtataatagttatgaagacttagaaggtttagaatgggaagaaatcacatgtaatttcttacctgatactgtagctgtttgggttgcaggttatagagtctgagcctcatggaggtttcattaaccctcttctgcctcattatgcttttttcctagccttttttcccgcagccagaaaagttgatataatcattaagtaaagacatacatggtcgataaccttgaatgatttgttctgaaattataataactaaaattccttgctttgtttcaagatttgaaggccatatagagatctgcccaccaggcatgagccattcagcttgttcagtaaacaagagtgttctagaagccatcagaggaagacttggatcttttcatgaactcctgctggagccacccaaggtaggggagctatgttaagcatggctgcccagcgagtaatttggttgaaacagtcattcgaatgtgtacgggccttaggag

SEQ ID NO: 66071 - DNA, 1401 bp, Homo sapiens
ctgctgctgctgctgttgctactactaccacttcttcttcttctttattcttccttcctcctcctccttcctccttctctttcctcctcctcctcctccttttttcttccttcttcctttttttgtttttttgagacagtgtctcactcttgctcaggctggagtacaatggcacaatcacagctcactgcagcctcaacttccgcaggcccaggtgattctcccacctcatcttcctgagtaactggtactacaggtgtgcatcaccatgcctggctaatttttgtattttttgtagagacagggtctcaccatattgcccaggctggtctcaaactcctgggttcaagcgatccacccacctcggcctctcaaagtgctgggattataggcatgagctactgtgcccggccataacttcttttagtttagatttctggtcagattttgaaatattgtactttttcctaggatattctgtagccttctgctttcttctcataacagcttggaatgttgaggcagggagacacttgatttcttataaaatttatgatccagggaaattccttgcttttttttcctttttcctgcttggttatttcattgtatcttaaagatatcaagagcagctttagatgttgtttcaggtgtaaaattcaggccatgttgtttgcagggtttaaactagtgtcatgtcttagcaaatacaccatttgctttgttcatttaactgaatttaattggaaagctttttcttcttcagaaaagtgtgatgaagaccacatggggtgtgctggatcctcctgtggggaatacccggttgaatgtcattaggttgatatccagcctgcttcaaaccaataccagcagtataaatggggaccttatggagctgaatagcattggagtcatattggtgagattttccctgctcacagacattttaatttgccattgatatttcatggatatttaaccaagttacaaccttacaaatttacattatgtcagtgacttttcttggtctgagcataaatggtgttttatgtagtttttgccttgagtttattataaatttcgaatgcttataattgttcactaggcatctactgttgctttatataaagaattgtaacataggattttgaagatgattaagagacatcggcttttccctcgtgctccgtctcgtggacaatgactgctgggtgcagcattgttttctgttcatatttagtgaggggacaaacctttatcttcttgccactgggaggtatctgtataacgtacctgacgccatatggtcttaattgatttgagtctggattgactcttccttgagacacagttattagcctgcttactgatggaaggagaaggaaaagcccagggatgatt

SEQ ID NO: 66072 - DNA, 1083 bp, Homo sapiens
cagcattcctctctagtgccctggaagcctttatgtcaccccgtagattctgaagcatggtggcataagggcgtgtttgggaaacactctgaaggcatgcttctgtgtttgtttttaagacaggtttattgagatataattctcatatggtaaagctcattttaggtgtacattcctaggaattctgactgatgcctgaagtcaccatcaccacaatcaagacatttctgtcacccccaaaatttctctcatggtcctttgtagttgatcatttcccagcattcttgttatgtgtctctgtgtctccaggaaagctagatgactcttgggagtcagccttactttgtgaggtttgattttttttttttaaatcgtttaataagcactgctactagggttttgatttggcttcatgtgggaaattggcattttgtttgtttgtttgtggcaaggggctagtattggtagacctcagatacattcttccaaatggagctctttggagatgctgtttgtggcccagttgacatctctggttatatgtctgactccgtcttggcttctctgtgtccttcccaacctccagtcttcttgctgcctcctcatctggccagggctcagatatcctttgtgccctgctctcctggtgagtcccgttttctggaggcctggtgaataccattccctctgtctagggggatcccgaaagaactttccttgtttccttgcacaacagcctgaagcagtttgaagctgtgggtcaccttagagatgggcctttgttttctttcacttgtgtacttgagggtgtgcagaagagtgactcagttgcctgtaggtaacacctggctctctggatcttactgaagaactaaaagagactctgagcaactcagtgaagattgactctggccaggcacggtgggagatgcctgtaatcccactgctttgggaggctgagatgggaggattggttgaggccaggggttcgagaccagtctggacaacatagggagatcctggctctacaaaaaattagccggatgtggtggtacttgcctatagtcccagctactcaagagg

SEQ ID NO: 66073 - DNA, 1119 bp, Homo sapiens
gtgtatggtcaagtactagttgactgtctcctatcttggccaagtctcacatcagctaatatcttaacttgagacatgtcattggtagataattatttctattcattgatataataaaaatttgctatcttttaagaaaatgaaccagcagaattcttacctcagttccttataatctgattaaggtttgaaaaagtttcattaaaaagatgtaaaataaaatcacaataacattaggcatcagagaaggtttatttgatcttttaaaaaataatgtgttattgacagtgagtgatgatttttgagattcgaataaactgtggcctgttgactgaggctgccatataatcttttacaatttcacacccctccctgaccatgctgcatggtcatattctggcaccttccattcctttgtttttcttttcttttctgtccatcgtcattttcttcagtgccttcagggtttaaaatgattgtttaaaagtccgcagtatttaccgagtgtttcatcacttcatcctatcaggaatctgagtatttgtcctttacctcttgtcagggctgagggaggaagacggcatggttacatgggacacctaacgaggatagctaactgtatcgtgcacagcactgacaagggccccaacagtgcattagtgcagcagcttatcaaaggtaagttatttgtgaaatttgaattacatttttgttgggttgcaggaaggatttaagggtcaagtagaaatgcatgtagcatttttaatagtgatttgtgggacttctttatatttggcaaattatgtatttgaatgaggttcttgagaatgtgtttgaacagtgttgttttttggttgtatttatgttcatgtagttacagaccattccataagcattggcaggcttggctggattcagcatataagagtcacctattgtcattcttaaagagcattgcttggtgaatcatgcttttgagtattgtgagtgtgaagtactcatatgctagcagttgagccacttcagctataattttgccttttattttctgaaggcctctatatagcctctgaattaagtttctttaactggaatattagggcatttatcagcatttct

SEQ ID NO: 66074 - DNA, 2428 bp, Homo sapiens
acgtcatggtttgattttctcagaaaagcagttgtttatccttttctttaacatttctctagaaggtagaatttcactattacctgtgtatccacgttggcccatgacacaaatatttaggaaacatgatcttagagcaatttgaaaagccatactaggttctgtggaacattcattggccagctgccaatgagagcatttcaagaaagtgtgcaggagctgtcatttgcagcattttctagacttaacttgaccatggaaaaagatccccctacccccgacacgttaaacacctaccacctttctcagaaaagcttgttggaaacacactttccaggttaagcttctaccagagcattttcagaaacttgttaagttcacaagctaccttagggctcttggcctcatcaagcctataccattgggtagggggattctggttcctgaaagtccatgggatttgggcctatggaaggtttaataattccatttctctaagagcactgggctggctgtcacccagtttctcagctgatagggcctgctcaccattgatgaaccaggtgagtaggcccacttttatattacctgcttactttatttgtctccgtggaggtcattgtggtgataatgcttttttgcttttctcactctgaagatcttcccgacgaagtcagggaacgatgggagacgttctgcacaagctccttaggagaaactaacaagaggaacacggtagatctagtaggttttacaaggttacatttttattctttcagtgctcttagcctttgcccatttattcagaaagatgtaaaagatcttccatttacctcagtaactgtgagccaaagataaattcttatctctttaccagggagagaggtcagtattcacaatattcttgcccatttgtctagtccactcctaattacctgcctgggatgacagaaggatattgagaagtcactgatttctgctccacatcctacttagtgtccatttccctccatgccctgctgccgagcacctcaacagcctcttgccttcctttcattctgctgggtttgtggccacatgccactgataaccctgggtgcttaggaaagcgaaagattcagttggatatttttctgatattattgagttgagtataccctcgttttacatcattcccaatgggggaatattttgtagatgactttgaaaccccagctttaaaatttttttaccagaattgggactttgagccagggaataatggcattgataatttttttaaaaattatattggactttggaatgtattttttggtttttaaacacatttaagttttaaggtaagtattgcttttttctgcttttaaagatggggaaagcatttccttttacaagtacatgccagctgatagtcgaggggtggcctttgcttagacagaagcagcacgtgactcgacattgaagtgtttatgtttggcgtttaattctatatttcaaatttggcagtggcagtcttgaatttctaatatgcagtaacaccttgactgttaggaattcaatgatctggcagcctgaagcaacagggaagcaggctctgaaagccagagagcagccacttggtcctcctgtgtcactccctggagggctgtgccccctactttgtagattgcctaaaaatatggtcatctttttccagactcctgacagagtcacactttttaagcggggaataatgatagaattaggaagtattaagagttggaagaattatgaagttgaggtaactattaaaaggaagctatgtggggccatttaattaaaatagacctaaggcctaatagcccgagtgtctctgtgtaccacagcccagcagagaaaatgacattagtattgacagccctgggtcatcaaggaagggttaagtcatttttaatgaatattttacccattgtagatagatactcggactatcgtttaacttgagtgttctggataatcagggttttttttgtagaatggaattgtcctctcccatactgttaaatcatactgcttaattttggaggttcccacgttgattcctttgcaggcaatatagtctcttttaaggggactattgtcttgtcttataaaggaatatttagtaatctgattttgtttgggaaacttcttttaaaattatcctttgattggcttaaaagttagaagtcaaaaatgtccaattaagcttgttaccagacttttaaacaattgtttttatcttaggtaactcaagcatatttcttttgtgagcagttctgtaataaagaaggacttcattacaattcagataatgctcacttactgtatagtatgctgtcagcagatctgctctgggattgtgtgtaaatgttactacatatatccccatagaagggtgtggtcatcc

SEQ ID NO: 66075 - DNA, 4890 bp, Homo sapiens
taccctatacagacctatttgaattctactgtgggtttattgaaccagtgttggaacaacttcgcaaaacagaccaggccagttaggtacagcctcatgagttggcaggtagcagcagcccgtgtcttccctaagatgacattccctgcccaaaacacttctgtgaaaagtacagaataaacagctcagagaatacagtgtaagttacccgcagaaatatagtacttctttctagaagtttacaaactgtccatgtttatcccttgccatatagcaatcactactattagtgctgtacttaattatttgtttatctgatttctaattgttaatgcttcccccaaatattgtgtgacatttgtaattaataaaaatcacttaacgatgaattggtgagcagttcatgtttgtgtttttgcttaattactgaaagttggttgtaagttctgggggcagggtgcacattttcaagggtagatgatttggggtcttttgtgagtgggaagctgtcgactcaagtcacatttagtactactagacagtggttttcttagtgtgggcaggaagtccaagaatttgaaatggttatatttaaacctgaccttttgagtggcgcactggcgcactggtaatccctggggattgcagttggaccctgcaggccccgtacatagaaagggtttctgtgtttcatctgtgccattacctctgtctttctttttgtaaacatttaattggaggtgattatcaaaatcacttaaatggagtaactcacctttcttcttgtctgttttctggcgatgtcagtagtgaggagtggaataactagaagggagtggcagggcagcagcctggcccgagggaaggaagggtgcccttgacacattgggcgggtttggcagcttaactgtgactgactttcatttttttctgttacacgttgagaaaaaaactaaatgtgatttttccataaaaatgctgatacaaatgtccaaaacttttctatgttaaatagtcttttacatttttatgcatataggttacaacctgccatattcattcatccagtgatgatgaaattgactttaaagaaacgggtttctcacaggattcttctttgcagcaagtgagtcacgcctaaagctttgctttttgtttttattttaaatgcttagtttagttgccttttatgaatcagcttcagagtcagattatgtattagaatgtgatttggggttacttattagttagaccaaagcatttaaaataggaagtgctgggtaaatgaaagatagatttgtattggttatgtttcaagggattgttccatccctgataacagtgatgagtcaagtacattttcagaagatttgaatgaactgaatagttaagaaggcatctcacacatgcttgttacacagacctttacaatagttgagttgttgcttaaagatttgtgtagtagagatctgctggtaaaaataatagaaataagacgtttaaaatgtaagtaaaagtaaactctcacgaatacccctgatgtaagttctattatagttacatctaaagtaaatttttagttgaagtaattcattgcaacccctctctgcctgcccctgaatttatcatctccctttaccacctgcttataatctttgtgggggaaagcctcgatatgaataataaatgtactgatttatcatccattgttagttcttggagaagtgacaaatgatttcacttctctactaggtatgggagtgaaaaacagaagcccttttgcaggctatcagcttttcatatggagaagttgtccttagccaggaccagaatgccttggcttacatgttgctttggtgcagcaatagaattaacggggacaccttcccacccagcacagaatgttgttgcttggcttcttttttttagtctctaagcttcgtcttagatgaagcttcacatgcttatgctggccctgtcttttggcttgtaagtcttacacctgtcatattccagtattggttgagctaagcaattgtttgattttaatactcagacagtttagagtttacctttcccaaataggtctgaagtagcatttcagcatttggctgacttctctgttgattcttgacacttctgcctttgacagcagatttccggaggttagggtcaggaagtagccagtccctagggggcactgttgagcagctctcacagcttcctgccttggcttgctattaggctgcacgggccgtggcggtggcccaccatggctcattgtgagccctcgtgcctgcaagcagcccttttcccagagcgctctggtattgtcccaggaagcacctggacaatgggctctccctccactgaggcacctgtagagtactgaaatagtccacccagttggccatgaacctgagtgctgtacattggtccacccctagaatgaagcttgatgatatcaaatgtaaattatcaaggtaattttgtacctgttgaaatacagctttaagaaaaagaacaccttactagtaataatgataaacttggaacttcggctgtcaatttagtctagatttggttaaatttaggcatttggaaagtggattcctttatttctcatgatatctggttccagggtcatacctgttctggggagagttttcttacattattttgtttgtttgaccgacagctcacgtgcgtacgaagccatttcattcacaaaactaacttacaacagcccttgccaagctcttagcttgcagaatttacccacttcatatgaacttttcaaagtggaagaataattactcttttctgattgacaagcttccagtacatttttctttgcatgtttaaaccaatcatggatcattttgaaaataaatacactccaaagcacttcttaaaattttgagaatgcaaaaaaggtcttggttaatttattagagtttcatcatagcctccattaagatcagaatattagtttgtagacttgaacttcaagttctcattcacgtttgaggttgggcatcatgttgataaagtccccgaatgtagagagctcagggcagataatttaaccaggtaacccagccacgtcaccagtggggagtgcctccaggcgtttgtgccctgcccatttgcttctccctttagccttgtctggtctcctaaagtctggtgtttgactccccacctccctgattctgccttatagagtttggagggtgaggcccccatggaggtctggagaattcagactgactgccgcatatgggctctgaaacactgactcatcatttcccactacctcacatcacatacgggcttgctggtaggcaattaggccacatttagttgaccagtagtttctgttgcctgggtggcattactgttaagagatttgcttaaagtggttggctcacttctcagtgacttgaacagtttctgactttggccaggatgacagtactaggaaagtgtgctttttaaaaataattatacagctatattgtgctttccagatataggtttctcagagttcaaagcactttttatatacctttaaataggatacaataacagtcttcacttacatatatttgtaagttttggtagctttattagtaaaaatgagatttgaaatgtgaagttctttgctagaagctgtaattgacttagaactaatgaggattacatctgatcattttccttttttctgtgcattattgcatggaagttactagtgtctgtgtcagttgctatgtatctctccagatggatgaatagataaatatatatctgtatatgtattctgtatgtacatgtatgtatgtatacattcatatttagtatttgcattctatttttgaagcatttaaaatataacaacattttggggaatatttcttcccctttacacccaggagaatcacattaggatcactagaggtataacagttttgagagagctggctgcgatggcatgcacctgtagtctggctgctctggaggctgaggtaggaggattactaggaggtaggagtctaggagtttgagtctagcctggacaacatggcaagaccctgtctcttaaaaaaaatttttttttggaggggaaaaataaaacaattgggagggaacttttccctcacgtgaccacatttctgatctgtagataaactcagagcgtggttcatgctgcttactcaacagaatcacttcatggttctttaccagatctttgaggtactgagcatctgttttgcctcataaaagataaagctgcagttcagaagaactgatttctttttgatgtaattaatattaatgctggctgtcattgtccattcataggtccagaactcagctcagcagcccaggacttgtccctacccttctgctttcagccagacccccgtgctcagccttggtttacactccatgccttaccaagtggccattccacagccagtcgcttgctgccccctgctccctgcccccatgtgctcatctaatatcacctctgggggcaagaaagggggcagcacaaaagtgggagtgagcagaggggcagtgggtgtgctgttgtcttgcatgagcgacaagggaggttttgggttctctctgtctagtcaaactagacatatagagcttttcttcagacctaagcagtatagataccttccaaagcctaatataaggtttatttttaaattatctgcaataattatccatgccataattccctgccaccagaatgagtaatcaggaattaatggtagaggcatttctgcagtgtacatctgcaaggtggaatctggaggctctgcccatatgtggaaccaaggagaaggtggtttaatacagttacagctgcct

SEQ ID NO: 66076 - DNA, 1032 bp, Homo sapiens
gaggaggtggcaaggagggagggggtggtcaccacttgttggatcttaggataaagttggttgtgtccagaggtgactgatacaccttataatttcagactgttccatgtcatgtgatcactttaaactaggcttaatccaaacctctctctaaagataattcacaatagaggacagagtggtcacatagtgtttcttacagtgacatgtgcattagaatgatttgtagaccaaatttcaaacgtttccttttttggcaaattgtgtctgaaattatttgatttttcttttagaaaaacacaccaacttttatagccctatggctatgtaaataagatgatttctggaacacaaatgggcaaatagtatgtagaatatcattagaatcattatatcactgtcactggtcctggggttgccaggccttttctgattatcagatgcaacaaatgacgtccaattttattgaccagtttggcttcaacgatgagaagtttgcagatcaagatgacattggcaagtgagtatgtttttctgtttccgctgttgctcttgcacacccttgctcttggtagatgtatgtgtgattctgcgggattcttagtcttgagcattcgtgagtgggaggaacctgctctttccacggtgttcctctagttccagcagattggccctgggactggataattaggacttaaaataacactgcagtggccgggtgcggtggctcatgcctgtaatcccagcactttggggggctgaggcaggcggatcacttgaggtcaggagttcgagaccagcctggccaacatggtgaaaccccgtctctaccaaaaatataaaaaattagccagttgtggtggcaggcacctgtaatcccagctactcaggaggcggaggttgtagtgagctgagatgtgctattgtactcctgcctcagtgacagagcatgacgtggtcccttttttttggagacagagtctcattctgttgccccggctggagtgcagtggcgctatcttggctcactgc

SEQ ID NO: 66077 - DNA, 1984 bp, Homo sapiens
ctgtctcaataataacaataacaataataataataataaaattattaatccctgtgttgttgactggggcatcacgttccagcagatgaccaggttggcaggaaaagctctgccctacatgtattctcatctctaggtgactcatcagaaggtagatttgggttttttgcaagagccagacacactaaccactcattttgcagtcagggtaagaagcagagaaatgagaattattgatactgtacagaattaacgagtagaaaatgtgtaggtagttaatagaaatgaaaacaggtggtctagcatctgacattgggatagaagagatttataaacaaaatattttgaggtagatattatagctcattgacacagagtttaagaaaaaaaatgaaggcagctggtatttgaatattggatgatgattctcacaggagacacggttatgccacagacacccagtatctgctgtggtctttggaagcagtaaattctcaataatttgttgaaccacagccagtggagcctgttgtttgtcacaggttgcagtttgcagtatgtgagaagctaaaatatttttacagcacgctcttaattgtgctataaacatgccgtatgggcacagtggaatggaggtgccgctgtaaacagcaagagttgaaggctgttacgtgccttgagaattggctcattttaactcaaaaagagcaagaacacaagatattctgtccataccccaggagcattctactcaggctaggatccaccacctcacaccagaccctgcaggtccctgtttggtgtctcgacattcacgtgcctggactcttgcttcatcttcctagttaggatctgtaatctctttacagtctgtattgcatgcttggactagtgattgagtggaacaaatattttaagaatcataagatagcccctcctcttcaaacttatgtttaataagcaatgaattcttttactccctccttgcttttctagatgatatcttgttaacagcataagatttcatgggtgtctatgtattttgtgtatgagtttgactatccctggagaaaactcaagtgtctgacagcttttgtatacttcatgttttgacttggttctttgcaaataacctttttcttggttatattagtatggcccatggaactatggttgttaccatagatgttaaaaatcttttataggaaggattcaagggtgtcccaaaggctttatgtctcagaaggcttctattgcagccctcctatcctacataaattcattaataccaagggagctggcatcatttaatataagaaggttgtttctgtttgttttttatttatagagattttgatgatagtgtaaatatcttaaatttggaaactttcataaatacggtttctgtgagctgatagtaattaatgcttcctacacttttattttgtttttttacagtgtttcttttgatcgagtatcagacatcaactttactctcaatacaaatgaaagtgtaagtataaactctgttgtgagcagtgtggcacatgagaggttaaaaattgggtgagtccctgtgtggatgccacatgctgggacccctgtgctctagagccctaatcctaaattggtgttacatacttcactctgtcccacggcctacctggcacccgtgggcatgtgatttttgcagccctggtttatgacttggtggagctaataagaccagggtcacttgtgattgcagcgtagacacttgacttcaaagagaaggctgcagtttgacaccaacccactgcctttgactcctttgtattgccaggagagaaatgtggactgggtcagggcaagcccctcgttactaggcatttctgtggaaacaccgagacagtcgtgtcacctgaatggagacagtttattgattttatgttgactagcatgagagaccactggcttatttgctgatggagtaaggtaggaactg

SEQ ID NO: 66078 - DNA, 1030 bp, Homo sapiens
actgggagaaaacatttgcaaatgacacattagataaaagacttgtgtatagagttaagaaatctctttactcaagaaaaagacaattcagtttttaaaaagcacaaaagtgtgaaaagacagttaagatataagatggcaaataagcatttaaaaagatgctcaacctccttggtcattaggaaagtacaaatgaacaccacagtgaaatgaacacctccaccccttcgagaaggtggttcttagattgtggcctccactttaagcagagcccatgtgttcctgtggtggaggcttagtgtgaggttgggcagcacgcacgcaaagctgagtcttcccgggcatcctgaccacgtggtgctcagacagatgtgatcctgctgaagcaccacaggaccttttgttgctggatgactgttagaattttctggatttagctggtggctgataagcagtgttaaatacttgggtcttgtttttccttagctcggggagtacagacagtgaggaaagtacagactctgaagaagaagatggagcaaagcaagacttgtttgaacccagcagtgccaacacggaggataaaatggaggtggacctgagtgaacgtaagtggattcattcttcagatcagctgccctgtgttggaattaggtattgtgaacaattggcaaaggagcagttcacagcatctgagatgatatctgaaggaaaggttgggttgaagcgtgttgtcaagtgaattcctcttggaggtttaagtttcagagacagcttcagggaaggagcacagaatgcatttgtggataaggtacctccccttcctggtaggaaatgaacgtcagctgtgtgggtctggctggaggacagagcccactgctaggtcagtcttctggctgtgtaccctgtgtgctcttgcagaaggaaaaggccctgtgttggtgggaagaggaggacatggttgtgttgtgtggcttcgtgagtggaatcagccaggggacgcagccttagcttaacaagcatttcagtg

SEQ ID NO: 66079 - DNA, 1053 bp, Homo sapiens
caggcgcggtggctcacgcctgtaatcccagcactttgggaggccaaggcgggcggttcacgaggtcgggatattgagaccatcctggctaacacagtgaaacctgtctctactaaaaatacaaaaaattagccaggcgtgatggcgggtgccagtaatcccagctactcaggaggctgaggcaggagaatggcgtgaacccgggaggcggagcttgcagtgagcggagatcgtgccactgcactccagcctgggcgacagagcgagactccatctcaaaaaaataataataaaaagaaatgggaggtttgagaatgtgggatcattgttagagtgccctccaggtggctgtgccctgtccgctcctgccctcattggtgagagtgtctttctcccacagctccagtctcttttgctaatgtgtttttgataaataccttgtggtacatgaaacgactgaagtgttttccaaatagaatttctcccctctttttagcacccaactggtcagctaactttgatgtcccaatggaaacaacccacggtgctccattggattctgtgggatctgatgtctggagcacagaggagccgatgccaactaaagagacgggctgggcttctttttcagagttcacgtcttccctgaggtgagcgaacatgtgctgtctctacacccttccacgggggacctgggaatggtcaggtgtttgctgttaacgtgtgttcttcaccttgactgacttccaagttgaatatactgccctgaaaaagattaaacatcagcatactaacacagctctgtgttgtaagaagaacaatcaccatcttcctttcctttcctcctggattaattggaaatgggagtagttcttgaacaaagtagcttgtgaggatgcggtcccagggagttagcaggacgcagcagaagatgcatctccgtgagcttttctggcttcatagagctgtcaggacagaattgaggagaagaggaatgaggtgaagccaagaaatcctgacaggcacagcacctctgtgtggggtgtggcaggc

SEQ ID NO: 66080 - DNA, 1613 bp, Homo sapiens
cctaccccttactgctcaggcatttggtgtttttttactatgtttccacagttccaacaacaaatatcattaagagggccagtctctcccaggcagtgtggctgaaaataagtaaaggtttttgtaaaaccagtcaacctgataaataccgttgccattgcacaatgtacgtctttgctgttcaagctctgggagcctcctagtgactatggtgggatgagaagttgggacatgatgagcctgtctagaatgctttacaaagtccctgtcttactgccttgctggcttaacagaacatttgcctgcccgcactcatgtccttcttcaaacagctactggcacttagatccatgtgtcactggagtttgtaacccagtgactcttacacagatgctaatgtctcctaacaaaaacttacttgtaaaggcttattgtgaatcttggggtaactgaggaccattccctgctgctaatatctgaattttctcttttttgaaagcacaaaagattctttaaggagtaattctccagtggaaatggaaaccagcactgaacccatggaccctctgactcccagtgcggctgccctggcagtgcagccagaaggtgcgtgcagagaggcctgggtacacgccagggtcacgtggctgctttgtcaaaccagacctgattctcaggctcaggggctagtggagcccgggagtgagatggtgggtctgatgtccacagggcagctgatgaaagaaattgtgcctgtccttctagaaccacagcatgctgactctggaaagagtaagggctctaagttaccaggcatgcagtgtgcagattaggaaactgaggtctagagggaagaaggcctaagcccatagtacccagggtgaataaaactggaattagacgtgtgcagccaagcctgtgtgtagttgtcccttggagtttgctttgctcaagcatgtaggtgtatctgggtttgtttagagctatggggctggttattttcacttcgccattgtaagcagattgaatagtcctgggaatctctaaagttccagtgggttttcctattactctacctagtcaaatgtgttccttgcacggccctgaactgttttcaccttgatggacggggctttgggaggagggggatgctagcaaagggagtgtgatgggaaccaaaaggatgtggagggcacgaatcatgaggtgggcttaaggagtgagttcttagaaaatgaaatgaggttttggtagagggtgtgagaaccctccttcccaggggcaagggaaaggaataaaaccaataactaatgctggtttcatcatcctcctgaacatttgatacagattcccgcatttgactcctcagtggttctgtaagtgggtgcactgatcccctttcctggatgaggaaactcaggttatagatgaggttccttgtccaagtagtctacagctaggaagtggtgatgtcgatgtttgaatccaggaagcctcacctcagccaggctcatcacctatgttggcttcccattagagaacaaagaaacgatccaccagcaacaccacaagaaagtaatttttaaaacaaagcaaagcaaatagagcccaac

SEQ ID NO: 66081 - DNA, 1057 bp, Homo sapiens
gctttgcctccgcggcagtcatgactccagagccatctgcatgtgacctcatcctctggtgcctaggtgctggtccctagggtgtttgatgtgcctgtcatcctctttactgcagtgaggaagggaaactgtctacctctcaagatgctgcttgtaaagacgcagaggagtgtcccgagactgcagaggcgaagtgcgcggcgcccaggcctcccagcagcagtcccgagcagaggtaaccacccgcctcctcaaacccacccaggccctgccctgaccttgcctgttgcttcctgggagttgggaggggactatagggatcgtttacagctgtgctcaagtcttaggccgctgacctggcaggacagggttttctcagtccttaatgagctgagtccgactgagctgagaacttagaaacagcagttcctctccttagcgcagaaactgaaaaccagtttttagagactctttaacatcactcgctcttttagaagtggctccgaacagaggggtctcctcacccttgttgttgaggtactgagctgagggtggcattgagcccctccaggacttgagttctcattggccccactaaagtcatccagccgccaggcacgagcagatcgtggtgcctatttgcccacattcctgccctgtgtgacacaaggagaacttgctggagccctttcatacatgtagctaaataattcttagtgcttaagtgactccctgtaatcttaagtatgaaatgcccactcccagagctgtgtgacttagaatgtgatgttttgtttctagtcactttttgcttagcctgagccagtggtctgaagggatgggccagtctaagtctcagccacccggagcccatgccaggcccttagcaagactgagcatggcccaaagatgaggctgcacccctgggccacaggaagctttgttcagcacttcccacaatcaacttctgtgaacaaatgtagctaagattgtatattccttccataaggaataaaatgacctttaaagctatttcagagaagttttaaccccccac

SEQ ID NO: 66082 - DNA, 3560 bp, Homo sapiens
cctgtggggcgtggggagggttcttttcccattttacagaggagaaaacagaactgagaggggctaagaaatctacttataagatcactcagcttgtttaagtgaaggcaagttagttatataccagttatgtctagttccagaagtctcgattcctatgtctctcatacacggagccaccatcagatgtaagtaagtgagcagagtggattgtgtgtgcagagctgactttttggctcactgtataaccagcaggtataaggcatgagtagcattctagctgtaaattgtgaatgctagtggaaaagtgcttgtgggcatcccagttacggccctaagcaccctttcccaagtctgcttgatacaattttggtcaagccttcccgaataggttatatattcaggttgtaattttggcaggaaggcaaaacctggacactttgttatatactgtcccacctgttattccctcccagttttgagcctaacatttgctttgtgggacatgttcttcaagtggacacctttttttttttttccagtagtttatttgcaaacctcctttcctttccttttttcccccctttcctagtagcagaatcctgtttccaagtgaaatagtatgtggattccaatctgtgggtcacataaaagctttcttgaaggagcggtgaacacatagctcctgaaggctctggaagccacagtttataccccactgacctagtcactccctgtgcttcttggaggccgcggtggggcggttctcccagagcatttgctctgctgctgcccttgctgaatgcctgctcacccggtgatgaagcttagatgcactcactcagatttttctagagcttttgctccattcatttacatatcattttattaaaaacttactaagttcaaaacaatgttaaaataagttgtccctgcccttggggagctcagctaagtaggttttgtttttcatatttctgctgcaagtgcctccgatgcctgtctgttgctccttaggactggccaaccaagcgcaccaggtgacacttcagtgaatggccctgtatgacgggtgacgtctgctgctgctgactgaggactgcagaccgccaccactcaggggctctggaggggtcagctggagcccaccaagctgtcactgctgcactcactctgcaagggatcaggaccagcaacctttatattctagattctaagacattgtacagagaaattcagaagtgtaaaaatattgcacattgacaaataccaagaatttttgcgtatgtttatattgtattgttctaaataatgggtagcctgtgaaataagatcttgccacccatgtaataatagtagtaatactatagttaaaatggctgtaagaatagttttataaaagtgaatacacagatctattgtatttgaaacataactttgacaattattagtgtgaccaaagtattaggcggttttcatacatttttcaccttgtacaaaattatgaattcatttttcctccaggccgacaaggagttgtagaatgaaaatgccctctaagtgttattttggttgttctaacttacaaaagtgattttgaataagaaatatttggtgttctttttataaccagtttttgattggtaattgttttctgtattgtttaaaacggatcaaaaatgtaagtctattggtagagattaagtaaagtatttattgctacatcatagttgataaattgatgttatcgtaaagccatatgttctgttcaagtcttgtttgcttgaaatgattattcctacaagtgaaacactagactatttggagtgtatatggcttgtgttttgggattttttttttttttttttggcttttgtttttgtttgtttttttgtttcatttggtagttcatctgccttttaacccattcaccaaaatttaccttgttaacaagcatcaccaatgaacatttcagagcaatctgcatatttaacagacctaaaataaatcctattaggcaagtcagttgaaaatgctcgtgctgctaatggaattagagtgcgttcattttacaggctagtattttaaaagtagaaatcaaaatctggcaccgaagcatgctaattgtttactgtaccttgtgaggttttcactcataaatttaaaccagtgtatttttttagaactggtttgtgtatatatatagtgattatggatactaattcaatgtaatttataattttctatgtcaatacaaaaatacatcacagccttctcaaacagctcaagcaatatattgtatattgccatatcgtctggtgaaagggttaaattacttcacctcttgcacttttagatgcaaatcagtttttcatttctgtaatagaaaattattcacgtatttttacatcatttgtttttcctgaccagtatttaaaaccaaaaggatattctgaaaaatggccaacaatttttttagaagtagcatcccaagcagcgtgcctaaacattacattgcatatggaaataaaagaatcaaacgtctaatgccttattatttctgatttcctttttcattttaagtggtgtggagattccagcactcccaggacagtggagtcagcagtaagccctgggacaggtggcaagggtgggtcccttgacctttgcacgcctcctcaggaaccccctttcccgggtgagcccctctctgaagagactgtccttgggcctcctctggaagcagcacccccagaggacagggctcctcctgcttgcctcagggctgcctgacttgaatggcgttggacctcggggattactggtagataatatgctctggtctcgcctggtggtgagttttgccagccatggccagggtttggctccactggtggcacacgtggcctccgtggtatggacctggtggcttctccatcccactgtggcctctgtggtatggacctggtggcttctccatcctacccaaggtaacagtgtcttgcttcatcccactgactgctgggagagagcctctgggacttttctttggggcatcattttgttttgtctttcgtagcagggaaaggatatgacaatggggaggacagttcttttggaggttggaggggccaagccaaggacaggagcaagtgtgccctcattttgtttctacttttaatttctgtgtgttggccatactgaattatgagactaacagatgtctacaatacaatacctgtattcaaaataacaaaaataaagcctgattctttgtttctagaaatctcttgtaccttgcttggatttttaatgggttgatgtgtcctgccattaggtcccgtgttacactaggtcctgtgtgagaaagactgcactgcactgtgtgagagagtggcctctgggatcaggggctcatcctccccactgccatagcccaggtgcccagaagaggtggtgcctgacaccggctctcagtcttgggacggctccaagggttcctctggacctccagcttgttacttttatgtgcagcgtgtcccacctatgttgtttggctc

SEQ ID NO: 66083 - DNA, 1048 bp, Homo sapiens
taggagggagttgtaataatcccttcctaaaatgaggaaagtccccaatgatcacatggcacacttaagtgattactaacatgctttgatattgttagtaatattacagcgtggactgctttagcactggtatatctgaagatgaacgacgcttcatctattgttctttaatttgtacttcccattagcattcagattttggcggggaaagagctgttcagtggggagaggagcacaaaaaatagagatttaaataggtcagggggagaagaactccaggaagacatcttgggaagggtgaagagccttaggaccctgctccgcatgcacactggctccctgggcatgtgtggctgtgtttggtggtgctagttccatcacattggaaactcccacttcatgattaggcatctgtcaataatacctataacgatctggtgttgagattctcacaatgtgttgaaaaacaccagatgcttagctaattctctatataaggagtaaccagctgaatacattttcttttttaatctttatagagtaactcttagttcatgggacacaaagtctaaaaagccatgtaactgtaccaaatcccagtgtctgaaattgtaagtaatcacaaatccttcattattaaatatgaaataaggttacttagaagtcagtaagtggagcatagtctagagaaaccggaacggctagcactgcacgtgttacagttacttctcagcaaccttgtcctaatgctcgttgtcaaccaaaacagcgagaagcagccacttttgcatgaagctggtacgaatttttggtattatcttggccaactaatttagtcaagatactggtggctcacacttcaaggggcgtaatttttcttgggttttggtttgcatcctctagcccctcagacaagtgctaacgatgtcattgttgagcgttaactgtaatatttccacatcccatttttaaaaagttttatgaattggtttattctacattgaaattttctcagaaagttctcccccagccaggaggtgtggtcaag

SEQ ID NO: 66084 - DNA, 1047 bp, Homo sapiens
tttgtcattaaatttatttcataattgatagtctataaaaatgaaaaggagttccatgacaatacccctggccagctgagtgacagctatggacggcctccagcccgtggaggccagccctgcatctttgcacacttccagacatctttgcacacttccagacaggctgtgacacacctcagcactagaccttccgaatgtcagtggattccttgtggtaataaggccagacatggttataaagggatggtgatgtaaacctttagggaaaaaaagaatcatttttatctagggggctggctgactggaactttaaaaatccttgctaattcaaaatatccttgcctttgactttgaacagcttgagggagccttaccatcggtagtcaacgggtctgctttcccctcgggatcaactcttccaggaccaccaaaaataactttggctgggtaaggattagaagcaatacattgtcactctaatgtaataatttaagagactcttggatacgttcacgattttcttctatactataaaatgagcttcactgcacaccttcatgacttctgagaaatgtttttaccatcagcaatgccactaacggtgttgctgtctgtgtctggtttcactggggctgcaaaggctgctggaaagtctggcccataacctgcatctgtccctgtcctcctgtccgctgtcctatgttggtgtttctgaggcttgttgccatttatagctctttgtcttcattccatgttgattcaaactgtactggcctctcttttttgctgtcgtccgtggaaataatggtgtggcagccatgcagcatgaacggggggctgcagagtgccctccagctgcctccgcccgctgccttccatgctgagttggctcgagctctatggcaggtgctaatgcatgatctgtcttcacatctccaggtggacataggctgcacttatctgggacctcatcttgctatttcttgcctgtcttgtgtttataatcttgctatttcttgcctgtcttgtgtttataattgttgc

SEQ ID NO: 66085 - DNA, 1199 bp, Homo sapiens
cataagcatttgctacaccccaccagccccctccccctcagaaacaccagttccttcccaagggcagctgtgccagactcccctcccgggactgccttcttgtcatcataagcaacaaaagaaataacaggcacatgtcataaaaggggagcaagggccgtgatggtcagataattcactcaagaataaaacatgacacgtgcctcaggaggatctctttcccaaagtgacagcaaggagggcagggcatcggccaccaagcggggactagcaagtgaggaaggggagggcagcccaccgtggtgaggagagagtggctccacgaccccaagggatggccttctcctcccacccggtgaggggaaagactcaccagagggtgatggagacagtatgccggctcaccttggtgaccagccaagatgtctcaagtgacagtgctaggtgttcacccagcctgtccttcagataggagtgccttcacgaaagcgtctcatggaccacaaagcaattatgcactgagtcatcttcagtatttaatgcaaaaatgaagcatcatggaatgaaattcccactgtctgtcatgacaagcttagctgtccattgttttaaattgtgtatttatttttttgaccacttggttctagttgggcctgactccttcagagtgctgcaccccgatagtacaacagcgatggctgaactgttggagtcgatggaaggtgcttgccggagaacacgtgcctttttttttttttttttttttgagatggagtttcactcttgttgcccaggctggagtgcagtggtgcaatctcggctcactgcagcatctgccttgcaggttcaagcgattctcctgtctcagcctcccaagtagctgggattacacgcccaacaccatgccctgctaatttttgtatttttagtagagacggggtttcatcatattggtcaggctggtctcgaactcctgacctcaggtgatccacctgcctcagcctcccaaagtgctgggattacaggcatgagccaccatgcgcggcccacatgcatgttttatgtatgtatacttcatgatgtaaaaatcccacctttatgggccaaagattttttttctcctgaaagcaagaaaaaatgaaaacaaaagacaaaaaaaaaaaaaaaagcgtccaggcgcggtggctcatgcgtgtaat

SEQ ID NO: 66086 - DNA, 1022 bp, Homo sapiens
tgagtagctgggactataggggagtgccaccacacctggctgatttttgtattttttgtagaaatgtggtttcaccatgtttcccaggctggtcttgaactcctgggctcaagcgattccaaagtgctgggattacaggcatgagccaccatgctcaggatggtcattgtgttttccgtgggataaacgcattggcattaggggaaggcttagatcgacaacacacccgcacaaacacatcagctgtcatctctttaccctcagcatttctctggaatgtctaagttaagctttaagacgttggtcagatcttagagaactggcagaaaggaatttcaatgaaacattgggtcagattgcaaatgaaaaagcttgaaatgtggggatggccacgttttaataggtttttggtttttgtttttacatgaaaggattctcatcgctttggaaggcacctgaaagaagcaatgactgacatcatcactttgtttggtctcagttctaattccaaaaagtaattccactggagctgctgggaaggaaaacgagctcttctgatgcaaaccaaatgaaaaataggcattaatcctgaccttagctcgggatgaaacactgctcttaaaaaaactcagttttccttccagaaaatgtgggtgtttttttttcctagaacagtatctctcccctgtgaagcataaccccactacttccagacttgccctcccttgggggacatctgataaagtctcccctgatgtctccgcatcggcttggatttattaagggatgcaaatcttgttgagttaatgaaggaattagtagggttgtggcttcacacacagtggaatggaaatggtgtgctttctcagtggcaaccgaaggcctagtgcttaagggcatttagcatcatccaagcagggtaaacttttgttttgttaaaagaaaaatgtgttattcaagttggtgtccccagttgtagctaacacatctggaatgcactaaccaaaatgctgtgctttgga

SEQ ID NO: 66087 - DNA, 1089 bp, Homo sapiens
aggtacagtagcattgagaagatcagtaagttggtacacagaaaaggtttggagcagagcctggcatgagggacgcactcttacgcacttactgtgacctgggctgccggaacttacctagggtggttcctgtagaggggagggagggtgtgtcagggagcgtggaacagggtgatctgggtctgctgcttcctggcggctttgcccacggggccagcctgcaatctggccgttcatttagtcagcatttattgaacaaaaaatacccaccgctccccatgctgtggtctggagaccaggagcaggtgagagtccttccagcaaacagtctcagatggggaacatcatcaacatggagttttccttcgagaaattctgaaaaactgcaaaggtttgattgtgtcatttcaaacatcacgctccatcgctgcaggtcgggctgcctttaatcgtatttcatcttcactgcagagttccctgggccaggtgtcgtcaggcctattttggacgtgggaaaaataagcagtctcttgatgctgtggagaaagcagcgttctttgtgacgttagatgaaactgaagaaggatacagaagtgaagacccggatacgtcaatggacagctacgccaaatctctactacacggccgatgttacgacaggtaccgtccttaccttctgagagacaggagtttgcccatgagcttggaagaaataccctgtgtgcctgacactcacccctaagtatctataatgctaagaaagaaggtggcataaaaatataaccttcagttttattttattttattttttgaaatggagtcttgctctgtcacccaggctggagtgcagtggcttgatctcggctcactgcaacctccacctcccaggttcaagcgattctcctccttcagcctcccaagtagctgggattacaggcgtgtgccaccacgcctggctaatttttgtatttttagtagagacaggatttcaccatgttggccaggctggttatgaactcctgatctcaagtgatccacccacctcagcctctcaaagtgctgagattacagatgtgagccactgcgcct

SEQ ID NO: 66088 - DNA, 1022 bp, Homo sapiens
aagcgattctcctgcctcagcctcccgagtagctgggactagaggtgcatgtcaccacacctggctaatttttgtatttttagtagaggcaagatttcaccatgttgaccaggctggtctcgaactcctgacctcaaacgatcctctcacctcacccaatgtgctgggattacaggcgtgagccaccactcccagcctcccactgcgcctggcctcgggtaatttgtttgaggtcataatctaatgagtgactaagctgagctcagaagtcaggcctctccgatccagagctttaactccaagctgtccttaatcatttaaaacgtcttgaggaataggttcctgaggctgcctggagagacgcagagcagggactcccatgccctttgcagagtcagggtacggtcgtctcagcacgtgctgaacttgggactcttggttttgtgtctccaacctgcggccggctcagacaccatccagcacatgagagacagcaagcacatcgtcgtgtaccatcgaggacgctacttcaaggtctggctctaccatgatgggcggctgctgaagccccgggagatggagcagcagatgcagaggatcctggacaatacctcggagcctcagcccggggaggccaggctggcagccctcaccgcaggagacaggtgcgcagcctaggtcccttgtcctgttttggggggtggtggaggcgctcttcctcactggggcccatccccaccagggcctgtgggaatcctggcacgggactccccacctcggctctgtttttctctggggtctcccggcttggcaggtctcaagagcaatggggacatggtggggggtccctggccacccctgtgtgtgtgtcaggcaaatgtgtgtggaaacactccagagtccaggacagggagaagtgaggattagaattaggctttttttttttgagacgaagtctcgctctgtcacccaggctggaatgcaatggcactgtctcagctcacagcaacctccgcctccca

SEQ ID NO: 66089 - DNA, 1038 bp, Homo sapiens
cctgtgttccttggccttttcttccaattgtggaaaatgcagacatttggaacagggtctcaaaatttagaaagctgcaggcacagctctatataaacaactattttaacctttcattgtgtctcatccagaaaacttcctgattgtctaattgctccccgactaatttttgctttcctttctctgtgttacgtgagggtatttggtgcaaatagttatctttaatagcgcagaagttttagaggacttatgttctcataaaacatttacaaagtcaaagtggagaaaatcaaattaccatttattttgtagcattgcagatgtaaccgaatatgtatgtatattgatgcatctctagaaatattgtgacagtgtgcaggatgtgctgtgattatttaaatttgcttatctttccctatgcaaattctctccacctttgtcgcttttcaggatctgctgtatatccttccaactcacattcaggcagcaagagccggcaacgccatccatgccatcctgctttacaggcgcaaactggaccgggaggaaatcaaaccagtaggcaaacaaattgctttaaaaaaattattttcaaacagctttacagaggtataattgacatattgcacatgtttaaaatatacagtttgtggccgggcacagggtctcacgcctgtaatcttggcactttgggaggccaaagcaggcggatcatctgaggttagcagttcaagaccagcctggccaacatagtgaaaccctgtctctactaaaaatagaaaaattagctgggcgtgctggcacgcgcctgtaatcccagctactcgggaggccgatgcaggagaatcacttgaacccaggaggtggaggttgcagcgagccaagataacaccattgcactctagcctgggttataagagccaaactccatctcaaaaaaaaaaattaaaaaataaagtgtagagtttgctaacttctgatgtgtatatattgatgcatctgagaaaccatcatcactgcagtcaggatggtgaatac

SEQ ID NO: 66090 - DNA, 1378 bp, Homo sapiens
gtggcccagaatctcctgcgcacctgccggggacgcacaggtcggcagggcatggctctcacggtggccaggtcctggcctcacagcatcccctctgccgttggtcctgaggtcctggaggaagctgtatctttttccagaagacacaaattagccctggttggtttcgaggccacccgagcagatcgggctgaagggacctctgggaagagagcaaacaggcccgccccgggcgcctgggtctgccagctactttcggcgtgattggttttggggtgaggaggagagtgcccgtgagtgttttaagagctcagttcctgcaagtgctctccctctgactttcccggctgtacctggggcaggctgctggaccctgcagcacgtggtgtctgtggcgtcaccggtggtgttggtggcaccgtgtggcctcacgcacagcctcccttgtctgggtctgtctccacagcaactgcatgtccagccagacgaagaacgtggtcagcggcgtgctgtttggcaccggcctgtgggtggccctcatcgtcaccatgcgctactccctgaaagtgctgctctcctaccacgggtggatgttcactgagcacggcaagatgagtcgtgccaccaagatctggatggtaattgcgtgtccctctggctgtggagggggtggacagtttgggctttgggaagaaggacacccctgcggaaggacacccctgcgaccttttctccctctatgcttggttggtgacttgggcctcaaccttgaatggctggagaggtttgagtcaccatgacacaaaagcaggggccaaagagtgcttctcttttgtgacattagtgagacctgcagcattttatattgaggtctgctcggtttgtagttcaggtcattcatcaaataaaagtgctgtccatccggttctttgtagtgttcttgactcacttgttgtcaggcattaaatggttaccttagctgacccctcagacaggctcccgtgactcagacttagcttctggaatgttcctccagcttgctttggccctcagcccaagggtcccttatttaaggtaatggctttgccatatatgtggatgcttgtccaaatttcatgatttaaatgtttttcttttttatttatatttatattttttcattttagttttttttgagatggagtttcactcttgttgcccagactggagtgcagtggtgtgatctcagctcactgcaaactctgcccttccaggttcaagcaattcttttgcctcagcctcccaagtttctgggattacaggcatgcaccaccatgcctggctagttttgtatttttagtagagacggggttttaccatgttggtcaggctggtcttg

SEQ ID NO: 66091 - DNA, 1009 bp, Homo sapiens
ggcctgggcccctagaagccgacgtcccgcttctgcgccgggccggtgttacagcggaccggtgttccccgccgggcccgtgcgttacgcacgcggttcgcgtcgtttccgtttccggccgaggctgcggccatggcagcatcttccctgacggtcaccttagggcggctggcgtccgcgtgcagccacagcatcctgagaccttcggggcccggagcaggtgagacctgggatatgggaggaagggaggacgcagagcgagcgctgctccctgcggtctcgccacgtatgtgcctgggtccgacctggtgccttgtgtgttgatcgcatttgtggtgaatatagcacgggttttggagtcgggggaacccaggttcagattttgattccttcagttagtagcctgaatactgacaatagcccttgaactttggtataggccctatgttatgggggagaagagtgaggctcagaggagctaggtaacgtgcccagggtcacacagcggggaagtggaagaagagtacttcaggcgcagtcatttcggctccaaagcctgtgcttgaaccactgcccccaggctgcgagctggtctgaaaaatggtgatggatatcctcgcctaatctgaactcattctgcaaaagaaacagccgtatttaaggcgctgggctgatacgaggctccaaaaaggttatgtccgttaaaaactctataaatctctgcttgaaaatggttggagtgtgtatttgtgtgcatgagtgtttatgtatgttttaaacctgggtttcatgtctcaccatgacccccaaaaatggaaaactggatctaactctatattggacgatattaaaagaatagtaccataattcccaaaacttggaagcaacccagatgtccttcaggagatgaatggttacataaactgtaggacatccatacagtagaatattatgcagcaataaaaagaaatgagtcatgaagagacatggaggaaacttacatacatgt

SEQ ID NO: 66092 - DNA, 1241 bp, Homo sapiens
acacgatcctagaatttgttaatcattgtttttgtcatttgtctttatcattttatgggcactttaaagagggacattatgttagaaaggaatatgctctaggaaacatttccttcattcctgttactctagagcaggggtttttcctgtaaagggatggattgtgaatgttttgactctgtgggccatatcatacgtaccgtctacagctgcctgctgtagacggtatgtaaatcaatgggtgtggctgtgctccagtaaaactcaccaaaaccggcagctgactggatgtggcccacagtttgccgattcctgttcaaggagaaaccttgtgaaaataaagcagacttaattttgtgttgattgggttgcccctggggaggtccggcgtgttcctgacaggcatcactcatcccccggggcacacactctctgaggaggaacacccacagagctccccagagcacctgagcctcacgctgctgcttcttccacagacccgctgacattcttcaacacctgcctggacacctcccagaaagaagcggttttatttgcgctgtctcagaaagaacttgccatcatccatggacctcctggcactgggaaaaccacgactgtggttgagatcattcttcaagctgtgaaacaaggcttaaaggtgggcagtgcatgccacttccctgtcagagcccgtccgctcctggtctgttgtgttcagtgggtgctcagcgacctttcagcctcagttctggtgggatgggtcaggaacattactgagcatttattgattgagccttggactgcccctgtttgatttccagcatccccgtgagtcttggggagcacgcgcaggagccgtagcctgggttgttgaggaaggctcctggagccctttgaggcgtggcagccttcgtgtcggccaggccctgggtcagggtttatttgttcaccacgcttgctgtgctcgtgctcctccgtgtgcacgcccgtgcaggggcctggagttggcctgggcccggtctgtgcccgtcaggagctcagcgtctggttgaggtgttaacagctaatcagatagtctggttaatggatacgatgcacatgtccagtgcacagatgaatgattttctgagatgtggaatataacattgtacattattattcacttacattttaaattttttttatttttattttttggagacggagcctcactctgtcacccaggctagagtctggag

SEQ ID NO: 66093 - DNA, 1017 bp, Homo sapiens
tgcctcagcctccctagtagctgggactgcaggtgcgtgtcaccacgcctggctaatttttctatttttagttgagacagggtttcatcatactggtcaggctggtcttgaattcctgacctcaggtgctctgcccgcctcggcctctcaaagtgctgggattacaggcgtgagccaccatgcctggcctttgtttttgtttttttttttgagatggagtctcgctctgtcacccaggccggagtgtagtgctgctgtcttggctcactgcaggctccgcctcccggggtcaagtgattcttgtgcctcaccctcccaagtagctaggactacaggcatgtgccaccacacccaaccaatttttttatttttagtagagacgggggtttcgccatgtgggccaggctggtctcgaactcctaacctcaagtgatccacccgcctcagcctcccaaagtgctggattacaggtgtgagctactgtacccagccagggctgcccatttttgatagagaactatacttagcatttaacagagtctcaactgtcttcagagcacttggttagtaggtgtgaggaattgtaaagaaaacattttccggccggatacagtggctcacacgtgcaatcccagcactttgggaggccgaggtgggcggaacagttgaggtcaggagttcgagaccagcctggcccacatggtgaaaccccgtctctactaaaaatacaaaaattagctgagcatggtggcgggcacctgtattcccagccacttgggaggctgaggcaggagaatctcttgaacctgggaggtggaggttgcagtgagccatggtcactccactgcactccagcctcggtgacaaagcaagactccgtctcaaaaaaaaaaccaaacattttcctgggtgtctttctgtctggtcctgttgtcttgctagtagtggcaatgggagaaaagtagcctgaacataaacattgaaaaaattggcatcctcctagagctttccgtccat

SEQ ID NO: 66094 - DNA, 1923 bp, Homo sapiens
gccatccacctgtgcctcttcaccatgttcactcccattgcccttgcctgggtcccagtgggtcctggctgggggagagacagccccgccaagtggcctctggttcagagcctgtgctgtgccctgtgaccctaagctgacagcgttgctgagtcttcctaaggctctgggacccttcctacagccagctactgtgggcccgcgccggggctgccccagctctttcacctgaagcagcatttgcagggctgtgagtgggacacagtgccccacagttcattcccaggtcctgggatggtgctgggagaggcgttggaggcagggcaggcagattcataacctgcatgcctgtctgtccagggaggacagatgagcgatggttgtgggcaagggcccctctgttgtcagggggctgtctcgggctggtacctggccctgcctctggctgagtggttgtgctattggcaccaggcatagcctccgtgtctgtcgtggtggttgctttgtgtgtggtggagggagttaggagcagggtggctgagggaagaggcctagctgcatccacaggatgcctggtcctggccagagagcctcctctccacgatgcccatggtgggcgttcacatggggcaccagctccttaggccacgtgccctgcagaaaagctcgttcagagcagctggtccacatacttcctcccagacctcgtgcccagtcttccactcttctctctccacgcccctgtcctccacttgggaacatcccctttctcagtccacacaggggactgcccaaccctgcccactgcagagctttcccttctgcagcatccgtgcagcgctttcttgatggaggctgaaatgtgcgtgtgtgtgtttccggctgggccggctatcattcagcacgtctgcaaaccaggcctgaggttttcctctgtggccagctgtccagtcataaagaactcctacaggcatggggtggcttgcagggaggactgggtgccctccagccttgtggccgagtgggttggataatatggaggctgccggtcactgttgggttttgctcgttcactcttgtctttgccagggctgtttggacgtggtttttcctcaaggccttgggtctgagggtcccaggggcttgactggcattgtggttggttgtccttggaggctagtcacctggatgtaccttcccgtccttatagaggcctcatggccccagctgtcaagggaaggccctcaggttgggctcttgtgtctggggaagctgtgctgtggtctgtgtctgactacaggtgagggtgcaagttcctgggcaggggaggggacccagcagcatcttcagcacctccttggcctgtagaggggctgaaagaagcctttgttatcaggccctaagaccagagtttccaaccagtgggcaatgaatgggttccgggtgagctgggcgcacagggcaggggccagagccctgagcagttctctgttcaccactgttctcttggccttctcagtcctgcgccaggccctggggtcccttttgagaatggtgattcacttggagtgagcgctggggatcagtcacttgcagatgttctggagggcctgccgtgctgctgctggctggaccttggtgaacagaataggcaggtctcttgtcctctgagacccccttctggagtgagagagagactgccagcgcacagaagtgccagacatagagtgtgattcccaagtgtggtggtgggtgccatgccggagaggagcccggcagccctggcagaggtggcgttctgcaggttgcgggggctgagccggccggctgggcagacactggcagcttgagggccgtggcctgtgaggtctgggaaggggctggactgactggctgggcctgttccgtggaccccggaggcca

SEQ ID NO: 66095 - DNA, 1053 bp, Homo sapiens
ggattagggcccattctaatggccttgttttaactaaattaccttttaaaaggccctgtctccaaatatagtcacattctgagctactgggggttagaggttaaagatacgaatttcgagggagacaaaattcaacccatagcaactgtcagctgcttcaggattccttgtcggcccctgtggctgcaggaccctgtcagaggtggttctctaaaaaacattgttttcctaaggtccttccagacctctgtagtcaggccctgccccagcctgagcttgagtgccacgcactcgtccccatcctcacttcgggcatcctctttagggctgcattcctcattgtggcacccccagccccttggggcatatgggcgatgagtgtggtgaggatcagtaggtggcagtttgaatattcacgccatcaaacctctgtttgggacaaggctgggcaatgcgttatcaacttaaggttgacttgaagatacgaaataaattttaccaggtgcagatttcacagaaactgtggagatggtcctcagataacagaaagttaagaagcaccattctagataaaggcgcttgtcctaggggcggagctgtttggggctcaggaagcagctcttagcggctgtcgtaggctaggtttgctgtgatccggcccatgtttaacccagacggacaccttggccaagagagatttcagcattatctattatgtctaaattgttacaaggagaaggtgttcgtatgttagctgtgtaactgagagataactgatatgactaaaggggcaggcagacacaggctgggagaagccagtcatcctaaaggttctggaaaggtggtttttgttcctcaggctttgctcctggtgtgttctgggccatctgggctctccctgggcagttgttgccgttccctagggcgtggttgagtcctggttgtccagagctgactctcccacccttttccagtgtcaggatttggtgagacctggaaaggggttcctcctcccgtgatgatgtggaggaagggcggatggattgctttggc

SEQ ID NO: 66096 - DNA, 1022 bp, Homo sapiens
gtgggcgatgggggcaggaaccaggggatggggctggcgcaggagaccggggcaggagacatgggctcacgcagttctgctggggcctgagctggagcaagtctcagtgtctggaacctccatgccctcccgtgtggacagagggtctgtgtagaaggagggctgcagccttcccgcaagggctggctgggaaggtgttggggggatgggggtcgctccggggctgcaggtggaagcggagcagtgagtagcccaggccccgccctctcgccaccctgcagaggcttttctgctcggtgttggctgtggggtgcactcccgtcatgccctgttgccctccctgcgcctccgtccaggaacccgcgcgtttccttgtctcctccctgtggggctcctgggctcctcccaacccgcctcccgtgtctctccccaggaggccggagatggtgggcctgctgtcgctgtgggacatgacccgcatgctgaacatgctcatcgtgttccgcttcctgcgtatcatccccagcatgaaggtgtgtgccggccccacccccactcgccccaccctcctgggtcatgctgctgcgttgctccagggtgggtgagcctggggcaggaagggcccgaggactgtgcccgtcaccctgggctccctggctgcaccctcagctctctgccgtgctcttgtgatgctggggaagggtcattagaagcaggagagcccagccctgcatttctgggttgggagaggaaggcgggcaagggtgtggcgggtgcaatgctttggccagtggcaggagctccttggggctggagccctggacaccagtgctcccccaggtctctgaggttcccagaaaggcctttgccatggctcccagggtgctattaatgaggggcagtggtatccctggccagggagcttgtttccaggatcctctaatgcgggcgcaggtggctcatgaccatctctgagggctggtttctcttaatgcaccggttaggagcaatgggcaccttaa

SEQ ID NO: 66097 - DNA, 1047 bp, Homo sapiens
ggaatgttgacaatgcagattcccaggctctgccccagagtttctgattgagatggccaggcttgaggaagtacacgtgtgaaaagtttcaggtgctgctgctggcaggggccacatgtgggggtcgactggcctaggagcgccagcttccctccctccttcccttcttttctttcggcaaattgtaaggagcacccagagctgctaggggccagtttgaaactagcagtgctttgggaggagcagctacagaaaggccctttctctgggtggttggaatgaacccagcctctctgggtaggggcatcagggaaaagtgctggctgctcagtgctgccgtgcccccggccacactggcggacacgtggcttggccggtaggagccaggcaggacattggcccatctgccttggctatgggatgtgtgcagggtgcacgactggatgtggagagcctggccggaccctgccacactcaggggcacgggtatcagcaagagcccctgagcatgaagagagcagagatggggtcccggcctctgtggggtctggaagttcccggctgatgcctcccatcccccagctccatgctcctgggcttttgagcccctccactcaccctgtgaggccttgtgatgtggagaaatttgtagatatgcatgccatcgaatgccagaaagaacagaaggtagcttacatctggtgctgtagcatgcagtcagtgtttatctgaggttactgtgagccaggcatggggcgctcacgttctcacctggacgtaccagggggatgacagcagagaaaaggctgggaccaggaggaggaggaagaggctggatatgaagcccgaagacccactgttactccaggccagcttggagcttcctgagggcctttgggaaaagggaaaaggtttctacctgaagaggcacgggtcttgttggtgagccctgcccttcctggcggagacatccctgggtgggctaggcctggagaaggctaccacccagcgttggtgaccccagcaccatgttgggaaacatcggga

SEQ ID NO: 66098 - DNA, 1051 bp, Homo sapiens
gaggggatggggtcggcccagccccctccccaggagggctttcctgatctcccccatcagaacaaccccctctcagctcctaccacctgttctgtctgtcccaacatcgacctctccctcctgtctcacagctggctgtgggcctgtgagtgctcctggatggaatgtcccagatgccgtcggtcccaataaatgagcccgtagcatggcacccgatccacccaaaacagactctccaatacatatggaaagcggggtggtgggggagctttccagcattgttccagtgattcccaaacattcgtgtccatcgggattcctggagggctcgtggaacaggctgccagccccgcaccagggttccaatttgtcaggcctgggagggacctgggaattccgctcctgaccagctccctggtgttgctgatgctgccggccgggggtcacacaatgagaaccacatcccagcattagcatcactgtagtgggctgagcggggatcccccaaagtatgaccaggtcctaacccctggcacctcaaatgcgaccttatttgggtaatagggtctttgcaggtgtaattaggttaaacaccttgaggtgaggccatgcgggatttagggttgccctgaatagaatggctggtgccttataagaatagagaaggcagagaccacagaaaagaccacgtgaagacagagggcagagactggagtgatgcggccacaatccagggaaggctgggagccctccggggctggaagaggcaggaaggaccctcctctagagccctcggtgggagcacagccctgccaatgccctgatttctgacccccggaactgtgggagaagaaacctctgctgttctgagctccgggttggtggtgatttgttgtggcagacaggagaacagtgcagcccccgaattgtgctcattagcagccacttcccggtgccaagctctgcaagacctcacatcgcgacctccaggcagccaaggccacatggggcaagtgcaacgatttcatgcttctgcgccctgctgtttctc

SEQ ID NO: 66099 - DNA, 1033 bp, Homo sapiens
ctaggctcctgatgatctcttgggagctgcccttggtgatgccgagctgcctacaggggtccttctggggcctgaggccaggtggtcactgggcccctgcccctcggcccctttgtgaacccagcaaaacctgcacctttggcgcatgacctccagctccttgggaacctatggctgctcttccagaagtccctctacctggcaatgggccctccaccgagaactcctggtgctgagatggacggatcatgatttccttctgtctgcaccaggctttgcttaggagagaaaatgccagaaacaaaaaggcttttctcactctcagccttaacataggatttattatgaataaatgaaactcccttgcagggcagttgctctgcgaccagcgtggcctaggaaggctcagctccaagtgatcagctctgtcctacagagactgaagcttggagcagctggtgacaggaccacgggcacgtagcctggattgggagaagttgggagtggcgatcactagtgtttgcggagcacttgctaggaggcctgagccaaggatgttatcttattgatgtacgttatcttatttaatcagagcctgccaaacatcccagtctgccccaaagtcccgggcgacacctgtcgccctggcgtcatcattaataacccccggaaggtgaaaactctcagagtgcccttgtggagctgagaaggagcacggtttcactgtgcttagtcctctgtcgagccctctggaatatccctatgatgtggatgaacaagctgtgggtcagggggatggagggacttgcccagggtcaccagctcggaggcagggttggattccaggatttataatctcagaggtgggatttaaagccacgaccctctaatccttcccaagcaacagaaggcacggagtgtgttcgcggtgtcagggagggtggtgggaaggcaggggcggaggtcccttcggaggcctgaccttcccaggacccctcaccagcggtcagcagccggggtcccgggaagaatt

SEQ ID NO: 66100 - DNA, 1032 bp, Homo sapiens
cgggctgcagcccacggtagcccagggtcacatagtggggcccagctagagtttgaacccagaactttgtgaccttgcaccctgcaagcattccgcttgaccattagggtggtcagcacctgtccctgccgccgaatgccagctctgtgaggttgaggccccacccaccactgcacccaacactgagcatggtggtgagtgcgcgccaggtgcccaagagtcctttgctgagtgggcgacgggtggggtcctcctacttccccctgccctccctcctggcccttgcaggggctaagtacctttgtacccctgggtgcccccgccacgaccctccccgctggcccacttcccccttccctgttctagccttcaaggtctgcagtctctggtctcacttctctcctcccctggttccagtagacagcggccagaggaggcgctcctggggttggattcactgttggttttaggaactgagaaaggcccccaatccccgagaaaatccagggcagaatgtggctgaggagctggagggaggagaggagaccaggcgccctcccagggcctccacctcaggcctgtagatatgaggtcccccaaggccttgctgtgtgacctgggcaagttactccatctctctgggcccggatagggatcaatggatcctatcttgtcggaatgcgggggcattgagggcagctggagaatgtaagcttagctcccagactggtgctcgggagggccggcgagggttctgctacgtttattaccacctttactggcgagttcaaaaggagcaaatcagcaaaggccccaaaacactggggcccaacagacacgcagtttccccttgaacaatgcacgtgttagggttgcgaccccctcccccatgcagtgaaaacctgcatgtaactttcgactcctccaaaactgaactacgaatagtcgactgttgaccagaagcctcactgataacatcaacagttgatggacagatattttgtatgttacatgtattacatgctgtgttct

SEQ ID NO: 66101 - DNA, 1128 bp, Homo sapiens
caccatgaatagcatagaaaaagagaggaaatattcttccggtattcaagaatcatggccaggcatggtggctcacacctgtaatcccagcactttgggaagccgaggcgggtggatcacctgatgtcaggagtttgagaccaccctgaccatggtgaaaccctgtctctactgaaaatacaaaaagtggccaggcatggtggtgcatgcctgtaaccccagctactcggaaggctgaggtaggagaatcattttaacccaggatgcagaggttgcagtgagccaaggtcacaccattcctctcaagcctgggcgacagtgtgagaccctgtctaaaaaaaaaaaaaaaaaaaaaaaaaaatcattacccagttcagcaaagaagtatctcccattcttgacaaatgaggtaaagttctgatattatgcctttgttattttatgtaggtgttatttgtggaatgaaaatgtcaaccaacagaaccacacttgttcataagttgatccatacgttggctacagatacagaattcagcaaaatcaacacaaacattcactgagaatcaattggcagtgtggaatttacaatagagagcattgtgtattttattattgtttataaattgggtctgggctttggggagggctccctggcagaactggttgaaaatcataatggatagccagggagaattcttaactcatgcctcaaaaaactagccagtcttaagtgcacagatcaatgaattctcaccagctaaatcacagaccaagcagcaaaacattgccactgctcagacacacccatctgcttgcttccagtccctctctctcccacagtggaagtgccttcctgactggaccccatgggaaatgtcacctgtttttgatatatagcatacattcttttgtgtcaggcttcctttgctcaatattatgtaggtaggatccattacattgctgcaggtagctgttaatcattcattctcatggctgcctggtattcaactattcaaatatttcacagcttattcactcattctattgttggtggacatttgtgttgtttccagtttgggattactatacgtcagtgttgctatgaacaatctcatgtgtctctttacg

SEQ ID NO: 66102 - DNA, 1072 bp, Homo sapiens
tcaacgcggaagaaaaaactccagcatcttggatgatggtcgctgattctgacactcagatatgttgtcggttaaacagatagctttggctcagtgatatcggacaattgacctcttggtgcacagactcccagcagcctcgctcccaaagggggtcttaggggaagccaggtccacagatcaggagcccctaggggacctgagatgggtctagggtttcagtttcatctgtgatcttttcggtgaggtgtgttcagtcagcgacttcctaggaggaagccttcagctgcatggaaagaaatttaagttcctattctctgtccccagagtcatttaaatggggccagtgtcggagaccggagcgtgatcctgcgctgtgcccgtgtgcgataccatctcagttgccactgagctcggcctgctggggaggaggaaggtggcctgccccagggagtcaagaaattcaatccaagtccatttttaactcgatgaacattgattgacaatttagtaggtcttacgtggaatgcaaggaggaatacattaaaagacagagtctctgctgaaggtaggaatgtacataactagcataatgcaagtggggatgtggtatgtatattaagaggggcacgagaatgtgctgcagaaatgattctatcttggagaagtggggaggcactgcaggtggatgacagctggatcctgaagggcaaatgcagtgtcagtgaatgtagtagtgtcttgatctgctggggctgccatgatgagctattgcagatggggaggcttaaacaacagaaattgatcctctcaccatcctggggctggaagtcccagattaaggtgtcacagggctggttgctcctgagtcttctctctatggtttatagttgactgctttctccctgtgtcctccagggtggtctttctgtgcgtgtctgtgtcctcctctcctcttacagggacatcgatcagatgggattaaggcccacccatgtgatctcactggacttaaattacctcttcgaagtccctgttcccaaaaacagtgtcacatcctgagatatggggg

SEQ ID NO: 66103 - DNA, 1041 bp, Homo sapiens
ccggcgctggaatttggggcccggcggggagcgccagctgcccagcccccacctgggggaaccctgcttggcggcccccgggtcccccgagggggccaatacctctgggcttttgagggtcattgcttcaagaagcgcagagaaagcattttgattttattttttccaaagagaaaagcaactttaaaaaacttttcggttgcagttttactttacactgtcttcttaaaacccaccacgaagcaggaactgcggattctgggctcatttaaagtgctctgttcttatttcttggtgaccatttggagacaaagggcaagtggcccagtcgggagggtaaccacgttgtttgaaagaaaatccaaaattaactgaaatcaccttcacgctttcctcgccccctggcccccgccccggtgaccgcggcctgggcggatggtcggtcaggagaaagcgaattccgctgcaggcgcgtgttcgccaccgtccctggctgtgggaaccttcattcaggcgggggaagggagcgcgttcattcaggaaccggcgcgccgcgacgcagaccccgggactcagcgcggctgcgcgccgcggggctcggggcttgggttgggggcgggtggtgcagggaccagtcccgacctttcgccagcgacctcccgcacccgcttttccaccagggcggctggcgggcgggcgcacccaggtggggtcacctgcagccgcatacctggcggcgacttgaaaggacttggctcaggctccgcgagttttccattgttaagcccttaagtcgcccgggaaaacgcttccgaaagccggcccctgggctccgaaggcgctcgagctccccttccccccacactgcttgcttttggggtgcgcgtggcggcccacgtgctatggcagctctgcttcgcttacgtagcgccgatcccaggcgccccaaaactgcgaggtgggccggggcgaactccggccccagtgcccacccgagacagccacacgctcggcacatggacagccgcaccgcccccccca

SEQ ID NO: 66104 - DNA, 1075 bp, Homo sapiens
gttgcaaagtcctggagcctccagagggctgtcggcgcagtagcagcgagcagcagagtccgcacgctccggcgaggggcagaagagcgcgagggagcgcggggcagcagaagcgagagccgagcgcggacccagccaggacccacagccctccccagctgcccaggaagagccccagccatggaacaccagctcctgtgctgcgaagtggaaaccatccgccgcgcgtaccccgatgccaacctcctcaacgaccgggtgctgcgggccatgctgaaggcggaggagacctgcgcgccctcggtgtcctacttcaaatgtgtgcagaaggaggtcctgccgtccatgcggaagatcgtcgccacctggatgctggaggtgcggggcttcgggcggctctcttaagacttccctgcaacttgttgcccagacccacgtttctttgctactcacccccctcccttctctcccgctagaactttgaagtttgccgtggtgtttctagggatccgtattttcaaaataaaaattgcgggtattttctgaaggaggaaggggtgggggtgggggtgctagaagtagcgtttcgtgggaggggagaagggggtccgggaggggtgccttcgggagaagccagtgccaggggcaccccaatgggcccgagggtgcgggctggcaggctgggtgcgctttgtgtcccccgcctgcgccccagcccggctgcgcctcagcggccgggagccgccaactccggggggagggggcatagatttgatttttaaattaatatccatggacacgtatgcaagggccgctcgtgccagtattatgcgccatctttgctcttttattgcaaagcaaaagtgtttattaataattgggggcagggtgggggcggggagcggccgccgggcgctggggccgcagctaagggccgcgcggctgccgggagcccgcgggaggggcgcagggacgcggcatgggtagttttggggggacgccgctagggaagggggggcctttgttcaagcagcgagtcccggggcgccccgaacgggcagcctgggccggagag

SEQ ID NO: 66105 - DNA, 1019 bp, Homo sapiens
cccgcctctgacatatctgctcctccgagggagggcggccccgccgccgggcgtccctgtccggggagcgggcgggatcctagccgccctcgtcccgccgccctgtgtgcgcttgcctgcgactcccaccgcgttcgcgccccgcggtgtggccgaaaagtgggcggcgcgcgccctccagcggctgcacgaggagcgccgcgctcggcgctgagcctccagttccaggtggtgggaggtctttttgtttccacttgcagagtcttttcacgcggcgggcgccttttctgttttgatctgggattgcgtgttgccccagctcccttgagtccccagcattcgccagccctcccctccaacatccaggaccgcacgagacgcaggggccagtgctctgagccggaggtgcggcgtggcccggcccccgtgctgccggcttccccgcgcccccgggctggcccgcacctcccctgatggccgctcaccctgtgttcgcagcaaatggagctgctcctggtgaacaagctcaagtggaacctggccgcaatgaccccgcacgatttcattgaacacttcctctccaaaatgccagaggcggaggagaacaaacagatcatccgcaaacacgcgcagaccttcgttgccctctgtgccacaggtagggcaggcccggcagcccccggcctccccttgagagccggctccttaggtgaccctggccggcttcttgctctccacctgggtgctgtctgggaagatgtccccagaccccctcctgcgctggagagcgctcttccagctctggtgagcagaggccctggattgtttgtcgcgctggatggagggagatttgctccctcacggccaccatgcagtaccttgggcattggtgtggacggctcagcctgcctgtgtcccgttactctggcctcgtccttcaggccaggcagcctgtggccactccatgctgaaaggggtttaccttggccacagggccgcctcctttctccacccacctc

SEQ ID NO: 66106 - DNA, 1586 bp, Homo sapiens
ttcattctccttgttgttggttgttttttcctttgctctttcccccttccatctctgacttaagcaaaagaaaaagattacccaaaaactgtctttaaaagagagagagagaaaaaaaaaatagtatttgcataaccctgagcggtgggggaggagggttgtgctacagatgatagaggattttataccccaataatcaactcgtttttatattaatgtacttgtttctctgttgtaagaataggcattaacacaaaggaggcgtctcgggagaggattaggttccatcctttacgtgtttaaaaaaaagcataaaaacattttaaaaacatagaaaaattcagcaaaccatttttaaagtagaagagggttttaggtagaaaaacatattcttgtgcttttcctgataaagcacagctgtagtggggttctaggcatctctgtactttgcttgctcatatgcatgtagtcactttataagtcattgtatgttattatattccgtaggtagatgtgtaacctcttcaccttattcatggctgaagtcacctcttggttacagtagcgtagcgtgcccgtgtgcatgtcctttgcgcctgtgaccaccaccccaacaaaccatccagtgacaaaccatccagtggaggtttgtcgggcaccagccagcgtagcagggtcgggaaaggccacctgtcccactcctacgatacgctactataaagagaagacgaaatagtgacataatatattctatttttatactcttcctatttttgtagtgacctgtttatgagatgctggttttctacccaacggccctgcagccagctcacgtccaggttcaacccacagctacttggtttgtgttcttcttcatattctaaaaccattccatttccaagcactttcagtccaataggtgtaggaaatagcgctgtttttgttgtgtgtgcagggagggcagttttctaatggaatggtttgggaatatccatgtacttgtttgcaagcaggactttgaggcaagtgtgggccactgtggtggcagtggaggtggggtgtttgggaggctgcgtgccagtcaagaagaaaaaggtttgcattctcacattgccaggatgataagttcctttccttttctttaaagaagttgaagtttaggaatcctttggtgccaactggtgtttgaaagtagggacctcagaggtttacctagagaacaggtggtttttaagggttatcttagatgtttcacaccggaaggtttttaaacactaaaatatataatttatagttaaggctaaaaagtatatttattgcagaggatgttcataaggccagtatgatttataaatgcaatctccccttgatttaaacacacagatacacacacacacacacacacacacaaaccttctgcctttgatgttacagatttaatacagtttatttttaaagatagatccttttataggtgagaaaaaaacaatctggaagaaaaaaaccacacaaagacattgattcagcctgtttggcgtttcccagagtcatctgattggacaggcatgggtgcaaggaaaattagg

SEQ ID NO: 66107 - DNA, 1098 bp, Homo sapiens
ttttttttttttatgtgatcaattttgacttaatgtgattactgctctattccaaaaaggttgctgtttcacaatacctcatgcttcacttagccatggtggacccagcgggcaggttctgcctgctttggcgggcagacacgcgggcgcgatcccacacaggctggcgggggccggccccgaggccgcgtgcgtgagaaccgcgccggtgtccccagagaccaggctgtgtccctcttctcttccctgcgcctgtgatgctgggcacttcatctgatcgggggcgtagcatcatagtagtttttacagctgtgttattctttgcgtgtagctatggaagttgcataattattattattattattataacaagtgtgtcttacgtgccaccacggcgttgtacctgtaggactctcattcgggatgattggaatagcttctggaatttgttcaagttttgggtatgtttaatctgttatgtactagtgttctgtttgttattgttttgttaattacaccataatgctaatttaaagagactccaaatctcaatgaagccagctcacagtgctgtgtgccccggtcacctagcaagctgccgaaccaaaagaatttgcaccccgctgcgggcccacgtggttggggccctgccctggcagggtcatcctgtgctcggaggccatctcgggcacaggcccaccccgccccacccctccagaacacggctcacgcttacctcaaccatcctggctgcggcgtctgtctgaaccacgcgggggccttgagggacgctttgtctgtcgtgatggggcaagggcacaagtcctggatgttgtgtgtatcgagaggccaaaggctggtggcaagtgcacggggcacagcggagtctgtcctgtgacgcgcaagtctgagggtctgggcggcgggcggctgggtctgtgcatttctggttgcaccgcggcgcttcccagcaccaacatgtaaccggcatgtttccagcagaagacaaaaagacaaacatgaaagtctagaaataaaactggtaaaaccccagcgtggtgcctgcctctttgcttcctgggctggccgtgagccagg

SEQ ID NO: 66108 - DNA, 1049 bp, Homo sapiens
aataaagctttattggcacacagccatgctcactcattcacagagcggctgcagctgcttttgcacagggcaagagaacctgtggcccacaaagcctgaagcctctctctgtggccctttccagaaaacctgccaatccctgacctagcagatgggatgattgtgtgcgggagagtgtaggctctgggagggcagggctgtgtctgtggctgccaccagagtgtcccctccctgtcaccaacccatggggtcgttgcaaaactcagagagaaactgtgttcggtgttgagcacaaggcacacagtgcgtgctcagtaacctccagctgcgattcctcccgtgattaaacaaaggcaaggaggactgcctcgacaggctcagagggcccagggtctggaataggagctgatcctcgggttagaccactcagctcttaaagtggctgccggttgagaggcttgtctcagctgccgctaggtgcaaattaaaaggattaatggacaccgccgtctttgaaaggctcaaggcccaccgaagccccttcagcagagggctctgcattctctcttccccagccctccttgtgtgccctcgtgagtggcggtgacaatgctcccggatgtgggccccaaggccagcggccccagagctgcccgcccacccgtccgcctgctattgtctgctcaggcctggcggtgtggcgctgggcttgtggggccctggcgggcaggggactgtgggaacggattagaggtcctgggcttgctttcctcgtcttgcataaactcttgatcaaagacattcctgggatgacagagccctgtgagctgcgaggctggcccagagtgcgggacgcacaccccacgctgcagcccctgcacaggcctgcccttgctggccctcgctggccctggctgcagtgctgactttggggactagccttatggtgggactggtgatagagcgggtgccagcaggcaacacagccttccccaccagattcagaggccaggcccccaatgctgggcagagcgaggctgtgactgctt

SEQ ID NO: 66109 - DNA, 1113 bp, Homo sapiens
agctaggcacacacttgctgtcgaggcactgggtatgggcctaagctcgttgctaggtaaataaatatgatttcgtgtaatgagaaaataatcatccagcttttgaacgaaggcattcttagcgcacctgctgggtttcaggaagccagcagcatagctgttgtgtaagttgagcctgttgtgtgcacatgactgagagtctgtatttctgtgctttacagcagaaagatgaaggtcttagaatcattgattggaatgatccagaaattcccttatgatgaccctacttacgataaactccatgaagacttagacaagatcagaggaaaatttaaacaggtgcgtgcactgtgtgtttcctcctgctaggagcacctgattgcgcctttcccaggcggggcagcgcactcccggggccgctgcggcaatggcctggggctgcgtgcgccgcggaactgtccgtagaggcgcctcatccttgagtcgcagtgcaggaaaactgaagacagtccagagaaaaggagttagaactcatttatgggctggccacatagacaggaaaagctatagctagagatagagttatcttctcatttttcagtaaaaatgcacaagattaaaaataccatctcttttgtgttttcagttttgttcgttactcaatgttcagccagactttaaaattagtgcagaaggttccggactttcattttgaggaggatggatgaacagagaccgaacgtcgaggaacagatgtgtgtgtgacgtgtttagaaatgcggtgaagggccagacggtgctgggaaggcagttgttcattgggagggtgagggttccggttcggccgtgggagggcttccttccctggggttttctgcctgtgtcaccttggtgcccgtcttggggcctcgccacacatgccctttgttgggctgaagccgtccctggcagagccctcgtgcattgacttgacagcctctccggcagcacaggcctagctggttctgggttggagttggctctggatagggtcagtcaccaggcctggactgaaggcagttatttttattattattattatttgcaatgagagagatggttggccccgaatga

SEQ ID NO: 66110 - DNA, 1050 bp, Homo sapiens
aaagctggaggatcgcttgagcccaggagtttgaggctatagtgagctgtgatcataccactgcactccaggcagggcaacagagaccctgtctcaaaaaaaaaaaaaaaaaaaaggaagaaagaaaagtagattccagggccttgctccagacgtactgaatctctgggggtgaggcttttgagttaatatctttgaattttccttgtgtgtttctagtaccctatcaggtttgggaatccctaatttagccctttgttgtagatgaagaaactgggctacaagaggtacagtgacttccagaggcaaataggaagtggtagatctgggactggaatctgtgtcttctgacttgaattttaggcttttcctcctttactctggtttgtcttactgggtccgggtaatacaagagagagaagtttttctggagaaagtattctttctcctgttgatttgatgaagcatgcttcttcttcacaggtttcatggggaagggtatcgggaaggctatgaagaaggcagtagtttgggtgtgatggagggaaggcagcatggcacgctgcatggagccaaaatcgggtctgaggtaagtgggaacccccatctggagatgaagcctcttcatttacaatttataatttatttcgatattcagtgtgatggagtaagaattgtcaggccttttaaaatcacagtgccggatgggcgcggtgactcacacctgtaatcccagcactttgggagtctgaggtgggtggatcgccttgaggtcaggagttggagaccagcctgaccaacatggtgaaaccctgtctctactaaaaatactgaattagctgggcatggtggtgcatgcctgtaatcccagccacttgggaggctgaggtatgagactcgcttgaacctgggaggcagaggttgtggtaagccgggaccgtgccattgcactgcagcctgggcgacaggatgaaactccatctccaaaaaataaacaaaaaaaatcacagtgcctttgcatgggagttaatggactagatggactgttgc

SEQ ID NO: 66111 - DNA, 1085 bp, Homo sapiens
cattctgctccctcgaggttgctggacaagctgctgcactgtctcagttctgcttgaatacctccatcgatggggaactcacttcctttggaaaaattcttatgtcaagctgaaattctctaattttttctcatcacttccccaggagcagccagaagacaggcagtagttttaatttcaggaacaggtgatccactctgtaaaacagcaggtaaatttcactcaaccccatgtgggaattgatctatatctctacttccagggaccatttgcccttcccaaatccctccaggccagaactgactggagcaggcatggcccaccaggcttcaggagtaggggaagcctggagccccactccagccctgggacaacttgagaattccccctgaggccagttctgtcatggatgctgtcctgagaataacttgctgtcccggtgtcacctgcttccatctcccagcccaccagccctctgcccacctcacatgcctccccatggattggggcctcccaggccccccaccttatgtcaacctgcacttcttgttcaaaaatcaggaaaagaaaagatttgaagaccccaagtcttgtcaataacttgctgtgtggaagcagcgggggaagacctagaaccctttccccagcacttggttttccaacatgatatttatgagtaatttattttgatatgtacatctcttattttcttacattatttatgcccccaaattatatttatgtatgtaagtgaggtttgttttgtatattaaaatggagtttgtttgtatcaaaaggtgcattctattatccgcctagaatgttagggagggtggggaaggggctggtggggggcagcaccgtccacgggaggaaaccctcggtgtgtctgccctggacaccaaaagctcgggtgggaagttagcgggtttgggccagccagctctagtggtggaggctggtttgggccctgctgtcctgccctttcctcatgcctaggggcttggcttcctcagtccaccttctctctagcagtctcagtggttagggcggcctctctgccaggagtgtttttggctgcagga

SEQ ID NO: 66112 - DNA, 5193 bp, Homo sapiens
gcccactaggagcttcggatgcccgagttagggctgcgccaaggcggccggagcagagagggagacggggacggggacaggcagggacaaagtgcaagaggcaaaactggctgaaaagcagaagtgtaggagccgccaaggggcgggacgaacaggtccgtgggccgggcggagccaagggtgggggccggggtccctccaggtggcactcgcggcgctagtccccagcctcctcccttcccccggccctgattggcaggcggcctgcgaccagccgcgaacgccacagcgccccgggcgcccaggagaacgcgaacggccccccgcgggagcgggcgagtaggagggggcgccgggctatatatatagcggctcggcctcgggcgggcctggcgctcagggaggcgcgcactgctcctcagagtcccagctccagccgcgcgctttccgcccggctcgccgctccatgcagccggggtagagcccggcgcccgggggccccgtcgcttgcctcccgcacctcctcggttgcgcactcctgcccgaggtcggccgtgcgctcccgcgggacgccacaggcgcagctctgccccccagcttcccgggcgcactgaccgcctgaccgacgcacggccctcgggccgggatgtcggggcccgggacggccgcggtagcgctgctcccggcggtcctgctggccttgctggcgccctgggcgggccgagggggcgccgccgcacccactgcacccaacggcacgctggaggccgagctggagcgccgctgggagagcctggtggcgctctcgttggcgcgcctgccggtggcagcgcagcccaaggaggcggccgtccagagcggcgccggcgactacctgctgggcatcaagcggctgcggcggctctactgcaacgtgggcatcggcttccacctccaggcgctccccgacggccgcatcggcggcgcgcacgcggacacccgcgacagtgagtggcgcggccaggcgcgaaggggcgggggcggggggcaacggccgccgggccaacccgctcagtcacactctgagaccctcggcgggcacctgctcgggggccccgggaaccggggcggactcgggctccggtcccttctgacgcggggctggggacgcagacactcttggctccggcagcccagcgcaacccctgaggtcgggcgccgcctcccgccttcagaaactcgggctccgagcgccgaattccagcgccttcgcccgtgggcacagggcgcgcggtgcagccacagggggcccgagacacgcgccccggcctggcccaggctggggaaccgctggggtcgggctcgcgtctgaaggtccgggactgggtgcggccgccgggggtcccctacacaggcaagctaatctgagctagcgcaggcttgggctccggaggccctagagggcagcttgggctctggaggcccttgggggcggctgcgccgggaaccctggccctttatccccaaccccaccccagaaatagggtccccggaggcgaacaagccgaggggcggagtgggccagggatcacctgccccgcaatgacctgcgccccgcccccaggcctgctggagctctcgcccgtggagcggggcgtggtgagcatcttcggcgtggccagccggttcttcgtggccatgagcagcaagggcaagctctatggctcggtgagtaccgcaggggtctggctaggcacctagttgggaacagcggacatggctagcaggctcgtggcttctccagccccacctgtgcctgggtcttggaggggtggcagggtcaccaggtcacgggaccggcaggcctccccagacaaaggaagcagccccaaggcaggaacaatgaggttcctgccatccctgagtgggcccctcccagaccgaggaaagggcgctattgagagcccttcccttctctagtccagaggggtaggtctcagtgttggaactgcgggcttgaggctggacacggagggaatgaattctctggctgctaggtgcagggcaggtggtgagagcaccagctgttgtgggctggccatgtccccttctcaccctgtgtgggtcttgacaccttaactgctcagcagagacatctcagcccagggtggggggtgggacagaagggggttctgacccctggcttcaggctgggtaccttgcccaagaggtgccccagccctgacactgccctgctttgctgcagcccttcttcaccgatgagtgcacgttcaaggagattctccttcccaacaactacaacgcctacgagtcctacaagtaccccggcatgttcatcgccctgagcaagaatgggaagaccaagaaggggaaccgagtgtcgcccaccatgaaggtcacccacttcctccccaggctgtgaccctccagaggacccttgcctcagcctcgggaagcccctgggagggcagtgccgagggtcaccttggtgcactttcttcggatgaagagtttaatgcaagagtaggtgtaagatatttaaattaattatttaaatgtgtatatattgccaccaaattatttatagttctgcgggtgtgttttttaattttctggggggaaaaaaagacaaaacaaaaaaccaactctgacttttctggtgcaacagtggagaatcttaccattggatttctttaacttgtcaaaagttgtcacgagtgtgctgctattctgtgttttaaaaaaaggtgacattggattccgatgtcatcccctgtagtatggcgtggagcatctctgtctggaaaggcccgcctgaggcttgggcagccagttcagggagctcccaggcttggctctcggctagcatcctcagaggcccactccctttgtgccctgttgctattaatcgggacatatcggtttacttcgggtacagaaagtgcggtgttgaagtcctcgctgccactctgtttttagatctgccaagactgacctttgaactttcctgtagtcaatcttcctcgatctaccagatgggagagacccttggacaactttataaactcctgtttgccttttttggatcagcgacagcccccatcgctgtgactattggggaaaagacgaagctctttcataaattccatggagaggaatcaatatcccactggaaggctagaaatggacaagatagtgtatttgcaatcacaaacaaaaccctagtgatgaaaaataatttgtgatggcagatgcttctgatggtgtgatagaatatgtttttgaaaacaaaccatcgaaccccccgccccacccccaaaacgggcttccctgtgtttagggagctttgggctagaactagctacgatttttaggtgaaatgtccttgtaattgtacaaagcacttggtgcagtgtttgcgtggagcagcctgctgctttctgatgcattccctgtttaagtgcgtttaacatctacctcacaagccctgaaaccccaggcaaaacccacagaaagctcatacccggtgcaggagtttgccatcccaagtggctttttttccatatgtagccaaaaaggattgcagatagcgtcggtgcgtcccattcgaaccttgtcacgtttgagctatctttaccctgtgatttacttttagtaagggtgatcatggtgaaaatatttgcagacagctgttacagtacactatatggtcaccaagtaaccttatatttttctttatatattttacaaatgtaacccctgtcattgaagcaaccgtggaagaggcagggtcggtgatgtttaaaaaaagttccgaggtgatggcaaacatttaattttaatgaatgactttttagagtttatacaaaatgaccttagcttgctaccagaaatgctccgaatgtttcgtcaagactttaatactctcctaggatgtttctgaactgtctcccgaattaactttatgggagtctacagacagcaagactggaaaatctgattggagtttttgtctttcacattccttttgaaaactctttgttcgaatgcaaatcatcgacttaaaatactattcttaaccaaggcctggaagaaagaagacacttgcaaagccgctaagacaggaccacacatcttaaactgctgttcctaccatgcactaaactgtttttaagttttaaaccacaccctaggctccaggagtgttcaggaaagatggtgtttgtaggtctccatgctgtttggcgttggggggtgtggagggatcatccgtcgactttctgaattttaatgtattcacttagtaacaaaccatgattgtcttaaatgccttaaattattatgagatttcttgtctcagagcccaatcagattgtcaggaattaacatgtgttaggtttgatcacccttgaccacttcttatagatatttcttcaacaaatcatgtgtgatgcctgtaggaacacaactgtacctttaaaatattgttttcatattgctgtgatggggattcgaggttcctgtatgtgccactgttttcagaatctgtagttttatacaggtgccgaccctcgttgtgatgtatgtgctgtgcacattgacatgctgaccgacaatgataagcgtttatcgtgtataaaaagacaccactggactggatgtacacaactgggaaaggaattaaaagctattaaaattgtgccttgaaatgccaagacctggttccctccccctgtcttccaggggtctttctatttgaggcctgagcctcacatggctgggggttggggtgggggcaggagagacgaattttagccagctgtgtccacacaaatgtagccttgaaaacaggagcctggggggtgtgagtgtcacaaagttttgccatgacagagtcttgcagtttattctcattctcctgatggggctaattcacgccattcccgcactgtaactggccctaaactctgtgcccctcccattggcctcctgttctctaaagcaatttgcacttccctagggggagccgtgaagctccagagctggtcattaggaggcagactcgagaatatttttcaaaatctgagtagacaccatccatgggtattgaactcaatataatgaactgcagctagtcttttatttttaattaactaatttttttatattttttgagatggagtctcactcttg

SEQ ID NO: 66113 - DNA, 1053 bp, Homo sapiens
gaggtcggagccatgtcccaaagagagacccaggggtgggtcaagaaggcatgggcactcagatccacagggcggccttcaaagtgggtttacaggaggggcccagagacctcaggacagcactgcagggcaggaaagggcaggaaaagagaagggccctgaggcagggccttccttctctctctccctccttctctctctccctcttgatctccctttctctctgtcctcctcctcacctcttattcacctctacctctctatctctctctctcacttctctctgtctctctccctctgtctctctgtcctttctcttttcctctctctgtctctctctcccttctgtctcctctccctctctatcattccctttctctcttctctctctcctttcttccccctctctctctcttcccacctccctctttttcactctaccccctctcactttctctctctccccctctctctctccttctccctccctctctgtctccatctctttccctctccctccccttctctctccctccctttgacagccatggggtcagctttcagggttcccattaaagggactaaagaagatatggccaacatgttttcttgcaactaagacccattagcctttttgaagtccagcctcaaagcctgctggacattatttatgtccatggggtcattgcggagaacgccacacactaaactcttggctgtgtgtgctggggggcggctgaggcccacactgccctgatgttgaacctgacccaggctttggtagatcctgagaaggccgtggacattggaaccctataaaagtctgtttgctttcatgtcgctgcccagggctcaagtctgtaccccactggctcgccgctggttctccacatgcatccccgtagtgggtggggctgtccccgcagcagcatctgttcgccatcttcatggatgctgcttttgaaaagcaagtgagggcggactccatgggagaagggctgctttcagacaaagcccacggctggatgcataggtggtggagacgcaacctcg

SEQ ID NO: 66114 - DNA, 1052 bp, Homo sapiens
gccagcgacctgctgtatggggaggtttcaagggcagagttcaggcccctagaccagggcagtggctccgggttcctgccctgaagccctgagtctggaggagcccactcctccattctgtcaggctttcctccagaggacccagccggtctggttgttctgtcccaccctgtgtaggctccggctgggtgccaggaagacagccctgcctggcacagcccatgatcccaagaaggcagcctagagctacatccatgctcctgattgacctttaagcaggtaatccctgctgagaggctgaggcaccgaagccaaaatgtttccggccctccctgcttgttttgagttagccctttaagtcttaaaagggaaaggggagaaatgaacgtatctgagcacctactgtgtgcagagccctctgtttagaaggaactgtacctcatataacctgtgcagacacagagactcagaaaggcttagtaatttgcctgaggtcacacagcccctttggaggagctggggccaaaagccgtccctagtgacactctgcaactccagtgcctcgctgtgtccccacctcatcccgtcatggaggccaaatgcatccctcttcttggcagccactactgcatttgtcttagggattgactgtcaacagtttaaattgactggcgcaaaactccctcatcagctggatctatttattgtcagagagccagcctcacaagaagcatctccaagatccatgcagacaatctcctctttcaaaatcttcatcgtgccttatgcagccatgtggggtctgttcccaccttaaagatggagaaacaggctggaggagctcagaccacttgcccaggggcgcacagcccagaaggagtggagctcggaagccctaggctgtgggtggcaggtatccttagggaatatggaagtttacagccacagattttccatatgactgaagggcgcccgtgctgctaagtaccaaagctgatgtttaagcatttggggagatgactggttctggcctgagccgcgtgcacccatgt

SEQ ID NO: 66115 - DNA, 1052 bp, Homo sapiens
atcaatgcaacctgtccacagcacacagctctgcagggcagagcgggggcagagcccagagccctgtccatggagggagctctctgggtggtctcttcccttgccgtttcaattagaaagattcaaatagaaaaaaaaaagcagtcaccatcttgttcagaagtcaatttcaaatgtcccttctgtgatgtccctgtggctggggaaagttggcggtgaggcccagtcccctttgttcaaccccttgggatcccattccctgatctcctgaccctgatggcttgggatcttgattttgggggtgataaccgaagtcactgggcacacacagtgccaaggagcccgaatgaatttcccaaagtgagccactcgcacccccagcggctggtcagggactcctttgggagtaataacctcaggcgacaggggccgcccctccacatagcctgaaccccagactttggtaatgaagcagaaggacacttgtctcctatcatgtgacccatgtgtgccttagctgaatctgagatgtttcagtccagcactgaaatttggaaatttggggaatttccaaaaccatgggaaaggccacagctacaaaggccacagtccacagtcaccctcaagcagcagtaaaccttaaaggaacccagggtcacccacccatcccggctcacctgtatccatttaccttcatcctaattcttaagaaagttgtctttaggaccgggcgcggtggctcacgcctgtaaccccagcactttgggaggccgaggagggcggatcacgaggtcaggagatcaagaccatcctggctaacagggtgaaaccctgtctctactaaaaatacaaaaaattagccgggcgtggtggcgggcgcctgtatcccagctactcaggaggctgaggcaggagaatcacttgaacccgggaggcagagcttgcagtgagctgagaccgcgccattgcactccagcctgctcaatagagcaagactccatctcaaaaaaaaaaaaaaaaaaaaaaagttgtccttagtggacaggtcctat

SEQ ID NO: 66116 - DNA, 1316 bp, Homo sapiens
cctcaggtgatctgcccgcctcagcctcccacagtgctgggattacaggcatgagccatcatgcctgaccgactgaccgagtgcttttttttttttttaaagcaaatattgcctttgggcttctctctaatttcattttaaagtttcagttgcattttcaaatggagattttattttaaactggagtgcagtgatttttacagtctttttgaaagcaacaaatgagatttttagaagacctcttgcttgaagaactcttttgtgtgaaacctagaagagagactgttcacctttcattgcaggtgaggtcccaaattttgccagtctctctcccaatctgccaatccctgaagcagggggtacaaaactcagaagattctaaggaatgaggtcttcaaatcaaatccaaacttagtgaaaaagaagtctacctgtgtcaggggtgttccctgtcaaagtgatgggtgagcttcagctggttgcagtggaaggtgtgctggatggattgaggaggcgagagggtgcaagacagcccatttaggaggcagttcctgcaatgtgggcatgaagtgttacagcccaaactaggatgctagaatccgagggcagagggcagtagaaaagaacaacctggcggaattgtgtaggactagaggatgacagccgagtggcagataccagggtcaagcttgcggggagaagggggacgggggtgggggagagtaaagaggagacgctggtgtttggtggtgttgagaggtatttgtggttgtcacagctagggcagggatgctcctaaacattctgcagtggagccccctcaacaaagaattatctggccccaaatgttggaagtgtccaggtttaggtataaagaatcagaagcttttctcaagtattgctgttaggttggtgcaaaagtacttgcggattttgctttacttttaatggcaaaaaccgcaattatttttgcttcaacctaatatgatgcaaaattggctacaactgtaatttgttgagtgctgcaaacaaggtacttgctaagcttaactttagtgaacaaattaggaagaattggaataaggtaaaactagctaaatgactcttccctgagaataaatactaatgactgccccttcagatggtgccccctcatctgctttactgactgtttcttagtagtagttggcaaaacacctcttaaaataccatacttgttttcatcgtctttggtgtatgaaatagttgaatatatcctttcagaataatatttggccatttacatctctcttttgcacacactgaatttgccatct

SEQ ID NO: 66117 - DNA, 1063 bp, Homo sapiens
cgatctcggctcacggcaacctccgcctcccatgttcaagcgattctcctgcctcagcctcccgagtagctgggactacaggtgcgtgccaccacacctggctaattttttgtatttttagtagagacggggtttcaccatgttagccaggatggtctggatctcctgaccttgtgatccacccacctctgcctcccaaagtgctaggattacaggcgtgagccaccgcgcttggccagtcgcctggctaatttttgtatttttttgtagagacagggtttcccatgtttcccaggctgttcttgaactcctgggctcaagtgacccccctgcctaggcctcccaaagtgctggaatcacacatgtgagccaccacactcggccagtgaatagtttagaagcaggccatgtgcgtcctttctgcctgcctctgtaggtagattccactccgcctcccctgtgtggattcccacattggagcgcgggctgggtgggtggcaaggagagcagtaggtttgtgtggagcatgggcttggagccagctggactcgcatgtcccctttcccttgttacctttgtcacgttccctcatcactgagccttctgtttcctcacagtaaattagagataataatcatttgggtattttttagcaaattcgtattgtctactgtgtgtaaggtaccgtccaggggctgggtatatggatgtttgggagatagaatgagatcatagtgaatgtttattgcctctaagcctctttataggaatgagcccccactgaagcctcgtgacagtgctataaagcaggacactgttatgaccccattttctagatgaagaaattggaaactcactcaggatcccatagatattacatggtagaggctgtatttgaatccaagcagtctgactccagagttcttcaactgcatgaaaaagtgggcacaacagtatccttcagacccctctgcccccttatagtattactggagtgcacacacttatggttctttaacggagggacttgtctctcagttagatccccttccactccttgcac

SEQ ID NO: 66118 - DNA, 1051 bp, Homo sapiens
tgggattgatacactctccagctggacagtgcagaattgcatggaattagaggcacacagctgcagaactgcatggaattagaggcacacagcggcagaattgctttacacccccgacatctggtgtcagcagtggtggtgtgtgtggaagtagggaaaacactttgatttttcctatcctcattagccagggaggtcagcaccccctcattttactagagaagtggggatgttaatcaagtgccctgcccttctcaagttcaaggtgcctgagacactggcacccctcctgtcacctgcatatatttacttcatgttttgattgtcccatcactgccagcatcaccaggcatgaccaccgtgttccagagcatggtggcagtttgtgagtgacagagtggcagccagtggcctagtgtcccgcaggcagagcagactctttgtttctccaaggcaaggatgtggcagtgccaccaaatggtcgtgtcaattgatgcccaaatggctcaccaaaagctgagtgacagttgccacagcaaaaaaaggggagaaaacataggttcagaatttcttggaaatgtttgaaatgcatgtgatagaactctaggtgggaaattggcttgttagatacagtaacttagcatgcaactagagtaaacagtttgacctaccaacccaccgactcatctgtttattttacttctttttttttgagacaaggtctcactctggccaagctggagtgcaatggcatgatcacggctcctgcagcctcgacctcctgggcttaagcgatcctctcaccacagcctcctaagtaactgggactgcagaggcacaccaccacgcctggctatttttttaatttttgtagagatgggttttcaccctgctgcctgggctggtctcgaactcctgaggtcaagcagtctgcctgcctcagctcccaaagtgttgggattgcagacgtgagcccctgaggctggccccatttgtttgttctaataaaaatgtaggactgaatttgactcacagttgactaatttacatt

SEQ ID NO: 66119 - DNA, 2381 bp, Homo sapiens
cagctccttgaaagggaagaagaaattgctgaactgaaagcagaaaggaataacaccagggtgagtgtgacctttctgttcactgcctgcccctggagccactgtcaggaggaggggcggtgtgtcaaaacgaaaggacgacccactctgtctggcctgaaatacttttcataccttttcccactgagcagactgtgattagtcagcatgatcacacattaatggcttgaaatttgtgatgagaatttatgatattttaatacaattgagaggaatttgtttttctgcggaattgaagggacttcattttagtatgagactgtaaaggagttatttgccccagattcaatcatgaaattaaaaatgctgtttaacaagtctttattttggccttttatttcagctgctgttagagcatttggaatgccttgtctccaggcatgagcggtctcttaggatgaccgtggtgaagagacaagcgcagtctccagcaggcgtgtccagcgaagtggaagtgctgaaagcactgaagtccttatttgaacaccacaaagctctggatgaaaaggtgccatcagccacataagtcttggtttgtgcacatgctgtgtattaggccagcttcacaagtgttggtgtaacttttgttttttgaagcttcttgaattcttggaaataacttctctaagaagacagggttttgtaggtttaaaaagtactaattggcttaaatgtcttaaaattactaatgtatattgatttgctgttacaaattgggtagtattaggttgttgcaaaagtaattgtgggcaaaacctgcaattacttttgcaacaacctgatatttcgggggaagatttatttttctgaaacttaatttagagccattaacaagttttcttgacagtaagatcaatgacagacattaatggtattttattatgttatattacactaatatatacattaagtgtatatattacacttaactatatattaagaataaaataaacagtatacacacacacacacaaactcaaccccttttattttcaggtgagagagcgattacgagtagcacttgaaagatgtagtttgttagaagaggaattaggtgccacacacaaagaggtaagcttgagacttcatcatgagttgaattgggggggggttatttttatcctttaattattaaaagcagcataaggccagacgtggtggctcacacctgtcatcccagcactttgggagaccgaggcgggcggatcacctgaggtcaggagttccaagaccagcctgaccaacatggtgaaaccccatttctactaaaaatacaaaaattagccaggagttgtggcatgttcctttagtcccagctgctcgggaggctgagacatgagaattgcttgagcccaggaggtggaggttgcaatgagctgagattgcaccattgcactccagcctgggtgacagagcaagactctgtctccaaaaaaaaaaaaaaaaagtaaaagaagtataaggactgtagttgtacatatcacatgttacttatcttcccaattgaggaccagcctatctgagtcattttaaggactacaaaatgatggttacctaaggactcgtctggccagtggataataaattccatcttcaatgatctggttattttcggattgggtagcattgccatatgctttctcttttatactatgttaagcagtttttagttgtgtttttccaaaaggagttttgctatctttacttatttctcttatgtaaggtattttacactcatattcaattttttgctttcagctaatgattcttaaagaacagaataatcagaaaaaaactctaacagatggagtgctggacataaaccatgaacaagaaaatacaccaagcacgagtggaaaggcaagtctgtaggctttgtctttattctgtttgatttcatttgttcacagtatgtgtcgggttatgtggaaaacagttgctaaagtaccggcttagagctgaagtggtcatgaaagttgtgtaatccaacagattgcataagtcagttttgattttagctatttcctggaagtatttttattttatagctcaccaaacaagggtatttaaggatttttttttccccctatcagagatcttctgatggttctttaagccacgaggaagaccttgctaaagtaattgagctccaagaaatcataagtaagcagtcaagggaacagagccaaatgaaagaacgcctggcttccctttccagtcatgtgacagaactggaagaggatctggacacggctagaaaagatctcatcaaatctgaagaaatgaacacaaaattgcaacgagatgtccgtgaagtgagc

SEQ ID NO: 66120 - DNA, 1032 bp, Homo sapiens
acctgttccttctagcaagtttgttgctaacagctgtaagaacctatcctcccactccatgatctgcttttaaagtctcgatttcttttctcccctgttatctttcctgtcccttgtcggctttgtagtctgaccttttgtcttctgggagctctgctgctaaggaagctaaactgttggaacttacttccaagcttaggaaggtagaatgggtgcactgctccttgcttgtgcttgccgctgctttctgctttccatgcttactaaccagaagcagtccaaggatgggagaatcacgactccattgagattgggcataggggttggggggaaaacacccagtcagtcgccagcagcagccatgcttcagaatcaccaacacaagagggctagccacctcatggcccagcacgtgaagccccgtaggctgtgttgatggatgagtacatgctttccatttagtatggcggagcagcccacgcagagcatgttgtgcctgttgccactgcagtggtatgcagcatgtcgttaatgaagtgtaaggatgacgtcagcgtacgctgtttctgctgacaggctgaagagagacacggcaacattgaagaaaggttacgacagatggaagcacagttggaggagaagaatcaagaactgcagcgggtgagcatgcagccctgagggtgggggcgctgagtgggtgctgcaaggtcattgctcggctgtggggagctcagggcctcccacccctgactgagatgttggtcctccagctcagttctggtcgcgtgcatttgttttgcaccctcatctgtgagtcgcctgctaatgcgtacatcccacacagtagttgttttcagtcagtattgggagctgcggaagaaatttgagatcctaggcagtacttcaggtgtccaaaaatgcttcttgcttgtctagcggcctatcaggggaactgttctaggtagctgtggtaccggcgtggcccccctaccccctgcaaatgtagaggcaggtccattgtcctgaatgact

SEQ ID NO: 66121 - DNA, 1038 bp, Homo sapiens
tgtggggagcaactgggggaggggagggcacacatggggctcaccctgttggtccttgtgcttttaaaataatgatcgaggatttacgtgaggtttataagactttgtttctcctgctttaggcaaggcaaagagaaaaaatgaacgaagaacataataaacgtttatcagacactgttgacaagctgctttcagaatctaatgagaggcttcaacttcatcttaaagagagaatggctgctttggaagataaggtaagttagataacacggacatgctggagctttcccaccctctgccaaaagattgctcatctgcccctgagcaggcgtgtgtaacagtggttagcagctgttaccgaaaatgggaattattctttaaagtggaaaaggtatgcacagttatccagtcactgaattaacttattgtttgctaagtccatgccccatttgtgtgtatgggaaattgtttatcattcttattctctagaatgagagtaggtaagtggtttttataaagggccagattgtaaatattttaggcttttagtagttatgagtaattaaataattttatgccaatcaagtcattagcacaaaagcagccataaataacgtgtaaatgaatgagtctggctatgttccaataaaattcatttgtagaaacaagcagtgggctggttttggccgtcaggttctagtttgccagcccctgcactaggatcattttttgggcccaaccctcacccctttattattcatgcattggaagttaatttctggctgggcgtggtggctcacgtctgtaatcccagcactttgggaggctgaggcaggcagatcacttcagccaggagttcaagaccagcctggccaacatggccaaacgccatctctactaaaaatataaaaattagccaggcctgggggcacccgcctgtagtcccagctacttgagaagctaaggcatgaaaatcgcttgaacccaggaggtggaggttgtagtgagccaagattgcgccactgtacttcattcagc

SEQ ID NO: 66122 - DNA, 1074 bp, Homo sapiens
catagcacatctccatttagactaacccattacagggctcagtagccacgtctggccagtgttggacagcacagctctagaaatgagatcaagtatacccatgacacagggatgggtgcatacttgatgtaagacaattaaacacaatacagagatgcacaggacgtgaatattgttccccttctcctctaaaagagtctgcttctctacgaaactaataattgttaatcatttggtgtttatcttctgaaaagcttttctatgactaagacacagcttttcattcattagggcttacaaagttaatatagtagtctgagtgtttatgtttattgcagtactcttggagaaaattttcccagaattaaaatgtttggtatttgtaactgctgatttaacctgttagggttatgcccaacatctgagcacatttgaagtaagtggttttaaaatctaaaagagatagcagtaatgtaagtcttttgcttttctgtaggatcagcttgtcctaaacattgaagcactgagggctgaactagaccacatgagactaagaggtgcttcacttcatcatgggtatggtattaaccagtgagcagccatattgtcagcacctgtggcaggccagttcttggctatgtgggcagcctaactggatgtggctaatggtgtgacctcaaggagcctgtagcttagtaggaagcgagagagaaaagtaactcaaaggttagagcttggtactgaggagacacatcattggcgaaactccaaaacacaggaggagttttgatcagttaatatttggatatcttaatttaggtgcccagcagagtgtgacactgatgatgtaagagcagaatgacagatcccaagatctcacaccacagatgctggcacgggtgggacaattgcagagcagttgaaggccagcagtggcgtgtggctgtgtttttcgtcagccctgggaaagtggagcagaaatgcagagccagacacctggacccagaggaggggtctctctcatcctagacagctgggctccttgtggctcatcaccttggctgtctgcacagc

SEQ ID NO: 66123 - DNA, 1180 bp, Homo sapiens
cctcaggtgatcacccacctcagcctcccaaaatgctgggtttacaggtatgtgccaccacgcctggcgtgtatcacctagtaatgttaactttagtcaccctgctgatctgtccaacaccaggtcttatttcttctaaggctatatttgcagccattgatcagcctctcttcatcctccccctgcccacccttcccggctgattttcggtttttgtttctgactctgccatctcccagttgtgtatttcgccatggaaatgccacatgtccatgttagggcgttaatatcacaagggtccaaggaatggattgttgccctccccaatttcttaaatactgcctgcttcatgtcagtaccttataagcatggcccatctttctaaaatcttttgggctttcattaaagaattcctaaatttccgatagatttatgtttctacaactaatgttgttactttatctactgagatttggttttcttgtttataggtacaaactcttaatgagcaggattgggaacgtgcccagcaagctagtgtcttggcaaatgtagcacaagcattcgagagtgatgctgacgtgtctgatggtgaagatgacagggacactctcctcagctcagttgacctgctatcgcccagcgggcaggccgacgcgcacacactagccatgatgcttcaggagcagctggacgccatcaacaaagagatcaggtgtgtgcaaccgtgcatgacactcaccacacgcatgggtgtctctgaggaatctcatcttgcctggaaaagtctggatgaaatactattaacattttctaagtattacataataatagaacttacttaacttctgttttaagaattttaaggtctgaaattgcccttgaatataaaattcaggtaaccagggcactctccccacagttacggcactagtacctttctgtaggacattgtgggacctgagaggtccttcccctgagaagctcgccacatagctggagggtgctgaaggggctcagcccagctcccactgccgtcctgaaagctgcacctggaaggccacatgagctgagcacatctggaggaggctgatcggcctaccttcctgatccagagtgcagatgaaaggtgtgcacggtggtgggctgggaagagatgacggactgaagcctgccttga

SEQ ID NO: 66124 - DNA, 1093 bp, Homo sapiens
tgatatttcacatacctcgggtaagcatggcatctaaagctctcgtcatcgtgtgctcttctcctgatggtgttgacgacccagtgttaacagggaatggttattctgtacgggcatctgaactgaaaagtgagaagagcgaactttgcctcctcggccccttctctgtgcctgtggcttatgcgtgtgcccctctcctctttgtcactgcttcccttgccctggatgtggttggtgcactggggtcaccttagaccacaggaaatgtctggttaacacacgaagagatggaaacgctcgcagccacgccgcaaacggttagtcacgccccacagcctgcactcctcccagcgcgttttccacttaagaccgtctgggttctttgcctttttgttgaaaacaaaatgttgttttccattcagtcgttccagataagtatttcctttagttattagttgaaatgtgtaagtagaatttgtattttattttagattttttccaggaacttcaagttggtagactctgtcttttagaatagctttaatctagctctccttttggagagatctcagttgagcctccatgtgactgactgtgtggccctttctccttccatgaatatgcttggcacggagagagtctgctccttgcatgagaagttgaaattgttggttttgcatgagttttgcatgatgctttgatagtctgaactttttcactcagtgaagctgcatcttccctgcagagttgcgttgcctgcattaccgagctcaccaatactaatagttatgttcttttgcattcctaaccacgtaaccccaggaagatgaggagggaagctgggctcaggttggagtctttctctaatatattcttcactacatgtacagcagcaaaaagcaattggagtatgaaaacttgtgtaatctactttttttgatgtttatagcatcttagtttattcggagtacaggattgttaatgatttgaaagcactggtcaagcaaaacatagcatcaaagagtacgtctcatggacaattttgaacatttctcatatggtgccatggcagttatttttaattaatatagat

SEQ ID NO: 66125 - DNA, 1114 bp, Homo sapiens
ctcttgttgggtggcgtgttctatcttctgttgttgggtggcgtgttctacattccattgttgggtggagtgttctatattctgttgttgggtggtgtgttctatgaaacgtcaggtcaagtttgttaagggttgttagtttaggttttctatattcttaatttttttctttttttgcttctttcatcagttgctatgagaaagaagtgttgaattttttcaactataattgtgaatttgcctgtttccccatttagtcctgttggttgttgctttatctcttctctaaaactatattttaactgacttttactgattttgaaatggattttttctttaggaaaacaaagtgttaaaatgtaaaccaaccagagataattttagtgagcagtgttgaattgagccttcaaacttgttcatgagtcgtgatcaatctttgtcacattattatactaaaaactatctcagagaggaaatttatagccagttacagtttttttgtagtttgatttaaaagttaaatttatcacaacgaatcatatatttttcatgttactattcctgttgtataaaaattttactaacaaatttaaaaggtgagaagagatcaaattattttgcaattataaaattatcattagtttagcctttgagaatataggtaatagattaaaaattcattttaaaaatgatataaactacttttgagacttcctctgtaactgaccttttccatttatgaaaagcagacactcgcctatggggacatgaaccacgagtggatcggcaacgagtggctccccagcctgggcctcccccagtaccgcagctacttcatggagtgccttgtagacgccaggatgctggaccacttgaccaagaaagaccttcgagggcagctgaaaatggtcgacagttttcacaggtaacttaatggagatagttcttaataattggctaagatttttcactgttaccatctctaaatcatctctcttttcttccaaatagaaacagtttccagtgtggaattatgtgcctgagaaggttaaattatgaccggaaagaactggaaagaaaaagagaagaaagtcagagtgaaataaaaggttag

SEQ ID NO: 66126 - DNA, 1013 bp, Homo sapiens
atgcacattgctgtgattcctaagcttgctttgttttaaatacacattcttgaatgaaacaagcccaaagttttgtggttaattatatattatactaagtgtgacactaatagcctttcagtttggagagactggttcttaaaactgcggactctggctggtgagtggcccgccctctccttgctgttctaagcaattttaaggtctccgttggaatatttgactggtttgttcatcttttatttgtaattggtaacatggagacgtaagccaaaatgaagtcagccaaggagctgtctcattgatgtgcatagcccttgatgttctagccagtgattctcagagcagctacggcacagaaagtgaggggtcctggaggggaggggtcagtgtcggggggacgtttgggccccagcatcagaagttcccgttcgtcagtatggcccggcctgtactgagtggttttttgtttgtgtttattttccagtttacccacactacttctacagatgattatgcagcatttgaatccaacaaagactacattttggaatccagtggaatctttaatcttgttaatacttgttatatggaccctaagatattttattacagagtttttaattagtgaaaaattcatgaataccatagagaaaatattttagaatttaatgtttcttatatttatgtaaacttatgactcttcatttatatagttacttactttttcatgtatatccaggctataaatatcctttcaaatcatgttcttatacctaattttagtctttcaaatgaatgtactgtaatgcttgtatgtataaatcctatgaatagagggcttttgtaaattatgcatttattgtaattatcattaattttttaatgataaaccatgacaaaggattttacgtttataaaattatgacagaagccatgtgcattatcctttacggacgcagcctagctctacagcaatcatcctgaaataagcatacctaatttcaagcaat

SEQ ID NO: 66127 - DNA, 1024 bp, Homo sapiens
gaccagtctagcccctgcaccctcttccctgcctctgctccttgggagcgggtggagagacacccatgtggctccccttagggccagcaccaagcaccacgctctcatcctgcaagtcggcgcacacagtggatgaaggcaggagacccagaaagcagtgcagtgcagctctaataaaggccttatttttcttatgtaaatcatctttttacatttgtttgtaaacatgtttaaagaacgaacctagtgggacatttttagactttgatgctctagccattttggattgtgtaagttgcagatgtggcttttactttttaaatggcatattaacaagccagcaaagtgtgtcagaccatggcgtggtatttattgtgcagcagatccagagacagaggcagcctgtcttttcagttggtttctgcttttaatttacttgtacaattcattgttactgttctgtttttctattaatcttttgtcaacttcctgattatgtaacaaagtatgtacagtctacttttgaactatttttatcacagtattatttattgctttctttcaataaagtactgaagcattttccactgccaatgaagaatactgagaataagctctaactgttttggaaggcagtgtcaccatatggaaattgtattacagaagtcaattgacagaataaagcagccaggagatgaagtgcaggttcagggcgtcatcctgcccgctgctctggaggtcccgagcctgcatcactgcaggagacaggtgcctggtgttaaattgttaaatgcaaatgtgggggctcacatacacagtcggtgggtagggcccaaaggcagagcctaggccgtggaccgcgcgcatgcacgcatgtcccttaacaccgtttcccagctctgcttccttcctcggtgctggcttcacactcccacctgctctccctgcctgctcacaaaggtggctcccaggcctgcacccttccacactgatggcctctggaaatcaggaagcctggttccct

SEQ ID NO: 66128 - DNA, 1014 bp, Homo sapiens
gggccgggggtccgcgagggccacgaggacgggtctgggcccaaggaggccgggcagggggcaagggggcacggagggcttggggctggggtccgcggaggaaggttagaaaggggccaaattggggtatcagctctgaggggagggtccctgggcgccggggggctccagggcaggagaggggccaggctgggaggggtcttgggtccgagggaataggagagggggatgggctccgagggggagggtattagggcccgagggagaggggctgggcctgtggggttcgggggtctgagcggagggggccggggttcgaggggccaaggaaggtgggtgtggggggtctcaaggaaagggcgaggggtctgagagggaggtgtctgggtgcagagggaaagggatgaggtccgaggggaggagattggggtctgacgggaaggggtccaggcgcagagctactgggatggggtccgagggaagggaattggggttcgaggggaaggggtcggggctcggaggaaaggtatagggtccgaggggaggggattggggctccaggggaagggatccaggcgcagggaaaagggatggggtccgcggggtcaaggcggttggggtgcgcgactttgaggggctcgctgtgggacgtggcggagcagctggggatccgcccggcctgcacctgagcggaggttttgcaatcaggtcagtggaggcagcgaggcgcggctgcagctagtcgtgaggctctaaatttggaaccgtccctccttcggggtgtgtttaaaatcaccagaacggtgctttggggctttctgttacgtttccatcacctggatagtctaagggatgcctgatccctgaagctggaaggccttgggtgagaagggacagggcttcctcccgctggaatctgtggacgtttggggccccttggggaggaattcattttctgctgaaggaagctccggaggcatccggtgagcgctccctggaatcccatgcgctccc

SEQ ID NO: 66129 - DNA, 1047 bp, Homo sapiens
agattgtggctttgtgacatattagccacggttctgaatttatgtgtctgtgaaaggaggatgatcatacctatctcacgggtgtttgctcagatgcccatcgcagtgcctggctggtgggagtgcacccctggtggccactgctattctcattactaatactaatgttctcagcatgacttatttgagaagcgagtttttgtgaagcccgtggaatgaatcagctgagcattccctgctgccgcatgctggggagggcaggtcaccagggatatggcttggcctgcgccgcccactgggccttgcagtgggcctgtccgtttaggatgccagagctcttgcgtcactgccacctgcacctggcttaggaacccagaggtcacagcatcatgtgtttcatatttttttaaatgtcatgtcatgaattcagagagattgtttcagggacattggaaagtatttctccccactttttcatgtgtttttggtcgtcacagtctgctgtaggctttgaataccaggggaagactgagaagcatgcctcccagaaaggtaagacgcgaaaggtgcagaaagagcccgctccgggggccccgatggggagagtcacagccacctgaagccgtttccccgcgctccgggggccctgatggggagagtcacagccacctgaagccgtttcctgagcggtggctgttgccacaaggaggactctgccctcctcttcatgtttctggatcatctggataccacatgatggatgtattccccgttacacatccccctcggagccctggcatctgctgtcattgtggggcttctcccccttgtagcggaagccgccttcccttcatctgggcagcgctcctcctggaaaagagagctcacagattgatcggcagaaagctaacttccccccaaggctagaaaccagagttgttaaattcttgttttccttatacacatacggtcttaactgctggtgattaatcttgattacatcatgcagtctcttttttgaaagaccaaagcatatcgccaccttaa

SEQ ID NO: 66130 - DNA, 1211 bp, Homo sapiens
tttttagtagagatggggtttcataatgttggtcaggctggacttaaacccctgacctcaggtgatccacccacctcgacctcccaaagtgctgtgattacaggcgtgagccccctcccccagcctgttttttgaatttttaaaatattagctaatgatttaacttagagatggggtcttgctatgttgctcaggctggactccgcctcctgggctcaagtgatcctcccttctcagcctcctgagtagctgggctgcaggcacacacccccacctctggttaccactgtttgtgtttctgttattacacataaatagcacctttaaatactgtctgtattattcagtggtcctacagtggacctgaaagatttttgtttttttaatcaaaggataaaatacttgcatgttcactgatttcgttgctccttttaaagtagtccttttttgtttgtttttagattactccaaaggtttcggcggcaaatacggtatcgacaaggacaaagtggataagagcgccgttggctttgagtatcaaggcaaaacggagaagcacgagtcccagaaaggtgtcttccgttttatcttaccctccagccagcagctagtaatgtgacaggtggtagccacaccggaaaaggaaaaacaaagcgttattgatagcccttaacgtagatgtctctttttcatgaaatgcccaacttgaaaacggcacatccagaaacacagctgctaaataggaactcgcagcttgagtgttatggcgctccagccccagcggcgttgcttatcgtggtggccacaccccgcacgtctgtgttgcccgtgtgagcctgtgctgtctcatggtgcgggtggaagccgcatgcgtgggagcttccatggggtcctgtctggcttagtcacgatgctgaggtcatagactaggttatttcctgccactctccaaggagggcctcttcatggatgttatctaaagtattaccaaagatccggaagggaagagtagattgagtgaatcatatgcgtttaactgtattgaaaacatactttccacctgtgacctgcactacctgttaatgatgggttctggcctttcattgtgcatgtagactatgtgaaagggtttggaggaaaatttggtgtgcagacagacagacaagacaaatgtgcccttggctgggatcaccaggagaaattgcagctgc

SEQ ID NO: 66131 - DNA, 1014 bp, Homo sapiens
gagatggttttagaagtttgtttttgttccttgcggggtcagttggtatgtgttgtgtctgcgtgtgcctgctgcacattgttttgtcttcactgtttgaagttgtcctgtgtgcccccccaatcccccagttccctccagctagtgtagtcacaaaccctccctgctgacacggggtggtaccccagagagctgggtttacctggaagtgggttgcacgggccaagcctgcagcagggggctgggtttacccaggagtggggacatgggtcaagcctgcagcggggggctgggtttacccgggagtgggggcatgtgtcaggcctgcagcggggggctgggtttacccgggagtggggacatgggccaagcctgcagtgctcctcatccaggcttcttgtctataaagtgggccacggtttttggcaggagatacttacttttgaaccgaaagtgttttcttgttggaatgggtgccccttccctggaaaaaggagcctgagggggctgaaagcctctcagtgtgacccagccctgagagaagcaggagcggggctaatggggctgcagcgccctccgaatctgcagggtctctcctcccgtgtacacagatacgcacactcgtctgcagtgtgcgtaggacgctaagaatgaactgcacagccgggagtgcctttactgaattatttgaagtacagttcttaggctgttccagatcttcgctgaatgttcagattttaagttcattctttaacgttgacctctggagccaccttctggcgctgagcctgggagtaggatctcaaaggccctaagctcaggagagcccttgctttctggaaactgtgtttgatttttgcgcatgctcatgcaattctaacccaactgtgtttcctcttttggttgttttccccaccgttgcttgtggattttcagattataagactggttttggaggcaaattcggtgttcagtcggagaggcaggactccgctgctgtggggtttgattaca

SEQ ID NO: 66132 - DNA, 1020 bp, Homo sapiens
gtctccagcagcattctgcccgaggctgttctgctgttattggtgactgccgtgagccactgagtcaggccttccagatgaggagagaggtgttggttcaaccaaaccactggccatttgaccaggggcttcgtagcagcaagggccaggagacaggcgtgttctgtgtggtttctgtgtttcatttgtggtggtgtttttggccggggttgggaggttttttgtttgttctgtttgatgacaccatatgtgtgtaacatctccacacagagccacacagtatgtacgtgaagccagctctgcatccttccttagagcagttatgttgttaccttcaaaatttggacttggttattagaacctgaacacataattggaaaaacagtaattccctaaccttgcagggaagactctaggctttccacctgcagcgttagaaacacacagcagtgttcaggtgtgggcaggtagacacacctggggtggtcccgcagactgcatggagatggcagtggctctccgtggcatcactgctgcatgacagtgtgactttcatgtggatctgtgttgctgcaacggaagtctttggctggtagaatttccacatggattttttttttctcttaaaaagcaagagaacaaactgcgattgagcctctttttagcgctcagtagagcaggcgcacaggaagcagatgagaataagcccgtgctggtgcggaagactgtgctattgaagtggcgcgttgcaaaggcctgtccgtgccctctttcctcgcttagctcctgcctgctgcccgccgcccctcctgcccctcctgcccctcagggaatgctgaagcctctgcccctggcctgtgctctgcttctcactgcctgtgtctcacgaccatgggtggaagcaaaacttgccttgcaagtgaagcctcgcttggccattctcgtttcttcccgctgtggtgcaccttcttgggctgtttctggatctgtctgcatgcacccacggccacccccatgctc

SEQ ID NO: 66133 - DNA, 1594 bp, Homo sapiens
gagctgcggcagtagggcccccagcccccccccggagctgcgccctggatcctcacactacagatcaggccttctttggttcttgggtggttttgggttttttctgtttttttttttttttttttttttttgaaggtggggaggggaatatacacattgcttttatatttaatacttttgctgatgcttttgaaaatgtttatgccacagaatttgctaatatattgtaatcacattccttaggaggactttggtaattggttttatgcattgatggttttttttttcttttttgccaaattgactgtcacgcggcagcttcagggagctcgcattctcttgtgttcgtgttgccctcgtgcccatcaagtgcagtcgggacctcccaggacaagcacgaggcctcaggtcggccctgtggcgggtaggcaggaaggactgtcccagacgaggggcttcctctagagtctcactgctggggaggagaggactgggcctgatggaagttaacccggagctaagtcacccagagcacaggagctgccatgtcagatgggaaatctgcctatgtcataccgtgacagcccgcaggatcaggtgacttctagcagagaccctggtttttttcctgtgcccactccggcttgtcctcatctctacccatcccctgatgcccaggtcaccgggagggctgctgggagcctctcctgtccccgccgggcagtgtcactgagtccttgaaatcctcccctgccccgcgggtctctggattgggacgcacagtgcagttgaggtctgcgtcgggcttggcttttcacaaaggctgatgtcttaactgtcacccatatggtccctgggccaccgggcagcctggggcggtgtgtgtgccatgtcacagcatggcctctcggccttgggaaggaaggcagtgcctgctctgctgtgagccgccaggaaccctcctcctgtcaatgggggtgtagtatttttgccaaaatatcatgttcaatttcagtagtttgatcagttgaaggctagaagtgtgaagtgcagatgagtgtgtgttcttccccaaggtccccccacagctccaggacaccgctgtcctggcatttgtggccactcactttgtaggaaactcatctccttcctgaggagccgggaggctggaccagtcccgtcgtgcagtcaggtgggcggtgtgtctttccagaaggtcacgtggaaatgtctcgggacttgggtcccggagtgcccgtgaagcgtgtttttgctcctgaggtgcattttctcatcatccttgctttaccacaatgagcaatgaggtcgggttttatatgcaacttattgtatctgaattcctgtagcacacctcataggtatgatttttttaaattaaagaattcagaataaacattttttgatccacttgcgtgatttgctttggtctgtggtcactccgttctgcagtggaagctgcgtcgacactctcggtgtcctgcgccccggacctgggctggcggaggctctcctgccgtccagtgcgtctcacgcgttctgttctggctttagaccgaaccgtacgttccctttt

SEQ ID NO: 66134 - DNA, 1045 bp, Homo sapiens
gagctcttctgatcaccgtgccccatagttccatatggaagcagtgttcttcaaaggaccatttgtttttcaaattcagagagttttgagctcagaaagatttccgtcattcttggcatgagtcctgtggatccccacaggccctggaatggagtctgtgggctctgagagctgcttaaaagatgcagaaagcccagaggggccggcaggggtgcctggttttcctgcacgccagccccatgccgtgttctgtgctctgggctggcattgtgccggctgccccacggaattctccgggcctgtcccatccgctggagccgatcagcagctctggctggctttcattaatataaaacggagagtcgaggattactttacaaatgtagcctgcttggaaaaccatcatccttggattcagggagagaagaacaaaggccagcagcctgtttctagcttctgagtttgcatgggagaagctgagatcagggacagtgggactggccgggggcacaggcgtgtcatgtgccaccctgactgacagacctcctggccttggcatcagtggcaggagcaggtcacaacattagactcataaaaccaggcaataattcatttttttgcagctgagcagcaagaggggactgggagctgagtttgcacgcctcgtattaagaggtgaacaagcctaagaacaggcaatgctgatggaattttaggggcaccaaagctcccattggtcccataactgttttcttttcattgtggtcaaatacatgtaatgtaaaatgtgccattttaaccatttaaagggggaataattcagtggcatttagtacattcacaagtctgtgtgaccaccaccgagacctagttaaccgccccaaaaggaaccccgaacctcctggcagccgctcccctcacccctccctggtccctggccatccccagtgagctttctgtctctatggatgcactgattccgtatatttcctataaataaaatcacagaatgtggccttttacgcctggcttctttcactcggcg

SEQ ID NO: 66135 - DNA, 1039 bp, Homo sapiens
tttgtggcgtaaagcttgccacctgggggttgtcgaacttgaccagatgagacttaccgacaagctcccaaatcagccaggagcaccaggcttcgctgtgatatgaggcaggatttttccctggtgtctccctgcctcttgatcccagtaccaggcttcatgccatagtcagtgcagatattgtgggtgatatgtttgtttcataaccgttcctaaatatagagtgcatgctaagtgatatctagaagccatgtaaaagaaaacgtttgaaatgtttgcaaagaggatgaggcattgagtggaccagaaaacatgtcttcctaaatgggcccagcaaacggtgctgctgggggtgttttccgttgccagctgagttgtgactcttggcaacggtttcttagcaaccgtgtgtgcggggtaccatgctcagccgggatgggaggctgggacggaggctgcctgggagtgagaacaaggcagcggaactggaggcggggaggccccagaggcctgcagccctcagccctccgagcgggaggggccccaggtttagaggattaatactccaggtcccacgctggcctggtggttgccatggggtgaattactggaaacttctcttcctgcatttttccttcctctacagtgtgtattttatgcacaaacgtgtcttttttttttttttttttttttttttttcatttttgcacagagatccaagaggctgcactgagatttcccccagcttgggcttgtggacctctgggaggcaggggacttggggagcggaggggcctgagtaaaagaggagagtgcagggactggctcagagcccacatcctccactgctcagagcctgctcagatttcctaaggtctgggcctcagttttctgatctaaaatggagggagggaggtctgggtagtgaagcaccaacttgatccaaagagagagctaacctttgccttcacctcctgggaggtggtctctgggctcccagaatatcctgcctgatgtatgtgtctctgtttgcctgggg

SEQ ID NO: 66136 - DNA, 1043 bp, Homo sapiens
gaacattccctgtgggtcagagagtttgctgaccaggtctctgctacatctccagcatgcagcacagttcagagagattaagaagcctgcccagggccctccagggaggtctgaatctaagctgactccaaagcttgtttcttttgcactgtgtctgtctgatgctccaggtaagtcccagatcattgggatgtaatcttaacagccatctttttctgtgtgtggatgctgtacacccagccccaggctacatggagcgaaggctgcaggaggcatagtgggctgacatctccatgttggaagctgctggcgccaggtcctctgatgcacccattggtgcctctgggtcctctccacctgcccccctcctccctcccatacacccactgcccacctcccagtgttctcagcaggctcttgttagtactgatttctcttcgcctttggtgccctttcgtggggagtttcatgatacaagtggttagactggcaaatgaactggaggaaggccctgtgctaagtgccccacaggatcttttaattgatggagtttgtcagccctgggaattagggtgtgtgtgcgccaacagtaagcagagtgggatgagaaggggagttagagctgatgctgtggagccctgagaatggtagccccgctgtggtctcatgaaatcaaccacccaccagcaagttctctacttccctctccccaggatcttcagatgggtcccatggagcagactttcccatgcatctcctttgtgttcagtctccatggcaggacctagggggtcatggagatagacagggacggtcctgggcatgtgcacctccttcagcaccctcagggctggggttgcagatggaggagtgggttatatgggtgagaaggggagatggcacgtgtgccaggccagtgaggagatgaacgtcgccattggacactctctctggtctccggaatgtgccacacccctcctgtccccagacacttgcccacagttttgcctcctccacctgctttaccagggcacctcctgcat

SEQ ID NO: 66137 - DNA, 1071 bp, Homo sapiens
gcacagacggattttctctaatcagtgtccctggggcaggaggatgacccagtcacctttactagtcctttggagacaatttacctgtattaggagcccaggccacgctacactctgcccacactggtgagcaggaggtcttcccacgccctgtcattaggctgcatttactcttgctaaataaaagtgggagtggggcgtgcgcgttatccatgtattgcctttcagctctagatccccctcccctgcctgctctgcagtcgtgggtggggcccgtgcgccgtttctccttggtagcgtgcacggtgttgaactgggacactggggagaaaggggctttcatgtcgtttccttcctgctcctgctgcacagctgccaggagtgctctgcctggagtctgcagacctcagagaggtcccagcaccggctgtggcctttcaggtgtaggcaggtgggctctgcttcccgattccctgtgagcgcccaccctctcgaaagaattttctgcttgccctatgactgtgcagactctggctcgagcaacccggggaacttcaccctcaggggcctcccacaccttctccagcgaggaggtctcagtcccagcctcgggagggcacctccttttctgtgctttcttccctgaggcattcttcctcatccctagggtgttgtgtagaactctttttaaactctatgctccgagtagagttcatctttatattaaacttcccctgttcaaataagtggctgtgtggtttctgactggtgaatgggcctgactcgtgaatgggcctgactgcaggtctgactggtatacgtgggctctgtttctggtatgagaagggatgtctgagagagatgcttgggtctcggcgtcaaagcattgggtgcccgtgggtgcgtggcgccaccctgcccctctccctcccatgtcagccctttgctggggctgtttttgggttgaatgtggagagtattccattcccccccaaggagatgaaaccaggcttggccacctgcccccggcaagtgaatggagaagccagaaagagtgccaggtttgtcttg

SEQ ID NO: 66138 - DNA, 1101 bp, Homo sapiens
aatggtgtgaacccgggaggcggagcttgcagtgtgccgagctagcatcactgcattctagcctgggctacggagtgagactctgtctcaaaaaaaaaaaaaacaaacaaaaaaaaaaaccaacctggccaaaatggggaaaccccgtctctactaaaaatacaaaaaaattagctgggcatggtggtgggcacctgtaatcccagctactcaggaggctgaggcagagaattgcttaaattcgggaggcggaggttgcagtgagccgagattgtgccactgcactccagcctgggcgacagagcaagactctgtctcaaaaaaaaaaaaaaaaagagctctgctttccgaaacctggaaattctgctttgcttggttatttagcctatggccttcagtaagtttctgaacctctcagcttcagtattgatctgttaacttggaagtaataatagtaaccacctaagaattgttatgaagattaaaggaggtcatctggtaaatgggatagagaaaaatggtatctgtaaaccacttggcacatgataacagtattcctatggcctcccatctggtgccttttctatcatgttaggatgactgggaaggtttggggttttagcgatccctcattcatgggcatcctttttcccttgggcgcagtgagattcctgattttctcctcctctcttacttaggatcccaagtatcctgtagagaacttgctaaacccagatagtccaaggagaccttggctcggctgccctcaggacaagagtgggcaattgaaagtagaactacagctggagagggcagtgcccactggctacattgatgtgggtgagttctctgtggcctaggaaccttgaggaagaacacaggaatgacagtcccctctaactactccactaacatgtctcagttcattctggctgagcagcctttatggaataagttttacctgggtgtcaaagggaaatgtggcccttgcccttggagcagatctgtgtggagaactccaagggctctattcacatagaatacaatgtgaatggcgctcctcaaattatgcaacataactaccatgctttgatcttagtg

SEQ ID NO: 66139 - DNA, 1348 bp, Homo sapiens
aaatctagcagaagaggaaagatttttgtgtgcccagtgagttcccgtagtgggaatagtgagctttaattaatctgagccctagagaggagactcaggactcatctttcattcttctgtctttgaagccttagccgcatactggctgtggcctgtgaggactgcttgatgtttagatggcattcactaagagcttgttactgctattgctgcaatctaccccattttgaatgctttatgactgtgagccctttggagcacaatttttatggtcattcgttcaacagacatttgcaaatcaggaactatattctcccttttacattgggtacacagaaatgattcagacgtgaaacctgtccgccgagagcttacaatttgtcaagggacaaagaagacatacccatataattgtaatgtgaggcactctgttaaaggctaagtgagaattgacaggttggagctgtcaccttgagctgtttaagcagaggagaggtgacatttgagcaccaaagatgcattagatttggtaaatgggaaagagaaagaacattccaagcagaggcaatggcatgagcaaaatcgtggagaaaagggaaaaaaagttttggtggggagggtaagaaaaagaccattatggccaggagtatatcaagagtcacggactcatattttcaggagccagatgggtagtaaacatgaataaaatggacagggataaatatttgaagagattccacctaaagacactcagacaactttaaaaactcctttcagcaaggaattgttgaagtaaggtgatggatgcataagttcattatactaatatgtgtgtttttgcatatatttaaaattttacataaaatgtttggcaaaacacgaagtacaaatacccatgtgaacttttttttttgttttttttctgagacggagtctcgctctgtagcccaggctagagtgcagtggcagtggcacgatctctgctcactgcaagctccacctcccgggttcacgccattctcctgcctcagcctcccgagtagctgggactacaggcgcccaccaccacgccaggcttatattttgtatttttaatagagacggggtttcaccatgttagccaggatggtctcaatctcctgacctcgtgatccacccaccttggcctcccaaagtgctgggattacaggcataagccaccgcgcccggtccagaactttttttttttagagttagggtctcactctgtcacccaggctggaatgcagtggcaccgtcatggctcactgcagcctccaactcctgggctcaagtgatcttcctgccttagtcacctgagtagctagga

SEQ ID NO: 66140 - DNA, 1070 bp, Homo sapiens
gaactcctggactcaagcaatccacctgccttggcctcccaaagtgttgggattacaggcatgagccactgcgcccagcccttagattcattatttaatttaataccataaccttataagatatgtactattattattatctcattttatagatgtggaagctgaggcatagagaatttaagtaagttgcccaatgttatacagccaggtaagtgacagaactggggttcaaatccaagactacttcagtgcttgtgctgttaaccacaacgggcaatatgagtactctatactgtccatcctgttctatgctagacatttccattatgtacatttgggtcttcctttccggaggtgatttaactggagtcatggtatttgtcttttccaccagactgtgttctcctcgaaaggaaggcctattcattcctatatcctttgtgcctggcatagagtatgactcaataaatgcttaaatatgtgaactcaggaaagattccagtccctctgtacctcagtttttaatctgtgaaatgataggtttggactaggtgacctttgagatctcttgcagctttgaaagacttggatcacagagttttattttggccatgtttcttataactctcatcaggtactgagtaaatactagtgaatgactgaatgaatgaatgaagacataatattctttttctttttttttttttttttttttgagatggagtgtctctgttgtccaggctagagtgcagtggcgtgaccttggctcactgcagcctccgcctcctgggttcaagggtttctcctgcctcagcctcctgagtagctgggactacaggtgtgtgccaccacgcccggctacttttttgtatttttagtagagacagggtttcaccgtgttagccaggacggtctccatctcctgactttgtgatctgcccaccttggcctcccagagtgctgggattataggcgtgagattataggcgtaaactgctgcgcctggcctataattattcttaataatctgtgctaataattaacattggaatgatagaattaaaaatggt

SEQ ID NO: 66141 - DNA, 1056 bp, Homo sapiens
gagcaatggaggtaagtgtggtagttcgggccctgcagtctaggaactgcaggttaacccagcttaattgagtgatatgtctacccattttgctttcttgtcagtaggaggcagtggctcatgaccggtaggactggtcttttgggatctctctaagtatctgggttgctctcttagtcttgaatgtgtaagcagatgattgcaccaaatcatctatctgggtttcaataccatttctaccatttactagctgtgtgatttttgagcaagttacttaacttctcacaaccttactttgccccatttgtaaaatgaggatcataacaatatctatacctcatagagttgtgaggattaatatatgtgaaaatcttagaagagtgcctggcatgtggtaagcttacagtaagtgttaactgctttgaagatgattatcattaacatcatcattattatccatgatacaggatggggagctctggttaagaaaatgggagatgtatcttctgttctcaactctgcaactaacttgttttgtaaatagaatgagccatcatatatcttatgatgattgctcatcagtaaaagggtttcagagtgcctgccccacgaacttcacaaggtgactgaccaatgaggtgatatcaaccttagaatttaatagtgagaaaaaacctattgattttatttagattaaaactattgactataaaaacatagaatggcaaaaatacctgttcacatgacaaacccagtgtgattttaggtgattttaagcttagtatgaaccagttgtgtacctcagctaccaaaatattctgaataatttaaaagatgttcgtagaaatatgctgtctgctgtaagagaggtgatagtgccactgtggtctgctctgctgaggtcacaaatattttgttctaagcatggcatattaaaaagatctttaactggatcatgtgtagaagaaggcaacctggattaatagtcttcatatcatgttatatgaacagtggttaaaagatctagaactgttagcctcaaagggcacaggaaaa

SEQ ID NO: 66142 - DNA, 1050 bp, Homo sapiens
tgaactcctgagctgaagccatctgcccacctcaatctcccaaagtactaggattacaaacatgagccaccacacccgatccttctttaaaaaaatttagattagtgtaatctagatcctgtaagattcatgagatgcttagttttcccagtcaattcatctttgctctctccaattgaatagttcctgatgattatctccttcatgaacctgtcccacaatgtttcgaagggaaaacctatcttttctgcctatgaacatagtcttatgttctatccttttcaccctctgaatcacctgacccttagacacacactcgccaatacactattcatcattcatacataaagttcattgttattgtctttctccacctccatgtggcctgggttaggctgggacctagaatacttaggaagggtctcttgatgactgacagacaaagaagtaagaggcaaagtggcttacattgtaggagcgtgggtgcctctgcttccactgcaccaggagcagctgggccaccaccaaggttgcgatgaggatgaggaccatttcagcatgcatagcttcatggccacggtgcttggcatgcatgcgtgcgtgctcgaccctgaaagccaaacacatggggtgaatcaagtcagggatgctgtagtgataaagggacagtgctttccagggatatcccaccagtacatagctcagaacacattccctgcttcatagctgcagggtaccacacaaattaggggctaggacacacaccctaacagacaggcatgtcgagatagaatacaggctctacggaccccccagcaaccaagcctagatattggaattagagctaagtggcctgctgcctgcccccatggaagaaacagctgacacctttcctgtagcatgaaggaggtcccaggagaaacctgcatcattgcccatttcaagtctatttcaacctgatgctggaacgagaaagtaacccaaagaggttatagacataaagtctcatacgcttagtcaccaatatttatgacagcagtaaaggagtaa

SEQ ID NO: 66143 - DNA, 1048 bp, Homo sapiens
gtagctcagttttcatcatctattcagagtctaacattactctttagctccttcagggatgttaggggaagggataagtttatgcctggaaaagtatccatcctatttttgaagttctccagggagaagctttcatcatctgtgtctactaccaaatatagtatctcttcacatctctacctcctgaactgctttccctcctggaaccggtgagtggcaaaatctcctacctggaaatctttaaagtactgtagatttttcttagaccaagatattaggattactagaatgtggaattagagaattctgactaaggtggtaaggggttgtaattcactttctatgagaaggaaaaacttctatcttcagaatataacaaaaacttgtagctgtggtatctttatcagcctcctttgagtctcatctacctctttaggctcatttctcacaccttcctcaaatactagttgtcttttctcaagtataccatgtcccctcatcctggaacacccatcatgatgcctttttctatctggacctattggccatcaagacagagatcaaaggatgcttccttcaggcagccttccttggaggggggtgggttctccactttgagtggagtgcctctcctctgtattttcttggtcaccagcccttactccattaaagcacttaattgtggttatttgtttctcctcagtagacttgtgttcttcaggagattttggttttcatctctgaattccccagtcattagcatggcatccagtaagtgctcagtaaatgtttattaaatgactgcttgactgactcgtttgcttgaagtggaaaagatgggaaagaagacatagttctaggtattagaagagtagtcataagaaacatggagtaagtttactttgtgctcctctgaaagataagagttggacccagagacagaagtgacacaaaggcagatttttcaggtcagcatcaggaaagagctgtctagcaaatatattcgtattggagtggcctgacttatgtggtaaggattactatgtgt

SEQ ID NO: 66144 - DNA, 1618 bp, Homo sapiens
attggagagaagactagcgatgacttcaaatttctgtcttagagttagaattgttttatgcctttaaaaaacttcagctaacaagtctgagggaaggctctgaaggagggagagtaaaacaggcactctttaaaacagaaatgtgcctctctctgagggagtcctactctagttttactttcctcttacttatcggaatttattgaggacatatcatatgccaacagttttctagtttagaggaagtgggaatatggcccagtcactacccacaaggagcttacatacaggtagagaatgaattcaagcccagccgcatactctagataagcactataataatgttagaaaagaaaatgcgtttggagcactagaaagcactttctgcctggaaaggagactagacggaaggcttcgtgtgtcttggatgtgatattgtcaggcagaaaggcaggcaggtgggaaggacaacctgatggggacaacctgacttaaaggcctggggagtggtagatggccctcgaaatagtaggtcggggccataccatgggggatttgacagcctagctaagaatgttggatcctctctactaaaaacacaaaaattagccacacgtggtggcacgcgcctgtaatcccagctacttgggaggctgaggcaagagaatcgcttaaacctgggaggcagaggctacagtgagccaggatcacaccgttacactccaacctgggcaacagagcaagactccatctcaaaaaaaaaaaaaaaaaaaggaatgttggatcctatcctttgactgtttaagggttttaagcagagaaatgacatggtgaagatttcgtgttcgagataccattctggcactcctcaaaaggatggacactgaatgcagggagactaagaaagagctcattgcagtcagccagccaagtggtagcaagagctcaaatggaaaggaaagaatatatccaagagatagttgagtgagggatgaaagggaggaggagtcaaatatggtcctaagtctctgacttggatcactagtggagttaactttatccaaagttgtaaatacaggagaggatcaagctaaaatagaaaacaagctgcatttgggactgtggacagagctgcagagggagctggccagagctgaagtgcttgtgtttgtgtttcagatggtgaccctctttcagatgtgggttgttcccctctatttcacagtgaagctgcactggtggaggttcctagtgatctggatcttgttctctgctgtcacagcctttgttaccttccgagccacccgaaaacctctagtacagacaaccccaaggtgagagtttaagtagtgggaagagcccaggttttccgaagctaatgggttggaatgcatgggaggagcataggtttagactgaaaaaattcctggttttgtctgccaaaattatttggcatggggcctctctaaaacaagctgattggtagaacccctcccctatttatcgattaaaaacctcaaatatttctgtatagcttactttatggtttcaaggtatttttatattaaaggcaaacaaaaataagcaaattgtggtgatcattgtggtctcattttaa

SEQ ID NO: 66145 - DNA, 1060 bp, Homo sapiens
ggcagatcatgaggtcaggagatcgagacatcctggctaacacggggaaaccctgtctctactaaaaaagtacaaaaaattagccaggtgtggtggcgggtgcctgtagtcccagctacttgggaggctgaggcaggaaaatggtgtgaacccaggaggcggagcttgcacgagtgagccgagatcgtgccactgcactccagcctgggcgacagagcgagactccatctcaaaaaaaaagctagtagttactattataaaaatcctctgtattacagacatattttcaattattttagccagaagttggcactgtttgtggtgtccttggtgactcttacattgttctattgcactttttcttcatatcatcttatcaccctatgtgaggtagcaattattgtcccatttttagggatgaagacttcaaggctcagaaaggtaaggtcatacagtgaacaagtggcagggctaggggtcccaatccacattcatctggctccacatcctgtatcttccacagtggcctttaaagtaaactaccaaagccagagaggaacttatggatcacctattttaccttatacaatgaaactccagaaggccagagaaaggcttgcaggaaagtagaacataagaagaataggaagaagagcaatctacaatttgaaagactttggatcaggtggtcacagctttgaggctggccagtcaagctctcttggacctacacaaacctctgtcatagcacttaccaactgcactgcaacaggagctttcttgtccatctcctccattaaacagagtactccttgagggcagggaccatgtcttatccagctctgtatccccagcactcagcacagggcctggcacacagtaggtgcttatttgaatgaatgagaaaatctctttttctgttgagtgcagatattaaattacctcacaagctggtggggaggatcaaatgagaaacgaatttgaataaaataaaaagaattatacaggcagtggctgctttgtgactcaagaaggaagtattgtttattggaaaattata

SEQ ID NO: 66146 - DNA, 1023 bp, Homo sapiens
attcgagaccagcctggccaatatggtgaaaccccgtctctactaaaaaaaatataaaaattagccgggtgtggtggtgggcacctgtggtcccagctactcaggaggctgaggcagaagaatcgcttgaactcaggaggtggaggttgcagtgagctgagattgtgccactgcactccagcttgggtgacagagcgagactctcatctcaaaaaaaaaaaaaaaaaaaagaaaaaaaatacaaagccctagttcttgagtatatggaggcatttctgcagttaagggagtgagcagctttggatagtaactgaagttgctcagtaagtcctgagcaaagaccctggtgtccccattgatgtgagaataaaggattctggtgatcaggaccattaaggccagaatctctgtgtcagctgcactaaccttctctcctttccccaggttggtttataagtggttcctgctaatctataaaatcagctatgccactggcattgttggctacatggctgtcatgtttaccctctttggtcttaacttattattcaagtgagtaccctttgtttttgtttttgctggagtttggggaggagtgactgttgagatgtacctcttgttgcaagtcgtggttattaacaggagggacgtaatatccaggataggagacttgggtgctgtggggggatgggagaagacaggctctccatgatttgttctggcagaaagcaaggaatgtctgaatatatacaaagtcagagtcctaaatcatattttccaaggctttatattttagtggaaaagtctagtaaccaaagtaagcataataattatcataacctgctatccataattctatcaccttaacagagctgtttttctcgtcagtgtgtactgttcatttgcagcatccactctgcatgaatggccttacgttcaactaggccaggggttggcaaactgtgccctctgtgccaaatcagcccacaacctgttattataaaatgaagttttactggaaca

SEQ ID NO: 66147 - DNA, 1020 bp, Homo sapiens
gtctggggtgcgaatgatcctgttgcccatgtaatgagcacagttacctaacagatagtttttcaaccgttgtccccactccctcctcctcttgtagtccccagtgcctactgttgccatctttatgtccatgaatatccaatgtttagttcccacttataagtaagaacatgcagtatttggttttctgttcctgcattaactggcttatgataaaggcctccagctggcatgttgctgcaacgcacatggttttatctttttttatggctgtgttgctttccaaactttaaggaaggaatgtccatgcatatgcacatcttgaaggattttatgtggcttatctcaccctagtgcctttctcttccattaaacaagtgacatcaacttgagcaatttggaggtgtcaagaagcagtatttaagaacccggatgaacttacccctatggtagatgccatgtagtctgcacacatttctgcaaagtcccgttccagaactccatagtagaggccatagaagagaagggagatgccaaagtccatggcatcttctggtttgatcctgcaagggaagcattagagctagaaagacccaccctgagacatatcttctatggattactactctgggacacacaaggcagggcccaaagcgagaaggcccaaaggctagagcaagtgcgggcaaactatgaccaaatccagtctgctgtctatttttatatggcccatgaacacctcttgaggaggctagctagcactgtaggctgtgaagaccaagctacagtatcccctcctaccccttttcctcactctgctcttagtccttgcctcccctaactggtgacaatgacttgcagctacccaggacctatgctcatcgggacctacatagtggggactccactgttggtaacttctggacactaagtgagctgccttgctgagctgtctctcttccagctagccactcaagttgaaacagctgagccatccataaggaggaaagggcatgccag

SEQ ID NO: 66148 - DNA, 2017 bp, Homo sapiens
catgccctttcctccttatggatggctcagctgtttcaacttgagtggctagctggaagagagacagctcagcaaggcagctcacttagtgtccagaagttaccaacagtggagtccccactatgtaggtcccgatgagcataggtcctgggtagctgcaagtcattgtcaccagttaggggaggcaaggactaagagcagagtgaggaaaaggggtaggaggggatactgtagcttggtcttcacagcctacagtgctagctagcctcctcaagaggtgttcatgggccatataaaaatagacagcagactggatttggtcatagtttgcccgcacttgctctagcctttgggccttctcgctttgggccctgccttgtgtgtcccagagtagtaatccatagaagatatgtctcagggtgggtctttctagctctaatgcttcccttgcaggatcaaaccagaagatgccatggactttggcatctcccttctcttctatggcctctactatggagttctggaacgggactttgcagaaatgtgtgcagactacatggcatctaccataggggtaagttcatccgggttcttaaatactgcttcttgacacctccaaattgctcaagttgatgtcacttgtttaatggaagagaaaggcactagggtgagataagccacataaaatccttcaagatgtgcatatgcatggacattccttccttaaagtttggaaagcaacacagccataaaaaaagataaaaccatgtgcgttgcagcaacatgccagctggaggcctttatcataagccagttaatgcaggaacagaaaaccaaatactgcatgttcttacttataagtgggaactaaacattggatattcatggacataaagatggcaacagtaggcactggggactacaagaggaggagggagtggggacaacggttgaaaaactatctgttaggtaactgtgctcattacatgggcaacaggatcattcgcaccccagacctcagtatcacgcagtatgcccatgtaacaaacctgcacatgtaccctctgaatctaaaataaaagttgaaattattaaaaaaaaaattagccagatctcagatgtaccctataatttttctctttagggccattataggaaagagccactttatccagcaggaagttaacattcattcagtagatactttttaatgcctgctatgtgtctagacacatagctatatgccagaattacaaaagtgtacaaaaataaacatggtttttgcccagataaactttactcttaggtgggagagatggctattacagtaacaaacacagataaaaataaaattacaactttaataagcattatgtaggaaaggttcatgatgctgtaaacacatgtagtagtgtcatttgacctagtcttggggctcaaagatggcttccttgaagaagtgactatggagctgacttgaacaatgaatagcagttaagtggatgaagtgagaaccaggcagaggaaagagcattcataagagtcctgtcacgggagaaagtgtgggtgtttttgaggaactaagaccattgcggttgtatggccaagaagtgcctggagaagtagtgactagactagaaaaaagcctgtgggccaaattaaagattttgatttttatgctaaaaatcctgggaggggccgggcacagtggctcactttgggaggctgaggcaggcagattgcttgagcccaggagttcaagaccagcctgagcaccatagtgagaccccatctctacaaaaaaatgagacaaaaaaaaaaaaaacctagccgggcgtggtggcacatgcctgtagtcccagctactttggagaccaaggtgggaagtcacttgagccttgcagtgagcttgttcatgccaccaaactccagcctgggcaacagagcaagacgttgtctctaaataagtaaaaattcacaaaatgtataataatcatgcaaaggcacaacaataaat

SEQ ID NO: 66149 - DNA, 1022 bp, Homo sapiens
ttataggttctgttacatctaacttcccaactgtctctagtctggtcacttctccccatctgcccagcaaagatgaggtcgatttgacttgtaaaagattaccttttctaaacagtttaaaaaaaaaaagatgtcctctaactctgggcctcccgctgccactgtgcctcttctctagaaggcctgaggtctctgtggagcttcctactttggctgcttctcacatcttttcctatctttccttcctgctattctccttcagttctacagcgagtcgggcatgcctaccaaacatctttcagacagtgtgtgtgctgtgtgtgggcagcagatctttgtggacgtcagtgaagaggggatcattgagaacacgtataggctgtcctgcaatcatgtgtatcctgcctcgagctcctgggccacatctctcctgcaatctgcacactgtagtgagagagagaaagagggtggtcatgaccctaggcatgctgtccagacccttgagtgtaggagagccacaagagggccaccttccctaccctttcccacagatcagagccactcttaggtaaacagtggttacaacctggctgggtctgagaggaacctgaggctgcagctagtgaggctgtgctagcagacctgagatctgaccagtcacaggggaagaggaccctctaatgggatccctcagtttagcatcatcctctgttctgaataacacttgtaatatttatcatgtatttacccagctcccattctctgcctatgttgggaaagccatgtattgtctccattttgccccataacagtcttgtgagatagggatcattatccttacttcacatgtgaggaaacaggttcagacacagggacttgcccaacattacagagctgataaagagcgaaggcaggatttgaacctttcaaagactgtctggggctggagtgccgccctggctctcaccatttcccttgaccagcggtgctcagcttccacgagttctgcatccgtggctggt

SEQ ID NO: 66150 - DNA, 2194 bp, Homo sapiens
gcctccttgcagccattgtcacggatagatagacttgtgtcagcctcaggctgtgttatcttacactggcagttccttcttagagaaggtgttacaggaggccctccctgcatgttagtcatggggaactaggatttatctctatacctctctcagggctgccctgcctccagtaccagtcccctctatctgcctcccaccttctctgcattcagctctttaccccaacagacaggctgtgaggaggaagaggagggggagggcaaagttgggagggctgcctgagtaggaagtgaggctgggcccttccagaaagcagcctccattcctctaggctgtggagcagctggaaagtggggcagacccagggagccccaccacccatgctagatcactcctggcagctcttgcacagagtctcttttctttaacacactgacagctgggagaggcctcacgtcatgtatgggcaactgctggactggcttcgatacttggtagcctggcagcctgtcatcattggtgtagtccaaggcatcaactacatcctgggcctggaatagtgatgaagagcatcagtggaaaacccaccccacacgccatggacctcagggcactctcctccctgcccacaaagacctcctgggtgggaaagactcaaaggggtgcttgggccactcaggacccctctggctgtgtcggactggggagggatatgatggagagccagccagtggggctgtcagcagtggggggctttttaaaagaaaactattttgatgaatatatttaaaaaacctttttttattgtggagcataggaattgcccccctccaggcttcaccctccctgcctaagcagggtgggggcagagccatgacatttttggtttaaaggagccttctcatctctggccgagaacactgctgggctcccaggtagctgaaggcctcagcccacccactcccttcttccctgtgtggggctcaagcctggtgcacttagtatagaagagctaacgtactcaggcttgtgccacgggtgagcactgaggccccaggtgtcctccctcccccactgtctgggacacaggacaggtgttgcgtctgactctgtctccccctgtccaagagctataggctggttgaggcaagtggaaccttatcagtgacttggccaacaagggaagccttggggcctcagaattcattgaagatttgttttgggacaactggaagaatcagcaccatggatactcgcccgtgggcagggctgtggtcagccaagaatagaggtcatatagttgggccatggggcaattgttggcagccatgactgacggccccttgtgcaagctcattcttcagtggatccttcagtggagtggtgacacgtgccagcggtcactctgccacatcacttccttcttgaaagcctaagagtgcgtatgcgtgtgtgtgtgtgtgtgtgtgtgtacgtgaggcagaagaatatgacagatgtcagcttctccctgtgtcagatgatatgtccttgaagctggcaggggattcccagtccagggaatatccctacatgatttttgtcattcatgggtcctccctgggcctgacaacgggagtggtgggtgggtgagaacaggttctgagagggggcttctaggaaggccccagccctagtcctaggcgacttgaataaagtgggaggtcaaacatgggccttcggcattgggtttctagggaatatggctcagtagggcctgccccttcaagggcagcaagaacgaagcaggatgttgtcactcccgtctgaataaagctccatgagctgggttggaaagctgaacatttatcttgctttcttcttcccacctctttccctggggtccccaggggtgtcttgcctttgttaacccccatcggagacctgagggtctgggggtggttgggcctgcctttctgctgttcccagctgttcccctgctgacatccctaggagtggtggaatgccaggctcctgtcctgtggcctgggggcctggggcatcattgggcctgccttcagactgaggttgctctatgttctcactgcctgaggacagtgtcccgccaccacctgccttcctgaggaccacactcaggctcggcttctcttccccagctgtggcttcccatggtaccctgctgcttatgcca

SEQ ID NO: 66151 - DNA, 1123 bp, Homo sapiens
cctgcccttccctcctgttagggttggctctcgagcttgtgtgccagttcctgggttggccgtgagagttctacagacaaggaggaagtgctctcggtgtatttcctgtggtgggttcacacgcagctagacacagctaacttgagtcttggagctcctagagggaagcttctggaaaggaaggctcttcaggacctcttaggagccaggtaggagtctgggactactagtgaacctagacctgtggctctggccagaggggctaggatgagagacagagggtgtgatggtgggtgctgggagatgtagccgaccttggggctggtggctgggggagtgggtagcctgggaaaggccaggatgtggacggactggtatggcattgagcctgaagtggtccaacttggggttccccagtgcctaggaaagttgtccccttgaatgtcagtgtgaaggtgaaggaggaagcagatgcctgttcatatggaaacaaagacctggctgtgaagaggggaggcggacaccaaagtcctgacacttgggcgggacagaattgatctgtgagagactcatctagttcataccctaggtgaccctgggggtggcatgggggtagattagagatcccagtctggtatcctctggagagtaggagtcccaggagctgaaggtttctggccactgaactttggctaaagcagaggtgtcacagctgctcaagattccctggttaaaaagtgaaagtgaaatagagggtcggggcagtgctttcccagaaggattgctcggcatcctgcccttcccagaagcagctctggtgctgaagagagcactgcctccctgtgtgactgggtgagtccatattctctctttgggtctcaattttgccttccctaatgaaggggtaagattggactaggtaagcatcttacaaccatttgtggtcatgagagctggggtggggaaggattgtcacttgacccccccagctctgtttctaagtgctgaaagagctccaggctatgctacgggaggagaagccagctactgaggaaaagccagctactgagaaaaagcgggagtggtttaccattctcctcccccacctttcaccagagaagag

SEQ ID NO: 66152 - DNA, 1053 bp, Homo sapiens
agttgtctccgagaggccctagccctaaacacggggaatgtgaggaatggtccttggttcacgtgatgaatcctcttctgaacctgtctcctcaggatgaccttttctagtgcccagcctcggtgacttgggagcccaggtgacaaaggcagtgctggatggctgctgctcctctgagatggccagaggccagcaggctctgggtggaggggctggccttggggtccactgcaaccaaggctctgggaggtcctgtgaccattacttatgtcttgagttctctgtcctatttgatagggagcatcttgggagctgcgccaagcctgcacccatgacactgggttggggagggagaatggtgcgtgctcagcccagctggctcagctggtggtacatgggcagaaggggactggcgctcaggagtcaacccgaccctgggaacctctgtgcccatagcccaccctccaccactgtgcttcttactcagtggcacttccacctctggccaggtcacttccaatgctggacactgcttagctgctgggaacactgggggctgggaggggcaggggtcctttgtgcttctaactgaggcagtggcagctgtggtggtctgcgagacaggtgtggctctgaccaggagagtgacgacgtgggcacacaggagcaggacccacaaagggctgaggtctgaggaaaggacagttacaggtcagcggctctggagacagagtgggctgcccgggtaaggatgtaactccagcccagagatgtctgggttctagccagggaatcagagcgggaagagggacccctcagcacccaccccttagccctttattgaacagagtacagagaagctttagactggagccagagctacaatatctgcccaggttcttaaagcaacagcaccaggtgcgctgggtggtttgccttggagtgaaggctccgggttagcccattgctccattctgttcatagacctcaccctaccccgcctgcccatgcgtagccccaaggcctacctggtgtccagttgtgtctcatggt

SEQ ID NO: 66153 - DNA, 1038 bp, Homo sapiens
cacactgctctactgctcagaaaccaccaagactgttgatgccttagccttgcactccagggccctacctgcatttcccacatgactttctggaagcctcccaactattcttgcttttcccagacagctcccactcccatgtctctgctcatttagtcccgtcttcctcaccgccccagcaggggaacgctcaagcctggttgaaatgctgcctcttcagtgaagtcatcctctttcagctctggccgcattctgcagacttcctatcttcgtgctgtatgttttttttttcccccttcactctaatggactgttccagggaagggatgggggcagcagctgcttcggatccacactgtatctgtgtcatccccacatgggtcctcataaaggattattcaatggaggcatcctgacatctgttcatttaggcttcagttccactcccaggaactttgcctgtcccacgagggagtatgggagagagggactgccacacagaagctgaagacaacacctgcttcaggggaacacaggcgcttgaaaaagaaaagagagaacagcccataatgctccccgggagcagaggccactaatggagagtgggaagagcctggaaagatgtggcctcaggaaaagggatgagagaaaggaggtggtatggaagactcagcaggaacaaggtaggcttcaaagagcctatattcctctttttcccacaccgatcaagtcaactcagtactcacgggagaaaaatagactttatttacaagtaataacatttagaaaagatccatccccggcccttaaaaaccttcccatcactccaaatcccaccccagtgcaagtctggggaaggtagggtgtgagctgctgctgaaggctgtcccccaaccccactcctgagacatagggcccatccgtcctgggaaagagcatcctctggcaggtgctcccaccaggtcagacccagtcctggacttcaagagtgagggcccctgctgggcccagccaccaggacagcaggaaccagggcct

SEQ ID NO: 66154 - DNA, 1028 bp, Homo sapiens
tctcagctcccaggccaacagtagccaaacccctagagacagtgatgcctgcccgcaccctggcctggtccctggtccttcactggcgccttctcggagctggcccagggggcctggagcatggacagtgtgggcgctctccctaccttgcctccttttttcttaaagcaaagtcacttctccatcacaaccagatttgaggctggttttgatggctgggtccttgggcctggccagtcttcctcttagcctctggatctagaagggaccataagaggagtaggccctggttcctgctgtcctggtggctgggcccagcaggggccctcactcttgaagtccaggactgggtctgacctggtgggagcacctgccagaggatgctctttcccaggacggatgggccctatgtctcaggagtggggttgggggacagccttcagcagcagctcacaccctaccttccccagacttgcactggggtgggatttggagtgatgggaaggtttttaagggccggggatggatcttttctaaatgttattacttgtaaataaagtctatttttctcccgtgagtactgagttgacttgatcggtgtgggaaaaagaggaatataggctctttgaagcctaccttgttcctgctgagtcttccataccacctcctttctctcatcccttttcctgaggccacatctttccaggctcttcccactctccattagtggcctctgctcccggggagcattatgggctgttctctcttttctttttcaagcgcctgtgttcccctgaagcaggtgttgtcttcagcttctgtgtggcagtccctctctcccatactccctcgtgggacaggcaaagttcctgggagtggaactgaagcctaaatgaacagatgtcaggatgcctccattgaataatcctttatgaggacccatgtggggatgacacagatacagtgtggatccgaagcagctgctgcccccatcccttccctggaacagtccattagagtgaaggggg

SEQ ID NO: 66155 - DNA, 1019 bp, Homo sapiens
tttagtccttggtgagctgggcctgacctgagcacagtgctggagtaacacccaggagccaccgcgcctacctcaggagttccagggccctggtggggctctagggagacccgtttgcgctgctgccgggtggtgatgccagtgccctcggctatctggattggctgcatgctggctcggcgcagggtctcttgggggtctccagttttcatctcctcatctgtgatggtgcccaggctcagggaaggctgcatgggtggaagaggtggtcagtggaccatagctgtatggagatggaggaggacctggggctgtcccagaactctacactcgcccgacacttatggtcgggacccttcctgcctcacgaggtagaaagacacaaggcctcctttcctgttctgctttctacctaagccctgggcaaatggccacaagcagtgcagtcctgaccagattcctctctgagctcctgcctaccccaagggacttcacccctgagtgccctcccagctgtctgttccacctggaaacatgagaaggtcaccctccccctcctcggccagtcagtgatccagggccctagtgctcaggctagatcagcaggtgggattccaagggagggcagggatgggaggccctgcacagtgaccccaggcctcaccctggactccaggggatagcaggtcttcagatgtggggggcacactcgattgcgctgctgcagctctgcaatgcggttccagtcatccagctgctcaggctcatcctggcaagtgcccatgtagaagctgttccttcctgtggaaggcagggaagtgggaacaaatgagcctggagtcggcaggtcacctcctggccctggcatcttgccagcctttgctgccacctaccccataaacttgaagcccagcacaccagtctgattcagtgccgcaggtgcaggagtacggcacacagactatttctatcctaggggcttgctcaccaccttctccctggagagggcagaagaggtc

SEQ ID NO: 66156 - DNA, 2174 bp, Homo sapiens
gctattctctaagctctggggccgtggggggtgtcggggcagaagaggggcaccctgcattccaggtagccctcctaggaagcctgtggcttagaagcccctgcatgtgtcttctgggagctctcgagagacaaccagggtggttcccatctctcaactgtcactgtccacttcagcagctactagtcacgtgtggttattgaaatttattaaagtaaatccagttcttcaatcacactagctacactgtgcccctgttcagtagctacatgtggttagtggctgctgtattggacagcgcagatacagaacattccaccattgcataaagttcttttggacaatgtaagtctagatagtctgggcagggaaagaacgagagtgtcaccagtgttgaatattacagtgcagtttaataacattcttaatgctttcaactgtgtcaccttctttggtttaatacttgctttttgcagttctaggcttcacagccttcagtcaggggcaaaggaattgggcaccagtggcattgggactcactaaagccctggtggctcctaggagttgttgggagctcagagcttcatttctcctgctcaccttcataccatggtgccacagcatgtcttgattgcaataaacaaatgtttattctactccttgtggggcctgtcctatgttaggagaggcaaaggggggatgcttctatctacagcaaagcacttgttggccttgcagatggacagagaatcaggccctgctcttaaggagttatggtctggacaggaggcagtgtgggcatcataaataagcccccatgggcttttggagttaggtggaccaaatcttactctgccatttagtcactgttactctggtcaatttgcttaaatctctgaactcagtttcctcctctgaaaagagggtgaagtgacttctcagagtggctttgaggagaaacaagttcccctgtcctaagagagctcacatgccaagtgccttagagtaaggctctgcacctgggtgttccctgaggattggttcccttcctcctacgggagattgtgcatgcaaagagggtgtgacactttgtgtctggtctcaaagaaggcaaagatagggcaggagctggtcagggaaaggccactacggatgtggactgaagggcatgtgggcttcaggtttagtagactgtagtcgggcagagagtatttggggtggtgtggttttcttccgcttcctaagaaagtgcaggagtctgaagcacctgtggagccccagtggctggtgcagataagcggacttgggtagagcggccagaccagctttcctgagtggcctttcttctcaggctgtccaggctcagggaggcgagagccagcaggaggcccagcgcctccaggcccagctgaatgaactgcaagcccagttgagccagaaggagcaggcagctgagcactataagctgcaggtaaggagcccagccccagcccatgccaccttcctcctgcccttcaacctctaccccacccacccaccctctctgcccacagatggagaaagccaaaacacattatgatgccaagaagcagcagaaccaagagctgcaggagcagctgcggagcctggagcagctgcagaaggaaaacaaagagctgcgagctgaagctgaacggctgggccatgagctacagcaggctgggctgaagaccaaggaggctgaacagacctgccgccaccttactgcccaggtgcgcagcctggaggcacaggtaagaatttggctggcagactcacctcactcctattccactggacccctgtgccctctcctcctaggccactgctgccttaggcttttcttcactctccccctggccctctccttctcaggttgcccatgcagaccagcagcttcgagacctgggcaaattccaggtggcaactgatgctttaaagagccgtgagccccaggctaagccccagctggacttgagtattgacagcctggatctgagctgcgaggaggggaccccactcagtatcaccaggtcaggaggcagccttcctccctatgtctgtttatggagtgcctgctgtttatcaggctgtatcctagtgagataaataagatgtgatctaaatttattcttagagaagaataacgaaaaacg

SEQ ID NO: 66157 - DNA, 1063 bp, Homo sapiens
gctgtagctcatggcccagccgttcagcttcagctcgcagctctttgttttccttctgcagctgctccaggctccgcagctgctcctgcagctcttggttctgctgcttcttggcatcataatgtgttttggctttctccatctgtgggcagagagggtgggtgggtggggtagaggttgaagggcaggaggaaggtggcatgggctggggctgggctccttacctgcagcttatagtgctcagctgcctgctccttctggctcaactgggcttgcagttcattcagctgggcctggaggcgctgggcctcctgctggctctcgcctccctgagcctggacagcctgagaagaaaggccactcaggaaagctggtctggccgctctacccaagtccgcttatctgcaccagccactggggctccacaggtgcttcagactcctgcactttcttaggaagcggaagaaaaccacaccaccccaaatactctctgcccgactacagtctactaaacctgaagcccacatgcccttcagtccacatccgtagtggcctttccctgaccagctcctgccctatctttgccttctttgagaccagacacaaagtgtcacaccctctttgcatgcacaatctcccgtaggaggaagggaaccaatcctcagggaacacccaggtgcagagccttactctaaggcacttggcatgtgagctctcttaggacaggggaacttgtttctcctcaaagccactctgagaagtcacttcaccctcttttcagaggaggaaactgagttcagagatttaagcaaattgaccagagtaacagtgactaaatggcagagtaagatttggtccacctaactccaaaagcccatgggggcttatttatgatgcccacactgcctcctgtccagaccataactccttaagagcagggcctgattctctgtccatctgcaaggccaacaagtgctttgctgtagatagaagcatcccccctttgcctctcctaacataggacaggccccacaaggagtagaataaacatttgtttattgca

SEQ ID NO: 66158 - DNA, 1040 bp, Homo sapiens
gtcggccttgtttaacatggtgtccctttttcccagagtacagctttatggaagccttgaaggtgatatgcgaggcagcccccacaggttagggaggattgtgggcttaggacacttgcccatcactttctggggctctaaccccgagcacagcatagagatgtctgtagcaggaagaccgagggtgaaggagcaggaggggtctataccagatgggggcgggggagtgggggtcacatggtctggctgcctctttctcatgggaatcatctctgtgttgcctgagacatcgaggctatagagctggtgtttctgagacatcgaggctatagagcaccctttctccatcactctcctacccagccaccccagggctgctgaaaaattgggccctcctctaaggagcctgtgatagtgggggacaatcaaagtgaatagcaaacagttagcaatggagcccttgcctctcccctgtgctgcctggtcatgcttgaactcccagaatgcttggagcagccaagggtgcatggggctgttatgttctctcttttcccctactccctgtgctcttcctctttgtaggagtggggtgggctttggagtacatgtgctgcccctgctcttgtcttccagcaatctgttccccaatgctaaccacagcagccatgctgctagcaccagccctaacggcctgtggatgttgggaagaggtctgagcatctgtgggcttgggctttggcagtttctgggagggaggcatgggaattcattgagtatgtctactagaattacagactaggtcctgggaaggttgcggctgcagagtgtggcggcagcaaggtggtggtgaggtgtcggctccccagagtcaattctcctgattttggaggtgacgggggttgggcaggcctctgtctctgcaggctcagggtagacgcaagaacagttggccctggcaacatctatgtgttaggttgcctcattcaggccctgccaagcagcctgggcagcaggctgttccgtaattggaggccagagaa

SEQ ID NO: 66159 - DNA, 2502 bp, Homo sapiens
agcacacagctgagagtgagtgtgagcagctcgtcaaagaagtagctgcctggcgtgagcggtatgaggatagccagcaagaggaggcacagtatggcgccatgttccaggaacagctgatgactttgaaggaggaatgtgagaaggcccgccaggagctgcaggaggcaaaggagaaggtggcaggcatagaatcccacagcgagctccagataagccggcagcagaacgaactagctgagctccatgccaacctggccagagcactccagcaggtccaagagaaggaagtcagggcccagaagcttgcagatgacctctccactctgcaggaaaagatggctgccaccagcaaagaggtggcccgcttggagaccttggtgcgcaaggcaggtgagcagcaggaaacagcctcccgggagttagtcaaggagcctgcgagggcaggagacagacagcccgagtggctggaagagcaacagggacgccagttctgcagcacacaggcagcgctgcaggctatggagcgggaggcagagcagatgggcaatgagctggaacggctgcgggccgcgctgatggagagccaggggcagcagcaggaggagcgtgggcagcaggaaagggaggtggcgcggctgacccaggagcggggccgtgcccaggctgaccttgccctggagaaggcggccagagcagagcttgagatgcggctgcagaacgccctcaacgagcagcgtgtggagttcgctaccctgcaagaggcactggctcatgccctgacggaaaaggaaggcaaggaccaggagttggccaagcttcgtggtctggaggcagcccagataaaagagctggaggaacttcggcaaaccgtgaagcaactgaaggaacagctggctaagaaagaaaaggagcacgcatctggctcaggagcccaatctgaggctgctggcaggacagagccaacaggccccaagctggaggcactgcgggcagaggtgagcaagctggaacagcaatgccagaagcagcaggagcaggctgacagcctggaacgcagcctcgaggctgagcgggcctcccgggctgagcgggacagtgctctggagactctgcagggccagttagaggagaaggcccaggagctagggcacagtcagagtgccttagcctcggcccaacgggagttggctgccttccgcaccaaggtacaagaccacagcaaggctgaagatgagtggaaggcccaggtggcccggggccggcaagaggctgagaggaaaaatagcctcatcagcagcttggaggaggaggtgtccatcctgaatcgccaggtcctggagaaggagggggagagcaaggagttgaagcggctggtgatggccgagtcagagaagagccagaagctggaggagaggctgcgcctgctgcaggcagagacagccagcaacagtgccagagctgcagaacgcagctctgctctgcgggaggaggtgcagagcctccgggaggaggctgagaaacagcgggtggcttcagagaacctgcggcaggagctgacctcacaggctgagcgtgcggaggagctgggccaagaattgaaggcgtggcaggagaagttcttccagaaagagcaggccctctccaccctgcagctcgagcacaccagcacacaggccctggtgagtgagctgctgccagctaagcacctctgccagcagctgcaggccgagcaggccgctgccgagaaacgccaccgtgaggagctggagcagagcaagcaggccgctgggggactgcgggcagagctgctgcgggcccagcgggagcttggggagctgattcctctgcggcagaaggtggcagagcaggagcgaacagctcagcagctgcgggcagagaaggccagctatgcagagcagctgagcatgctgaagaaggcgcatggcctgctggcagaggagaaccgggggctgggtgagcgggccaaccttggccggcagtttctggaagtggagttggaccaggcccgggagaagtatgtccaagagttggcagccgtacgtgctgatgctgagacccgtctggctgaggtgcagcgagaagcacagagcactgcccgggagctggaggtgatgactgccaagtatgagggtgccaaggtcaaggtcctggaggagaggcagcggttccaggaagagaggcagaaactcactgcccaggtaaggtactcagcccaaccaccctcccaaagatcaggagctgagagcgcggggacatcgatcctctgtgtccagggcctctagctcctacactggagtgtcttgcctttcctcattcactgggtggcagaaaaggagaggtggctggtggagttcaagtctgttgcccctgtcatcctaaagaaaatgtcagtggcctcccctcccctgaaggctctgtcactagagagtcaagttgtgatgaccaccagcctgttcagaggcacacctgcactggatg

SEQ ID NO: 66160 - DNA, 1085 bp, Homo sapiens
cccagttccatggtttctgcttttttctaggccagggcaaaaggagatcttggtaacaagatgatgggccccatgtttgctgatgtttatgagggcttgtgtggtaatctggtgcctgttccccctctctgttcacatgggtctcatttactcccagaaatgccttgaagagaagaacgaaatccttcagggaaaactttcacagctggaagaacacttgtcccagctgcaggataacccaccccaggagaagggcgaggtgctgggtgatgtcttgcaggtaggaatgcacagaaagacctgtgtgctgctggttggtgtggactcacattcagtacatttgggttcctggtgttcctccatttccagaggagtcttgatgactgaggagtcatgctgatcccagtttgtctctttataccaccagctggaaaccttgaagcaagaggcagccactcttgctgcaaacaacacacagctccaagccagggtagagatgctggagactgagcgaggccagcaggaagccaagctgcttgctgagcggggccacttcgaagaagaaaagcagcagctgtctagcctgatcactgacctgcagagctccatctccaacctcagccaggccaaggaagagctggagcaggcctcccaggctcatggggcccggttgactgcccaggtggcctctctgacctctgagctcaccacactcaatgccaccatccagcaacaggatcaagaactggctggcctgaagcagcaggccaaagagaagcaggcccagctagcacagaccctccaacagcaagaacaggcctcccagggcctccgccaccaggtggagcagctaagcagtagcctgaagcagaaggagcagcagttgaaggaggtagcggagaagcaggaggcaactaggcaggaccatgcccagcaactggccactgctgcagaggagcgagaggcctccttaagggagcgggatgcggctctcaagcagctggaggcactggagaaggagaaggctgccaagctggagattctgcagcagcaacttcaggtggctaatgaagcccgggacagtg

SEQ ID NO: 66161 - DNA, 2156 bp, Homo sapiens
gatctgggatctcctcacctcacccagtattaactgggggaagtggttgggatttgtcatgtgcagaaggcctccctcaaaagctgttccctgtttatggaatacccttcttcctcggagactacaatgaagtctcttctcttagcacatctctgcagagccaaggagaatatatcactttttttttttctgacaaagaaattaaggcagtgagaagaaaagttttcccaagatcatgtcatgaggcttgaggtagcactgcaaacaacccaggtgcacaggcctcccagctgctagtgcgcacttccatagaccccgctcccttactgctgcctgttgctgattgcttcagatcttaggcgcttaccaatgcatatgggccttctccctcctcagctttctctcaggttctccagcttctcccatgggtgatatcctgcagaccccacagttccagatgagacggctgaagaagcagcttgctgatgagagaagtaatagggatgagctggagctggagctagctgagaaccgcaagctcctcaccgagaagggtaggtggctggcacactggcagatgtgtgaatagacttgccggaaggatgtcccctggcctcccatgttgtcccctctgctggcccctggagctgagagctcagccctgggcctgtggtcaggctgacctcctggaagctaggttctgtctttgtccccatcttctctttcccttagattggataccatattcctcctcttccctatgccgtctcctcccttccccttgtgcacatagttctgtgcacatagttccgctcatgcacatagttctgattctcctctcctcctccctccactctgggcagatgcacagatagccatgatgcagcagcgcattgaccgcctagccctgctgaatgagaagcaggcggccagcccactggagcccaaggagcttgaggagctgcgtgacaagaatgagaggtacagctctccctgcattccttcccaggccccagcccctcccctcacccagccaggaacccatactctcttctcactgcttccctccctcgcagccttaccatgcggctgcatgaaaccctgaagcagtgccaggacctgaagacagagaagagccagatggatcgcaaaatcaaccagctttcggaggagaatggagacctttcctttaaggtgggtgttaaggtggtgtgtgcatggaggcccctcagggctgaggtggtctggaaggctccccaagagagggttgagaagaatgtcccagcacctgtcttatgcttcagtctctccagagacctgcatattttgcccctttccttatcccataattggcggcttcccgggtactgggctgtgaccctaaatgttgatttgtagttctgaattagaggtgtgatggctgtgattggtttgtagagggttggcaggataattggaggcatccagcccctggggttctgggagcagacagcagtggtggggtcagcgttgactctgggtgatggggattctcacttgcccgtctcagctgcgggagtttgccagtcatctgcagcagctacaggatgccctcaatgagctgacggaggagcacagcaaggccactcaggagtggctagagaagcaggcccagctggagaaggagctcagcgcagccctgcaggacaaggtaaccctctgctggggtcacagccacagtcttgaccacatgtgcaaagctgagtccagtttaccactgtgctcttctgggcctttgggtattaagttgctttctcttcaaggttcaatagtgtgctgtaattgaaagattgtgggcttcagtctagtacaccttttttttttaacttattttttttttccccagtcaatgccctcactttatagtacacctttcaatcctatctctgctgttcacaagatgtggatcttggacaagttaatcagtctgtttttctaagcatcctttccctaaaatgggagtagtaacgagtagctgcctcatcacctattatgagaaaacgtatgtaaagcacttcacacatcgtgtagtgtaaagtaagctctcagtgaaccagttgtgattgttactattggtaagaacccaatttggccacttactaataaccatgtagccc

SEQ ID NO: 66162 - DNA, 1111 bp, Homo sapiens
agttggaggttatagtgagctatgattgtgccactgtactccagcctgggtgacagagcaagatcttgtttcttaacaacaataacaataaaagcaactttctgattgtgttactttccttaacagtcacttcacttgtggtcaggagttaagtcagtcaggaactctgacttcggtacatcttgaggggaggtgggagggaaggggacaagtggggtgaacatatctctagttgaatgttgttggctgggtcataggacctcagctctgagagggagaatgggatccagcaggctcctagggcatgagggagccggggactggcactgccagggtggagctcctggcagccatcccttcagaggcctaacacctaagtgatgctctttttctccctgtggcccaggctgagttggctgtcattcttaaatttgtgctggaccatgaggacgggctaaaccttaatgaggacctagagaacttcctacagaaaggtaagtaggtacacactcctgagaatcccctcatctctgaaatggggaatactaggatcctgagttgtcaagtatggtgggggtttgtttctgtccccaacacaaggcagagttgatgctcaggaaaagtgtgtgtaatggagtaggtcgatttctgggccatgttgtatcatctcagttcctatggagctcctccttgctgcctggcagcagttatgtaggatatttacaagtgatcatacctacttttgttttttattttttaaacaatcattactctaggcttagaagctgagaatacagtctttttatttttatttttatttttttttgagacagagtctctctctgtcgcccaggctggagtgtagtggtgcgatctcagctcactgcaatctccacttcccgtgttcaagcaattctcctgcttagcctcccgagtagctgggattacaggcgcatgccaccacacctggctaatttttgtattttttgtagagacggggtttcaccatgttgattaggctggtctcgaactcctgacatcaggtgatccacctgcctcggcctcccaaagtgttaggaatacaggcatgagccactgcgcccggcccaca

SEQ ID NO: 66163 - DNA, 1176 bp, Homo sapiens
ccttcagcctagtgggggaacttcaccctgtcacttcagagccttgtttcctcctgttctttcagttcttggatgtttttccctccccatggtcttctctcactcttaacctaggtgtgttctccaggcttcctgacagtttagagttgagccattccagatggtgtaatatagcttcccgttcatctgtgctgcctccgtctcctctcggcccctttccacagagcttttttatgtttgcaaatagggtggcagagtgccatcttttccagaagaaccccatgcctcaagtcccctcttcccacccaccacacagttccatctggataaatggtgtcctggtatctgtcacctgcctccaggatctgatctggatctcttccagatccagcagagatcaagactggaaggaatggggaggtactatgaaatgcagcagcaaggaggcaaagattgctgaatactctggtcctaatacttgctctttttctagccatggcactgaagagggacagcaaatcttgaagcagccggtgtcagagagactggactttgtgtgcagttttctgcagagtaagcacctttcttatccagctatgaagaagctgcttcctcagctcgtgggattggagagtccagaggaactagttcatgggtgtctggaggagaaaaatttcaaggctccccactctttaacacaaagatgaaaacagctggttcagatcccctgggtcttgtgatgccttcatcagttggtgtaagaagagtgtcccttcagtcccagagcccttctcggagatctaggtggagccagaaggttactttttgggacctgtcacttttaactctttgagcaccttaagtttctgtttccccgaacttcaaggagacagaagagagaatgagtctctttcccttgcaagaaaaactgtttttcccagataactttgaattaattgcttaggcgataggtgtaggggcagaggcacattaaggttgatcttgacccccctcactgcttgtgtgacctttctggacataggttccctatctataatatggagataactgctcttcaagtggatgggtggattaaataagaacacatgcaaagcttctagtacagtgcttttcagttcccctccccttgtccagccttagaccacagagtcctcg

SEQ ID NO: 66164 - DNA, 1415 bp, Homo sapiens
attccatccatttggcaagggaggaaactagtgcagagagaaataaagtttgtaacaaaggttgctggcaagtttgtggaggagctgggcccaaagtgtgtatgtactggctcccagcccaaatatagagaacacatttgtaagcaatagaatctagttgtctgcacataaccactatgctgaagttctttaaaataccttgtttcttaaagcaggctcagtctctctcccctcttagtgttgaatatgtgaataattaacttagcaaaccctttcttcctatagtaataaaaacgtaaacttcagcccaggctacttctgaactgtagtgcctgtggaattcatgaggttttcctgtagaggttgaccatgtatacttattgaataacctgtgtacctgatgtgtgtgacccctggtgaatattctagtggtaaaaactgatttaaatgtatgcctatctgaagccaaagaatgggaacaggcaactaaattagaattaagaagtttttctttgaaattcccagctcctattctttcatcccccaccgccccctttttttttcttttcttttctttttttttttcctttggagacagggtcttgctctgtcactcaggctagagtacagtgatgcaatcccagctcactgcagcctcgacctccctgggctaaggtgatcctcccacctcagccttctaagtagctgggactacaggtatgtgccaccactcctggctaattttttgtattttttgtaggacagggtttcaccatgttgcccaggttggtcttgaactcctgagctcaagtgatcttcccgcctcagcctcccaaagtgctaggattacaggtgtgagccaccgcgcttggctccctccaccccctttttaaaaaatcatcttgttcccctattgtttttcccttctcccctcagccaaagctttatgtgtggaaagaataaaaatgtattaataagattttatatctttgtgggagtgtatagcatatatgtaatatttaagttttgaatagatatttcaaaactcaagagccacaaagggctataatataaaatgtattaataagattttatatgtttgtgggagtgtatagcatatatgtaatatttaagttttgaatagatatttcaaaactcaagagccacaaaggactataatataaaaatccaagggatacagaaacttataatgtaaacgttcaagaaatacaaagagctataatacattcaagagctacagagagttataatgtaagagcctttcttttcccacctcagactccctgctgtcaagttcctctctttagaagcagtggtagtaccaatttattggtgtatccttccaaaatactcccagtgctggaacatcttaggaaagtttaagcttttattta

SEQ ID NO: 66165 - DNA, 1395 bp, Homo sapiens
atcgtgaaagatttattctataacttgagggtattaatagtatttgcttgataggggtgatactatgttcaaatgaatggaaattgttattgttactcttacattttttttttttttgagatggagttttgctcttgtttcccagggtggattgcaattgtgtgatcttggctaactgcaacctccacctcctgggtttgagcaattctcctgcctcagcctccctcgtagctgggattacaggtgcctgccaccgtgcccggctaatttttttgtatttttagtggagacagggtttcaccatgttggccaggctggtctcgaactcctggcctcaagcgatccacctgccttgacctgccaaagtgctgggattacaaacgtgagccaccgtgcccagccactcttacattcttatcttgctttttggcacacatgttcatttatttgttcactcaagctaggaaatttagaggtgcttcaagaattttccttttctcattcttcatttatacagttgtccctcagcatctgtggggattggttccaggacttcacacagataccaaaatccttggatgctcaagtctctatataaaatggtataatattagcatataaccttcacacgtccttcgtatagtttaaatcatccttggattacttatataatgcaatgtaaatactatgtaaatagttgttacattgtattgtttagaataatgacaagaaaaaaaagtttatacatcttcagtacagatgcttttttttccctaaaatgtttttcatctcaggttggttgaatccacacatgtggaacccatggatacagagggcctactgtaattggttgtcagggcctgtcataaatagttctcaaagctattgttgcatctttattgtcattgccttacttcagacatacattacttcttgcttgtaacagacaatggtttttgcactgcattctgtaaagctttacagaactatagaactgacttaagaaccagggggaagcagagggaacaagtctccaaatatcccttacttcaaactgtcttcttctgtgtgtcctggggttctatataaaggttacatttaaatagagttcatttaaaatatatagtttggaacctttcattcattcaagaagtatttatcaagcactcatgctgtgccagccattgtgctgatttctaagaattcagcggtgagcacacagtttgtgatttcatggaacttaaggcagtaagagaaagataaattaataaaatacaaaaaggcgtaattaggaactatgggctgggcacagtggctcatacctgttatcccagtgctctgggaggacaaggtgggagcttcactttagttgaggagttcgagaccagcttggac

SEQ ID NO: 66166 - DNA, 1003 bp, Homo sapiens
caaattaagctgattatattgtagtgccctgtaacctgttcctggaaacagtggtcttgaaaactcatcagttaaatgaggtgttagacagcctggtcaaaagattctgtgactaagttactgtataatcatttgcaattctctttcttactctaaacattgttttcctcatttttatattgaaagagttaagagatgctaaaaattctagatctgaaaattggataagcctaagaaggtttgaggtagggaaatgtctattctaagctgtttgactactggacttggggtaggagtggaatttcttttttacttcctaaattatagttactttactctctacttatagtcacagctgggtgatcagacattaagtagctatttaatgagaagcaggcactggaagcttgctccagaaaaacaatcacaggacatgttggtcctgagagaagtcattccttggtaggacctattgtttgaaggaggtgggggtgaatttcatcaaaatggacagtgtggatattgtgattcagaggattgagagactttgtttcctgctgttattaatttcaagccttttttaaagggattctcctagtgattggtacagtgggattcatttagagaaaaagccttgtgtaccagttggaagttaatgcccaagagcagggccagttgctggaggacaaagtggcctaattagttgcttttcaatacttagatcctacaggctaccccaaagataaaataggctactttgtagctcagatcttccagcctagtgcctagcaagctcactaagaagaggaggtgacctgtagaatccacacctcttaatctccctatttctcttctttccctcattgccctttagttttaattaggattgtgtaaacatagtcatcttgccagtcctcttaaagtggcaggcccttggcattttctgctggtcactcatgctatatgtataacttgcaattagagggactagctttgacaattt

SEQ ID NO: 66167 - DNA, 1051 bp, Homo sapiens
tatcatgttatttaatccctatttcagcaagtatttcctaagaaaaaggtatcttcctatataactacagtactattaacactcaggaaacttaacattgattcaatacatccagtatataatacttgttcagatttctcatcttttcccagtgatgtcttttattgagttttttaaaattcaggattcattgaaggatcatgcatgtatttatgcacttagttgtcatgactatcatgtctttagtctgctttaactttgaacagttcttttttaatctgaatgcctttttgtctttcatagcatttgtctgattcttcttgattagattcaggttaggcatttttggtagaagaactatatagattaatacaatagtttgattgatgaggctgacactaaaatacatagaagcagtatctgattttgcaagacagtatataatttagcacttatttgtgttgtctaatctataaaccctataggaatttacagaagaaggaattcagtaggacttggataactaggaatgaaatactttggcagaaagatggggtttggaaaatgaacagaattggaggcagttgggatatggttagataagctgtgatttgggcttcccatcctactattaaggttgtgtatcatgaaaagtgactttgagggttctgtatcttccatggtgtttgcactgctagaagcctaatggtgtagagctcttgctttggcatcagacaggtctagagactgtgcccagcattttgccagttacctaaccttggggaagttttctcatttgcaagatagagtattaataactatttaaaaggttatcgtgatgctcacagtgagacactacataaatatttgaattaaaatatttgaatgcctttaggggggtgcagcgtttcctagatctgccatgtgccccactggatcattcattttgttttgtttggatacgtggtttcgctctgttgcccaggctggagtccagtggcacggtctcagctcactgcagcctcccaagtgggtgggacccaggcacact

SEQ ID NO: 66168 - DNA, 2058 bp, Homo sapiens
tcctctttactggaatggcactccctcttgaaaacgtgatgatattttcttgctttaatacataattccctctctctagtatctgttgcctggttctatgtttccaaacttctgggttgtctggtcgttaaagctttaatggtaagggagttgggcctctctgctttgtggagatctttactgctgtgaatatatgggaacctggggcgaacatgaggatcatgtaaggtagctttctgtcagcacagatgggtttatgtttcctcagtccctctttctgtgtggtattttcttctttagaggaagaaccacatacttttttgtgaaagcttccaaagtattcttttcgtagcctaagttctagcaagggatgactaattgtaatgtctaagctcttagttcacagcgaaaagcggtacattccaaaagcttaaagatcttacctgaaagctcgttaagaaacgtagaattcttttttacatgtggaacatggaagtgggaagaatgccttgaaataagacttgaattctagaacttttaggatgagggcaaagccctgctcaggtggctgaacagagctgatcaggggctgtttggacagctgtgtctaattgataaaactatgatcagaagatattaggtttgtgcaaaagtaattgcagttattgccattgaaagtaatggcaaaaaccacagttacttttgcattaacctaatatatggtgtggtcatttaatttagcctcttacccagtgtacactaaacataccaaaaggtgttgtccagactcaaaatgagtactttctagaatgagatcattcccaaagtcaatccatctctaagctgaacaattctaattgataattattattttgtagctgggcatggtggcttgccctgtcatcccaactactctggaggctgaggcaggaggagcaggcgggagaatggcttgagcccaggagttcttagctagcctgggcaacagagtgagaccccaacacaattaaaatatgtttattgttttgtattgttagtgattatttcattttacccatgtatgtctactgtttgctttttcactatttttccttgcattttattccttccttttttattgcatagatacatacatccttcagatgtttgtccagtgggaatctgttagtggtaaacactgtcttcatttaaaaaatctttatttcactttcagttttttgttttttttttttttttgagatggagtctcactctgttgcccaggctggagtgcagtggcacagtctcggctcactgcaagctccgcctcccaggttcacaccattctcctgcctcagcctcccgagtagctgggactacaggcgcccgcaaccacgcctggctaattttttgtatttttagtagagacagggtttcattgtgttagccatgatggtctcgatcccctgaccttgtgatcctcccgcctcggcctctcagagtgctgggattataggcatgagccactgtgcccagctcactttcagtcttgattggtagtttagctgggtactaggcttccaattattgtctcttagcactttgaaagtgttttttcattgaaattctggctttttgttgttactcttgagaactatgcttgcaaattaacttattttattgtgggtaacctgtctttctttctgtttgtttttaagatcttctttgctgtcatttgtgttctgtacttccattacatggtgtgaatttaattttcttaaatcactatatactgggggcatatagtaattccttaatctgaaatttcatatcttttcactaattgtgtaaaaattcccaatcattacctctttacctctctcagatctcatgcgtaacttatgttgaacttcctcattctgtcgtctacatcttattctttctttcataatttccatttctatctttctgtgttaacttctggataatttccttatatctatcttctagtatactagtttactcttcagctaggtctaatttgttttttgaattcttatttttattagctaacttttt

SEQ ID NO: 66169 - DNA, 1140 bp, Homo sapiens
cgcgggcccgcgtttggcgtgcggcctgggcacccctgcgggtgctcaggcctaaaaggggtgctggagaggccgctgcgagcggaaggcctcctccataaccgagtccgaaagggcagaatctatgggggtaaggtttgtgaggagaggcgcctgagagggaggagccggggggggggggggtgccttaaaggggagggtctgtttgggggcgtgtctgtggaattaaatctgaaggtgactggggtcgggggtatagggcaagttcccgaaaggcttgtaagcgaggggtcgggtcctggaaagtctttgccttttatcgttaacaatagcagtagttatggtagtgcagtagtcagcattttctgagctacaccgtccacaatgacctgccaaatgtttatctttttaatcttctaaccacctgttatactttaaagatggggagcctgaggtttataatgtttagcttggcccgggttacgtagccagtgcgaggttggctctactttgggtttatgggttgggcataaatggggacggggaaggtgctttgtgggggcgcgcgttgtcttggactggtcagtgtattttgagcctcacttttcatatatgtaaacaatgaccttacctgccttacctacttcctggggtggttgtcctggtcaaaacaggttaagtcttttttttttttttttttaatttttgtttgtttttgtttttcatccatggactctcacagataacatgtttcatacacgcacctcggagagtacaaatttatgactataagtggtgtgactgtgtgaagattgtgggtgggcgggagcccactgggttgatgctgccgcctctgggtactctcttttgcttacctctgagttagcacttgtcatttttttttttttttgagacggagtctcgccctatcgcccaggccggagtgcagtggcgcgatctcggctcactgcaacctctgccacccgggttcaaacagttccctgcctcagcctcccgagtagctgggattacaggcgcccgctaccacacccggctaacttttgtatttttagtagacacagggtttcaccatcttggccaggccggtcttgaactcttgacctcgtgatccgcccgcct

SEQ ID NO: 66170 - DNA, 1043 bp, Homo sapiens
tgagtagatgatagcacaaaatcctgaattaactactggtaaagcctatagaattcacttcagtggaatacactttgatatcctgtctctctttccatgaatgttgagtacctacagtatgccaggtactggatatacagtgataaacaaaatgagagacagtctgttccagactttgtatgaataatagggcagagagcagacatttgtgccttggaggagcttatatgggcaagatgggagcaagctggcaacatggtgtgataagtgctatataatagttgtagcagcacagaagagaggctattgacccagtatgggagctcagggaagtttcccagggaaggtgaagcctgagctgaatctccatggattaggggatgtttatcaggcaaagaagggtaaacaggcagggaacagcatgaagaaaggtatagaggtacagaacagccagggagtctggggcgggtttgtgtgcctgcacaagtgcttgcacgcactgcacaagggggacagagaggaaaaggaggcaggaatccagtcaaaagtctcaaatgtcaggctaaggatcttgggctttaccctgtgtgtaatgggaaggcactggagtgtttaaagcaaatgattcaaatcttttatttcagaaagatcactcttaagtgtcagtgtggaatatggattttagggagtgagttggaccaaatgaccaatttggctgtttgagtcatccaagcaagacatgagagggccctacaatcaacataatttggttgactggatgtaaaggtagaagaatattaaagggtggttgccagttgtattaactggtaaggaattacagaagaagaaatagcattgggaatgtgatgagttcaggcttagctttggtgtatttgaggttcctgtacaaaaaggtggagaagtcaagtaggcagttggagatgaaggtcggaagctcaggagacacagacttgagaatcattagcatagaaggcatacaagttagggaaagagatgagattcctcagggagagtgagggtag

SEQ ID NO: 66171 - DNA, 1037 bp, Homo sapiens
gttgccaggctggagtacagtggcgcaatctcggctcactgcaacctctgcctcctgggttcaagtgattctcctgcctcagcctcccgagtagctgggactacaggcgcccgccaccacgcccagctaattttttgtatttttagtagaggcggggtttcaccatgttggccaggatggtcttgatctctcttgaccttgtgatccacccacctcggcctcccaaagtgctgggattacaggcgtgagccgctgtgcccggtggttttcatgtattttcattcaatcctcacaaaacctttatgatactggcatattatccccatttttccgacagggaggctgcagttttgagaggttaggtagcttgctcaaagtcacagtcagtaagaggcaaacccaggatttgaacctacatctatctgtctggccccctagccttgtgctttggactgtaccatgctgcctcattacttccttgataacatgtaggagtggagaggttgggggctgaacaaagtggcttcaggctcccctgactggattcctactgttaggaactcacagggtcaatggaagtcaggtcattaaaggacaggtcgatccaggccaggttctctgggtgctccaacagctgtgaagccacctggttgaagtctctcagatcattgagaacattgttattcagccacagggactgggtcagtgatttccccgactttgaacgcttcagtggtcgtagtcctgtccttggctcctcatttaccagatctgtggggacaaagtgagacttgggtatcatctttgcttttttggctttagggggtgggaagggacagagctggaaagattagccatccaggctgtagctggagggtctggaagggccatagccctgtgcctgagtctagtgcaaccctgtcccacagcttccagcaatcagtaagtttagactaagggccagagacttctatctcaagctcttggctttccaggtcacatggacttctcatgtccactgtaccactgggtctttt

SEQ ID NO: 66172 - DNA, 1029 bp, Homo sapiens
cgtctcaaaaaaaaaaaaaagaaaagaaaaggctagagctacttgcagttgcctgagttagagaacatctctacaaggtgtaagtgacttctcatctgctcaacagctcaaattatttattgtcaaaccatgctgtctatgcttaggcctttaggactactagggtcgtgggagcctcaaagtgtattctgcttggtccaggccttcttgggcttgatgttcatgcgtttccagacttcagctgtggtgcggtctgctttggtgaccccactgaagtcgaacgtggtgatacgggacagggtgcacagcacatattgcctgtggggaagacttaggctgggggccagcacccccaccagaatccccttccccctccactagttgctgttgtcttccctgactgcaaggaatggagggacttgagcatagtttgggaaagattaggtttatcctgactgagagcaaggaatgcttagaggtctgttactcccttcccaggtccaagcatggcagaagaatggtcgtagatttcttgtttctcctcctcctttcctttaggggagcccagctagacgctacctccaggggcagggcacttacctataccctttctcttcctccatggggttcccatggagtgtcaggctacggagccgaggaaggacagccagcttattcacctcccccaggcgctggatgctgttgccgtgaagatagaggacactcaggttgaagaaagttgttaggacctgttggggagggaaaccaaaagccaggctagacaggacaggaccctgaatctctgctcagggctgactcgtgggcagagaaggaagaatgtggggaacaacctgccctccactccaaccctccacagccatactgtatgactgtaacctacttttatttatgttttaagacatacagggcatcacactgaaaaggagctgtgatctgagggtcaggagtgtgggcctgggtaccagcactgccactgacttgcctctctcagccttagttgccccttca

SEQ ID NO: 66173 - DNA, 1400 bp, Homo sapiens
ggaagaagctgccaccgctgccgtctcttaccagccagccccaccaagtgctggccagtgagcccatcccgttctctgatttgcagcaggtgagacacccctcacctgcccctgcccacccttctcacactgcccagggtatggcagagggttcacccactctgcctcagaggaggtagggaaggtggagttagggagcctggtagccttgtaggccccagctccctcccacctcgttctcttaactttttatgtctttcctatctccttcctgcaacctttattgtttcactcccctttgttcttttccttctgtctctcccatccctgtctttctctttgccttcctgttccccttcattccctccttctccatcaccatctaatctcccctccccatttttcctgattgccctcctcacctgtctctgttcctctcctccccggcccctctctgtctcaggtctccaggatagctgcttatgcctacagtgcactttctcagatccgtgtggacgcaaaagaggagctggttgtacagtttgggatcccatgaagagaggggtccttggacagctcttctcctctcttcatcccatctctaccccacccccttggcccccagcctcactgcggcttatacagtaccctaacctgctactaatcacagagaaaaatgtgaagaaggaggagaagaggaaggctagaagcctgagcaagtgagggtagaaccttttgggactggcctttgaagctctggccagggatggggtgggggccaaaaggacagagcctggtatgtcttcatagtcattgagaatgtggagataccagtttgggtggggggtgatcaccaggggacctagggagatccccttcccaccctctctgttggcctcagagtcactcctgccccctctccctgacttggtgctcacatgcacctcactagggtttgtgaccagggtctggatgagcttgaatttgaatgaattgagtttgtatttctagaaccctgggtttttacatgtttggtctttttttgttttggtttgtcaccctcgataaaggaagtatattcatccatgtgctggttctggcccctctgttctacccattctacttttgattacttaggtctatgagagtaagatggggggaaggggacatcttccagggatattgaagatgaacccaagagacaagggtttagggtgtcagctcttagctgagacctggcttgggctaacctcagactggatgagactgttcttgtcccttgtccagtgatgatgggaacactgtcaaagctgaacagacctgaatctgaggcagctttgattcttgggggccctgcctcagactcaatggaattaccaacagcccctgggggtgaaggg

SEQ ID NO: 66174 - DNA, 4971 bp, Homo sapiens
tgtgcacccagaccgtacgatctggagcatcaggcctggatcccagtcgcccctcgcatggcatttagaagagtatatcacaagggcatacgagggcatttggtacgagttcgctcaatggcccagaaaagtggcctagtggccacgagaacgcataacacaattcacgatggccactactgccagtttagagactggaaagatgaagtcatgtgatccgccccgccctttccccgcatcacgtgcttgcgtgtacggttacgccttcccattggttgacaacgatcacgcgctagcgggcgggaccggaagccggggtattgactgaggcggccaagcggctccgggacagggggtacggggggtgggggcgggtggttgcctgcgggaggccgccgcgggtcatgtgaccggaagggctcctcacggacgccgtccctcctcggcgcggcctgagcgcccggcccgaccccggccatggggtgctgctacagcagcgagaacgaggactcggaccaggtgcggccgcggcaggcggggctcgggaatgagggctaagacactggggcatggggcccagaaagaaacctgcggaggacgggcagccggactgcagggctcactgaatacggaggcctggaggggacagattacagaggagacgccaagccgggctcctacccctgttaaagccccagatttctacacagtccccgcctcggggtgtgcaggcagccgcctgtccggctcgctcccaccacttccgtttgctcctaccttcaaaacttttcagattcaaggatcctcagtctaggtccccgggaaacactcccttccccagcttcctgtgtcttctgtgtattagtgggctttgcgaatccattttaggggtgggtaagctgaggccctgagttagtctgtcctgagatgaatcaggaattcgtgtatcgtcttagtccctggggttgcagaaggaaggtcgctgctagtctagggccaggggacgactctggaagttggtggcctttgaattggccaatgaaggatttaatcgatacagtgaggacatcgggacatgtgggaaattgtctgggaagcaacaaagaggatttagctttggctagattgtgggaaaagagaaatggagcgggaagttcatttggttctgagtttggcttgcctcagtgcagtctgcctggggcctgagggttcctttagctggagacatgcctattctgagaatttggctgtagatctgatacctttggagaaagggttaggctggggagacctgtacagttttaaattctccctcttcctcttagtgcattctcacttctccccacactctaatccctgccctgcctggcctgacattcaaggatgaagtctcaagttgctgtctactctccttttttgatcgtctctaagcccggattctacatttgaacatatagtagacctgagagagtagaaaggtttcaggtagctcacggtctaatggggaagatggtcacaaaaatagattatatcactggtacttgggaagtagttcgttcttcagtgaacgtattttggattaagggcttaagcctaggaaaatgtcgtttgtatgggaagcaagggtggcttctggttctcaattctccatacacccaatgaacacatatttcctttgccctgtgttaggcatgtgttgtgcctaatacctctcacttcacttccacctttttgagaaagagacaacaataaccctgcctactgggagagctgtagcctagtgggaaattgtcccttaaagcataatatggactcttgcagggaatgagtcaagaaggattaatgccgtatgagaaaggatacaagcttctacttggaagggagagctgggcctgctgctctcctgaatctctaccttctccttggggggctctcatttctgttcctaacacccagagaaggtgcttaatcactgctgggtgatttgaggcctcatgtagcaagggccataaccatccaccatcccacagtccctctttgagttcttgggcaggcccctctccgactctcatctctgtctctttatcataataaaaaatatacaacacgttacagtttacaaagggccttcacagttatctaatttgactcttgccagacatccgtcatattagtgtgggttatgtctattgaaaggtgaggaagaagttcagagaagctaagtgatttggccaagctgagaagtgctagtgcccaggtgttctgacgctaggccatgtactttatccatggggccaagctgtctcagccatgcccctagaccaggtggccagtcacgggcaggctgctatgtctgtgctaaggtagacagtgaaaccctgcctcttgggttacactaatgcagagacaaaccttgatgtgacaaacctaacccatgctccactcgcactttgggagtggggtgatgtttgtctgctctgaagtaggtagcatggcctcttctttaagtctgggtttcaagaaaataaccttgttgttcacttgatcttagctgaaggctgagaagtgatcagccaaccttcttcttgaagaacccctgatagggaagagactaccctgtcctgcaggaagatctgtctgaagtggagctgggaggacagacacataggaagctaacttgggcctcattatggagccagctttccttagaaatacatagttttatctttggcaaacattttgtctttttagctctttaatactgagcctatgtatttagggaggaagggtgtctgggagtttatagaggtgatggggcaaagcccacagcttctgtctcttgctgttgggaactggatcaaattgcctgaggacacttgggcaacctagccttgagaaagaagagtaaggtgaaaaggctgggcctccctaagcagggcaggaggaagtagccctctacaaggagagttgtggagttgtgggcaggggagctgcggcctgcagcaggaaagactgaggaactgagataggcctggaggggagcattgaggagtctggcactgaaggttggtgagtcagcattagccaggatgtccccctgggcccatccttggctttgttcagggcactcttgctctttatgggttggatagatacccagcaggtctgtttttctcatttactgctgatacagcaagcaaggatttgcagctgatggtctcaaggcagggtcaaatccagaaatattacagtagatagaacaggggactgaaagaggacaaggaggaagaccaaaccaatgaggaagcttggtttggtcttacattagttcaggggttgtgattatcagcacaggccagcaggaacagggctgctgaaaatttacatgggctactcaggtggtttagcaagggagggaacagcgccattgttgtttgttttgagatggggtcttgctctcttgcccagactggagtacagtggcacagtcctagctcactgcagcctcaaaccctgggttcatacagtcgttgcacttcagcctcccaagtaggtgggactgcagggctcacactaccaagtccagctaattttttttttttgcaaagacgaggtcttgctttgttgcccaggctggtctcaaactcctggactcaagcaatccttctgccttgggctcccaaagtgttgggattactggtgtgaatcaccatacatggctacagctgtactgctcagatcaggatacaccatgtacactcagtttggttctgggagtcacgtacaaaaagagcaccagagcacaggagggtgaacaccttcgaagggacctgccttcaagaagggaacacacttgtactgtgtgacccagagctgggctgggattcctgccctgacataatttgagaaatggccatggagaggttgggcttgctttctcttggggcctagggctttgtctggactcgccagggcttccatcttggaagcgaacagctttgctggggaaggcctggtcctaggggatgaggaaggctgttcttgggctcttgacttgcactgatttcccctttagatcccagtgcttgctatgtctcagctccactgtcttccagcctctagtatcctttctttgccaggtcctagaatgtttttcaagctccagggctgttgctgactacctgctttgtgcctctgtccattttttcagggcctctaggactgcctggttccactctcatttatcctagaacaccaactcagttgagctcccaaggataggcaggaactgagtcttatctggcattccataaagctgggcactttagatattccttatagaaacatttttggtgtttaaggtcagagctgggctaagggtagcacccgtgaaaggcaggatctacgggtcctggggctgacttctctcccatgaccacttctaggaccgagaggagcggaagctgctgctggaccctagcagcccccctaccaaagctctcaatggagccgagcccaactaccacagcctgccttccgctcgcactgatgagcaggccctgctctcttccatccttgccaagacagccaggtaagtgtcagaggaccaggcctgggtcagagctcctctatccatattaaaggctaggatagaaggagccaggctcaggacatgggggatgggacaaggtcactggggagaggtgcctccatgtccagccctgctccagtaggcaggagggaaactggtgtcagatagccctggagttggtacctggcactgagtcctgtttgtccttctcggaagcacctgtcatgtcatctctgtctcctctccccatagcaacatcattgatgtgtctgctgcagactcacagggcatggagcagcatgagtacatggaccgtgccaggcagtacaggtgagcacctggccagcgtgggtccctcaggctacttgggctcccaccct

SEQ ID NO: 66175 - DNA, 1001 bp, Homo sapiens
gcttacctgggctggaggaccagagcacaggacaggtcggggagtccagggcctgctgcgggggataaccctgaggtaggaggctggaatggctttcaattattcatgctgaggctgctgctgtcacctgagacctgcagttcaagttaccagccccagggacgagcttgagctgcctcctacccttcaggaacctcaaaagatttacagaacctcagggtcttgatttgaggggttataagaggtatgagatctggtgacttctccaatactttggatcagaagatggggcatggggtgagccaaggtgatggggtgactgtaacatgctcattgatatgcaagttttctgtaagcaaggccatgccttgggctacagggaagagtcagaacctgtcactgtgctccaggaactcccaagtttggtaggtgagactgacccaggaacagagaatacaatatagtgtgatcactattggatgttccatgactacagggactttggctgttttgtgaactgctgcatatccagatataacaatgtgtggcacatagtagacgctcagcaaatatttgttgattcaataaatgcatgaattaacactggatgaggattaagcatagggagctgggcatgtccagagaatggagtcagagaaggtaatcaggaggacattgtactgagtctcgaagacagtaaagacagtaggcagaccaggctgcatgtacaaagtccagtagatcaatcaggaaactacattatttctctatgtccagtgaaacacattgctgacccctccacccctcaccccagaacatgcagtgggagaggtgtcaggctcttgttatgtcagacgggtaatgtgccaaaacaagatttgagggtggcacatttgatacatgctggtgaacacccaatcacacgctcatgaacaacaaatggatcactatacaatcttggacggacttggacctgtgttcagggcccaagggaagacatg

SEQ ID NO: 66176 - DNA, 4226 bp, Homo sapiens
cgtcacatccggtttagtgggcgggagcggggaaaacaaaaggagacgaaggacgcatgcgtttggtgagtcccggattctggtgggttcttccgctcaggctgggtgaagcgcttccgggtcgccgccggcagcagcctcccggcgcggtaagtacagacgcaaggctgcaaccgtctccttgccccttcattcctttttcccccagagaaacccatttcctttgacccgactccccaggagctccatattgagagtccttaacccttaaagagctccagctcattggccgcttcctcgagactaagccccaccccgtcacacaaggtccgtcattcattggtgtcacttcctgtcacccagcatttctttcagttaattggtcctacccaggccccgcttttttcgcgtttagcaaccctataaggccaaatttctgtctgagacccgccctgctttctttctgttggtcaactgcatggtcattatcgtaatgagcaaagaaagggcggtggctttgcgacggtgggttgggctttcggagccgagatcgctggtctgtcagtacttcttggacatgagggtgtttaccgtcgtgcctaattacgcgggttgggaatctgagatacagggaagggcagcggctggccctgggtcggtcagataaattaagacaaaagcaggaccaggcatcgattattttctcctgctcatccctttcacggaggaattctaagccccgacacactgtatgacctaaagccagtctctgcctgtcgctgggcctcagttcgcctgtcctaagtttaattcagattatctggcactcctggtcggctccctcagccgctcaaagctgattgtacccttataatgttagttcatccattcaatcttccatctacttatttatccacttattcatgcctcctagaatgtcttactgaaccctgcttgcatatgctacaatccctccaccccgacatttggctgtgattcatgagaggtcgttagtgtcctaaatttctgacactgggtgggtgtggtatgggccatcataaagggtcaaaaagcaggttttagtgtgtggaggaggtagggatagtttcagtagaaccctgctacctctaattttgtataatttcataatgccagtctgcattctggattcctatccctacacttgactcccattctcatccctccttgaacagcctgcaaacagctttgttgatccattatttacttaattatcagaataactttgacagtggtataattgttattatccccattttacagatgaagacactgaggctcagagaggttaagtgactcagccaaggtcaaacagctagtaagtggtggagccaggactcaaagccaggtctgtctgattcctagggggaggggctgctttcctgctgtcttccaccctatccctaaatcaaattacaaccaaattaaaaacaaaaacaaagcaaaacacattcacttgaccctttccctcagtctaggagccatgtccactttgttcccctcactcttccctcgtgtgactgagactctgtggtttaatctggatcgaccctgtgtggaagagacagagctgcagcagcaggaacagcagcatcaggcctgggtgagtgagcagctagcacagcacagagacctcagcacagacagagacctccttcagtgggccatgacccagccttactccagaaatctacccaggaagagctttttgccctgagctgggaataatcgggctgggagccagggagccaaggttctcatcttgtggtaccctattttacaggggtaccatgtgacttctgggccagattagagcccaggctgctgacactcagcccaagctcttttccctaaagcacaggaaataattttgactattaattgaggatctagcagatgatgctttctaggctgataagtctctcacttcatcctcaccataattatacaaaaaaaagaaggctcagagagtttaagtatttggatcaagttcataaatggcagatgacaagaaagggattgtatctccctgagaactgggaggaagcttctccccaacacgtgtgggttgtcttctgggcagaatgggccagtcccatgcccctgacctgccctacttgggctctggccttgttcctctgtgcctttgcccacagctccaaagcatcgcggagaaagacaacaacctggttcctattggcaagccagcctcagaggtgagtggctctagcaggtggggcctgtgtgggggccgcagtggaccgaggctctgctctaattctgaatgtcctgtctctgacccagagcagttgtggttctcagatctgggtaaaagcctaaaaggggagatagaaggggtgggcattgggcctagcattaaggtcctgcagaacatgcaccagcctgctagactcaaggagggagtgtcggggtagggggtcattcattggccctagagagaggctcaagtgggtcagttcttgaactggtccatgcaggcctgtagggcttacaggctctgtcctgcccaccagcactatgatgacgaggaagaagaggatgatgaagatgatgaggatagtgaagaggactcagaggatgatgaggatatgcaggacatggacgagatgaatgactacaatgagtcaccggatgatggagaggtcaatgaggtaggcaaggggtatgggggagggcctctgttcctggacccttgctcctgacccagttgatggccaaggggtacagaaaccctggatccagccaggggcaggatctggggctgaggctggctgaggcccctccccacccacacccagcctcctctccaggtggacatggaaggcaacgaacaggatcaggaccagtggatgatctaggtagacaaggcagggtggcctcagggagattccaggccagcccaaactaccctgcatcccaacccccaacccctgcccacagaaccagctgatggccccagtgcctgaaagtgcccttgggcacctcctcagctgctgccaggatctggtctctttggcccctcccaggccatcagtctgcacttgaaatccccagggcctgaaacctactccaccttcctggccagtacctcaccccttgattgccaggtctggtctaagtttctttaataaagacaaaggagtgattttccacccatgtctattccctatttgttggtggggcccagaggagtccagcatcttcttttgggctttaggaagagggcactcaagggacatcagccacacctaattggctaggtgggccagagttagggaaggccagggcatccctggccctgggtccagggttctgtgccattttctctggcccagcttgcatccagctattcctgcagggcgtctaactcattgccacttcctctgatcccacccagaatggcatgggctgaggatgggaggctttctgaggccgagaactgggaggcccctggagctctcccatccagcttccttcgtgttaagagagaagattaaatctcagagcaaggtggggattcccttggagtcactcagcaaatcagtgacagagctgggtcgggagctcaggcttcttgctgtcagtccatggttctctctggaaagagggggcctagtgagaccaagcagcctgatagaacttgacacttgaggtcagtgtagaggctgaaagaggtcagaggtgggaagagagactccctagccctgagcccagcgtgtgtcaaggccccaaacaggaaagggaggggattttgaggtccctgcttgggtgggggtgggggtgggcatcagtaagtacccctgggcctggacctcagcctggtccagcataggtgagctgagctattccatccttgatggcagggaagtctggaaggccagtgtggtggaggcggcagcggtagcggccacagctcttagcatactgcaagaagcggggtgcaccagggaagagcacatggtcagccagcacggtggcacctgctggcagtagggcatgggcctccagcagctgcaggtccctcaggtaacatcgtggccggtgtgccaggagcaccaggtctgcccgactcagctgatactgggtgcgtaggcacgggatcacgtcctctgagctgcccacgatgagctccacctgtggggatagggggagctggaggtgagggt

SEQ ID NO: 66177 - DNA, 1052 bp, Homo sapiens
acctgaaggtgagactaggcaggtgggaaaggagcttgcagagtgatgctgctcaaaaggacaggaagagagcctggcttcagaagcagccacagcaagagagactactgactgaacaggtgggctccactgggggctggggaaaggattttctcagcccccatccccagcactgtgtgttggccgcacccatgagagcctcagcactctgaaggtgcagggggcaaaggccaaaagagctctggcctgaacttgggtggtccctactgtgtgacttggggcatggccctcatctgtgctgaaatgattccacaaagattaaactggctatcatttgttgatttcccccttcttacatttaatccttgcaggagaaagctaagcctcaagatagtttgcttctctttcccccaaggccaaggagaaggtggagtgagggctggggtcgggacaggttgaacgggaaccctgtgctctaaacagttagggtttgttcccgcaggaactgaacccaaaggatcacctggtattccctgagagtacagatttctccggcgtggccctcaaggttagtgagtgagcaggtccacaggggcatgattggatcctggaatgaatgaatcaaccatgagagagtgaatgaacactggaatcaatagagtagcagagtaatggattgtggagcaggaaagagagctgctgggtgggaattcaattccaggcttatatgagccctgctgtgcagtcggcctggagacagcccagctcaggccctgcctagacccctgtcaaggaggccctgtcaagaggagaggaggggcagcacgggggcaaggcaagcttgtgagcgggaaaggcatgtccactttagcgactggtatgtggaagatgagttagaggagacagatggagagaagtcataggaaataaattctgagcattttaggagggcccagacacctggtgtccagtggagtgaaggaaacagtcgcctcccaaaattcagtgtctgaggtcaaaggattgaagttctgtgatgaccaaggagaagc

SEQ ID NO: 66178 - DNA, 1041 bp, Homo sapiens
gtgccactgaccacagctctttcttcagggacagacatggctcagcggatgacaacacagctgctgctccttctagtgtgggtggctgtagtaggggaggctcagacaaggattgcatgggccaggactgagcttctcaatgtctgcatgaacgccaagcaccacaaggaaaagccaggccccgaggacaagttgcatgagcaggtgggccagggggtgatctggggtggtgagggactggctcaggaagaggaaacgaggacatggaaatgccaaaccccattcactggtgaactgaagtggaggagcccttcagtttgcattaatatgggtgactatttcacagacactgtgccaaatgtcggtacaatgccaacagttcaccttcttggttgttgagtttccgcattacagaaataaggaagcaggcccaaaggagagcctgggaaatgaagttggagtgacccatcctggggttgcttgatttagggatttagactgggaatgactcctccaaagatctgagggaagaaactgcacactgtgcatagtggcctcttttctgccagccctaaacagctcaagaagggagagtctctcacattatgaggctgtgtgcaaagcattcttttttttttttcctgagacaaagtctccatatgttgcccaggctggtctcaaattcctggactcaagtgatcctcccacctcagcctcccaaagtgtgggattacagaaatgagccgtacgccctcctgaagcatcttggttcatgcatctcgcaaaactttgggctgtgtctctcgaccacattggacctgaggtctccctataacatttattttgctaccacccctttaatatcctgaacatgatgatataactaaagaaaaagcagaggaaaagtaatttgtaggccaggtgttacggctcacgcctgtaatcccaacactgtgggatgtcgagatgggcagatcacttgagctcaggagttcgagaccagcctgggcaagatggcaaaaccccatctctactaaaaaa

SEQ ID NO: 66179 - DNA, 1872 bp, Homo sapiens
ctcagtgaggcttaatctgaccgcactattacactacaagtccccatccgtctctgcttaatttttgtccaaagcaaaaatcaggtgatgtgttcattgttgtaaccccagtttctacaaaagtacctgggtgagagtaagtaggatctcaataaaggttgaattaacaaattttgtaatgactgcaactccagcaggagctcccttttgggctcccactgtctctgacggccctctcccctaaagaggtcccaatagcaagtattttcctgggtgacttccagtgggctggggaatcaaggactaagaggggagacactgcatgtggaatattctggctgtgctggctgtgctggctgtggactgagtcctctgtcttcccccatccagtgtcgaccctggaggaagaatgcctgctgttctaccaacaccagccaggaagcccataaggatgtttcctacctatatagattcaactggaaccactgtggagagatggcacctgcctgcaaacggcatttcatccaggacacctgcctctacgagtgctcccccaacttggggccctggatccagcaggtatgcatggcttcctgcaggtacaagacctagcggagcagctgagctttccaggcatctctgcaggctgcaaccccagctccagttctattcggggctgagttgctgggattcttgaacctgagcccttcttttgtatcaaaatcacccaggtggatcagagctggcgcaaagagcgggtactgaacgtgcccctgtgcaaagaggactgtgagcaatggtgggaagattgtcgcacctcctacacctgcaagagcaactggcacaagggctggaactggacttcaggtgagggctggggtgggcaggaatggagggatttggaagtggaggtgtgtgggtgtggaacaggtatgtgacaatttggagttgtagggctggcagacctcaagatagttccgggcccagtggctaaaggtcttccctcctctctacagggtttaacaagtgcgcagtgggagctgcctgccaacctttccatttctacttccccacacccactgttctgtgcaatgaaatctggactcactcctacaaggtcagcaactacagccgagggagtggccgctgcatccagatgtggttcgacccagcccagggcaaccccaatgaggaggtggcgaggttctatgctgcagccatgagtggggctgggccctgggcagcctggcctttcctgcttagcctggccctaatgctgctgtggctgctcagctgacctccttttaccttctgatacctggaaatccctgccctgttcagccccacagctcccaactatttggttcctgctccatggtcgggcctctgacagccactttgaataaaccagacaccgcacatgtgtcttgagaattatttggatatgaatgggaacgtgactgttttgttttccaattcccattgattgaaaccagtgagactgggccaattcctagctctgacagttgctataaactagcctgatacttaactatttttctaacttaggagacattcgtagctctcaatttcattttttactattgctccaatctagagccaagcccaggaatttttcatttgtttgttttgagacagggtctcacccaggaatattttgtttgttttgagacaggatctcactctgtcaccaggctggagtgcagtggcatgaccttgattcactgtaacatctgcctcctgggctcaagtgatcctcccacctcagcctctcaacttgagactgcaaccatgtgccaccacacctggctaattttttttttttttttgagatggagtttcgctcttgtt

SEQ ID NO: 66180 - DNA, 1081 bp, Homo sapiens
gggcggcgcggggcggggcgggcggcgcggagggcgggggcgcgcgcggatggccatcttaagtggccgcctggagcccagggccgctgtccggggaagggggcgccggagcagcccgggaggtgggggtctgcgtgcggcggccgggatcccgggagggaactttctactagacgggccagggatcctcctggcttcggactgctgaaccccctcaaggcccggcctgcgggtgtggggggtggtgctggggaacttggccgagagggggaagggctctgcggggctgggaggggctgcgtgagaggctcgagaacgtcgcacctcgtctgggccccccgccagagtaagaatcttcagaagcctggttagccagggaatctccccgcaggctttgccgggggacggttcccgtggagttgggggttcagatctaagagggggctgcatttcgcaggagttgggggccccgcccgcttgggtggagggaagaggatgggtagggggtggtcctggatccttcgcaggtttggggaactcgatgcagccaagctgtaagggggacgagaggaagagccatggagtggaatcagacctttatggggcttaggggtcatatcattgggagaactgagaagcgctgaattctccagggggtgcctggatcccgaagtgtcggggccaggatggggggactcggatttcgatggggatttggggactggatctcctcgggtgaatgatgggggcaggatcattgtggggtctgggaggtcccgggcccttcgggaaggtgggggcaccgtccccgcaggaggagctgggggcaggggcggcccgggctgcgggccgagcggagggggagggggcggcagccggccctgcgctccgctcctgcccctcccccgccgcctctgaacaaacttttctttctcttcaagttgaggccggcgctgcaggcagcggcggctgcgcggtgaacgaggcggcctgcgcggcggagtgctgagtcccgatccccggctctgtccggcccacggatcctcaagcccgggccccgggcccggccccagcctcagcc

SEQ ID NO: 66181 - DNA, 1009 bp, Homo sapiens
gcctgggggtgacagattctggccctgccttggcatcaggtatcagaagcatgtgcacacgtatcgcattctgcctgatggagaagatttcttggctgtgcaggtaggagcttgggcccctgacccctgaccttgatccagcctagggcttggggacctgctggctgacccttcctcccacccttgctggcccacagacctcgcagggtgtgcctgtgcgccgcttccagaccctgggtgagctcatcggcctgtacgcccagcccaaccagggccttgtgtgcgccctgcttcttcctgtagagggtgagcgagagccggacccaccggatgaccgggatgcctcaggtacttcccagtgtgcaggtcccctccctgcccctgtcccttggctctacctgcctcttcccatccccccttctcaaccccacctctcctgtaaccccctttcccttggccatgatgccggggccctttaaccctctttccatggaagtcactttacagctgcatcgtgcctcctactccactgagtgtgggaggcccaaacggctgcccactgacccctgcccacagatggggaggatgagaagcccccgctgcccccgcgctctggctccaccagcatttctgcccccactgggcccagcagtcccctgccagctcctgagactcccacagctccagctgctgagaggtgagacccccatcccatccactgaacaggagaccctttctcctctgagaactatttccctaccaaaggtggggaggccttctaagaccccaccagggacccccaccccacctcagcccagaggcagataacctgatccatcccgccctggttgccacaggtactatctcctctagggatggggcagaggtgctgggacaggtcagcaggacctccactgacttcttaacccctccccaaagtgctcccaatgggctgagcaccgtctcgcacgactacctgaaaggcagctatgggctggacctggaagct

SEQ ID NO: 66182 - DNA, 1047 bp, Homo sapiens
gccacctgccccacctcacccgtaccctcgctacctcatgccggaggctgcacaggtatctgggacatccagccccatgtattacacccttacctctgacctgtcctcacctgcttcccggctgcacaggtgccctgatctctgatcctgaacagtgaactagccattgcctcttgactttcctcactggtagcctttatccttgtggtgaggttgaggctacacccagcgcccccttccctatacttaggtcggggtgggagttcttttgatctgatgtcttccctagtgaggtggacaaggtcctgtcaggcctggagatcctgtccaaggtgtttgaccagcagagctcgcccatggtgacccgccttttgcagcagcaggtagattgtagggagacctctgggaggtgcgttcgtgttctggagctgggtgggaggctctgcttaggtgactcatgtacaagcctggttcttcctccccccagaacctgccacagacaggggagcaggaactagagagcctggtgctgaagctgtcagtgctaaaggacttcctgtcaggcatccagaagaaggtggcatgatctctgacccttgacccccgattcactggccactgtcattggcctagcactgatctcaaccctcagtctacaacttaacattggccccaaggtcaattgtgtccctccctgccccagccttcagtgtgtcccctgaccccgccctgcccttgttccctccaggccctgaaggccctacaggacatgagctccacagcacccccagctccgcagccatccacacgtaaggccaagaccatccccgtgcaggcctttgaggtacatggcagtggggcctcacagggccaagggtggttggaggtgaccagggtgctgcctactccaaggtcttgtcagcagcctccccacctggcctacaggtgaagctagatgtgaccctgggtgacctgaccaagattgggaagtcacagaagttcacgctgagcgtggatgtggagggtgggcggctggtgctgctgcgg

SEQ ID NO: 66183 - DNA, 1067 bp, Homo sapiens
atgtcacagcgtctggtgggctcagcgggaggatcctctcactgcagctttgagaggcagaagggagagttgggagccctctgaggatgacccaggccttcctctcttgcttgccttaacagggaacaagggggctgtgggcgtctccttcatgtttaatggcacctcatttggctttgtgaattgtcacctcacctcgggaaatgagaagacggctcggtgagggggcgcctttcccatggtctctttacacccatcccattcacctgaggcctgttcccgctcccataccctagcccatgaccctcccgcaggcctgtctccagagaccccctgctctcttatcccaattcaagacccttctgttcctgaccctaaccttgtccccaggggcccggatctttaccccatccctgactcctgagacttcttccctttatgcctatccctgacttctggccctgaccctggggatctacccctccccaccacgcacccctcaccctaggaggaaccaaaactacttggacatcctgcggctgctctcgctgggcgaccggcagctcaatgcctttgacatctctctgcgtttcacacacctcttctggtttggggacctcaactaccgcctggacatggatatccaggtgcgagcagggccctgccatggctgtagggaggctaagggccacatgggctatcacccctggctctggctccggaggaatgtttctagcctttgtgtcctccaccccaggagatcctgaactacatcagcaggaaagagtttgagcccctcctcagggtggaccagctcaacctggagcgggagaagcacaaggtcttccttcgattcagtgagtgtgggcctggtaggtggtgatctgagggctaggagacttgcagtatccctgggtgtcagggccctgaaccccacctgtctcctgctttccttaggtgaggaggagatctccttcccacccacctaccgctatgagcggggttcccgggacacatatgcctggcacaagcagaagccaactggggtgagccaagaaaacggcatg

SEQ ID NO: 66184 - DNA, 1086 bp, Homo sapiens
tgggaggcaagagggtgcagtcagccccctacttagggggaaaggaagctgagaggtggtgctcagttgggtgtctcccacccccaccccagaatacaagaagagctttgagaatgatgcccagagcagtgacaacatcaacttcctcaaagtgcagtggtcttcacgccagctgcccacggtgaggctgtgggcagggcccctgcttatgggtgagggcacagagaggggtacataagagtttattggagagcctgcctgggagggagtgtggggccagcagagagagagagagagagtgtgtgtgtgtgtgtgtgtgtgtgtgtgtgtatgggcatgggcatgagtgaggataaaggcgtttgctttattttgggagtgtggaaccttgttgcagtttgttcattcattcaggagatgcttcttgagcttttgctagatgtcaggtcctgtgttagctattgagaaaattaattagttacagtgatgctaggtgctgtaaaaggcctgtatagggctgtgtcttctgcattaaggatttggctcttctctgaagagttgagtgtgagtgagcacagatgacctgagggtggggattgagtggtgtcagggggcagcgcgtaggaggggcaggaggaagtggcggggctttgttcctcactgggcctccctgcttcccagctcaaaccaattctggctgatatcgagtacctgcaggaccagcacctcctgctcacagtcaagtccatggatggctatgaatcctatggtgaggggtgaggggtgctgaggggaacaggaagccagacagggccctagattagcttggtaatttgctggtttgtcccatctgctcctcaggggagtgtgtggttgcactcaaatccatgatcggcagcacggcccaacagttcctgaccttcctatcccaccgtggcgaggagacaggcaatatcagaggctccatgaaggtgcgggtgcccacggagcgcctgggcacccgtgagcggctctacggtggggactccactgggacatgagatagggtggtgtgaacagatcaaggagggcagggtgcggggggca

SEQ ID NO: 66185 - DNA, 1058 bp, Homo sapiens
agtggccattacagtgcctgctccacagcttgggcaccaccggcaccctcgtgtgggagaggggagttcttcagatgaggagtctggaggcacactgccccctccagactttccacctccaccactgccggactcagccatcttcctgccccccagcctggatcctttaccagggccagtggtccggggccgtggtggggctgaggcccgtggcccaccacctcccaaggcccatccaaggcctccactgcccccaggcccctcaccagccagcactttcctgggggaagtggccagtggggatgaccggtcctgctcggtgctgcagatggccaagacgctgagcgaggtggactatgcccctgctgggcctgcacgctcagcgctcctcccaggccccctggagctgcagcccccccggggactgccctcggactatggccggcccctcagcttccctccaccccgcatccgggagagcatccaggaagacctggcagaggaggtgtgtggagcagggtggctgtctgtgtgtgcctgagtgtgcttgcccacagactggtaccctttcactccaccattcagcactcatggtgtccctgctaccctgaactgatcactgggaagttgggagacacatgtatcagcccagcccttcccttccttttccccagagcatgcagcagaatgtgactgcaggtgtttctatggggggcactcagctccccctgacatgccctgtttccttaggctccgtgcctgcagggcgggcgggccagcgggctgggcgaggcaggcatgagtgcctggctgcgggccatcggcttggagcgctatgaggagggcctggtgcataatggctgggacgacctggagtttctcaggtgggggaggggctggccccgggggcggagctggggccctcaggatccccttgcccatctcacttcccagcctgttttactccacagtgacatcaccgaggaggacttggaggaggctggggtgcaggacccggctcacaagcgcctccttctggacaccctgcagctcagcaa

SEQ ID NO: 66186 - DNA, 1058 bp, Homo sapiens
tgtgcctggatccttacccctgcattattctttgccagagatatattttaaaattttttaattgtcatgaaagtcagcttgggtttaaaaataaataaaaaaatttttaaaaagagggagaaggggttgtcgtggtggtggtggttaaatagctgatttatttaatgtgccaggcactgttccaacacttcatatattttaattcatctaatcataaaatgaactaatttaagctgggcatggtggcctgtgcctgaagtcctagctactggagaggctgaggcaggaggatcatttgagtccaggagttcgaggatgcagtgatcgtgccactgcactccagcctgggcaacagagagacatcctgtctctaaaaaacaaacaaaaactagtttgcagatgagaaaactgaggcacagagaggttgaataacttaccctaagtcacacagctcatcaatggtggaaccagagttgaaacccagcaaccaggctccagaatttgtcatcattcttggaagtgaagctgtcctgctctgcaaggaggcttcacagcaagattgcagtgacagtgtttcatgctagagcatttttagctcccccaggagtacacacattttgggggtggaggccttagtcaggatgagctccccatatcagactctcaaccaccagccgttctggtatgaagcccttgcagagtccttcccactctgcctgtctccttcttctttgatggtgagttctcaggaagcctctttgcctacccctatcacacatgcacacacacacgtgcacacatgtgcaggctggcttccaaagttccctcacctctgccatctgagagacctgtctatataggtctgaacccagtagtggacatggtttaaaacacttccttggaatgcttctcagctcctatgctgatcagcagatgcaaatggatgcctgcagagcagaaaccccaactccacatcctgcggcctggaaaggccagttcctgcccagctaaccctgtagcatcttacaataaagcttctaatcaccactaccatttgt

SEQ ID NO: 66187 - DNA, 1004 bp, Homo sapiens
taaaaatacaaaaattagccaggcgtggtggcgggcgcctgtagtctcagctactcgggaggctgaggcaggagaatcgcttgaacccgggaggtggaggttgcagtgagccgaaattgtgccactgcactccagcctggtgacagagccagcctccgtctccaacaaaaacaaacaaaaaaagaattacttcttccagagattctctgccagaactcctaggtggtgttggacccatatcttttacttccatagcatcccaggctcagctcacttgtcctacttgttctgtgtcttcatcactagaatgtaagttctaagagggcagatgccaagctgttcagccattcacagaacctggcacagtgcaggcatatgacagatgttcctttattattatacttgggtgagtggatgggacctgcagcaagtgcagatcttctcagtgggctctggaacagaaaagtattgtttgtttgctcagcatatttttatttgtcccatgttgctgtggccaggatttgagctctgagacaatgcagcaaggtgagacccagatttcttttgttttgttttgttttttgagacagagtcttgctctgtcgcccaggctggagtgcggtggtgcaatcttggctcactgcaacctccacctccagttcaagcaggtctcatgcctcagcctcctcagtagctgggactacaggcatatgccaccatacccagctaattttttttgtatttttagtaaagacggggtttcaccatgtttgccaggctagtctcaaactcctggtctcaagtgatccacccaccttggcctcccagagtgctgagattacaagcgtcaacgactgtacccggccccaaattccttattgaggatcctagaatacatgagaccagacttggaaatgaaagtgtaacatgtttattgttcaaaaagaaaaactcaaaggtgtgtagtgattttaaaatttagggaaattcctcaatatagtgaa

SEQ ID NO: 66188 - DNA, 1847 bp, Homo sapiens
cctcctgaaggaggtgagaactgagagtgctaaggcctgcccaggcacatagctccctgactgtacactcccttccttcccttcccagggccggctgacagatggaaaagggaagaccattgattgcaaggacgccatcttcatcatgacctccaatgtggccagcgacgagatcgcacagcacgcgctgcagctgaggcaggaagctttggagatgagccgtaaccgtattgccgaaaacctgggtatggcggctgacctgagcagtctggtccagtgaccaagccaccagcctatctcctggggaaggatgggattggggccctgggcccaggtgaaggttctagtgggcagctctgtccctagctgacactgagcagatatcagacaccataccaagtagtgggggttgagacaaaagagacagagaccccacttcaagaaagcctcaagtctgttgggtgataagagggctccaggcaggaatggacagagctacaccagggtggggggccagaagctgctcagtgtcttaggggactgaggagatgcacatgcaagagacacagatgctttggtgcaagaaggggacagcagatcgaaaactctatggcagtggacacagccttgttcacccagggcagcttcctgcgtaggtgggccatggagagtgctgaaaaaaaggagcacatccggcaggaagctgtgtctgtcaccttttccattcaagatcgagccctgcagcccccttcctccaagtcaggactcaagtcttaatcctgacgtttcctctcctctccctccctcacacaactcccaccctgaggaatcgcagacttcatacacttgagagctggaaaggcctccgaaagtgcctggtcagaggaggagaccaggctgaagcccagagagccttagaccttgaccaggaccacacagatggacaggaccagggctctttccatgggcaggccaaggggcaggcacagcccccaaagttccctgaatgtggggaataagcagtttatgattcttctccacaggggatgtccagataagtgacaagatcaccatctcaaagaacttcaaggagaatgtgattcgccctatcctgaaagtaagaggtctttcttggcacttcctgctggagcctaaggttgggggagggtgatcttagccatcctaaagatctggaagccccataatttccccagtcttcccctggtgtctggtaatttccctaacccgctctgggtcactgagctcatcccacccctaacctggcccttcaggctcacttccggagggatgagtttctgggacggatcaatgagatcgtctacttcctccccttctgccactcggagctcatccaactcgtcaacaaggaactaaacttctgggccaagagagtaagagggaactgcccatgggtgggggcgggatagccagccactggaaatctggaacactggactgggggcacccccacacacataaaaggtggagcacagtggtgtggggccagtggccctggcctcaggccagagtggcaagagatggaaagcagtgggccacatgcaggcatgcttctatctgacccatctcaggccaagcaaaggcacaacatcacgctgctctgggaccgcgaggtggcagatgtgctggtcgacggctacaatgtgcactatggcgcccgctccatcaaacatgaggtgagcacaggagcctgagaaatgaggcgcctccacacctccctccccagggccccccagacccagtccctgagctctcagcctgcctccctatagcttggttgctggatattcacacccagagtggatgcc

SEQ ID NO: 66189 - DNA, 1052 bp, Homo sapiens
tccattgaccaaagctgccatccaggtttactcgatttaggctctttgaggatgggcccttgtcatgttcacttgaaccattcccagagcccacaaagtcaggggaaatgttgtattgactaatttaattcaacagtagttttaattcaacagtagttagcaaaccttcaaagggttagtaagtgctaggtgaacagagtggcggggctggcagtagaaacctaatgtataaaagtacagggcatgaaacaggctggcatgctcagggaactgcagctggtcagtactgctcgattgcagagggaaaacaaggacagagtgctagagacaaggtaggtaaggtaaacagggcccagttaaaatgccaggcacagaagtttgcatttctctggtagagagtaaggagccttttaaagactttaagcaagaaagaaacagtcaaattttcactttacaaagatgccgtgggcagctgtgtaaagaatggatgagaagggagagggtcattaacaaggagactgctggggagcccaagctacagctggggaggccatgggctggagaaactactagaaggttgactgaggagaggaggaggagccaagggtggccagttggctgctgccagttggccatcagctaaggcggcgaacacagtgggaagccgcagattgaagaggaaggtgaggcactgaggtgtggaaatgttgaaggtgagatacctgagggacatccagatggagatggccaaggggccgttcatcagttttatgggtcaggagtttaggaaaggtctgactgaaaatagcagttcaggaatccttcagcccagagaggttaacggaagccacaggaatggatgaggtctgtaacccagggagtgtataatgtgcagagaaaagagggctatacacagagccttgggacctatcagggaagtcaagacagactcgccagagaagtaggaggcaaaaccaggccaggcatgatgggtcacacctgtaatcccagcactttggaaggccgaggtgggcagatcacttgaattcagg

SEQ ID NO: 66190 - DNA, 1829 bp, Homo sapiens
tctgtgggttccccttatagccagcctttccagagatcctgggccagttagtttagacaaaatctggattcttgcccaggagagaggttatactgagctttttctcaggcctctttcaggattctcagggagcattttctgggcaggcagaagtggctagtctgatgtccatgaatttgcacagcttccatctgtttctactgaggccagaagtagagagaaagtcgtattttaggcaggaacattagagatcgagatgagaaagaccactggcttgaggctgaactcctaaaacagtattccagaccttcacagtctggtcccaccccaccactcctcatgatcattcctgtctctccacctctgacatgctggccacctttgcctcttcaaatcctgcccatcctccatgatccatcaccagtcctgcctcttccagagaaccttcccagacctctgcagtcgtttctttgaaatccaaccacacagtatagtagttaggatcttggcaactcaagatgggcagacacatcccaaacactgtcaaatctttccccattgactagtgttccaggccttgttctctgacatctatcccttagctaattttcccctgacaccctggggaccagatcagacatgctgttccatttgcagactgaccttgacattacacagtactctctttcctgctcctgactgccgtgtttccattagtgcaaccaaaattcatacttttttgagcagccatatgttacttttttaaaaaaagacgacaggtttagagagagaagcaactctgccatctactagttgtgtgacttgggcaagtctctatctgttgcctcagtttcgtgttcagtataatggagttgagaatactactttcctctccgggtatttgtgtgggtcttgaatagatacgttgttggtgaattttcccattgtgcttagcatacagcatgttcagtgcatgattcttcttgcagttctgcctcactccacccccactcgtatacttgagaatgtttctgagcctgattctcctactccataattaagcacttagttttctcagattgaatgcatagcccttaattacatacgtcctcttgaagaggaggtcaggtcttgctctagcagagttgagcctccaaggaacctggtacctatctgtcccactccccgtgctccccactccctccaccactggaggctatggtcagcatctctggtaaccatgtggcttaccccttccatgccctgagctccacattgcctttgattgacttccagaaaatgcatttggctgtgtttccactttctgacccagacagtggaccagaccttagcttccccagacaggaaagagtccagggctcacaccccacatccccaagggcctgccatgggcttctgcctcttgtatttgcataggaggcggcccgtagtcccactagcgatgagtagatgagtaaccagtgagagcagaagttcctctcgaattctccttcaccagtcccccacccccttcacctccattcaccatccacccgcctttcagtttccctagcaacgctgagtgctcatcctggaaaactttatccgaaatctgctctgggcagctttccaaatccatgctaacctgattacgtgtctctaggggccttgccagctaatcagattaggcagcactaatggtagtgaggactttgagtgggcgcagagcagtaaaacatattgtatacttagtgataattatcctgccttttgtgtcattgatttatctgcctccctccctgtcccctgatcttgtgtgtttggccgta

SEQ ID NO: 66191 - DNA, 1027 bp, Homo sapiens
agggcacccaggacacccagcacctgctcccatggaatatggtcagattgggggcacaccctccctgccagacacaagggcacaggtagatgaaacaccttacactgcccgtctctgagcctcggtatcctgtgtaaaatggagataacacctacttatcaggattattaggaggatgaaagagttactgtaaaataccaaagctaatggtaactaccattgctgctgctatgactaccattatttttactcttattgttatcccactcctcgccacttacaaattgctttcatcaccattaacttgtttaatctgcatgtggggctgacacagtatatgtgactgttcccattttatagaggaagaaacggaggctctaaaggaataagtgttttatttaaagtcagtcagctggtaagtgacagaggcgggactccatgctagatcctgtaactcctgccctctccactataccacccggtagatgaatgcatgccagagaatacagacctgcaagttaatggctagatgtggtgtggtggagtgaatcaaaaagagctgttgcaggtgagttttcagatggtccagtagtgacaagcatggccaggagaaagcagaacacaagccaggtgggcacccggcactacctgctgggaggcagagcagcctgcctggagcttgtggcgatgggactggccagagaagggagccaggctgcctgtgcagagggccctgacaccatctctagcccaagagcagtgaccaagacagggttaggggacaggggctcctgaggccatgtgctgaatggctgagcaggccagattggaagactacagagaacgttttccaaggagtcagggtgtgaggaggtgctgtggcagcggagagtcagaggaggagagctgaccttcctctaagctcccatagtacagcgcaggctcaggctaagccagaactgagggtaaagcccagggtctttgtttcttccccctgtaaccttaagcaggtcacctaacttctgcg

SEQ ID NO: 66192 - DNA, 1062 bp, Homo sapiens
gacagagtgagactctgtctcaaaaaatatatatatataaaataaaagaagtcagtcattcatttcatatgttttttagcacaaactctgtgctaagcattgtgaaaagagcatgaagcagtaatcttctgcctgcctggcttaatctcagtgtcctttacatttttatcaagaagtctgatccattttctgaggttttagtgaattggcatagatatctgggactccaggctggggagaatcagaatgtactgaaatttaggccatggtttgaatctttcccaagaccatctagaaagctcctggaaaactaaccagttcacggtataactctccccaccccacctgtcacctccatagaagtcaaggagtcctttcctttgcccaagaaataaacaggaataccaaacaacctaaaaccatgacactgaagaagagttacaggaagtagaagtgtttccccagagaagactcagggaggccacactggtcatacccaaatcaacaaagtggaaagaaaagttatgttagactttgcctgtggcaaagggaaaagatacgttatgtgaggccccacagaccaatggatggaaggtacccagaggtggaattctctatcacgtaaggaaaactgacagcaaagatgagccacctcaggcagtggaggcacctctagagccgggtgagtgttgagactgcaccctgcagacctagggttcctagagatggagcctcgagagccgcctctggggcagtggtagcaaccaagtggactcggctcatggcttcggcttgagccagggtaactcttcttattatctgtggaattccacccacaattaaattagttaaaggattccagtaccaaaaacaaaaaggcactagattagacagtctgttatcaaaatgcagtgaaggagaagaggagtcacatttatcaaaggtttaataagggttaggtagaaggtagccattttggtcactcagactacctcttaatgctatgtgccagagactctgctaagaacttatatattaatgcattatctcatttaatcctca

SEQ ID NO: 66193 - DNA, 1016 bp, Homo sapiens
tcatgaatgaatgtttatctgtatgctgatatgttggaaaatatggacattttaatgaatacatgtatgaaattgtatgtttacatgtatttgtgctgcggtatattaacctgtgtatttgtttggcatactttcttagcatgttcaactgtgtgtgtttgtgtatgtataacacatctacgtgtgtgtagtatgttatcgaacatgtgtgcatgcacatgtaggagccccagtaccatgtttttccaccatttgtaggtgtccatggacattcccaacatagaaatcagagccttaagccacctccaagggaaggctgaggtcccactgatcgttcatagagcctctgtttatccttcttctcttgccaggagccaaccccctgcagaggaatgaaatgggacacacacccttggattatgcccgagaaggggaagtgatgaagcttctgaggacttctgaagccaaggtaagtctcagggaagggaggaggcctgtgggtactccatgcatcatttaatccttcactcattaaattatgtcaggctttacaccaaaggccacttctccttaggtgattattatctgtttaaatacagatattatctgtattattatctgttgattattatctgtttaaatacaaatccagcccccagtctcatcaagaataggaagctgcccctatcatgaccagggagcggccttggccacttctggcttctgagcattacctttaaatttggtttatgaagtgatggatctcccaggtccttttcagaggagggggttctagccagacaaaatccttagcccaagcaaagattttggtcatatttttcctaggcctcatgtattctacagtctcatcaaacaatcttttcttatcatcattctttctagaactattccttcacccctcccctccacacacactccagaaagcctagtatagaatctgagccaaaaaaccctccattctaattctgttttcccaaccaaacttttgaactcct

SEQ ID NO: 66194 - DNA, 1032 bp, Homo sapiens
agacatgctgccctgaggctccagaaccttggggagccttctccgtgaatggtcaggtggagcctgacctgagagcctcctgggctggagacaggcgccgtactgctttaaaaggagcccctgtgctggctggcccaggtgcagagatgtcctacctgtccccatcccatcctttatgagaagtgacacgactcctactagaaattactcagtggccaatgtttatggcacacatttttcattctgtaagcaaatatagatcactgacagcacttgtttgaagaggctaatctcactctgttcgttcttccactgtcttcctctgtcaccttctctcctcttgcccctcctcttctctctcccatttctttcttcctatccaaagcagaagctcttctctttgccattcttccccttccagaggtctctccctaaccctcccttccactgcagctcatatctagtgacagagctccccttgaggctaagaaaggacagacctttccactgcttctttgcagctccctttctgcctccgttgtggtttagctctgcggggaggggaggatgctgtctgccactggctcctcagcccttgcagagccgctcagtgctgagcgccagagaaagcaactcagtggggctgggccaggaaggctaggctaggcgaacaagtccctgagcactttgttccttcctgagccccccagtgccgcctgtccctccttcagcacactgatgacactcagtctgtgacctcctgtctccatgagctcctggagaggtggaattgtgctggactcgaactctaggtagcacctaataatcttaaagacaggaagaggagtctgcaaaagaaacagaagaaatggtcacaagagtgggaagaaaacctgaaaagtggttttatagaactcaaaggagagagtggccaaggtatcagttgctacagaacagtcgtgaaatataaagagggaaactattcattggctctgccaatccttcatcatcctgcacacagaggcttgcaga

SEQ ID NO: 66195 - DNA, 1121 bp, Homo sapiens
ataagagcaaaatgtcatgcacaaaaatgcacaaattctgtttcactgtacacttacattctcacagccagtagtaagtttaagcaagtgatttggccttgattaaactgttactggcctttagtaaccaaacgcatttttgaatttccacaggaactctgacttaatctaaactaaagccagccttccatgtgctgaggtctgtaatcaaagcacaagatactactgaaataaacttgtccatctcccctcaactggatcaggaactcctgaaaagcaagaacagtatcttcttactcacttttgtatccctagcacttaccatggtgccaaacacatagaagactcaaaaaaatatctttgaatggataacaattaatcttgaaaaaaaatctgtaaaccagtatataagtaggaaacctcctaagcggttgtccatttaatgcttgaacactttcagtgctggagaactcagttgctcttgaggctgctcatattctattttcggatgttcccatggttagaaatttagccaaaatctgcttctcagggttttaatattacccttggattcatgtagaatgaatctaatcccaatttaacatgatggcccttgaaatatctgaaaatgtccagcctaaaccctctacttccttaaactatttttctcaggtgccctctaaaccctttcctttctcaatcacatttcccagaacaatcctcactttctcttccaaacctatgacttcctatttatttccactaacttgcatcatatttgctttagctcttaatgtcaatcttccatctggtgtatttggtacccttcccaccttaattacatctgcagatttgatgaggaagatgtccctgtgatatccatgtcatagataaacatgctgaacaaggaccaagtgtttgctgccagtggaaactccttccagacctctgatccatcagtgacccacctccttgggtctggttagtccatcagtcatttactagcattccatgtggtactggcatccagcccacatttctccattgtgaccacaggattatcctgagacatcccatcagatgtctcatgaagtccacatttggcctaattgtacctgatt

SEQ ID NO: 66196 - DNA, 1046 bp, Homo sapiens
tgctggtactcccaggcagaaaggggagacaaatgagcaaaatagagcctctgccctcaactagcttaaagtccagtggtatagacattctgggacaaatatagtcacactgtgtggcaaagaggtcacagcactgccattatgatgtagacatcagggactgtgatccaccccagttctgccacatctcacccttctctaacatggcccttctctaacatcacttttttcctctataaaatcatggcccttctctaacatcacttttttcctctataaaatgaagaacttgtgtcaggtgattgaatactaaaggtttcttcttcttgtttggattcaaatgttaaagtccctccatgttagcagttatctgggggagggatggggagagattgctaatgggtacaaggtttcttctggagatgatgaaaatattctaaaattagattatggtgatggttgcacaactctctaagtatacgagaaacctcctctaaattgtgtactttaaatgggtgaactttatggtatgtaaattacatctcagtaaagctattaaaaaagaaaagaaaaaaatcctccatgcctctcaaaaccagaaaatcttgtcttggatgtctgactgattgcctgaaagcaggctggaaagccaggaggaccagatcaaccccacagctagtgtggtagaggagatgagcccctctgttgtataaaacagtttccttttaaagaatatcattaaaaaatttgtaaacctctctcttcccttcctttttattgatttcctgttattattttaacaaatatgtattgcatccttgtaaagcttaaagtctggtagaatatagatgttaggcaaataattacaaaattaccagctaattattagctaaattgctagctaataataaaagtattattaaggaagaatagagggtactataagagcataatgggacctaatctagtccgaaggggaatggaggaagtcttccctgagcatatggcatttacactgagactcaaaatgtggatgttagcctgtc

SEQ ID NO: 66197 - DNA, 1061 bp, Homo sapiens
ctaggtttgaatcccagtttacccacctattagctgtgttgccttgggcatgtttccttaattctctaagcctcagttttcgtacatctaaaataacacctgtttcacaaggatagcatgaggattggtggtattttttatgaaagcccctggcaggcacatggtaggttccctgttataagtacttatcattgtgacatgtataaagaaatcaaactctcattctggcagctgtaattccattcctccccaatatagaacctttactcctaccttaaggcctcttaattctgtctttacctacgatattcccatcctgcctaaagtgccatcatgttccctgttttcttatctgaatcctcagactcttcaaggcctctctctcttaagaagcctttcttcgtcgtctggtctactccgatacttcctcctccaaacttgtacagcattgtacagcttagcacagactgcttaacgtcgtctcattttcgggagaccctgtagcatagtgaaaaagaaacaagctttgaagtcagacctgggtttaaatctcagccttgtcaagtgaccctgggcaagccacttgccatctctgagaccatgggcctcagggaatcctaagacagatcaggcaaactgtcactgaccctgagaggctctcacactgtcagaggagatagatgtggaaacagaccatgataatggggtaggtgctctggcaggcgcctggacaaggggctctggggacgaacagggggaaatgatgtcttctgcctggtgatcagagaggtagaatcagttacagaaggcttcccagaggagggggtgcttaggccttatcaggaaggatgatgggagtttgccagagttctccagaagggttttgaattaactagtgccagtcttctactcccaaccgccacagaaaagtacagagaccctcatgttttttaccttggaagatgctgcttttgcctgtgttgatggcttatcagcaggaaggctctgcttcagcacttgaatgcaggtgtggtgggagggagggaggaaggtggggaaga

SEQ ID NO: 66198 - DNA, 1964 bp, Homo sapiens
aagcagagctaatgaaacaaaggacacaggctctttaaatccctcctaacccaggtcacaaagacatcctctttggtcccacccccgtctcaggcccctttcattactctgggtcatggcaccctattcttttccgtcattacacttgtcacaacctgaaattgtttttatttgttcaatagccttctccctaacttgtctctgagcttctaaaaggcaagaaccatggctgactggttcaagtgtccccagcatctactatagtacttggcacttagtaagcactcaataaatcaatgaataatgaataccctccctttggagaacatcagttaattggagagacaaaacatgccatccccagactcaggctgggcaagtcctgtccaagtctggtagtgctacctgccagacacatcccagtcactttctttcccacttccccatatcccactcctgcctctccttgggagagtgtgggaagcatctggccaggatgtgtggagcacagacccctgagtgagtacatggcacatgactgcctgttcatgcctcctctggtgctttttgagggccagggatcctctcttggggctagaccccagggtcttccttgttgggatcattcttcatagaacctgagcactggaaaggtcctcaaaggtctctgggccactctgatgattgcctgcctctcttccagcagaaccctctccaacagctggctagctgacatttttcagagacagaaggaacctccttcttccccagggagactggttgaaacctttttttttttttttttttttttttctgggacacggagttttgcttttgttgcccaggctggagtgcaatggcacaatcttggcttaccgtgacctctgcctcccgggttcaagcaattctcctacctcagcctcccgagtagctgggattacaggcatgttccaccacatctggctaatattgtatttttagtagagacagggtttctccatgttggtcaggctggtctcgaactctcaacctcaggtgatccacccgcctcagcctccctaagtgctgggccactgcgcccggcatggttgaaacatctttttaatgagctgtggtcttctctataacttatgccaactgtcttttgctacctagtcacttttccaaataccagtcttcaaagaaagttctttcagtcccagagcctttgcctccacaggcccagcatccccagatcatcttctcattggcctctgggaacttcccaggaacacgcacgtaatcttgccactttctgtcagccacagccatgctagcttaaaacccaggcctggcctgtatccccaagcctacaagggacctgccccagagcagccagaatatgctttgttctagggcacagccactgaagggcaggactacttgtggatgtggcagcagttcttgggatgactgatgcttctggagcgagaacttgctgttctcagaagcagagacttagaaaacatccccaagcagaaagcttcttcctttgtccgttggaaaactctgtggcaagacatttgtagctaagaattggagtgttcaccaaggacattatctctgccgtgccttaaaatcaatcaatactcccagctattgtccagtagtttacattctctgcttcccccaacccccagacaagagaattcactttataaggagcccctcttcctagccttctagatcgaacacctttgaaatgaaaagacgagggccttttatgaaactccctctatcctcacccccaggccaaggctggccctttgagccgttccaggggcatggttcctgcctgttgacttggaacagatgcccttagcccccacctttacatttctcccacctgcctttttagccagcatacatttacaccccttgccctagcctcccagcctcaagggccaaaaccattaacccactat

SEQ ID NO: 66199 - DNA, 1029 bp, Homo sapiens
agcagtgggcctcctctggacattccttattagttgggctatgacaccagcactctcctgacgtttgtgccaaaatagccccagctgtgttccttgagttcatctgctgtttatggtaagtaccctgtgtatagctctgtcattgcacatgtgaaattgtattatcatttgtctgctcagtggtctgattcttgcattaggatgttagcttctgaaagtcaggaactgtgtcttatttattattatatctccaggaactaccaccatgcattggtgctcattaaatgttgaatgaatgatgtgttttctttgtaaaatggattacacctttcctgctttcttgagccaactatcacttttcgtcaggttcatcattatatccagcagttaatgtcctatgtggcagttcagtgatgcccttaggggcttttgaggtgctgtactctgaattcctttttcagcttttcattgtcctgttcttttccctgcctgcctggccagtgcttgattgtaatcaatctgcttggttctgtagcatcctccctggccttcttatttccttctcctaatctgcagtgggctggaaataagatcacctagcatgatttgataagactgtaactaagggctagtaatctctgattgaggtcctaaacggctctcttatgggaaaagtgtagatgccattgcacatgggacttgtatgttagaggccttttaacttcctgttcttcctgctccaggaaaggtcagataacactcctggggcaggagcagggggttcatcagtctggagaggccatgtcaggagtagaaggctcattgaccattgattctataaaccacaagaaactaagaaactgttgtctgttctccagctgcacactccaccaactttattttggccaaacatttgaaatgcttccatccacattaggttatctgagtgctagctacaaacctcaggccattttctgttaagggcaaattctgcagagagtgagtttgcaccttcacccaaacaggaaa

SEQ ID NO: 66200 - DNA, 1223 bp, Homo sapiens
gcaagatctctctacctttttttttttttttttaaataattctagactacctttgtctgccacagttttctggcagctggctttattttcctgggtgtatcagtttggatgtgctctgctgtccaacttggtgcactgaacgttccgacttggacctggatagtgatagtcttttagaatcttctcagggctcttctctctcatcagcctaagcctttagcttcgtcttaaccatgtctttcctttttccgtttaaggaaacctcattttttaagccattcaaccaatatatattgactgccaattgtatgcaaggcaccatacccagctctgactcattctcatggatgaaatagaaacaaaagaatcctgtagttctcttatttttgtattgcattgacttttgcatgaaaaattacctgacttgtagggatgggtaaggaaggtagagtaaaacaagagatgtaattccctttccttcgagtgtgtctaggcaaattcacaggaagttcacaagctcaggaaagttgggcagtcctttgctgttatattagactatggagtcactgccaagtccatgaagtccactaaatttctaatagatatttctgtggcccttggaaggaaggtgtagtttgtggctttggcaagacctctctaacctccaatgatacattccttttcttccgtatcagtattgttgtgaatatcaagagataaaatatgtgatatgtggattgtaaagtgctctacagttgtaattgcttattagtttcatttatgcataattcagcgtgttcttaccgagtatcaggcactctgccagttgctgggattatataaatgattatacatagtctagcccctcatcagtgctcccagtcatttacagagacaagcctgtaaacaaggaatcacaacgcagagtgataaatgcaatggtagctgcacaaagtatgtaggcagcactgctgtaagtattggtgagctctacctgagaagtgagcaggctggtgtctgggaagtgtcacagggtaagtgaccttgaattgggtcttaaggatgagttggagattgccaggaaggctaaaagggatggaccttccaggcagagggaacagtctatgcagaggcgttgggtgggggttagggagtgacagcaggtggaaccatctgctgcaggattgaggagaataacaagaaataaggccggagagtgaaga

SEQ ID NO: 66201 - DNA, 1208 bp, Homo sapiens
cagagtgacagcctgcatgttctttacctctgtggactcatggagaccccaaagggcttggaacagctgcctttcacagtcccctggctctaactttatgtcacttcaaaagaagtcttggggaaagaaatagaggcctgatttcatgacctaattgcgggtaggaagtacatttcaactggtgttttcctgaaagtgcttcagcctggagagccgcagatgagtggacaacggagcagatttcagtaaaataattaaggcaactgcatggaatgtggatttgttcgtctcctgtttcctgcagacttaccttgccccattcctgccccagaactagacaacagcctcactggattcctcagcctcagaagtccctaaatactattactctgaatactgcttttccccctcctaaatgtaaattgcagtcctgtctctgggactgtcccctcaacttactctatgatccaggacaaacagtggaccttctctgtgttttgatgtctatcctcataaaatgaggtcatcatcaatgcctcctctgggatgtctgggatgttgtgttggtggtggtttgaacttcagaatgaagaggctctgggatgagtcttggggattgaatgtccaaggcaggtgtttgggtttgcactagggctcgatcatgtgtctgttggggggtgcctcagcaagtcagtctatgttgtgtctggtgagtacttcttccaaagtgggattgaaaaaaacagctggttgctttggctgcagtcagaaatgagtattttacatttgagctttcgtttatccagactgtcgccactgctttccccttgtcctggatcattcacagaggctgcgatccctctgacattgccagcaatagggtggctgagcagtggctgctttagtgttagcagtgatgccaggaggacagacagcctctctgactgcctgagagccagaatattgacgctgggggaaattcagccaaggggagcaatgtgctcagccttcagagctgtaaggctgccagactgacgtggtatgtggtaactcagagtagcggtgttgttgctgccccggggagaaggtttctcaaatcagtggcatgagaggagtgtccaagagcattaaggcattgctgcccaggtaaagtttgaagttaccctctcccttcccttccacctctctaaacctgctccttctcttaa

SEQ ID NO: 66202 - DNA, 1011 bp, Homo sapiens
atccaaaggaaataatcagaaatatgttactaaaatatttaaaacaatctattgttttatagtagggattggttaaatcaagcatggaatagtcttatagtggaatactgtgtagccatttaaaacaatgtgggtttttttattgttgtttgtttgagacggcgtcttgctgtgtcgcccaggcttgatgcagtggcgcgatctcggctcactgcatcctccgcctcccggattcaagcgattctcctgcctcagcctcccaagtagctgggattacagacatacaccaccacgcccagataatttttgtatttttagtagagacagggtttcaccatgttggccaggctggtctcgaactcctgacctcaggtgatccagctatcttggcctcccaaagtgctgagattataggcatgagccactgtgcccagccagtaaaacaatgtaatagacatataatacatggaaagatgtatgtgcattcagagagaaagtttatatatgatgccatttttataaataaaagtatgtatatatccattgaagaaactggaaagatgttatatgttctaagacgttttcttcttttggttatctatattttctggttttttatagtgaacatgagcccttttttattagaaggaaaaaatgtattagtgggaatattacataaatagcaggaagaagggaagctaacatggagtccctgcctctggtcatactccctcttcttatacagccactggagtgatttttgtaattgcaaaggtttggaaggaaacttgccaatctataaacagtagttactcttggaatttggactaaggagatgcatgtaaggggagacctttaatgttcccatgtgcttgagaagaatgtgtgttgtactgctgttggatggaatgttctgtataggtctgttatatccatttagtctaaagtgtagcttaagtcagacatttccttattggttttctttctggatgacctgtccattgctgaaag

SEQ ID NO: 66203 - DNA, 1030 bp, Homo sapiens
aaaatcatccatctatgttgttgcatgtatatccagcctgttgcttctaactactgcatcgtgtttcatagtgtgtgactaccacatttaccttatctgtccccccagtggtggacacttgatggcccgcaactccccactgccacagaatgctgtgatgaaccatttcttgtgttgccctttatggacctgcataagaatttttctaagaattgtatactcaggagcagaagtgcttggtcatagggtaaggtgctttaatgaagtcctgcaagattggcttccagaatggctgcaccagtctataccctaacagtgcatgaagtgtcccagatcctcacatcttcaccaacacttgccatttttcagctttctaacatttgtgaatatgttgaatttacagtgatatctcattttaatttgcatttctgtaataacaaatgaacttgaagattttctttatatacctagtaataatccttttttggtttcctcctctaggaattggctgttgatatctttgcctcatttttgttgggccttctttttcttttttcttttctttttttttttttctatttcgttttttttttgagacagtctcactctgttgcccaggctggagtgcagtggtgtgatcttggctcactgcaacctctgcctcctgggttgaagtgattcttctgcctcagcctcccgattagttgggattacaggtacctgccatcacacctggctaatttttgtatttttagtagagatggggttttaccatgttggccagggtggtctccaactcctggcctcaagtgatctgctcgcctcagcctcccggagtgctgggattataggcatgagccactgcgcctggcatgttgggccttctgatcctagcatttctatcaaagcctgatctggggcaaagtgctcctacagactattaactacctgaaagtcagtattgggaagtgaaaggcaatataacatacttgtgccatagacattctctgcttccccaaattagtaaggg

SEQ ID NO: 66204 - DNA, 1093 bp, Homo sapiens
cctagagagagcctagtctgggtccatactgtaataagtcctaacatctagggcctgactacactggccttaggtttggtgaccatatattatgaaccacaaattgaaagacatggaagtgtatttagaactacgctgaggatgtgaaattgggattatcttggaaaccctgttgtgggtgatcttgattccttggccatcagcttaacgtgccatgccttcctcgagccttgcccctaattatatcacctctgtctgggttcaccactgatttttacccttgtctatctcaaacagactccttcttatcccagctagctgctatgacctgctttgctttaactgccatctgaaaatatcactgttcctggtactatgcagtaagagcttagtaactatgggataagaagacagactaatggatggtcagttgggtgagagccaacgtggtttaggggaatgtacaccaaatttagactcagacagacctggttttgaatcttggttcttgtgcttatttaatgtgtacatttgggtaactcatattatcttgccgagccttagtttacttatttataaaataggactggtacctcattgcaagttgttataaggatctgaaatagtgaatataaagtgtctaacacactgcggctgctttattatgattattgatctttactttttgaagtaaataaataaacattatcctcatttgaggaaactggggcacattttctatacaggtaccttatttcctacccaatctttaattcatttccttaggaatctggctttaaaaagaaaactgttctctgtgccctctctactctcagctcatgtccccatgccacaggacttgtagatttaacaaatgctagtgcctttggttgggccacccggctttcctgaccagccagagaccaggttactgaatgagccacaactcatttgactttccagcagacctcctgaactgtgaccttttcacttcctcccctcatcgaggtgtgcactgggttgagaagaggtcactctttgtcttctccttgggacccgtgacactcatcacagtgatcctatgcttcagatg

SEQ ID NO: 66205 - DNA, 1069 bp, Homo sapiens
ccaggaaagtgttgggcttgacgtttctcccacccctactgctatggccgattatctctgagtaagaaagagtcatttctaatcccatttggaatcgttgctcaagataatcctgttttgtggtaatgatattccaattccagcatgcactcgtagtttggcagacacatgcctcaacctcaggcaactcaagacgctgctccctggaaatcagtgccagctcatttgcctaacgtgacagtctcagggtatacttcctgggcccaatgctctgttctgtcctggggttctgtgttcagtgctgtcttcatggagagtggcagttggggataggagagcatccagtgttcattatggagagtggcagttggggataggagagcatccagtgttcattatggagagtggcagttggggataggaaagcatccagtgttcattcagttcagctgcttggggcagggtgttccatctctaggaactgtgagatggtctagttctatacctcttctttaagagacttctttaaaaacagctgtaccataagctgcttattttaacagagctgccaggctggtgggccaggggtcggcagtagatatcatgggtgtttcaggcttttagtaagatatttggatgtctctaatgacatctatatgagtaaaattatgatgtaaaaatagtatagtcagactagtaaatgtaaatgacctggttcattgtttatgtatgaatggacatcagactagagagcaggcttgagtggtgagcaatggggctctgtcctgttcagtattttatatcactgatttcattgaggtcattgataaatgccaacagagttaatgaagcttgaggaggtactaatatattgggtgaaaaaataggggacattaaataaaacctcagtgggctagagcaatggttaaatctgtgttgataaaaactaacaaggataagtatatgggtcaacaattaaaaaccaactgtaaaacccaacgtgcaaaacttagcaatactaaaagtaaagtctagaagctgactaaaaacccaatatgttgtctgctgt

SEQ ID NO: 66206 - DNA, 1117 bp, Homo sapiens
catgaaaacatactcagtgcaaattcaagtcacaatgagataccactacatacctgctacagtagctaaaatttaggaaaactgacaatactaagggctgacaaggatacagaacaatattgatacatcactgataggaatgcataatggtatagccacattggaaaacactttggcagtttcttataaaggtaaagtatacatttaccataccacagagcaatagcaactcctaggtatttgtctaagagaaataaaaatgtacgtctgcaaaaatacctgtatgtaaatatttatagcagctttattcatgaccaccaaaaactggatataatgcaatgtccatcaactggtgaatggaccaacaaattgtggtatatccatacggtaaaaacagccaaacaaacaatgacaacaacaaaagcaccatgctaagctaaaaccaacacaaaaagctacctgctctgtaattccatgtatatgacattctggagaagacagaactttaggggcagaaatcagattggtggttgccagtgtttgggaatgggaagagaatataaaggaactttttgggatgatggagaaatattctgtatcctgattatcatgctggttacatgaatgtatataattatcaaaattcattaaattatatatcttaaaaaggatgaattttactctgtgtaaatgtgatacttcagtaaactgactttaaacactttttaaaaagctgtcatccctctctaattttcattattaattgtgaccagtggcatactgagaatttgtattagtagtatcaaaattaattcatattgttaatggtcacctggaatgttttgaattcttattgttgatgatatctcacattagagtgatatgcattctgatttttagtagggaatgaagatttgtcaattcatactatcagtgatgtaatgaagtataattactgatgaatagtgataaattcactttatgagtagtgtacagtggacttgtataaattcataaagtatatgattcttcattccagcaaggagaaagttgaggttacagactgggagcttgcctctcccacactattcttgggttccttatctctggactctca

SEQ ID NO: 66207 - DNA, 1131 bp, Homo sapiens
gctttcatatgcatgataaggtgtattgtacagataaggaaactaaggctcaggaggttagataggtgggctaggttatacagcaaataagcgacagagctgggctagaccccaggtctgactgtctccagatcctgctctttcactctactccagtgcatttgctcatgagtgagtcttttggctggactgagagttccctgagtcagggctggctatgaatccgcccactgcccagcagtgtagctcagaaccaggctgggcacagagggctccatgtacctggtattgagctatttgaaaagattgtgcctctcctgttgacttttgagtttttctgagtcagtccaattttctttatggccacaaggtggtggcaacagcctgcaggctgcccagaccaggccagacgcacttagctagcgttgcttttctcctaggcttagtgtctcctctgctttgggtctcccttccctgggctcagcactggggagtttgcagacgtctcaactgtcatttcatctccttgacatccttgtgaagctggcagggcaaggagttttgtctatgttttacagtcaggaaagctgtggttgagagagagaggagctgtcatggtcacgtggtgagtagtgggagtggaatggagctagatctcaaagactcctagttgagacctctccatcctcagagaggcctacaccctgcttgctcctctccattctacctttccttttgggtttatgacttgacatcaagattcagaactgggttgaagaactggagttgagggagaaagtggacaagatcagggaatctttagtaataactcttataggaacataaagcatatgcagagcttcatagattatgaagagcacattatttaccataggcaagacgtggtgctagcagttgacctgcattccctctatgatgagaggagtgaagagtttgggctctgtagtagaaaggtgtggaagtcaggttgttaacagtggacaccatgtggggagggaatgattcgtttctcattatatattgtgacatcagtttgcttgtcaaagtccacgtttctaaagtactgccactgtcttagtgggccctccacgcagtcctgagatgggtatg

SEQ ID NO: 66208 - DNA, 1044 bp, Homo sapiens
tgcttcgctgaaatatgttaaagcaaatcccagacatgatgtcatttcaccaaaggtagactttttttttggtggggggagctttccggtgaagactgaaaaacctgctagacaaattctaaaatagatgtgactttggatttttgttttttaaggctaggaggtcctggatgatgctgaaatgtaacagtgacacagagccagtgtggaactgtgtctgatgctgtgtgagggtgacatggtggctttgggaacatgggtgcaacactgaagatatgggagactccaagtgagggtgacagtgagagatcactgtgtgtgtggccctgtgacacccagtgacatgggacagtgggacgctgtggaccctgaaatgactgtgtgtcaccgagcaggtgggacctgctgtgtgaaggccacaggtgtcatgtcttcttgtgtcatcctggttgatgagtgtgacacagtgcaggactctgcatgggagtaagagggactgaagctgtgctataggtgaccgggctgcatgtgattcaagtgggctcagccccagcttcagctgctgagtatgggagggagcatggacattgtagggtagatgaggagaaacactgaatgggaacagaaatggtgtctgtgcccagatgcgagctcctcccttctctgaatacccaggaaggcttcctggaggcaggatgtgggcacttcagcaggatgttgtaggtgctgattaagagcagggcctgtggtgtcagacagccctgtctaggctctgacattcagcaggtcattttatctcttgagcctcaatttcctcaagtataaaatgggagctcttaggaggattgcatgaagcagtgctccaatgcatgcagtctctggcacttggtaaatactctatggtctcttggggagcagcaacctcaacacctgcaccccaggtccccaaataacaggagcaccagtaggagcacagtgaaggtgcgctgagtgaggtgtcctcttacacccacagccctcctctctccctctcccccaacttct

SEQ ID NO: 66209 - DNA, 1103 bp, Homo sapiens
ctgttctgggaagcacaggtctgggcaccctggggctggggcgaggcccggagctgatctcctctgtccatcccagtagagccagcaccagtgcagacacatgggggatccaggttggtggaccaggggaggatggaaagtcccatggatccagccggaatgttggagtggggaggcagagggcccagggttcctgctggccagcctctgggcttaggggtgtgtatcccagacaggccaggcctgccaggggccctgacaacaggaaatccttgaaggaacaagcagaggctgaggactctgagcacaacaacaggaaacagccgtgacatggggcaacagccctggcgactgtgcccagttggggtggggacgaggggccaagcttgtgggacccagggtgatgccaagagggacactgagacactgtgggacagggggcgttctgcacatgtgacacggagcttatgacgtgtaatatcaagtacgtgaccatgatcatagggtactgtgtggagtgtgggtgagtcactgagtatgtgacactggctgtgaggcactccatgatagcagatgtgtacagtggctgtgccaccaagtgtgtaacactgtgtgatattgattgtgtgatgctgacaccgagtgtgtgacattgcacattgcatgctaccacgtgtgtgacactgaaagtgacagtgagcacatggagggtgtgtctccatgagaatcaaatacagaaacgtgagcaaatgacgctgcagtagcaggtatggtcctgagtctgtggctcgagtgtctgacactgaattgtgacattgagtgtgtcccaagcatatgatctagtgaggctgagtgtgtaaacaaaggcatgacatggagtgatagcaagtgtgtggaagtgggcgtgtgatgctgtgtgatcttgggcctgacattacatgtgtgatgctctgtaatggttgtaacagtatgcaatgtgcacatacagtgctgtgtaggacactgtcatgggaaggcaccgatgggttcaggcgggaaagtaacaccgtccaaaggatggttttaaaagattgctctggccagatgcagtggctcacacctat

SEQ ID NO: 66210 - DNA, 1051 bp, Homo sapiens
tgtgtgagtgtgtgagtgtgtgtgtgtgcgtgcatgtacacgtgcatatgggaatggggtggggtgggaggaggcagtgggccagcagcgctgtctatgctgaggggctgtgtgtgcccacaaacgtgtgacattaggtgtgcacattatctatgcaggttgtgtctgcatgtgtctctgtgtctaggtggcgtgcgtattgaatttaattggatgcatacacctgtggctggggaggtgagaggtgtgtgaggtgcgtggtgggagacggtgtgagtgtggtgtgaagtgagggtgtgtgagctgggtgactttttggtgtgacgtgtgaattatgtgatcttttctccccatgagctgtgtgtgcctgtggtgaggagtgagtggaggatggccagtgagctggcggtgtgtgtgttgggggtgttgaggactgtagaatgtgctgcggtggcagtgtgtgcatgaggtgtgtgtgaggaatgaggtctgtaacatttggggcgtgtggaatatagtgggtgtccccataaatgtctgtggagtgacgcatgtgtgcaaaagggcttggctgccatcctgttcttgctcccctcctgatcaggtccctagagatgccctggaatgttctccatgcccccccaaccccagctgcccctaccctttgcccttcatcctccttgccttgaccaagccctttgttttgggtttccggcggagcaggcgctggacaggcgggcggcaggcaatgtcgtggtctgagaacctttgttctcttagtttgactggtgtttggggccttggtttggaggagggtgtggagaggatgcacgtggcagcaaggtcactgtgtttactacaccacttcgtgctccgcagaggggaggcatacggcgcaggcagtgaggcctgggtggtgtctttggtggcgcctgttggtgtaagaacagcttaggctgggcttggagtttgccagccatgcagtcttagtccatagtggcccagcgcccttcctggctcatgtcagcggggctgagcagccgagcagcca

SEQ ID NO: 66211 - DNA, 1022 bp, Homo sapiens
ctggtggaaatggctatatattgtccagactgtagcaggggctggccaagatggtccactcctctccccatcctcctccaaccagaggccataaaccccactctatagattaacaattccctgaaaagaagggggtcacttttgttccccagttctagaactaaatattaaagcaattatgtaactagcaataaattacttaaagtagtgactcactcagcttaattagagcgcaagcagggagggattaaggtatttttagagcacacacctcactctctcctgtgggggaggcctctgtgcaaggtgggggtggaaaaaaggctgggaactcatgggagcaccccaggtgtctgcaaggagatgaaagctgatcctccgccccactgaggtcctaaggaagaaaggccgagtcagagctgcagcaggagggattcggatcagactcaagaacacttcccagtggtgcttatttgagaactgggacggcaacactagattgtaaactctgtgagggcagggattaggtctgtgactgcctcctcacccagcgggagaccaagaatgagacttgggagtcagacacaactgggtgtgactcctgcctttgcgggttgccagcacgtgggcttgggcaggttcctttatcaccagaagctttgccgtctcctccactataaagtgggcacaataacatccacctgcatgcatattataaggattgagtgggttaaaatgtgcaaagcaagactttgtgctcagctgggcacagcggctcacacctgtaatcccagtactttgggaggctgagacagagtgcttcagcccagtagttttgagaccagcctgggaaacatagggagaccctgtctcttaaaagaaaaaaaaaattagaagactcggtgctgactctgctagaccaaaagcccacaaaggcagggattaggtttggtttgtgttgttcattgttgtatctcaagcttcattcataggactgcacaaagtaggtgttcagtaaatgc

SEQ ID NO: 66212 - DNA, 1008 bp, Homo sapiens
gcattttttatctgttccatgtgcatttatgtgtgtgtatttgttagtgtgtgaataatagcattgctgtgtgtggaggtggatgtggctgtgtgcgtataagtattctggtgtgggtgtgtgatcatggtgctagtgtgtatatcggtgcttctgtggctggtgtgtgtgtgtatctatatgtgtgtattcatctgagtgtgtgtgggtggctgtttccttcccctggcaattgaggatacagctgggacaccatggcccactgatgcagggcagggaggggctgaatgtatgaccgcctctttgaactcaggacaattcattctacaccctgtgggaaagatgcagaaaagaaataggcaataatgactctgccctctggggcttcctaagcttcttagacataaaatagcttgagaataattaagcagtagagatcaacgtcatgctaacaggtgggggtggggtgggaactgcataagcaaaggccctgggctgggcatgtcctggagcagtgaagacactgtatagagtggggggcaggcaggacccacattcaatagaactttaagatccaggactcttaggctttatccagagagccctggggagcccagaaaggttttatataggggagagacatgatcagatttgggttctagaaacctgccctgggccaggcatggtggctcatgcctgtaatcccatcactttgggaggcagaagcaggtggatcacttgaggccaggagtttgagacgagactggccaacatggtgaaacccagtgtctattagaaatacaataaaattagctgggtgtggtggcacacgcctgtagtcccagctacttagaaggctgaggcatgagaatatgagaatcgcttgaacttgggaggtggaggttgcagtgagctgagattgccttactgcactttagcctgggggtgacaaagtgagactctgtctcaaaagaagaaaaaaaaaaagaagaagaaaaataaagaaac

SEQ ID NO: 66213 - DNA, 1017 bp, Homo sapiens
tcagagattggaagtttgctgatgcctttgggaggccaaggcaggcagatcacgaggtcaggagttgaagaccagcctggccaatatggtgaaaccccgtctctactaaaaatacaaaaattagccgggcgtggtgcgggtgcctgtagtcccagctacttaggaggctgaggcaggagaattgcttgaacccgggaggcagaggttgcagtgagcccagatcgcaccactgcactccccactccaccccttccccatgcctgggtgacagagcgagactccgtctcaaaaacaaaacaaaaacccaaaaaacaaaaaactaagaagtttgctgatgcctttaatagtaacaaaaggtgtattggatgttcaatatttgagggacctacgggttgttcccagaggagatgtccaagagacagcctggacacctggagctccagggagagggatgggcagcaggggacacccggagttgttggtatgctgggagaaggctgcatgctccgtgggagtagggtggagaatgaggagagacagggccgccgtcctgcaaggagcatccatattgagggggcgaagatagggtgcaccagtgagggagacagaggaggggccgtctggaaggtgggagggaaacagccgcgcaggacggggcgggggcgggcgctgagaagaagccgccttcttcggcaaagaggtagctgaagcctgtggagcctgcagtcctctcaaggctatgggggcagcgcggaggccggattccagaactgaatcttcccatcgctttgggcagccaccctacctcccaggagcatccttcctgccatcccacctccagttccccagctaacaaaaaacggtgtttcttgactcccggcagggcggcggggcgggcaggtcttgtgaacacggctcgcagggttcagcaccctggagagaggcctgtggccggggcggggcctgcggcgggggtaggggcgcgcagtcagagcagtcgggcctttggctccgtct

SEQ ID NO: 66214 - DNA, 1081 bp, Homo sapiens
ttcctgaggtgttgaagaagctgctccaccttggaactactataggggctgtggtggcctttcattcctttatcagcaaaagcttttgtcacttgtgtggtgggggacatgcttagtgtgagaatgcagagacccatgccaggccctacccaaggacatggtgctccttcagccattgtcatcagagccacagaggggagcttcctggcagaggaggagtggggagaagctgtggaatggctccttgagctccccactccaccccttccccatgcctgggctcccattgcaaagacccagatgtgggcttatcctgtcccccagccagagggagtcacccaggggtgttcaggccaaccctttgtgaaatccatgttccaccagttaccagcctttctccggagagctgagggctgtctcacactgggtagtctcagcctgccctggggttgggggggtgctcacagagcagtaagcgtcactgcctgcatccccacacacctgcattatcttgtctgcaagacacgtgtgcccctgagctgagctctgttgtgcaccacccgatttccgtcggcctcctttctgacttttctccatcaacatttcctgcttgggcctgttgcgggctacccaaaggctgtggactggggccgaggtacataggactttggcttgtcttttgagctaacaggatcctgtagaagaaatgagatgagcctgagagggggtcggggggtgagacattagggaagggagaggccaccaagggtctctagcccagaatccaatgccccttcctgcctacctgtccttgtgggtgggaggcagggtgtgtgctgactggcccagcaatggtgggctaggatttgggataggcagagaaaaggaagaggagggggaagtcggcctgggaggagaaacactgtacaaagtcgaggaggagagaaccagagtgtgcttagggaccagacctggccccacctggagcagaggatggtgaggtcagtcagggctggatcgacaagggacctcaaatgccaggctgaggagcttggcctttatcctgagggcactggggagc

SEQ ID NO: 66215 - DNA, 1050 bp, Homo sapiens
caggtgttctcccaacccagactccatttgacaccctccaccttctgcacatacatgccatacacacaccccaaccccacacatcactgcacatgctgtcctggctctagacctgggacttcttccataaccctgatcctctatcaaacagagccagaggccgtggagcggggcccctgagaccgtgagtagctgtgggctgactgccagctgccttacaccacctgggggccaaatgagctgggtgggagcatggggagacagccagggctcctggccatctccaggcatggatccctgcccccttgcccgttggcactggcccctatcctggggcctaagctcctcccctttatccctaatcctgtcccagggtcctttccccaatatagggttccttatcagtgcaatgctctagaattttccaaaggacttagtgtagaagttaaagagccagtaatgatggcacctaggtttgaattagagccctgatcttcatctcctgtcatccctggagccaccttatttccaaccctggacagtgttccaggactgtcagaatgttcttgctactgccctgatcctaacatgccggggtgggacgagagaggcttgtgggatacccccacctggggtagcagtctctctgaggcttcctggctggctatttccactctgcacactcctaggagagagagctcatccctccgcccttggggctgccctgttcctagggggatacttctgtctggaaaaggtccttgctcaggttctgctgagaatctgcatctcatgatgcccccatgggtcccagctatgccttgggggctacagagcatagatgccctgcagcaggggtccccaactgttgggaacagggccgtgcaacaggaggtgaacatcgggcgagtgagcattactgcctgagctctgcctcctgttaggtcagcagcggcgttagattctcgtaagagtgcgaaccctactgtgaactgtgcaagcgagggatctaggttgtgcgcttcttatgagaatctgatgtctgaacat

SEQ ID NO: 66216 - DNA, 1092 bp, Homo sapiens
gggaggagatcactgccattgtgaagatgcgcgtggctggcactgccagtgggacccaggtgaaggctggagcctgggtggggggcttggacctgccacctgcacccatttcctaggcccccagctgagccctgtctccctgcagcatgccggtgacttcatctgcacagtgtatctggaagagaagaaggcagagactgagcagcatatcaaggtaggtgctgggacctagaagccaaggggctagagaatcaggctgggccaggtacaggctcagatggccaggggagcagtgcttctaccccgaggagaggaccagtttgggacctgtatctggctggtgctggggtctgctcctaaggaccactcagaaatacccctctctatcccaggactccagaagggcctgagaaggatgggctcaggctctgagtcacatagcaaggttgtggcagagcaggggctaggcacaggcaggctaatctcctccttggtccttgcaggtcccagcatccatgactgctgaggagctcaccctggagatcctggatcgccggaacgtgggcatcagggagaaggactattggacctgctttgaggtcaacgagagggaggaggcaggtgggtgacgctgggcttgtgcagggtgtggtatggcttgtcttgtctcagctgtagccccagtctgtcctcccctaccctgcacatgaggatgggtggtgaaaagggctttgatgacatgttgctgtcacactgatctctgtgatggtggtgatagggtgctggcagggattgaggttatggctgtcatgtggctgatagaagatgtcagtgacagtggtgatggttgaggtgagaaatgtattttatggtaaaggtggtcttgatggcagtggaggatgaggctgtatctgttcatttgttttactatatttgttgagtgccaggcactgggctagggagccacacacacagtccctatcctcgtgggggttagtctggtgtgggacggaggcattagtctaatgatcataccaataaatgttcaactacagatgcattaactgctgtggaggaaagacccttggcatt

SEQ ID NO: 66217 - DNA, 1031 bp, Homo sapiens
tgaggaccatggaatggttttggttagaggaaggatggggtctgattttagctagatcactctgggattttggaaggggctgctgcagaggcctgggggagcggatgacttgtgggctggctagcgtggtggggatgcagagaggtggatggatttagggaaaacttgagagaatgaagagctcatgggtcagatgggagcaggagccccgggaggatgcagaggtggttttcaggtggtggggggctccctgatggctcccctgcccaaattctccccagagttcagccggcgctggtgtgtccttggtgacggggtcctgagctactttgagaatgagcgggcagtgacccccaatggagagattcgggccagcgagattgtgtgcctggcagtgccccctcctgacacccatgggtgagtactcctgggcaaatcagactgtggttgctataaggtacaatcccccactggggagacagggaaatagacccagagaaggggaggacctccgcagagtcacacagcaaacggaggctgcacaagggccgactccagtctcttgaggccccagcccaagacttttccaccacctcttaggggaccagaataaggacaagcgccaaggcagtgcggagggggcagaggatggcggttgatggtgcgggttgggggtgggcccgtgctggatgaggtgggcctgagtcctggcctgtgtatttgcagctttgagcacacctttgaggtgtacacggagggagaacggctgtacctgtttgggctggagagtgcggagcaggctcatgagtgggtcaagtgtattgctaaggtgagcctggggtagcagggtgggtgtaagggtgtctgactggggaaggtggggcctcctggccaatcccatgtatcccagctcccccgtctagagagcagaagctagatgcagggcagcagacatggagcgggcctgtcccaccaagagcctactgtaatctgcagccctctgcggagttggtcagacctatcctagctct

SEQ ID NO: 66218 - DNA, 1122 bp, Homo sapiens
cctgtcccagtagacactgggggtgggtaagtgctcccgtgaagggggggcccaggtgattctgggtctggccctgtgtctacaggggagcaccgtggcctgggcgctggcgtctccaaggtgcggagcctgaagatggacaggaaggtgtggacagaaacacttatcgaggtggggatgcccctgcttgccaccgatacttggggtctgccccattcaacagctgtctgggtctcccagccccctccctatctcagtgaccacagcaccttggagctggaagagaccctttgtgataatctagtgggtggggatttcggaaaagcaatttttggcaaagtcagcaaactggccagtgagctaagaatgtttttatagttgtaaagtgttatttttttttaaagaaaaaaaaaggaagaaaatgcagcagagactgtatgtgttctgtaaagccgaaaataattactatttcgccctttagagaaagaatttgctaacttctgatctaatttcactgtcatccattgaatagatgtgtaaactgaggtcctgggcagggctgtaatctgcctgagattaccctgtaaatgcatattgaccaccatccctgcctctttccatcccacttctggctgacccagggccttctcccctaccttgcacagcccctcagaggccctcagcctccatttcatgtgaactcacatgtaccagtgggtatatatatgtgtgctgtgtgtgcacacacgtgtacatttatgcccctgtactggaaactcccaggtacccatatgtggtagatataggggagaacctgcaatgggagggtagacccaggctgcagactccagacacttggagtgtcacatccgtttctcacctccccacggtgtgtttggcacataagtgctaaggactttgcatatgttaattaactgactttcagaacaagccaggagttaggattagaataaccagtttacagccttgaagcccagggagagaaaataacttgctggaagacacagagtgaatcagtagtggcaaggacttttctgctttgttctgtgctgtgactccagcaccccatacaggacctgacaaggaggcaaggtggggggc

SEQ ID NO: 66219 - DNA, 1029 bp, Homo sapiens
aaagtgcagctctacaagaatctagaggtgctaaggggtcatggaacctctcccctgcccatgtccacctaccctgccccaggctgacctagggccttagccctgccttttctgttccctcttttcctgcactgggcccagccctttgcctggatatgtcctcgctcccccaagttctgaccacttcccccaggctctgagcactgccctccagtccctgccctggcccttgctcccccgcacctctgttcattgctgtgtgggccctgaacctgcagccccttaccctgcccagcctcccatgtcccctgctgtctccctcctgggcaccccccccagtccctgagttgcaccaccttcccttcctctccctgtcccaagcctcacgccctgcccccaaagccttgccctcatcccgtcccatctgccctccaggagtaccacctgggcattggcatcaccttcatcgacatgagcgtgggcaacgtgaaggaagtggaccggcgcagcttcgacctcaccacgccctaccgcatcttcaggtgaccctccatcttcttggctcaccggcatcctcactccttcctaatgttttccttttgcgcgacgtgggaagctgccccttcctatgggatgggttccctcaccctgccccgccctgccccacctgtggagcccctctcccgtcacttgctaaccctctctgatctccttccctcctgagaggtcttactctcccctgtgctgcttggcaactgctgtcctcccctgcccgccatgctgctcaggggttgcccatctggcctcctgctcccactgcccctgccccactatccctgcgcctacgccacccctggagagtgctcttgtctctcatgaggctgctcctcagtccttgtctctgggccaccaagcctctgccatcttggtttcctctgacctcagctgttcattggtgtctttctctgtcctctgccctctccctgggcagccttgcccactcccaggccttcagccgctacctctgag

SEQ ID NO: 66220 - DNA, 1086 bp, Homo sapiens
cccaacccccaagctcaccactggctcggacctccttgtggtgtcccagcttctcctctgccaccctttagtactgtcctatgaggcctgggggtataaatcgcacttcctgtcccctgtgcctttttttgaaagccagggggaggtggggatgggggtcttggcatgggggaggctttgtgaagcccagtgtggtgccccaggagaggaggccaggccccttgccctgaggccccccaacccctctctcaccagatgactctgactacgatgaggtcccagaggaggggccgggggccccagccagagtgatgaccaagaaggtggggccaggcatgggactgtctgcctgtcagggtgttgtgggggtgcccagctgcctgtcagaccctgaggactaccagacagagagtgggcagccatttcccgggaggcttccccttcccccacctcactctcttgccatacgggggtcaggagtcacgtgtagccacagcgctctgggccaggggtcggggctctggtgtggctcccccaggccctggctgtatgtgggtgggcatgtggcctccccccaccctgtgtgttaggaactcgtgtcctgtcccggagtgtctgtctctgtttcacttcttgtgttcccgtgtctgtctgtcttgcatccctagcccgcagtctttttctctgtccctttatctttctgtttttgtctgtgtcctaggtcggtttctgccactggctctcctgtccctgtgatctgggtctctgtgtggtctccgctggcagggggaggggagtgtgaggaaacagaactaaaagtgctgggctgtgtgggtcggggctgtgtggacagagggggcgtggcagccccgggtgggtgtgatctgtggcttgaagggaaggatgacgctgagtgggtctcgggggcaggaggagcccccaccgagccgagtcccacgggccgtgcgcgtggccagtctgctgagcgagggagaggaactgtctggggacgaccaaggggatgaggaagaggatgaccacgcctatgagggcgtccccaagtgagtgtccggccaccctccttcc

SEQ ID NO: 66221 - DNA, 1047 bp, Homo sapiens
acgggcaggtacacgacattcttgggcatacgcagcccgcctggccggagctgtgggagtcctcagccccaagacccagcaggcgtctgagggtaagcgaggtgccgccgttgctgttgttgctgttgggcacgtaggagggaggccctgggagggctgaagtccctgtctgtcacctctggcctggttttctgtgctgctctcctcccccttctctttttttctcttagagttttgtcttatttcactttccccacttcttctctttttcccctgccttttccttttctccccttgtctcatccctccctcttccctgggctttctaggtctccacctccccatacgcctctcctgggtccaccaggagcccacggtgcctgttttctgggcctttctcagactctgccccacagaatactcctctttggggttcttgccccttgggggcctggtgctgatcaccttacttctctgctcccacctccctacacccctctggggattcgttggggaggcttagtttggcttatttcactgtcaagttcaagggtgctgtgattctgaacctctcacccccagaccagggtgatggggagatggtgtgctgcttacccctcctccccaggactggtgctgtggtgggtgcttatggagtgtgggggctggtctcccctttcctgagttaccgtggatccctaatgaattcaacaatcctgtgcttggcttattggggacatagacctctaaccaagtcctgtccacccacccggcactcttcagccctgccctgtgcccttggctcatcttttccatagggcccagcggataactgcacctgctctttctgccaggccaggccaggcctgggctggacccaggaagagctcagtacttctgtgagctccctgaggatgaacttcctcctgctgctgccctcaggagccagcacagggccaggcctgggaagcgcttagagctgccatgggaaaggggcctctgccacctcctgcccagacagcagggctggcctgtgggaaagctgag

SEQ ID NO: 66222 - DNA, 1120 bp, Homo sapiens
actgctagggctgaaggtcctgtagaactgcacagatgcccctcaggcacagggcagaggccagcctgccagaagcttccccatccctagcatctctgggctccttcagcccttttagccggagataaattgcatgccagggggctgctgggtatctgtctctgccccaggctcactctcttgcactctccagataaccatctcttagagaaggctgagctgctggacaagttctcaaagaagctgcagccggagccaaacagtgtcactcccaccacccaccagggcccctggtaagtgtatgtgggtccgtggtcacaaagggctgcctgtgctggggccctgcccctgctgcctgtgctgggttcattctctccctagtgcctcatcagcccttggctgctgcccaggggtggtgggggtggtggaggtggtgggggtggtgggggaggcaggcccttggccttcccacaggacagctgtttagaatctctttcccctccacctttctttgtccatctctctgcatttgtcccatctccttcccgtcccacccctatacttatgtcttttccctttctcagtctttttccatttccctgttccttgcctgatgcctaaagaaagggtcttgctacctgttgcaaagagggagtaaagatgagaaccaggaataggttggggctcagagttgggaggtgctttgcttttttttttttgagacggagtctggctctgtcacccaggctggagtgcagtggcgtgatctcagctcactgcaacctctgcctcctgggttcaagcaattctcctgcctcagcctcctggaacgtgcaccaccacccccggctaatatttgtatttttagtagagacggggtttcaccatgttggccaggatggtctcgatctcttgatcttgtgatccttccacctcggcctcccaaagtgctgggatcacaggtgtgagccaccacgcctgactgggaggtgcttcttgagaagggtccttggccaaggcctaggggaatcttagagcagaggagtcatggacagctcatttctagagacttgccttttcctttactggcttgctggcttccatcttcccaggacgaagt

SEQ ID NO: 66223 - DNA, 1083 bp, Homo sapiens
cgccggtgtctggaagggaggggggcagcagccgccccctggaggaagggaccgggtctagccccgcctgcgtgcgaggcgccgcgccagggtctcaggatgctttttacccaacaagggccaagcaggcgcgggtgtcccaggagctgaagaaggctgccaagcggaccgtgagcatcagcgagtaagagtggggatgggccggtccgacccttgcgttctgcctcccgccccgcctgcctgcggcgacccaggctgccgactgtacttgtgcacagccccgtcctgaggcccccatgtggtcggagcccacgagacacctgcagaggaccgtgtggtcgtaggagcctgcatgcgtgaccgctgcacgtgtacacccacacagaaccctcatcactgggaattcctgtcttcagcgtatcctgtgctggggtcgggaggggctggcttggtcccttggcctttctgaacttcattacctctcctaggggcccggacaccctaggcgatgggatgagggagagaagggagactctggctctggcccctgagccagagcccctggagaaggaagcttgtgagaagtggaagaggcccttcaggtgaggacccaggtgacagtctcagagctctgagctgagccccaccccagaggctgccagggtcttcctcttggaccttggagccagctcttgggttgggagggggcttgaggagaggccagaaagctcagatctcccagggctagtctgacctccattgtctggagccacttggggtcagttccatctcacccccccaacccctaccctcaaccctttccctccttcttgggatcagagctctgggggtggggagtcaggcttctgaatagctgtcaccaggagagaacctgtgggcaaagcccagagcccagtcatgccaggcatgtgtgcgcagccataggtgtgcaagcatgtgcatccgcagggacatgaggccacaggtgtgtacaagcttgactgagcccgtctgtatgtgtgaatatataagcatgtgtagatgtgtgctcacacttgtgggacctgattggggcttcagacc

SEQ ID NO: 66224 - DNA, 1059 bp, Homo sapiens
accttcagcgtctctcctccctgtaggccccggctcagcttcccaggaacttttgttggtgggtactagtagggtaaggcagttcttcccatcatgagggagaccttgggagactttcattaccaaatccattgctgccccgaccttcctgggactgatctgggtcaccctggtctcctgatcttggagaagtcaagttcttatcccagacttgagaggttacaagcctccaggtctctggcaaagtgtggagatgatggacagccatttgtacacacaccagccagtcccttagcatatctctcttggttttgtctcaggtctgcctcagccacctccctgacgctgtcccactgtgtggatgtggtgaaggggcttctggagtaagtgtgtgtgtgcctgtgtgtgcacccacgtgtgtgtcgggctccccagcccaggcttggtctgtgtctgtgcctcgacctgtccatccctgtgatgtgcagctgtctgcctgtgagtctgttgggccttggagacaggagccaggtgaatggcctcagccccggccccggttcagctgtcttccaggttctgtcctcacaagggtctgtcttcatccaaggtcgtcacaggggaccaagagctccagcctcaggcagggcaggagctcctactcaattgggaaaaatgctctgaaatgtcagggactcattcagagtcacagagccaagcagtggcaagactgggattgaaaccccggccctgaggtttctttgcacccaccaaccctaccctgctcctgtgtctgcctctgtgtgctccccaccccgtctccacaccaacccctggggtcgaggctgggttggggaatgctctcgctgctccttggggccatgttctgccgcctgccatgtctgcttcctatggttgatgcctcaggggagctggaggctcccacctgagaaggacttgctgaatgccctcctgaccccaacccaccttaccccagttttaagaagaggagaggtcactcaattgggggagcccctgagcagcgataccagatcatccctg

SEQ ID NO: 66225 - DNA, 1034 bp, Homo sapiens
tcccagcactttaggaggccaaggagggcagatcacctgaggtcaagagttcaagaccaacctgagcaacatagtgaaaccttgtctctactaaaaatacaaaattagttgggcatggtggcacatgcctgtaatcccagctacttgggaggctgaggcaggagaatcacggaacccaggaggaggaggttgcagtgagctgagaatgcgccattgcactctagcctgggcaacgagagtgaaactccatctcaacaacaacaaaattctcttattcaaggactcagccagtctaacggtctaagagccttgggctccaacattcttcgatactcagccttctactctgccccagccctcatgccctggctcccagcagccaccaggggtcaccagctgcctagtctactgaggccattcccgtttccagggacacatggctggggagaccgacactcctgtagccaccgtgactgagcccttaggaggtgccaggccctgccctgcaccctttctgcagcattatttgttcctcccaactacattgccatgtagctaccatgtttcccaggtgagaaaactgagctcagagaagccctgcagctggactgtggctgcattacacatactctttttaaagcaacgtgttcagactcgcagttaggcagggctgcggggcatgccccctcccccagggtgtgtgtgccccctgcctgctaccacgggggtagaggtgtgatgctagccttgtgtctaacctgactccctccctacatcttcacccttttctattctgggtcctgagcctggacggttagtatcccttgaagtgagggacatgcagggacacaggagtgagggaacttgaatcttgggaggccagctgcgccattgcgtttctccctcatttcacagggttgtagtggagactgcttagagagcccagaggaggtgctcaggaaatggtctgactgatctctgggacagtgagcccttctctcccccaaaaccttcccttctactttatgggcgtc

SEQ ID NO: 66226 - DNA, 1230 bp, Homo sapiens
aatcatggagaagattcattaatgggtattgtcactgaagtgatcaaagaactaaaaatttcttcagttatcaccttacttttggtcaaaaatcccatggggacatttggcgagcatttcaagttttttaagattcttaggagggatggagttttcaaagcataatacaacttgtagattaaattctgcaaatttgatttcttaaccaaggaaaaaaaaaaaaaacaaaccacaaccggcgaacatcccttagtccctaggtattgtgctccctaccttctacaggagcggacagcagacagtcagcacctgacgtgggggcacctgctgctgcaggcttgctggcctgcagagaaggccactcctggctttccctgtgacacacagaagacacttgtcttttcctggtcaatctgtacttgtgcagggtgcgcaatccttcagtcctttctcatagaaagctggtttcctccacgagccaccaggttcttccttccacggaaatgtcagggtagtgggacctggaagctgcattttccaccatagcagttggtctggaccagccacagcctggctgtctgggccggtctgctggcttgggaataaaataatgccggggcgtccccagtagagaagctcaacaatgcaggtatgtgtcctcaacttatctagacatttggattctaaggatactggtaagaagagtatatgctgtaaaaattaagatgaaaaatacccaaatacaaaagaacattatattggctaatttcagatccggaagttccatttctgctttagccacagcctcctttctattagtctatgtgatgaacaagatgtggctactagttcagcccctccatattagctctgctaattctaaatgaatggcacagatattaatacgaaggacactgttattttaagtctgttagttgtggaagagatgtgcgttaatgcaattggtgctaaattcagggcagtccaatttttcccaataaggtttcactttctcagtctggggactaaccttggggaggagccagcctctcctgaaatccctccttctgtttccttatgtagccaacatgatctgattaattctcaatcagatgagcaaaagccacttgaagaaagatgagaatctttgccacatccttgtggtcacagtaatatactgtacgagtgcacatgatcagtaatttagggactgtgccctggaatgaggcc

SEQ ID NO: 66227 - DNA, 1069 bp, Homo sapiens
ggccggtctcaaactgctggcctcaagtgatccacccaccttggcctcccaaagtgctgggattacagacgtgagccacctcactcagcctctccatagctttttataagggcagcagtttatttaaaagtgtactacctccctggtttgctgtcacatacattaacgtctggtcgtgttgatactttttaggtcttgccatgaaaaacatttttattacaaaaatgccttttgctggcatattcaaggcatagtgtggtttcagagtagtgaaggaattccattggaaaagctatcaagggtaaatgagtggggttttttcctcaatattatttttctgtctcagggagctatggcaacatccagaatctggattttgatgaaatgttttaatgttcataaaatgggaaattgatcttgaaaatgaccccttttttgccttatttttgtttgtgtaacttggagttaattttacattttgagattgtgagattttaaaaactttatggttttaggtgatggttttaacccatcttgggacttggggaaagcttttaagactgttttctagagagccagaagccagcaggcccctgtctattacacatgacaggcaagactgttaggaagcaaagccacacggactttccagcccctctgtggagcctcagagcgtttacagatttggcagtctcaagggcaacatgtgggtggctgatgctggtggattgctgctgtcagggataataaaaccattatggttagcagcttgtacggtagcacgcaaatggatcagctcagtctccacacagttaagttggagcataagaaatccaaaccatgactgatctcaatcatttcctttcctacaatttttttcttttggccactgctttacagtgattccagatcaatcctaggcactgcacccactatcatcaaattcacgtacatagttctttgcattttcactgcatgcttgtccatgggagccctctggtagcagttccaattcagtgccttctcgtttgcctttgcttcccaaatcatcacagttctgtgcttatcc

SEQ ID NO: 66228 - DNA, 1053 bp, Homo sapiens
tgtctgttgatcccctctatgtgtccatgttctaatcatttagcttccacttacaaatgagaatttgcggtatttggtcttctgttcctgtgttagtttgctaaggataatggcctccagctctatccatgtccctccaaaggacatgatctcattcttctttatggctgcatagtattccatggtgtatatgtaccacattttctttatccagtctaccattgatgggcatttaggtttatttcatttctttgctattgtgaatagtgctgcaatgaacatgcatgtgcatgtgtctttataatagaatgatttatattcctttggttaacatcatctttgataacttactcatgttgtatttggagtgatgtccactgtgattacttctctgtccagtggagttgagagattctattagtaaatattgaggagctgtcttcctctgtattaggtattaccagattctttatctggattctcccttcctcgtaaaaacaaaagctaatgctttattaagtacctcctatgcaccaaacatgtgttaggggttttaaatattttacttcatttaatctttatgctaaccctgtgaagaagtaactgtcttcattagagagacgaggtcattgaaattgaggagttaatttgcccaaggtcacacaacaagtaagtgacatagtcaacattcaaacccaagttggccagaccccaagaccctgctttctacctcatgattgtgccatgaagctgagcccctcagaggtgtttttaatgagtacaagaagatggctcccaaaaccaactcaaaaagatcatctttcctgcctctgcaataagagtaagcattttggccgggcgcggtggctcatgcctgtaatccaagcactttggaaggccgaggcaggtggatcatctgaggtcacgagttcaagaccagcctggccaacatagtgaaacccccgtctctactaaaaaaaaaaaaaaatacaaaaattagctgggcatggtggcacacacctgtagtcccagctactccggaggctgaggcag

SEQ ID NO: 66229 - DNA, 1116 bp, Homo sapiens
cagattaccaaaaaattggaaaatacaatacagaagaaaatgattaatagctccatccttataatagcacagctagcaatttggtgtatttccttactcttatttatttattttttaattgacaaacaattgtatatatttatggtgtacaacataatgtgtatttttgtttgtttggagatggtctccctctatcgcccaggctggagtgcagtggtgctgttgatggctcactgcagtctcaacctttggggctcaatggatcctcctgcctcagcctcctgagtagctgggactacaggctcatgcccccatgcccagctaatttttgtatttttcaccatgttgcccaggctagtctcaaactcctaggatcaagcagtccgcccacgttggcctcccaaagtgctgggattacaggcatgagccaccacacccagtccatatttttattttttctaatcttttatttatgagccactatgcccaccctgttcttttattgcttacattttcaaactatagcccacaatgttaacatcacttccccgttttcagccactttccccaactaatgtgcaagggcaaactgccagtctactctgttgtacagcctcacttagagtatgaacatctgcagagttgcatataaataaattctgactttggttgttgtgagaaccatgcttaataatgatgttggagataagggtaagataaggagtttctaaaactgctaagatcatatgctttggctgggtcatataataggtatatatttaacattttaagaaactgacaaactgttttccaaagtggttataccattttacaattacatcaacggggtactagtgtttcagttgttccacaaccttatcagtacttactatagtcagtctttttaactttagacattctaataggtgtgatgttgtaaatcattgtcattttaatttccatttctctgataatgttgatcatcttttcatatgtttatttgcatctgtatattttctttggtgaagtgtctgttcaaatctttgtttaatttttattgggtttgttttatttttattgcattttaagagtttatactctgaatacaaatccttt

SEQ ID NO: 66230 - DNA, 1033 bp, Homo sapiens
gggacccaatacaaggaatccctgcactggtttaggtttaaactaaactaatggttttctaacacccccttagaactccagaggttttgaggaagtgcttcactggttgtggggtgaagggagaggcagcgtaggcaagcatagagaatatgagcatgtttttggtacagccccatggaagtgatctgaatcagaacaggcttgccatctgcctgggctggagaaaccccagtaaccccacctccacttcattcctgttcacagtctaattgacagccaccatagtgaggagggcagggtgtacaatgaatagtcatttttctctttgaattcagggtcatgtctaaaccactatcttagggtgctggccaagtagtgttggcaagccctcatctactctaagaaacactggcctgtggtagaagagttattcctgttgtttgtttctccgcactctagatgaagccagtttttcagagccttggtggaacaggagtaattattttaagacaagtctcagaggttttctgaggggtatttcatgtattttccatttccagaccccatgcatggtatcaccgactggtaccctaactccacgaaacctcccgccatccccagtagtagcagtagtaggtatcaggcacacagagtcttcatttaggccagatgacctattatttccatagtatgccaaactagactgtgtttgttagtttcaaactaaaaatatgaagtgaaattctcataccacgatgtctcacctcttctaatgcaagtatttaagtctacattctcaaaaatagttttcttatcaaaaatgttgaatatagtatgctaaaaccattgtagcagatccgttttctcagttttgaatatctgtagcatttaattaattttactgttagcataaaataatctcacttggtttccacttaacagatacaaaaaatagcctaagtaaaattagccagcaaatatgagggcatatttattggggtagtacttacaggattatcataataaaattttt

SEQ ID NO: 66231 - DNA, 1039 bp, Homo sapiens
aatgttgggggaaaagtctatgaaaaaatcttatctttgttccttctatgaagtggttgatttttgagtgaacaattttgttgttgttgttgttatttttagtagagacaaggtttcaacatgttgatcaggctggtcttgaagtcctggcctcaagtggtccacccgccttgcctctcaaagtgctgggattacaggcatgagccaccatgcccagccgtgatcaaattttttatgtttatttgtccatttagattttctgtctctttttcagtatatttgggtaacttacattttcctggacaattgtccatttcattaaaatgtccaattttcctaggcagttgtccatttcatttatcagatttgatgtcataaacttgtttgcttctagaattgtctctgtttttgtttttaatattgtgtgtgccctctgtcttattttgaccagacttgccagtctattttattaatctttgccaagaaccagataaaatgacctttattctgcttctcagtgttgtgtctatttccttaatttttgcctttatattcattatttctactgtcttacagtttatgttattgttctttctcaagcttctttttctatttagatcctatattttcagtctttcttgtttttaagtaaatttgtttaaagcttttaaaaaagtgtctttctgcttgaactgcattctgtgatatgtagggcttttgttttatatctatttttttctccttattaacccatgattatttagaaatgagtttttcagtttccattcagttggaatatgtggtagggtgacatttttatttctaattttattataaattgtatttttaatccaacgacatttattctaattttattataaattgtatttttaatccaacgacatttattctaattttatcagagaggttatcttctagcaaaattctttgaaatgtttttttccaagaataagttggactggagacactacccttagtttataaaacaggaaacattatagtcgtaacagatagctaa

SEQ ID NO: 66232 - DNA, 1978 bp, Homo sapiens
ttaaagattttttgaaaaagaaattgtgaaaaaggaattttgaaaaaggaattgatgggaagtatactcatcaccagcagtaggtttctggagatctaagatctggagtttacctcactaccttagtttctaatgcttgtcatgctttctcaagaccatttctcaaagaatgttcctcttctctaactataccttttctttctgatccagcactgttaggcatctcatgttttctggtgtgttttacttttcttaatatctaatactatgtttattttattttctattggagcacaataacttcataaatatctcttattctttgcactttcagtaacaaaattttttcaagtcaaagtctgccagcaccatagaggagtagttgtgtttgcttcaggattgtctgaggctttaaagcgggtgaactgctgaccttgaggaaaagcagataattctatcaagaaagcctccctccaggagtaggcttttattgctttattatatatcttaaactgtaagatcctgtttcttcacctgtggaaataaggtgaacaatatccttttcatgaattgtaaatatgtgtaagtgcctggcacatagtaggtgttctgtaagtattcatttatctttcttccttcccttatcttccactaatccatataacttaatgtctcatctctaccaataagctcttatgtatcttaaccaaattttcttaccaaaattaactataggccaggcatggtggctcatatctgtaaccccagcactttgagaggccgaggccggtagatcacttgaggtcaggagtttgagaccagcctggccaacatggtgaaaccttgtctctactaaaaatataaaaattagctgggcgtggtgacacatgcctgtaatcccagctactcaggaggctgaggcaggagaatcacttgaacccgggaggcggaagttgcagtgagccgaaatagtgccactgcactccacactaggtcacagagtgagaccctgtctcaaaaaaaaaaaaagatagtcaaacttggtgaacacaagcaaacaaaaaagtgtatggaattgtttttgctctaaaaatactagagactaatactagattagtgttttccttcataggccatatatatctttctggtattaagatagagaagagagagttgcttcatctgagtgaccaagcaagaccaatataagttaaagtacacagggagtttccaagcattaaactcatgggtgctcttcctgtctaatcttgtcttcatttggtaagacatatgcagacctaccatgaagcttcagggaatttttgattcttgccaaaaataaaaatgccctgaagtgtgcctgttgaaaatgccaacaatatgtagattctgaaagttatcttgtaagtgaaagaaagagtatagctgttacagtattcttgtcaaataggattttccctaagttttatgggagtaaggactttctctgctatactgaacgctagcctcatttcctcagcaagcatgattgatctcagttagatattaagaatttataaagagattgtgaaagggtaaacctcaaatcaatgggaaaataacagattttaaaagtcatgacattgagactcttaggaagaaaaattttgtttcttccatcaaaccaggccaaagtaagttataggtttgttaaagataaatgtaatagagaaaaacatgggagaatatttatctgatcttagtgtaggggtgagatttttaaggattctagcaaaggcaagcactatatgggaaaatggtgataaattttacaatcccacagttcagaaatgtgtaataataacaccagagcaaacatttattgagctaaatgccaagccttgtagtaagtgctttacgtataagtcagtgccaaggttgagaaactctgccctagagctgcgtaatctgtcgctctcgtttgctgtgttatcatatg

SEQ ID NO: 66233 - DNA, 1050 bp, Homo sapiens
tctcaaaaaacaaacaaaaagtactaaatacagagaaatacaattcaaaatgacctagaaacacctggatttgatatacttgtagagcagctaagaattgggagggcagataccacattttaaaactgaatattaaagaataaaaacagggtgaaaagtcacaatgttggcgatggaaagcattaggtttgagcagtgctaaggcagcctcacatgtgtgttacctccccattcctaggtcaccattttctatttaccctactctgcaaccactaaaaagtgctttagatcaaaagtaggaaaacatagtaagtgagaggtatgtgtgcctctttccctaagcataatttactttctctgtcttcacccccaaatttctggctcagtcttcttatctacaacttgggaattctttttattaaagcctttctttacctgtattcttattatcagagtgtatttcacaccctggggttctttattatgccctgtcccttgccccataccctttctccacatcaactcccaacattatcaaagcagagagaactttctggtggctaacagaatggatactattttactagaaatctttgtaactttaaaggaatgggaatggcaaataggtttcagtttatgtgtcagttgtaagaaattaatagcagctgcatggaacactggaccaagaagtattatgaaactgctaggctcaagtgccataatccattatcagtcactgtcataggtgtgagaagagtgaatgacagcacatggactccacatttgaagccccctgacctagcagatctctgcctttgaatccatttaaatccaaaggagcagcagactagagcatatattccatatgatatagtttggatatttgtttcttccaaattgcatgttgaaatgtgatccccagagttggaggtgagatctaatgggaggtgtttgggtcatgagggtggatccctcatgaatcgcttagtgcccgcctcacagtaatgagtgagttcacatgagactggccatggcatctcccctcccacc

SEQ ID NO: 66234 - DNA, 1022 bp, Homo sapiens
ctcttttaccaaagaggtaaccaaggcatagagaggtaacttgccagctcacacaggtaagcagttaagtggtagaactggagtttgaactcaaccagtctggctccagtgtgccttctcttaaccactgtgtaatactgtcactcatccagagtcacttccactgatgcctgctgaaatcaagatatttaacttttgtggcagttctgtaatctattgactctaattgcttaaaaaaaataggagggacctttgtgatatcattttggtgtgatttttttttttattttaacctgtgctggctcctgatgattattggtattttttaaattacaaagctatttgtttaaccatcttttccagaatttgataggaaatcacattaagcttacctctctgtcatttgttttacataaagaacattcttagtttaaaaaaaaaagggggaatttagttcatatccttagttgacaatggttgaagaaaaacatctcaaaaatcacttagtttatataaagtatattttgtaaactcctgttctttttacagtgaatatcaatcgcttataccagaggttctcaaacgtttttgtctcaggacctctttacactcttaaaaattattgaggaatcaaagagcttttgttgatgtaggttatacttattggtatttaatgtatttgaaatttaaactgagaaaatttagagacacaagaatgcccaagtacagatttcattagctgtcagagcgattgcatcatcacgttattcagcctctagaaaactataccacatacttgtgaaagagtgggagttaaaagggcagacaatgtcttagtattataaaaataactttgaccccacaggtcccctaaaagggtctcagagattccccccagtggtcccttgatcttaccttgagaacctctgccatatactaaataaacttattactgtcttcagttagaagaaactctaagactaaaattgaagatctagaattgaatatttcaatggaattct

SEQ ID NO: 66235 - DNA, 1060 bp, Homo sapiens
ttcactgtagatgtatggatttgattctgggttctgtcttctgttccattggtctgtgagtctatttttatgccagtaccatactgttttggttactatagctctgtagtataatttgaagttaggtaatgtgattcctccagttttcttttccccagcctaattattctgaagaataagatcaggcctggcacagtggcttacacctgtcatcccagcactttggaaggcgggggtgggaggatcacttgagtccaagcgtttgagaccagcctgggcagcatagtgagactttgtctctacaaaaaaatttaaaaattagcacgtgcttgtagtcccagctactcaggaggctgaagtgggaagataacttgagcccaggaattgaaggctacagtgagctatgatcctgccacagcactccagcctgggtgacaaagtgagacctcatctcttaaaaaaaggaaataaaaagaataagttcatgttgatatctaaatacaagtatttggacagattccccaagaaatactatttatttcttatgccagtagttactagagcagatactgaatatatctttctctgtctgtatattattaggcagatttctttaaactctaaactaaaacaaacaaacaaaaaactattgctagaccctggaaatcagataactgatttcatcaaatctacagaaatcaactcagctggtttgtggtgagataatttgttcctcacatgttcctttttcatagcatgttcttgtgcaatatatgaactaacattttttagaagcttgtgaaatattttctttgtggtttggatgaggaagaatgagatacagtgtgtcatagtagaaaagagaacaaacgtcaatttaatggaagattttttaaaagcttagtaattcttaataggatttatttctagacaaatatttcttcagtggaagccaaacatacattgactagttgataatttggtgaagtaataaaagataaacatctttctgtatggcagaaatctagaaaatataatttgacttatcttttgcagactt

SEQ ID NO: 66236 - DNA, 1047 bp, Homo sapiens
ggatttgatagggtctgattcacagagctgatcacaaggaattgccttctaacatgacccaaattcagaggggatacagcaagctagacatattaatattaacttttcaactatagagtaaggaatgccactttatcttcatttattcgcagtttgttgaatactttatattggatatggtgagtacagagatgagtaaggtaagctttgtgccctcaaggaatttaaggcctagaattagaaactcaaagaaatcaagtgcctaaagtcacttaatattaactaataacttacttgcagtagtaatgtgaaaacacttttaggaaagcctagaaaatatagaggttaattttgcctaatgataaatgaaagctttatagaagaagtgatgtttggatagaatcttgaggaatgagtataaattttctaagtagagataaggaggaagatcaggaaggggaagttaaactgtactacctatagtttttatagatgatttgatagatggtgtggagatgcacacattaggagagaccatagaaggaagagggatacaatttgaaggagatgatgaatttcattttggatatgtttattctgaagagcctgggaaacactggggtgaatatgtttggaaggtagtcaaatatctggcacttaaatgagaatttgggcctcaagatctcgctttgagggtcagttgcctatcagatggtagttacatagtatatagaatagatgagaagttgagtttggaaccccaaggaacattaattttgaagggtaggtggtaaagagtagcacgcggtatagttcattatttgtgtagtgtttgggtgtaaaaatcctgccttattttttctagattgaaatgtttgagaacaggtactattttattctatctatcactaatacctaccttaatactacacaagaagtatattaggattaggaaataaagcagaagccagaaatttaaaaccttatattggaagatctacatgcaactcagcctatttgggtaatgactgtaaaaaaaggagaact

SEQ ID NO: 66237 - DNA, 1058 bp, Homo sapiens
acaacaatattaaatttggttctgatttctgtatcaatggcttaagaataatgacaagaaacaagataggtaaaaggtttaaaacagtttcataggacgttcaagtgtgaactaaataaactacaaatttttatgattggaaagactgggaatgggatgtagactactagaaagagataagaagtataaaaattgtttttatcacactctggggactgtggtggggtcgggggaggggggagggatagcattgggagatatacctaatgctagatgacacgttagtgggtgcagcgcaccagcatggcacatgtatacatatgtaactaacctgcacaatgtgcacatgtaccctaaaacttagagtataataaaaaaaaaaaaaaaaagaaaaagggggaaagagagacacctgaagagttggataattcttttatactatgtaaggcatattttaaagggctaccatttttagagggtacgttcttaccaactttttaaggagaggataaaattttgtgaaatcaatattatggttattaaaagcacaaaaggaccataaaaaaaaaattgttttcaaattcctaaaagtctatcatgtgtacaaggaaggtttcttaaaaaagttttgctcaagataaatagaaactaactataagctgaatgctttgagagagagtgaaatactgtcactgaatgaattcaggtagaagttgccaggcctctctatataagaagtcagtaaacttttctgtaaaaggccagagagtaaatatttttggctctgcaggccataagatctccagggcaactaccctaatatactattgtagtgagaaagcagccatagacaatatgtaaacaaataggtatgtccgtggtctaacaaaactttacttacaaaaacaggtgtcagaccagacagccctagtttgccagcctctatattaaaaagagggctggaccatatgaccttcacaccacttctagctccaagtttccataaaaagtcattaagcaattcaacaatatgtagaaataagtgaaaaagacgtatt

SEQ ID NO: 66238 - DNA, 1034 bp, Homo sapiens
tactgtgtcctaggtactatgccggtcacttaaagacatgatttcatttaatctttaattgtggggtattcatttgtttactacaaaggtccttctgcattttcctaggttgtttccttatgtacttcacgatgcaaatcaattgtcaacctatggattttatttatttattttattttattttttagtttttgagtcggagtcttgctctgtcgcccaggctagagtgcagtggtgtgatctcggctcactgcaagctccgcctcctgggttcacgccattctcctgcctcagtttcccaagtagctgggactacaggcgcctgccaccatgcccggctaatttttttgtatttttagtagagatggggtttcactgtgttagccaggatggtctcaatctcctgaccctgtgatccacccaccttggcctcccaaagtgctgggattacaggcgtgagccaccgcgcccggccttgtcaatctatggattttattccctcatctgttgctgctcagtctgaatttgatggctctcatgtgctctcctgtagtaccttttgtttctgtcatatgacttattgttctgttatgctctcttctctacctattttgcatagtctctggtatgtgttaaatgcatggtgaatgtttatttaatgaatgaatgaatgaggaaatatagtttcaagttctgagaatgataataaatccttaggtgaaatttaccccatttgaaagattaaattgattcattttagcaaagttgaagagacaaatgtacctaaacagtcctttttcattgtgaacatgtatgacttttagaatctagggagacaaaaaataatttttaaaaagattacattttgggggtatgagcagtgttctttactaataccggtattccctagcagtaaaaaataactcctgtacatcaattagcaatttgtttgcatcaaagagattttaaagatggagaccatctctttactttaggcacagttgcacaggacccctaccttggctcgtaagccc

SEQ ID NO: 66239 - DNA, 1043 bp, Homo sapiens
aactcctggtctcaagtgatctgcctgcctcaagctcccaaagtgctgggattacaggcgtgaaccaccatgcccagccctcagtgatgttttagatgtgatgaaaactggaagtagcagatcaggtactggactcaggtatttaaaaattcattcaacaatcatagttgcttctcaattagtattctttcaaattagaacttaaaatgttgtaaatcttgagagggagaatttttgaaaaactgagagctgcaagaaaaaaagatcaagtagggctacacttaaataacatttctttaagagagggaaaaaaagattacctgattttataattaataaaaggtaacatgcaacttcgaatgactaaataaaatttaaatgtaaatatatacttccatattatggtcagttatgttggggagaaaaaggagatgctaactaggcagagaaggaaatatagtttgagagggtctgtttaattaaactttttttgtcacagaccactgtgtacttgaaattgaaagaattagggttttggtaatacctcttcctattggtgactcttggtttattagctcctaagccattattcagaaatctttacctgctcctaaaatttaaagattcttttctgaatgggacagccattgcagcccaaggcaggtgaagatagtttatgattcatagacatgaatagaggatactctcctgaacttgatggtattaaactaaggactaataatgaaagttacttatctctagggttaagaatagaagtgttagtctggcaccatagcacgtgcctgtagtccttgctaaggcaagaggatctgcttgagcccacagtgagctatgatagtacttgtgagtagccactacactccagcctgggcaacttagcaagaccctatctctaagaaaaaagtattgaataatttttatgtatactttaccttcccctggtctttttagccacacccaggtatataaatataagagattatgggccaggcgcggtggctcacacctgtaatcccagcact

SEQ ID NO: 66240 - DNA, 1051 bp, Homo sapiens
gggcacagcctctgaaatcagacagcccagagtggctatgccgtttgctaattcaggattcaacgagaggaggtatatgaagccacctaacacagaacttggcacagggacagcactaaactcttgttgtgatataggtgttagatgataagggaggccgtctctgagcaatgatatgaccatgggactgcttttgttgtgcctgagacaggaagatgagggcagggacagagaggatgggctttctggagggatggtgggtaccagatcagccagggcctgagtgccaggctgaggagctgggacagttgcctgagggcactagggagccacaaacatggctcaacaatgtatggtaggattcgtgtttcaggaaactacatgactgcagtgtgaaaggtggacagacggggcaggggtggaggcacggaggccagtgaggaggctgctgctgtggactgtggaagcacaggcctcgggctgcagtgtggggaccgcgtagtgcatgtccgaggaatttcactggttggactaacagggcttggtgagtggtgggcttccagcagggtggggaagagggaggttgtccaggctgtatcagaggtttgaaacctggaaggatggtgggggcccttctcagaaatgagaaccacttgtggaaagtgatattctccattttagcctgttgagtcaaggcattttctaaggaggaggagacagggtgtgcacctgggtgcagcagggtgaaaaggctgaccatccctcaccttgtcatagtctctagagtagatcagtggggagctaccagcccaccggccttgtcaatctgagaccaccaggcaaggtgcactcagtaagcagtggcccagaggcatttcccgtgtgcacccacgccccccgtacccaagctattcctgcagtgcccccatctcctctcccacatccccccagccttgtactgcacttccagcttgggaacctgggctcagctgtcgcaggcccactcctccatcctaggcaaatgaagatggaaaaagaaaaactcaggagg

SEQ ID NO: 66241 - DNA, 1049 bp, Homo sapiens
gaaggatgaatagaagttcactaggaaggctgaaggaaaaaaaaaaatatatatatatatatatatatataatatataaacaaaatgaatcagattgctcccaagagttagctttattgtatcccaagttttctcaaagtgagggctctgtggggcttcacggggtggttagagtagccgagttgacaaagttagtgccctcactgttcagacagggagatcaaggcccgaggaggggcagggcctgctgggtggtgagtgagcatgtcactgacaggctgtgtattgctttcccagcctccctgaacataggaaacccacctgggcagccatggaatgggacaatggcacaggccaggctctgggcttgccacccaccacctgtgtctaccgcgagaacttcaagcaactgctgctgccacctgtgtattcggcggtgctggcggctggcctgccgctgaacatctgtgtcattacccagatctgcacgtcccgccgggccctgacccgcacggccgtgtacaccctaaaccttgctctggctgacctgctatatgcctgctccctgcccctgctcatctacaactatgcccaaggtgatcactggccctttggcgacttcgcctgccgcctggtccgcttcctcttctatgccaacctgcacggcagcatcctcttcctcacctgcatcagcttccagcgctacctgggcatctgccacccgctggccccctggcacaaacgtgggggccgccgggctgcctggctagtgtgtgtagccgtgtggctggccgtgacaacccagtgcctgcccacagccatcttcgctgccacaggcatccagcgtaaccgcactgtctgctatgacctcagcccgcctgccctggccacccactatatgccctatggcatggctctcactgtcatcggcttcctgctgccctttgctgccctgctggcctgctactgtctcctggcctgccgcctgtgccgccaggatggcccggcagagcctgtggcccaggagcggcgtggcaaggcggcccgca

SEQ ID NO: 66242 - DNA, 1046 bp, Homo sapiens
ctcagatgaaaaaagcttctagatgggggcttctaggggaggatagaggcagggagggggctgcagaggctgggcagccagggccctttagagaggtcaggagtggttctgggccccatattcagggctgcctctatgggtctggggggtcggttcttgttcccccatcctgtctgcttgcatcttttccccactctacccccttcttggtgactctgagatgcaccccgtttctgccagacccccagccctgggggctcactctccctgagacccctccttctaccttctggcttcagctatccctggagtttaggctgtggattcagatgggatccagatggcatatgccctggcatctgggttgggagctagattccaggctgtggattctgagctgagctcagcgatggccagtggttacttcaactgtggcctgcgctcccactgcgctccctgactgtgtgagaagcctggaaattataaaccctggactgattcagtcactccctttcccagcactctcatggcccctctgaactccctttctctttgtttctctctccttgtctccagttacccctggtcctggctctggggtttctcatggaggctgcagagagagcaggcagggagtggggagcggggcgttttgaacctgtccttccttctgagtcccagtgagggcagctccggtgcccctgaactccagtgccagttctgaaggtgggggaggggaggaagacagcaggtccagttcttgtcaggggtctcctccccagcctcctttcccatatatcttttctgggagccttgaaggctcaaatgggggagaggacaggagtaaaccaagggactcagggagactgaaggtgggttgggggtgcttctaagagaaggctttgagacccagagaggaggtgggagtttacagaacttctcctgccccacctcccttcacattctcctctaccccccacccctttctggagctctgaggcgggacagatctgccataacatgggcttctccctgccacgaacaga

SEQ ID NO: 66243 - DNA, 1206 bp, Homo sapiens
actgaggtctcactctgggtttcttggtatcccccgcctttccctgtctccctgggatggggcctggtgatgagatgtccaacttctgggcaggccagaagggcaggaggaggaagaaaagggccagggcctttaatgccagaactgtctacctggaaagactcttagaaaccagccatgttttctagccttcctcacccctgcatcattcagatggggaagctgaggcccagcaaggggccttgcccaaggccacacagtagtggactagagccagaaatcccccccatgcatctcaccattgctccagcctcacactgtaaggggtcactgagagttcttgagaagtgcagtgacgtggttcacctggcattttagggaacttgtctgagccagggcaggaaagggaagcccctgtatgtgtctgaggccaagaggggcagggaggtctcagtttgaccagagcacctggggagaggctctgtgtgggcaggaaccaggttgaaagcctcaagtgccgagttaaatggcctgagcagaggggctcccctctgccagctcccctctccctttctgggagaggaagggctgggagcactgccagctttgcacatcacagtatcctctggttgtgaggtgatgatctgacatgagggtgcgggaacatgagtagcctgagcttaggtagcagaggatgtggagctggcgaggggagaactgactgggaagacaatttggaggcagaatctgggaattcgaatttaggttcaggggttatatcagaaacagggttgggggagcgggactcacttcttgtctcggcagaaatttcctctgcattctgaaagagtgaggtggctgtgagccctgcctctgtgcccagcaagcctcctgtctgacctcaaaccctctgctccagtggaagtgccctgcctctcaggggggtccctgaagagccccagagctccaggccacacctgcagtctggccctcctgggagaggcctaatggagggagcatggaagggaatgaaagagcaggcttgggctgccttgctggctctaacctaagacaagtccctctgccttggtttccccatctgtgaagtgggagtcctccagagtccagcagagctctagaatatgcaggcttttgggaactgagggagagggactggtaggtccacaggcaggcatccttgccagc

SEQ ID NO: 66244 - DNA, 1021 bp, Homo sapiens
cccaggtaatcctctttggtagggggatgagctgagctccctgagggaggcttggagttccccacgggcagctgtccaaaggaaaagagtggggctatgcaggagggatgggactctgcaggctgggggctctgccggagttttgctagcagaaatccccaccttgctttaaagttgcccatcactgactctggagcagctggtctgtgttccttgccatacagatgggggcccagagaggggcagggttgccagagtcacccagtgacttctgaccccaggaccttcctccaggctggggactcactttgaagctcaaagcccagccctgaggtcgctctacccaaggcaggggttgagcgtttggcttgaaggaggaattggacagttctaccccagtctgaatgtgatttgggcagggagggcttcctggaggaacaccacatgtgagactggaactgtcccagaggagaccaatgtggaaacagaagagggaaagcaaagacaaaggctccaaacttggggctccaaggcagtgccccctgttctctggtgcagtcttcattcagtgggaacctcgtcctctgtatgtaggctgggaacacaggtggtgccccagctatgaggaggcacagactgagacaggaacatcaggcctgtgtcaccagggcagggtccgggctggggcagagatactccgaggccaggggagcccagaaggtctaggagagagagtcatggagggagcctagagaggcaggatggagaaggaagaagaggggtgcaaaggctgttcagagatgagacgtgaggctggagtgggcagcaggggcctgattgcaaggtgaattttttaaattaaatttatatatttaatattttgaatagatgatatattcacatggttaggaaaaatccaaaaggataaaaagtctccttcccacctggctgcctatttcctaccctgcctgaccccaggccacccagctagtagtgtctttgtgaatccttttatctgcaa

SEQ ID NO: 66245 - DNA, 1040 bp, Homo sapiens
gatccctgctttccagtgctctgtgcaggtcaggaatcagaggctgaacggtggtggtcctgggccacagggcctgattccctgagcactggtctggtgctgagccagtgttagacattttgaatgaaataacttttagagctgggagaggagggcccctggaggtcatctcattcataggttttaagccagggctgggaccacaggccaggccagtatgtaggcagaagtgtgcataggggaaggtgggtgcatttcctgggagccctaaagcaggagttgccagatttagcaagtcctacctaccctaaggcctcatgggattaccagtggggtccttctcgactgccaagggcagggcaacctcccctgctcagactcagatgtgggacccagaagatctgggttctggtttctctgcctgtaaaatgggggtgacagtcccagcctcttgggctgagaggatgattgcattcaaagcttctgagctcctaagatgtttttcacatctgttgggggtctgtctatccatctacttctcaagccccacctcctgcttcccgctattatccataatgagaaacttttccttcccagcctggaaggtccagctgtatcttcttgaaattgggagggaggggggcggatctcagagaagaaagaaagggaaaaaacccacattaaaaaaaaaacccaccagttaaattcaaaccacatgcaccacagcccctgccatgtgggcctctgctgccacctgtgggcgtctggtggaagtgcagttcttggggcttcagcttcctcactggagccataggcttaatcctgaagcctgaaatcaggaaggaaggtcaagctgtccatcctccacctctgagcatgacctcacccccaccacctctgctgccaggaagcctggtggggaatttagaatccatctacaccttcccttctcccccatttgtttacagagggggaaactgaatcccagagtggagaggaatttggctaaagttgcaaagcaagacagtcaatagataagt

SEQ ID NO: 66246 - DNA, 2805 bp, Homo sapiens
ctgtctgacagctgggaaggtgggtggcagaagaggaggtcaaggccattgagatccggcaaggatagaggttacaggaagggagtgctggggacagacactcaggaagtggactggtcaggccaggcgtggtaactggttggttgtggggggcaaggtggggaagcccaagatgatgtctgggctcctggcctcggataggtggggcccaggggagaagcacaactggagcaaggtggtgagttcaggctcagacatgaacctgggaaggcccacagcctggatgcacacatggcctggggctggatgagtgtggacctgagctgaagtggggcctggcagtcaccattgaggatgaatttgcccaagctagctgggcagagtgacagcaaagggtaaaggtagaaccttcaccctatggaaacatccagagcattcactcactcaccattcattcattcattcactcactccacaaatccacggtgagccccttctgcgctccaggtagtgttctctgtgcaggggcattagtggtaagggcctgtctcctggagctcacggtctatggcagagactgacagtgaccagccagacatcaacacacagtggcatgtggtgatgcagaagtgcacacacagagaacctacacacaacagggatacgccttaaaaggagggaaattctgacatcctacaacatggatgagcctggaggacatgatgccaagtgaaagaagccagtctcaaaggacaagcactgtctgattccacttgcatgaggttcctggggtagtcagactcagagatggaaggtaggatggtgggtgccagggaaagggtgccaggctgggaaaggagggaatggggagttactatttaatgggtgtacagggttgcagttttacaggataaaaagagttttagagctggatggtcacacattatgaatgtatttaataccattgaactgtacatttaaaatggtaaattttatattatatgtattttaccataaaatacaatgcgtttgtttattgtttttaaaaagtgcatggggagatgagaacacagaagggggcctaccctggtgtcggggtcagggagggcttccctggggttggggtatttagctgagacctgaagggtgagtagatttcagcagaaagagcccggagggatggctcccagcagagggtatgtcagggacaaaggccaggaggctggaaggaacctagagcagcagggaaccagaggtggccaggtggctgcaggaaggaaggctgctgggcatggagctgggctttcctgtgcacgcaaggaagccatgggaggatgcagccagaatgccaggcaggaggagtagacatggcaggggcctgagggggtcctttgccatcccctagatgagagttggaggcattagggtcagacagtccagggttgaagtcacgtgcgtcctcactgggtgatactagcctaatcacctcaccttctctgagcctcaagtttgcctgcaaaatgtagctaatctacctatctcccatcaagaagacttaaaggtgagccaggcgcggaggctcacacctctaatcccagcactttgggaggctgaggtaggcggatcacctgaggtcaggagttcaagaccagcctagccaacgtggtgaaacctcatctctactagaaatacaaaaatcagctgggtgtggtggcaggctacctgtaatcccagctcctccagaggctgaggcaggagaatagcttgaacccgggaggcagaggttgcagcgagccgagatcctgccactgcactccagcctgggtgacagagcgagactctgtctcaaaaaacaaaacaaaacaaaaaaaacaaaaggtgatgacggcacccatgcctgttcacaggcaggagtcaggagcagtggagagctgggagcaggcagggcttgggcatgtctttctacctccgccaaatctcccagacccgtccagggctgcacttgggagagggtgcaggacctgtgggtggaggaagccagaatgttgggtgagcaaggtggaggtggacaggagggtgtcacgtgaacccaaagaccgtccctggaggcagccctggagtgtgggaggaggactgaggtctggctccaggtcaggagtatgactctggagccaagccaccagcattcaaacttggctccatctcctggccagctgcatgacccggagcatgtcacataaccagtctctgcctcagtttcctcatctgtagagaggggataataatagacctgccttgagtgcagttaattagagacacatgtttataatttagcatactgcctgcagctctgcaagcatggtaaaaagttgcatttaatctttgtattaaccttgtgaggtagatattatattctttatacaaagaaacgaagactcacagaggttaagaaacttgcccagggtcatccatctagtgagtggtattagttgacattcactgagtgcccactatgtgccaggcactgttctgaatgctttagaacagtgagtaaattcatataagcctgactataaaccccattttgcagatgatgcagctgagacacagagaagtaaagctgcttgtccaaggtcacagagttaggaagtgccacaccctgggttgaaaccctgtcattgtgactctgggttctccctgtcacccactagtctacactgcctagagcacagtggtattcaaattgagattggactccatagtcccagtgttaacttcgaaccatcactgccctcactaattgat

SEQ ID NO: 66247 - DNA, 1021 bp, Homo sapiens
ccaccccaggctcggatgccatcatccggcagcacaaggctgcctgtctgcgaatcacagcgctgctggtgtgtgaggagctgctgtgggtgggcaccagtgctggtgtcgtcctcaccatgcccacttcgcccggtactgtcagctgcccacgggcaccactcagtcccacaggcctcggccagggacacaccggccacgtccgcttcttggctgcagtccagctgccagatggcttcaacctgctctgcccaaccccaccacctcccccagacacaggtgggtcagtgcatcataccccaagctagggatcatggacatttggtttaggactccccactatcctgccagaagagctttcaagagggaggaaaagtgtcacatagagctggaggtggcatatgtgacaggaaatacaccacggaagtgtccaaatgaaatctaggatagttgtgtgtgtgtgtgtgtgtgtgcgcacctgcatgtgttgtgtgtatataaagttctatccagagaaatgtcatgagagacagggagggaactataacctaagaggtagaatatgtcacaaatagaatatgtatatagaaaatatgtcctgttgtatatatttcctatatgcaccaggaaatagcacaggactagaaatgatatatagggcaggaagtggaatcaggaagtgatgcacagagcaggaaatagaaatagcaacagaaaacaacatagaatggcactagcacagaaaatggactgataattagaaagtgaaacagccgggtgccaggcgcggtggctcacacctgtaatcccagcagtttgggaggatgaggtgggaggatcgcttgagcccaggagttcaggacccagcctgggcaacatggtgagacaccatctctacaaaaaatacaaaaattagccatgtgtggtggcacacacctgtggttccagctgctcaggaggctgagctgaggtgggagactcacttgagcccagggaagtcgaggctgcagtcagcagagat

SEQ ID NO: 66248 - DNA, 1031 bp, Homo sapiens
ggcaacaagagcaaaattccgtctcaaaaaaaaaagtgaaacagcaggaaatgaggtacatcaggaggccacaaccagaaaagtcttgctttggcaggacaagaaatgatattcccaagaggaagtggctgtggaaatcaggaagcaataaagcctcgggtcaggagttgtctgggttcacagaagacttaagctacctgggaaagggctgttggaagtaggaggcttatttaatgcaaggacgttgcgtgcagtaatcaagagagatagaaagtggcatcttacagggcacttacattgtaaaaagaaaaaaatcagaagtggcgtcaccttgggaaattatgtgactcctgactagagattacagatgggacataagaagtctggctgccaagaagtgggcatttctttctaaataagttcctagctaacagaaagtgggattcccccataggaagtgtgcacatcttccttcctatcttctggggtgtgggaattcaggccccgatgggacagtgaagcctccattcgcccccaagctgacagatcctcccctctgcccccaggccccgagaagctgccatcactggagcaccgggactccccttggcaccgaggccccgcccctgccaggcctaaaatgctggttatcagtggaggtgatggctatgaggacttccgactcagcagtgggggcggcagcagcagtgagactgtgggtcgagacgacagcacaaaccacctcctcctgtggagggtgtgaccctgtctgccgtggcccaggactcgcccgcccacctgccttcagcctgcttgcctctccctagcccacacgcagactttgaccaggagtatccagccaggggcacacatgtgcctgcgtgggctctgccttgtcttcgcggaagcattcctgatggaacacccactggccagccaggccatggcttctcccgaccctctggctgccccggtgcttccagtcatgatcgggtgggggacatgtgggctgaccaggacctctgaccctg

SEQ ID NO: 66249 - DNA, 1058 bp, Homo sapiens
ttggtggccacagtggcctcctgtcagcaacctcagggctcagtctccctggccacatgggccttccgacgtccacacacttgggaagaagggaggccttggagacccagaagagtgctggacggcgaggttgccacgatttgctgtgttacctgggcaggtggctgggctgcagtttcctcatcaggaaaataaaggggttgtaccagttcagtgctttgtaaccagggttacatggtagaatcccttgcagatgacatgtaaatgcagaaacatgattcgtaacttatttacgtattaattgagagcttctgagtcagtgggcctggatggagcttgggaatctgaagctgacatgctccaggtaaagagccaggacccctgttgagcctgtctacggctcctccaggaaacaatgttctccagcaaagcctcagctggagaaccctgatgaaggccaaggccctgctccaaccctctgaagtgtttggagcagggatagaatccaagtctgtctgatttctggtctgaagaggtctgtcattaaatcagacacaagaacgcacaggcccagcaacatgggactattctgtgcaaggacagagagccctccagaccagagtgcacctgcagaactagaggtggccatcactagaaggcatgtcgtgcctcagctctgctacacgcacgaacgtttccagcctaaatgactgacttttgagtcagcccctgaaggggcatgcaagctcatgctctgcaaactggcagcacacctctcaggggtctgctgggtcctcaacaccacaggacgggcatggaccgtctccgtgcagcatcattttactggggctatctggggaggaagggattctattaataagcacagatatattatggagtaggaggcatcattcatgtggaatatataacgaaacaaagcattagaagaaacacaggctttgaagctggacagaccttgtttgagatcttgactttgccgctaactagctatgtgcctttgggcaagttgtatcccctctgagcctccatttcctcac

SEQ ID NO: 66250 - DNA, 1086 bp, Homo sapiens
ccacttgagtcgccagtgcctcccacactgccagtcagttgctgttccactgctttccagcttctgctgcctcagggcctccgcctcctccactcggaggaccctgggcagacttcagttttagcacaagatacccaagaccagatcctcaccacttccccgactcaagtgcctcagtaagaatgggcttggcccagcccactgttacttagaggcccacattccagggcactggccagcctgtggacagcccggaccccatcagctgtgggcagggaggccctggaatgagcatcagaccccaggctcccggcccaggggaggctcctggaaggattacctcctctgaagcagtggttctcagcctgggatgcacattatgatcatgagggcctaggccaattccaagccaattaaatctgaactttgagggtgggacccaggtgtctatatgtttttcagaaacctttagttgaagtataacatttatacaaaaaaggacataaaaaaggacccagcgtgatgggtattcataaagtgaacacacccaggtcaaggaacagaaaatctcatcaccccagaagctccccttagacctccttctggtctgccctccaagggtaaccaccaccccggcttctgacaccatgatctagcttcaccagccaaggtagagaactgctgctgtaaagggaatgactatggttagccactggtgtgggggaaagtggggcttgggtttgatgttaagagggaacgccagcctggccaacatggagaaaccccatctctacaaaaaatacaaaagttagccaggcgtggtggcgtgcacctgtggtcatagcgacttgggaggctgaggcggagaattgctttaacccaggaggccaaggttgcagtgagccgaggttacacagcaccccatcctgggtgacagagggagactctgtctcaaaaaaaaaaaaagaacagctcaaaccaaggcaaggaggggtagaggagcctggtgcaggcccaggtggatggggaaagaggaaaaggcaggggcgcctagattgggagctccgtgagcgtgggattttgttc

SEQ ID NO: 66251 - DNA, 1049 bp, Homo sapiens
tggctgtcggggggcgcgcggggaagcagcggaacttgcggtgtgaggggccggcggggcccggagcggtccccggcccgggaaacttggaccgagaccaggttgtggtgcgggctggacggcggcgcctcggcgcggctgcggcgcggggcggccaagggggggtctggatggtgtcagcccgtgactgtgggtgacacggcgcgtgaggcggcctggccgggcgaacgtgtggctgggacactgggcggtgacgccgggccgagcgggcgacacagaggggctctgtgtgtgggagacaggcagcgtgtgtgcgtgtgttgtgtgagggaaagacccggggtcactggggtcacgaagtgcgtggcttggggcgtgaccggcgcagggccagggccacccgttactgtgagtgtgaaatagagggagaggagcccaagtgactgagaacgagccgagctcgctggcgccatggtgtgcgtgtggggtcaagtggtgtcagtgtgtgtgtgtgtgtgtgtgtgtctgcgcctagggtgatgatgagtaagaggcaggaggaggagggaccggacctaggacaccttccggcagatgtggggcgatgaggaagttggggagccaggagacaagggtctccaggactgtccccacgagggcacccctcaggagttcagcttggtgaggagatggaccctgagggataggccctggctgagggagaaagccgaggctgggcaacatctggtggggtggcccagatggcagcagggtaggggccctgtggtagtctcagcttccccccgcccacctgcatccacacactcacgcatcgaagtccctacacctggcaaagttctgcccctgtgtaatctgtattctcagcggacccggacacaatcttgttctcagacccccccgcccccctcccccgcgcaggcctcagtctccccatctgcacactgaggtgctgggctttgaatggactgtgaatcatcactttgggatcctctattgttttgggtcaactgcctgtgttctcccttccc

SEQ ID NO: 66252 - DNA, 1060 bp, Homo sapiens
gggctgtggtctcccccaagtccctcccaaagcctctgcccaggtcttccaggtcagggtgattgggggcagggcccatgctgagcacattagggacttgggatcagttttatggccggggcaggtggcaaaggtggcttcttggaggaggtagcagagcatgagccggggctgcagtgaggtgtccttcagcacccccagacccgttgctgtcctgtctcagggccagggttggcaacacagggctgtctgtggtgctgagaggttgacggtggccagaagcagtggagataccaggcctgggtggctcaggcaggggtcgcctgccagttgcccctactccagggtaggtaaacttcatctccttcaaggtgaagttgttacaggctaccacttgacctctctgagcctcagttttttctgtgtgaagcatggaacactgtctttgaggggttcagtgagacccagcttagagtgggaaggggacaggcagtagtgctcagtgaggagggttagggagcctcctctctgcccgagataactgtctggtctcagacatccctcctctagccccagactcggcccaggaagtggggcaaggattgcacctgtaccatacccagactgggaggagctgggtgggccaggtgtggccacctcagcccttttcttggcctcaaggggccaatttagcccccttagcctcagccccaccccatccacctgagccactgaaacccaggcctggtggcagccaggaggtctgaggtgcagaaccatgcccaacttctgggggtgttgctgagagtgggctggggagcagctgctgcctggcctcgaggtgctccccagcccttgagggactggtttataccccatcgtggtgacctgggagctcatggctgcccagggctgtgggagggggcaggagtggagcacctgtctcactgagtggccctgagccagcctctgcacatctctgagcttccagcagcagccctagtaagctggggttccaccctgggacctctttttccccgctctgggaattcccagactt

SEQ ID NO: 66253 - DNA, 1039 bp, Homo sapiens
aggtgatatgggcttctctgagcctggatcccacatttgcagggctctgggaggcttgtcacctaaatgcacatgctcagggcccttaagaaggccagggttgccctctgctggcagatcatggtttagctcaggagtgcggcttccccctcttccccaggatcagggcccttctcttccccaggaatcaaccctgcctaccggactgaggatgccaatgaggacaccattggggtcctggtgcgcttgatcacagagaagaaaggtgaggagaaggtctgaccccatcccagtgcccaggagaggagggtttcctccaggagcctgtgaggcagccgcggtgggcagagtcttgccctgctctgccttccctgccagggtgcctcaagcagcctggtgctctctgacccaggagtgcacacctctgcctcccattcttgcctgatgaagtgggaggaaaaggcgcacagcccaggctgggagtggtggtatggagggtaggtggggggttctctgctggggcagggggtgggaggtgtgtcccatatggccacagtgagggtctgactgcagctacccacagagaatgctgcggccctggaggagctgctgaaagagtaccacagcaaacagctggtgcagacgagccacaggcctgtgtccaagtgagtgggctggtgggagataacggggccaaaacctacattaaccagcctgcctcctggggatctcccacttgggtctccctcaagtcaccctgttccctgctggggtctcctgcccctggcctggcctatggccacttctgcctgtgccccctgcaggctgccgccagcgcccccgaacgtgccacacatctgcccgcaccgccaccatctccacaccgtgcagggcctggcctcgctctctggcccctgctgctcccgctgtagccagaagaagtggcccgaggtgctgctgtcccctgaggctgtagccgccactactcctgttcccagccttctgcctaacccgaccagggttcccaaggccggggcca

SEQ ID NO: 66254 - DNA, 1003 bp, Homo sapiens
ctgaggggcggtctagtctaaggacactgcggccctgccctgggaggttccgaaggcttcctggaggaggtggagctgcagctgggactgtgaggaccgagaagcaatggcccagcagacgagacagcaaagaccaaggcctggaggtgggagcgtctgccccagtgaggaggcaggtggccggcgggcactgtgtacaggagcaggctgagccccgcccctggccctgctgccatgttgctcccctgaaggatgccccgacccccgtgcctgccctggctggatcctaggagcccacgggattctctgtatcatcagaggctgggcttggcagaggggaggggcctgtgcccgtcacccctggccccattccttggtaattagccacacccttgcctctgtacagggccctagagcagatgtgcgtccccctcctcttccagcaggtctataaagggaaggggtagcagaaagtcctgggctaggagagtgagtccctgggttctaatcttgggcacatctgtggccatcgctgggtccatttttctgactgtgaagtaaggagagacgtctcagtacccagggcctcttcagctctttgtaggttctgggctgggttgtgggggactggggagctgggctctaccatccctcccattagtagctttatccagccccgtttttgctgcttccagggcctctgccttcaaggcccccatggggctgtccatccatggctctgcctacggaaggggcttaatgcatgtgcctgcccctcccccagctgtttttaatgaaactgaaaaaatagacttgatcccggcaggactgtgatacagagccctagcctgcccagccagccccaagatctcaggagctttagggagaagacttggtggggctggagcacaccttgggcctcagtggtttctgtgtccctgtggtgccagtgcttctgggcagtgcaggcggctgccaggcccagccctgacttccactctgg

SEQ ID NO: 66255 - DNA, 1051 bp, Homo sapiens
cccattccagccactgatagcagggggattttccttcctaaggagaacagatgtaacagctttgcaaagtaccggcccataggaatcaaatgggtgagatcagctttgggcctgaccccagcaagaccagcatctccagaccccagcctttctcctcaggcctaagagagtcagggaaagagaggagactgtcccagagaccttctcctcgggtcagccagatagtctggatctatggtgtgactcaagctcctccttacccagggggggtaaggccaggcctctagctacttggagttgtctgtaataatcttgaaaggcccaagggcctgtccccatcctgacttaaaggcatctgcttccctgtttcatatcacatgacagagaaacctgttctcatggcatgtaacatccctgtgaagagagcgttgtatatgattttgtattttttaattcattttaatctacaggttggaatctaatttttaaattttattggaactcacattttaaaaagaaataaaatttaaaataataataataataataataataataataaacctttgaccagtgtcttccaagtagtttgatcaaagaatttataggtgttttcaaaacacagtccggagtgtaaagattggaaagccccatggccttgcctgtgtgtatgaagtgtaaatctggttttgttttgttgttttggattcttttgggtttttgttttgttttgaagatcagacagtgatcactctgaaagattgaagccaagaatttgtaactatggtatttactgtaagctgtagaacactcaataactattaaaaaaaaaaattcccccccaaaaaaaagtcttaggtgactagactgagtggttcttggggagggaggcacagaggactgtcctgggccagtgagtcccttgggcgtctccccaagttgatgctaaatttgttctcagtagtcaagaaaaacctatggtacatcttacagctgatctgacaggggtctgccctaagggtctcacagctgctggggagctttaagtggc

SEQ ID NO: 66256 - DNA, 1010 bp, Homo sapiens
ggaggtaccataggtagatacctccaaagattctagatggcacggtggtcaagctagacaaaaagtcagagctggaagggccgtctcattgaaggcaggcaagcaagagaggacaagggatgtagccgcctgacagtgagctacagcactggccccaggatgcaaacccctctctcctcctcatgccactgcctctccccaagtgcaacacctatggccaggatcaggggtacagatggctcgttaccagccaacccttttgaattcttctacttctacctgaccccctctcctcactggcctggggtcaagaagtttgagtctgggagctggattgcctgcaaatagtgaaagcctgaaacataatggtttgccatgttttgaaaaaaaatgcatatttaatttcttcctcatgagataggacagttgctgttctttcttacctggcaatgaccctaaaatgtatatcctctttcctgaatatttagcagagacacacacacctgtccagagcgtttttggtatgcaaagtactttgacattggttgccaaagtcctccattttatagatgaaaaaactaaggctcaggaggcttgagacttgctaaaaggtcacacagcttggaagtgattcttcaaatcctctgctctttctgctgccacctgctgggtctcttggcaagcatggagggaggggctaactgtactttatagagctgggaagcccagtctctgagctgagcagatttgtatgaactgctttgggccaggacctgtaatgagccctggggagggacccagaggcacatctaactggcagcacaaggaggatgagaatttgcaactaaaggcctcacttggacaaaacactttggggtcacaatgcccaggaccgaagacatgttcaaggacagcacgaggcatctttctattgggagacccatgtccttggtaagcctgcacacctggcttcctaatccctgagagcctgcccactgtccagatccagt

SEQ ID NO: 66257 - DNA, 1062 bp, Homo sapiens
gtgaaggaaccacattccaggtgggtgctggcagctctgaaggtgaggatagtgaaggaaaagcaatagcaataaacatttcatagactcatggaactgaagggaccttagcaatcatctcatccatttccctatttggcagatgaggaaactgaggcccagagaagcggaaaggacttccctagaccttacagtaaattagcattaaatgcagccttcctacctagtgggcaccttgcttacaaaaatttacctagggacggattggcttggttttgtaaaaattaagtcggcagcgcccatacctggtgagtctggaatggtctctgggctcctgtttctgctcttttcctccacggactccaaaggcgggggttgaagactgggcagaggctacatgggggcggatggcaggaacagaaattgcaaatgaagaaatagcatttggaaattctgtgaagacatctggaacttccgtcctgtacctgactccacctccaggagaaggagcaggtggactggccgaaaaggagaggccatgcttttaggacagtagcccctcatcccgagaggagaggaagaggaggaagacagtgggagtcatcaggagaggagaatgaggatgaggcccaggagacaggctcatctgggagaagagggacccctgggacgaggaggtccctgctagtctcagccaggagcctggattgcccagcagcagcctccggcacccagcgcttggctgggccagcagcccctctgggggtggggcacgaacattttattgtaaaaaatgggatcattgacaacatttgggactttaaaaaactgctttcatttaaaattcatgcaaacttggacatatccttaccccaacctcccatgtctccctaagggagggaaaaatcaggaaacccttgggttggaaggagctcagaagctgtctagccattcccaggagggtaaagcccatcagcctccttggcctagagccaggagtttgggggcccaccttcctgggcttccaaggaactttaggaccagtaagaaaaaattcagctg

SEQ ID NO: 66258 - DNA, 1039 bp, Homo sapiens
tcttctctctctggatgctcaggtaccctgctgactacaccccagcacacggcgattggggcacaccctgtctccatgccaacatatagggcccaaggaacccctgcgtacagctacgtgcccccacactggtaaagcctgcagcccatccaagtgagtgtggccagggtgagagaagtgggagggggatacatacaggaactgcctcaaagtccctggtttgggtctggagcacaggtgtcagctagggcaggtaacagctgtcaagttaccagttgctttcctgctccaaggtccataatatcactcttaataatagctatcacttctgttgactgcttgttgaaatctaaataataacagaaataataatagctatccctttgcttatgttatctcataatccttatagttgctctgtgaaataaggatcattagctctattttacagataaatatgtagttaaatatcacttagccagtaaaaattaagctagggcttaaacttcagttctctagtactaaattctgtgccatttaccttatggtcttcggacttcttttaactatgggccccattcttcaaatgaactcttgcccagatcatatgttaagagctttggttggagctatttggaggctttgggctgacccagacctctggcttccttggtcccctcagcagctcctgaggcagtgacagtgaaccatagggctccagggatgtcactttgaaatcctctggccccccacatcatctggcctcccccatctcctccagggctcttggcaccagagcacaacaacttccacaggcgggaggcaggcagcttcactaggaaggcacagcgggctcccgagttgaggggagaagcctcctgaatatcactgacactgtttctttcccctttccctctgcagatctggagtcacacattgtatgcaactactcaagtcttacaccggtgctggagcagttccctagcagcaccacctctatttgcaagaagagacaacggaagtgcaagggtcactttat

SEQ ID NO: 66259 - DNA, 1043 bp, Homo sapiens
ggaagagaaaaattccagagcacattctccaggagcataaaggaaagtcatcagcatctttggcctgttaactttaaagaatcataaaatcatggcattttaagccataacattttagaatcttagaatcctggagtctgtgttccaagctgggacagaccatagtagtcatagattagctttagtctctcagaccaggctctgcctgcatacccttaggacagaagcttactgtccctataaagtgagagagaaaataataatagctgatctttataaagtgcttctaatatgtcaggtactgttctaagtgctttttacttaacagttaatgtatttatcacaatgaagtaggtaccattactgttcccatatcacacgcgagactgatgtatcctatagctattaagtctcagagctgggggtttggacccaggcagtcagtctgtctccagactgctcataaccatggctctgtgctacagagctttcagaaacaggcaccttctgattcaggggtgtcctactctcctgcatagaaaagggatgctttcagctctgctaggtttctctacaccttgatatattcctttaaattaggggtcagcaaacattcctgtaaagggccaaatatttaggcttttaaaaaggccatatgctctctgtcagtgactaccattgtagcaggaaagtagccttagtcaatatgtaaatgaatggatgtggatgtgttacaatataactttgtttaccaaaactagcttcaattacaaaaaacatggctgaaatttaattgttttaaatgtttatagtatgaataaaagattctgtggtaaaattaatttggaaaatacagtcttgtacatactcccatcttagagattcacagttcacctccccaccttctttaagagacagggtcctgctctgtcacccaggctgaagtacagtgttgtgatcatggctcacaacagccttagactcctgggctcaagccatcctcatgcctcagcctcccaagtagctggggactacaccagcca

SEQ ID NO: 66260 - DNA, 1346 bp, Homo sapiens
aatagggatatacatgttctctcttacatctaaacatctggatatagacgcatataggcacacctactgtagtgtagcagaaagcagcctggagtggaagctgcattgaattctagactgggttctgtgtaaccttggataattgatgtccatgcattggaccttgatttttcaaactgcaaaatgagggaactgaactaaatcatctccaaggttctttcttgcaattagactccttatctctcagcaagatgatgtgtactcagcgtcttccaccccaacagggaccacctctctagctgcccttagctggccaacaaaccatctccaaaaatggagtactcattcccttcagaggcaaccctttccacaggaagtctgagtaacagaaggccttgccttctactatgttgaaatcttcctgaaatcccattaagtgtccagcagccacatcccactgttccctcccagacaggctatcacagtccctgaaaaagaccaaaatgtacccacccccaccttttttttgagacaaggtcttgctctgtcactcaggctggagtccagtggcacaatcacgtcacactgcagtctcaagctcctaggctcaagcaatcctccctccgcagcctcccatgtagctgggaccacaggcatgcaaaaccatgcccagctaatttttttaattttttgtagagatggggttttcccacattgcctaggctggtctcgaactcctgggctcaagctgtctgcccaccagctaccatgcctggcctacctctgtttcaagcaagtaatgtataaacctgtgccattttttaatgcagttggggttgactggccctcccatactcaaaaagattcctcccagcattcagattttgtggcttctagtaccacagaaaattcagggcactttgacaaattcagttcaatttcactgatacttgctaagcctgtttgtaattaggtctcctgctgattcatcactgtctcacttggctaccaacaaggagtcttaggggtcaaagcaagattcagacatagagctttattttgtccagacatataaatctgatgatcaataaaccaattagtctaaaaggcatccgtgatgcaaggatcaagcctttgaaggtggtagggcttctacaactgaaaaagatttatgacagtgaaaaaggattgcagaaagcgctgaaaaggttttatcttgttaatgtacatactctttttattatcccatttgattctaaaattatggttaggaacctaagagaaagaataggacatcataaacaaagcctcttttataaggcagagctgggacttcgagtgatcta

SEQ ID NO: 66261 - DNA, 1240 bp, Homo sapiens
agaaacgcaaaatgattgtttaaaacagactctcctcctcctgcattgtctgcagagccatgtcttcatgtccaggaaaggccctgggctctacatggagtactgctgggtctccatttctcttatcagaattctccttttagtgtgactttcctgcccatgatttccttctcatttctcagcatctgctgtatatattgctggccattaatgcaaatgcagagtcagcctacaatagccataattctagccttggttcaacaaaaacagcacagtccctgaccttctctggccccagtacttctgggatcgaaggaaccagaggcattacctgttacctgaatgggcagagggggttacgggatctctctagaggtagaatgtccttgtcctggtggaattagagagtgtataggcatactttattctcataacaccctgtcttagcctcttatttaaatgttttaagtattgccaatgcagccccaccttctgctaatatactatatagcaccccatatccatgaccccccccccaagactttatttgagtggaaaatatgttgctaaaattcttcgttttaccataaacagtaatttgagtcaagaatgtttcctctctagtgtttgaaattataataaggaaaatgtctaaaaagttaggcaagtcccacttcagaactctgtttctcttctccttccctcaggacaccatgaaggtaagttttttgagtcactccccatttctaaaacatatgaagtatcatccttcagatgtctcgagctgagctttgagtcagcctgggaagtctttgcagatcttaaactgggcctcatctatatttcctacctaccccaaatttcatatgtgctttcttaatggcccaaaggaccacctctaattcatgaggaaatatcccaggtggggcacccagtaacacctcagtaggagatattcaggggtatgcaagaagtatgtctgtctggcctcagctgggtgtacaggagaaggagttattagcaaggagtgccccactggctaactaggttcggtgtggcacagtgcccagtgccttttaagctaccatggccacagctcagtcccttcagaagagatggtagtccagcaaggttcatgtaatgtggtcattatttgtgggcctgtctttgaaagcagcttataaatatacctccagatgatatttcagacaacaaagagtgctcagttgatctggtgaca

SEQ ID NO: 66262 - DNA, 1050 bp, Homo sapiens
gtatgggctctgtggttagaaagtcctgggtttgaatcctgattacccaactcactagttgtaaggccttgggcaagtcacctcacctctctaagattcaaatgtgactacctgcctcagggttgtggatggttttatgtaagttccatttactcaataagtattgaatgtcttccatactggaatagaaaaattaaatgatgccatctttgcctgcctgaagtagctcccatttgggagcctggcatataaactcactgcagtactaatgtgctaagtattgtaaaaaggaatacatggaaggaggagggaacaacggtctgcctgggggtgaaagtgtaggggaagcttcagagagtggagaacaacagagatttgaagaagtagaagctgttctttaagcacacaaaggaatagtgggcattccaggcagagtagagcatgggcagaggcttagagatgtgagaacatgacactgtgaggaacgtagaagtaggggagtggctaaactgtgagcagctagatgaatctgaactatagatatacaagggctgacttggagaggccttgaatgtcttgataatacccgcccattttcttgtttagcacttatcattatagaattagaaagcttcaaaagaccttagagatcgtccagttcaaccttttctcttgaaaaaggagaatcaaaaagcagtgttttgtcccaagttacccagtgagtcagcagccacatatggactagaatctttggcagatctcctgactctcgtcctatgcttttctctgccaatctagtatttattctactgtcattctctttcttggggcttacttaaaggagaaaagaatacaggttgtctgaagacctagatttgagtcctcactgtgtcatttcctagattcgcaaccttagagtcacctgacctatcagaacctcatttcccccatctctaagtaggaatcatgtcataattatacacacacaccaagaagttatcagacagcccctgttttttggacaaacaagagctattttatgtaaatagg

SEQ ID NO: 66263 - DNA, 1031 bp, Homo sapiens
attccctgcagctcgccagtggaaggctgggtggctgggccttgaatctaatatacaggctatcttagattcaggtctggtggacaggttcagagccagcactacagaactgctgcctgcttgggctgacctacattttcaccagtatagcactctcagcagtcaagcctcccagctagtaagagaaattcagattcatgcatttttctggagctaacagattcaagggtctatttattttatttccttctgcctatcaaagaaaagaagggggggtgaggcggggggatagtacttgcaaaccctgcagttagagtgtttcccgtcattctttgtagcttcttagcccacaggactaaaatggggttttgtgctcaggatcagattttgtaggctctgcctcctaaacatctttgtagtccctcctctcttcatcctattgctagtgttttagcttttcctttgggctactgtagtgacttactatcgtgttcctccttctctgatcttaaccactctgaactccttttcattctgccgccagagtagtttttgtaagacatacatatgaaaccccccagtttaaaaccctccaatgttttcctgttattttttgattaattccatcccttagcctggcattcaaatcccttcacagcctgtcccccagtctacctttttatctttatttcctgccacttttccccgcacgcagtaaattccaactgtacttaactgtttgccatttccctaatgtggtatgcactttcataccttcatgcatggaatcagtatatatttctttgttcctgccccctccgcaccttgacaaactcctcccattcattgttcaaagccaactaaaatgtttatttctctaagaagcctttcccaactattctaaacatgttcttcatttcctcctcagcattctgataacactttcagcattctctgattatatcttacatatattactgctagagattaatttaaataactatattattttcccattagactgtaagtgc

SEQ ID NO: 66264 - DNA, 1050 bp, Homo sapiens
tttcaccttaacacactgcggggaaaaagagcaaatgaagcctaaatcaagtacaggaaaggacatgataaagaaatcagtgaaataaaatggagaaaaacagagaaaatcaataaaccaaaagttggttattttaaaagactggcaaaatcaacaaacctttttagctttagctaggctgatgaagaacaaaagagagaagtctccaattactaaaatcaagaatgatacagaggacattactacagacttttaatagaaataaaaaggaatatgaggtaagaccgtgaacaattgtatgctaacaaattaggcacctaggtgaaatagacaaattcctagaaagaaagaaactgccaacaccgactcgtgaagaaatagaaaatctgactagacctataagagagaattagtaatcaaaaaactttccgcaaagaaaagcccaggaccagatggcgtcattggtgagttctaccaaatatttgagtaagaattatcaccaatcctgcacaaactctttgaaaaaatggaagataaaggaacactttctaactcgttctatgaggccaacattaccttgataccaaaaccaggcaaagacatcacaagaaaactatagatagaccaataacccatttgaatacaaatgtagaaacccagaacaaaataggagcattgttttgggtcctatccaacacctgatattgttacactttaaaatttttttgcctgcctagactgggtgtggtggctcacgcctgtaatcccagcactttgggaggctgaggtgggcggatcacaaggtcaggagatcgagaccatcttggccaacgtggtgaaaccccatctctactaagatacaaaaaattagccaagcgtggtggcatgtgcctgtaatcccagctacttgggaggctgaggcaggggaatcgcttgaacccgggatgcggaggttgtggtgaactgagatagcgccactgcactccagcctggtgacagagcaagactctgtctcaaaaaaaaaaaaaaagtctgtctgataggtatgaa

SEQ ID NO: 66265 - DNA, 1081 bp, Homo sapiens
ctaaggtcacactgtatagcagaggccaaactaaccccagttacaaagtaggtgcttttagggctctagcatacatggctatgtcttggacggtacagtgattaggatctcagatgagcctggaaaatggattttaatttctgaaactgttctcacaactccccctttgatgttcaaactgatctcctctcctcaggagagaactccaaggtcacttaattactttttcacctatggttgaagaagagcatctaaagagaattcttattaactgttctcatgaatataatctccttgtggaccctttttagcctttatcctaatttgactcttctatatcatttgacacctgacccctttcttgaagcaagctttcattgcctccataattttcattgaccataattgtttatttttgtttgttttccctttcttcttctccagctgttcctgaatttgtctcctttcagaattttcttcccctgctcatccattaaaagttgatgtttcacaagggctccgtttctcccttagcctcagctgctgtctataggctgatgattcataaactctagggctgtggcaaaccattcttctgagcttcagactagtttatccagccgtctcctgaacatctcctccatgaatgtctcatgctttgctcagacttattatgtctaaaactgagctcattatcttatcattcccctgtaacccattttttatcattttgtgattaataccactatctgcctattcctaaaatcagaaaacatcatccttgatactcttgcctcttttgccttctaaagccagttattaagtcctgcctttttaaaaaagattgcagtaaaacacatgtactatcttggctgggcgcggtggctcacacctataatgacagcactttgggggactgatgcaggtggatcacttgaccaagagttccagaccagcctgggcaacaaagcaaaaccccgtctctactaaaaatacaaaaaataaccagatgtggtggcgcacacctgtaatcccagctactttggaggctgaggcatgagaatcgctggaacctgggagg

SEQ ID NO: 66266 - DNA, 1160 bp, Homo sapiens
tttcttttctaaaatgttctgattgtgtcagtgtccaagcatcacccaggggtctatctagtatgtgttctggagtgtgtcagatctctgctgaaatctggtctctgtcactaattagctatggaactttggttgagtaatctttctgcatctcagtttccttgactgtaaaatggaataatgacctatacagatggttggtttgtagtcggtgaaaatgtttataaagcttctcgtgtcgtgcctggctcatagtggacactcaattaatggttgttgtaatgcatagcaatgagtatacacctacagggaaaagagcatgggacatacagttagtgacttagattacagaccctattctgccacttaagagctatatgacatcagataagttatcaagctttctgggcctcaatctatcatttgttttaaaaaaaaaaaatgataaaacagggttaggaatgccttcctcacacgacagctgagagtaataaatgtaacagggctagccactgacttgtgatgaagtttccaaaacacaattagaaaataattctaaaacgggagaacagatgaagcccttaaatgaatccatcattttataggtgaaaagatggagtataagaagtgttttgaagaaagtgttggggttgagtctggaacccatgtctccccatctgggtctgtgtattcattgtctctctaccacagaataacaagtgttctcccttctcttcattccgttgtggccacttcacattcctctgctagcccactccagttcaagagctctttctgactcctcctgtgttgacctttaatgaatatcctggcttcagccagtagaaaacataggtctaaatgctacaaatacagtaacaaaagatacaactctcaaggttagaaggctaggaaattaatctgttcaaagactaccatctttttttttttttttaaaccagtgtttgttttcccccccacccccagattgctgtttttgcttaaaactttgtaaggatcacctgttggaggttttgattaactgacatttgtactttgtttattctttgcaaagaacttttgtgggatttttcccttcgtatgtgttttttttttttttaataacaattctggaagatagtttttattttccagatgaa

SEQ ID NO: 66267 - DNA, 1041 bp, Homo sapiens
gttaattccctgctgtagattctaggaccacacagatagtataaactccacataagtagtataaattcagacttcatacaggccaaagtttcaaatttgtagggagacttttattttttaacccaaccttggctgttgaatctctgtacttttggattttttttttctttttttaactgacactatgactcctccaaggtcccaactttatgtaggggaatttgagttgcagctcttggctgttccagggcccacagcctatctcctacccctggtggctgtaaaaagcaagccctttgagtgcctagactaaaaaatctccccaaagcatcccaatatcagcttactacatagacttcctgatttttagtttcctcttcattttttgagtaatagggatttctttttctttcttaaaatctcaactctacgtaatacaatgtttgttatacttcataaccagcttttctaggtattatgcagtaggcagattttcaggttatttttcttctgtattactggagatggaagatctaagtaaagataatttataaacaaatgccaaatatattgcattacagtaagcatttatatggttatgttaaaattattatcatttggtaagaacatactaggtactatatattaattataatttcattaatcataaatgctatagtttttatagataaaaaaactatggtagtttaattcaggtcatgtgacttgactaatgtatatagcttctaagggatgagaaaatatttgaactcagttctttgtggtttcaaagtatatgtgctttctgttacagtaagctaatctgtcttaaaatatgtgctgctttctctcttccccatgataaactaaagatgaggattgtcttttccatttctagggctaggaaagcttccctttgaggagctagaatcctgttcctggccagcattttggggtagcctcaggagggcaaaagtacagggggtcaagtccattgtactgtcatctgcttcagaggaaatgggatggtggctgcaggga

SEQ ID NO: 66268 - DNA, 1083 bp, Homo sapiens
tgagttccagagaatacagtggaaaaagatcaggagatgaagtggggagagtgatgagagttggagcatggaatgtacagagccacataggattaaagtctggaagatgagagttggaaaaaaggaaaaaagcaaacaaaaaaataatatccccagctgagaaggaagaggtcttttctgtttgtttttagtaagatcattcgtattttattcacattggtcttgctggttaaaaaataatccatggctcatcaatgtggatgatataaatttattaatactgaaaacatactacttgtaataagaaatatttgtacatatattctgaaaaccagacagatgcacacttgttctcctgcaagaaaatatgtttagggataccaaaacagatgagtagcttatgctaagcattaatctttattcaaacattgataccacattgtcttttctattgagggccattttgcttcctgatgaatgtgttagaacttatttttcaagtagcaggatgctccatctaaatgatctatttggaaatacttgttccagattataaatcaatctggaaatctcagtggcacaggaggggaaaaattctacagtgagcttttaattttatctctaaaagctaataaatgatggtcagacttacagtttgtgattatctttatccgaaatgggaagtctggaatgttattgaaaaccagcattttcatgctttaacatggatgaaccttgaagaagttatgctaaatgaaataagccagtcagaaaaggacaaatattgtataattcatcttaaattaggttcttagttaaatttagagacagaatatagaatggtggtatcagggactgggtaggaagaggagaatggggagttagtgtttaatgggtatgaagagtccagtttagttcatgaagatgaaaagttctggagatggatggtggtgatggttgcatgacaatgtgaatgtgtttaatgcctcaaaactgtacactttaaaatgattaaagtagtcaattttgtgttatgtatattgtaacaacaaaacaagcaaaaccctccagtgttgtgagtat

SEQ ID NO: 66269 - DNA, 1044 bp, Homo sapiens
ctaaactttctcctatcatcatcataaacatcataaacattctataatactttatagtttacacaaagcattttcataagtttatctcatttaatcatcataacaaatctatgggacctagatatttatacctgttttacagatgaggagattaaagaagtttaggagccgggtgcggtggctcacgcctgtaatcccagcactttgggaggctgaggtgggcggatcacaagtcaggagatcgagaccatcttggctaatgtggtgaaaccctgtctgtactaaaaatacaaaaattagccgggtgtggtggcaggcgcctgtagtcccagctgctcgggaggctgaggcaggagaatggtgtgaacccgggaggaggagcttgcagtgagccaagatcatgccactgcactccagcctggatgacagagtgagactctgtctcaaagaaaaaaaaaaaaaagaagtttaggcacttgtctaaagttacactatcataatcagtgagaaagttgaatgcagttctgcctgatctcaaagcctgtggtctttctattatatagcaactacctttttacactaatattatagagctctgtgattgtgagcttatttatttatttatttatttgagatggaatctcactctgtcacccaggctggagtgcggtaatgcattcttggctcactgcaacctccacctcgcaggttcaggtgcttctcctgtctcagcctcccgagtagctgggactacaggcacgcaccactacacccagctaattttcgtatttttagtagagagggagtttcagcatgttggacaggctggtgttgaacttctggcctcaggtgattctcctgccttgtcctcccaaagtgctaggattactggcacgagccaccgtacccggactaatttaattatttattcaatgaatatttgatgagcacctgctctagtggtcactgctcaaagtgctggagatacagttgtaaccaagacaaagttcctgccctcataagtctttcattctagtgggggaa

SEQ ID NO: 66270 - DNA, 1014 bp, Homo sapiens
ttagtcaagtctcacattaagtagtggaacttcggtttggggtgaaggactagacaaagactttccgattagctctacttattgtgattcctgcctctttccacaagttgggatgatggtgggttattacactgatgctagcctgtaagggacattgaatgtatggaacttaaatcatgagtggtgtgtgataataaggtagaacaagctctgtgttaccccgtgtcattgctaagaaacacttactggaggtttactaaaggttggtgctgggatacagaaatgagttaggcatagctcctgccagactgcctgctagactgtttgtgcctccgggaacacacagaatttagacatagcgctgtcctgcagaactttctgcagtgatggaaatgttctatatccatgctgtccaatacagtagtcaccagctacacgtgggtcttgagtgcttgaaatatgcctagtgagactgaataactgaattttaaatttttttacttttaattaatttaaatttgaatttaaacagctatgaatggttaatggctattggaagcacagatctagaggtgccgatcagtggagagacagacatgtaaataagcaagtacaattaagtgtagtaggtactatgatagaaatgtctatggaggccagacatggtggctcatgcctataatcccagtactttgggtggctgaggcgtgtggatcacctgaggtcaggagttcgagaccactttggccaacatggtgaaaccccatctctactaaaaatacaaaaattagctgggcatggtggcgcatgcctgtaatcccagctacttgggaggctgaggcaggagaattgcttgaactcggggggtggaggttgcagtgagccgggattgtgccactgcactccagcctgggcgacagagcaaaactccgtctcaaaaaaaaagagaaatgtctatggagccaggtgtggtggttcactcctataatcccagcactttgggaggccaaggag

SEQ ID NO: 66271 - DNA, 1072 bp, Homo sapiens
aggtataactttttaaaggctcttgatatacactgttgagttattatcctagatcattgcagggactaagtatttgttaaatgaaagagtgactacccgctagaaagactgtgagtagtcatgctctttacaggagtagacgagtggctctaactccccatactgcctttcatatttgatcctctcagtgtcctccatcctcatttgtttacagtgagggctttatcctcttattagtcagacttaattgctttctctatgctcaggccagatgaaatcaggtctttattccttctttcccaaagaagagatactgaacttctcatttggtcatggtctttcttcacccttccatcatttattggtagcatcttctgactttgagggcccttcttgaaaccatagagacttgaaaaacttgaccaatcccttaggtaatatttaaaatgtgggagggattaaggtctcgttgaaaaaaaatctagaattagtttctgagagaccaaagggattctaattcctgctctacctggctgaccttaacctttgatctctctgggactctgtttattatctgtaaaaagggccataataataactccctttcttatcatatgggcttgataggattaattaatttataaaacaatatattattgaatggctactttgtaaaattgtatgataaattaaattcattccttcagtcatgcatcctttattgattgattgattgattgattgagacagaatctcactctgtcacccaggctggaatgcagtggcgcgatctcggctcactgcaacctctgccttctgggttgtagtgtttctcctgcctcagtctcccgagtagctgggattacagttgtgtgccaccacaccaggctaatttttgtatttttggtagagatggggttttgccatgttggccaggctggtcttgaacttctgacctcaagggatccacccatcttggcctcccaaagtgttgagattacaggcatgagccaccacgcctggcctcatccattatttattcaactggtcaacagatgttaattgagtacct

SEQ ID NO: 66272 - DNA, 1122 bp, Homo sapiens
aatcatctaaacctaattatctcccaaaggatgtgtttccagatactatcacattgaggaatagggcttcaatttatgaattttgaggggaggcagttcagtctatattattgagttattgtggagcatcttttttgagaccgggtttcacactggagtgcagtggtgcattcacgactcactttggcctcaacttcctgggctcacgtggtcatgtaatcctgccacctcagcctcccgtgtagctgagacttcaggtgcaggccaccgtgtcttgctaatttttgtagtttttcatagagacgggatttcactgtgttgcccaggctggtctccaactcctgggctcaagtgatacccctgacccagcctcccaaagtgctggaattacagatgtgggccaccgcacctggccatgtgcagatcttctgaactgtataatgtttaagaacccacatttgttaatatcaccactcatctcatcagacaaatcttttctaattttcatttgaaagctcaaattttatcataggcaaccaatactgacagttgttttcgttgaagtgacagtctcacattgttcattttcaaaaaattgtctgccaaacatccaagtctgaataatcatagtttttctgccagtcgttttttcaagtaaaaatggtgtttattaaagcagccagtacagtttgcaactcaattgcacaagtgctttagtgcttttctttgagacaattcttgtaccttaatatgcagcagaaatgctttatgtgaggctcggtgcggtggctcacgtctgtaatcccagcactttgggaggccgaggtgggtggatcacctgaggtcaggagtttgagactagcctggctaacatggtgaaaccccatctctactaaaaatacaaaaatttgctgggcgtggtggcacacacctgtaatcccagctacttgggaggctgaggcagaagaatctcttgaactagagaggcagaggttgcagtgatccgagattgcgccactgccctccagcctgggcgacagaactagactccatctcaaaaaaaaaaatgctttaaatgtacattccatttttccatttcttcacatagaatatgaaacagat

SEQ ID NO: 66273 - DNA, 1022 bp, Homo sapiens
aggtgtagtgtgttcttgcttattgctatgtagcaacagtttctcaaacattttggtgtcttcacattcatatttattgacaactccaaagaacttttgcttgcagtggcacagtcatggctcactgcagccttgacctactaggctgaagtgatcctccatcctcagcctcctaagtagctgggactacaggcatgtgccaccatgcctggttattttaaaattttttttgtagagacaggatcttgctcagttgcccaggctggtcttgaactcctaggctcaagcaattctcctgcctcagcctcccaaagtactgggattacaggcatgagccactgccttcagctgtgttagcatattctaatgaaaataagtatattattctaaatgtaaaaaattagaataatattttacatttaaaacaatctctttagtatcttattggatctgcctcagtattcagtctgttgcagtttgttgttttgcatggaatataaagaaaatccagtcccacaaaggaggaattttctttttctttttagacggagtttcactcttgtcgcccaggctggagtgcaatggcaggatctcggctcactgcaacctccgcctcctgggttcaagtgattctcctgcctcagcctcccaaatagctgggactacaggcgtgcgccaccacgcccagctaatttttgtatttttagtagagacagggtttcagcatcttgcccaggctggtcttgaactcctgacctcatgatccacccaccttggcctcccaaagtgttgggattacaggcgtgagccaccgtgcccagccgaaaggaggaatgtttttatataattgtggatattcctctttgatactacaccagtcatgtccagccctttgaatgtgaggacttttttgcttatctgtagtggatatcatgaaaattatacacactttttttttctttttttttttttttcagcttatcagctatcgttagtgttggtgtattttatgtgaagcccaa

SEQ ID NO: 66274 - DNA, 1027 bp, Homo sapiens
ttaaataagataatcaatggaaagcatttcacacaatatgttttatagtacacattaaaaaaattagttgttgcctttattgttagaaagataggcagaggctagaatggtgaatagccttgtgtgccctaccaatgagttcttagtattgtggtatttattaatgaggtatgattttgttttatgatctcatgcatatttgcatgtttacagtctaggaactttaaacagttctttaaatgccaaagtcctaaacagatgttagctgttagcttcctcattaataaaataagaagaaaaattatgctctgagaggttaaatgacttgtttaaggttacacagtcagtggaaaagtctgggttacagcccccaaattctaatttgtcatccccatttatatcctttttttaaattgtaaaatatgtcatatgtataaaagtatatttaacataaacccacaacttaaagaataacaaattgaaggcttttctacttgctacccagcttaacaaaaaggagatttctagtacctttaaagcctcttgtgaggtcctacttgattgaatctcccatcttctctctccctcagagataaacagtttcctaaattttatgtgaatcatttctttgcttttctttatacttttaccaaatatgtgcatatccctaaacagtatattttttacctttgcaactttttataaatagaattataggataaatattcttctgacttgctttattcttattcttattttttaacttttaaaaaagctttatttcttccaccattaaataatgtgtgctcatgataaaaactagaaattacaaaaagtaaaaagaagcataagtattgtttttagtcctattacccagtaacacttttttttttttttggtagagacagggtctcgctatgttgtcctggtcaagtgatcctccttcctcggcctcccaaagtgcttacaaatgcaggcatgtggcaccatgcctggctggcaaatgctttttgtagaaaatattttg

SEQ ID NO: 66275 - DNA, 1031 bp, Homo sapiens
ggtggcctccaagagacacatgagggttaagggttggaatacttaaatgaacagccttggtggctgtggttgggtgagaggcagtaaggctgttagaggggactttgcaggggacacggaagagaccttctcattcttaggggccattttaatctgttcgggtgatgtttttgtttgttttatttatattagtaaaatttggaagtcaagtcagcccaaagggtaaagttgaaaggggatttagttaaggtagaattaaggaggggagggtgtcttctgttatttgtatatcataaaaagtaagttgggggaaaaaagcatacttccaaactaaaggtgggagaagataaactggaatgtaatggatatctttctatatgatgtctctgccttttcttttcccctctcctcctggtgtatttaaaaactagccaggcattttgaaatttaaatagatttgatgagcttgagattgttaagggtgcattccttgcttgagaactaatgagtgagcctgaaaaatatgagactgaatttattttgtaggtaggtaacaagcacataggcaaaaagagcttgggccttttttaccccctctttaaattgattgcttgaagacgccatttgttagtgtcctggtttgcaaggcaattaggcccatcattgtattgcaggctaataatcctgagatgagtcttggcaccaccgctttatgtaaacagagaagacaggaaatatggaaatgtcataaatattcattggtgagatggtttggtactgatggagtttttcatatgattgtcttttgacattgataagatttagaataattggactgtatttctaaagattgaattttcttccaaaggaattcaggtgatcagaattctgtcagatgtgaataaataaagcatattgagtcatttttattttattttttggggaatgatgttgatgtagtcgcattgtattaactacagaaacagcatctccacctattcatcagaaattcgatttaaaccttagcgata

SEQ ID NO: 66276 - DNA, 1017 bp, Homo sapiens
ccttccaaagtgttgggattacacgtgtgagctaccacgtctggcctgtggtcattatttctatcttctatcaggtccactttttctgggatgaattttgcaaatctgcactttgtcaagatttttttttttttttttttgagacagagtttcactcttgttgtccaggctggagtgcaatggtgtgatctcggctcactgcaacctccgactcccgggtttaagcaattctcctgtctcagccttctgagtagctgggattacaggcatgcgtcactgtgcccggctaatttttatatttttagtggagacggggtttcaccatgttgatcaggctagtctcgaactcctgacctcaggtgatctgcccacctcagcctcccaacttgctgggtttacaggcatgagccatcatcgcccagccaacatttttttgatttttccatcaacttttagtcaataagtaatttcactgtatatgatttagccattttcagtttttgttttttctgtcgattatgtagcgtataagtttttttttgagacagggtttcactctgtcactcaggctataatgcagtggtgagatcgtaactcactgtagccttgatctcctgggctcaagtgattctcccacctcagcctcctgagtagctgggacaataggtgcatgccaccatgccccacaaattgaatttttttttttttttgtagagatgggatctccccatgttgcgcaggctggtcttgaaatcctgagctcaagaaatccactagcctcagcctcccaaagtgctgagattacagttgtgactcatggcgcccggcctgaaacacagacttcttaccctctttgaaatcagttttgactgacaaagggtgattgttcacaatatataaagactttctgaaaatagagggaaaaagaacaaccctttaaaccacaatgaggtttcgggacatagctattagaacaggtagacttaaaaaaaaagtgataacaccaaatgctgatga

SEQ ID NO: 66277 - DNA, 1248 bp, Homo sapiens
tgacagagcaagactccatttcaggaaaaaaaaaaaaaaaacaaaaaaaaaaaaccataccatgtacccacaaaaattaaaaaaagaaagagacaggaatctcatcctacttcccccttgagctatgtattcatctcttagaactgcttgctattgccacaagtagctagaagttaacctaataatactacactggaccctgtaacccacaccctatagcttaacaatgtatagccaattgctaatcgatgttatttctgtaatccaatgagaattcctgacaaacaactttgcatctgcacacttcctgtcccctttttttgccttaaaaaatccacttgtaactgctgctaattggagtgtgtattcagggcaactttaatctatgctcccgagtttcaagcttggcccatttctctactcattttgcctcagcttcttcttttttaagttgaaaagggttagagaatattaaatgtaattatttccccatccaagttcatagacctcataattacatgagtcagtggatcccacattagaatgccccccttttttttctttttctttttcttctttaaaaaaaaaaaaaaaaagacagagtcttgctctgtcccccaggctgggagtgcagtggcacgatcatagctctctgtagttttgacctcctgggctcaagtgatcctcctgcctcggcctcccaaagcactgggattacaggtgtgagccactgtacctggcctaaaatatctttttctagggttggtgctcataagcactatgatatctgctccacttattaaagcgaccctgttttctggaggttgcctggcatcccaactgcctgcagcccaacatcctcagatgcatccctttgaacacagctctaacaccacagccccaggaagtcctgccagaatccccagggttctctgcccgtgctatgagcttcctccaggctcccatagtcaagggcttccctttattataccataaggtaatgtcactgttcatgtcctcctttttttttttttttggtttttgaaacagagtctctctctgtcactcaggctggagtacaatgacgcaatctcggctcactgcaacccccgcctcccaggttcaagcgattctcatgcctcagcctcctgagtagctggagctacaggtgcatgccaccatgccaggctaagttttgtcttattagtaaagacgaagtttcaccatgttgtccaggctaatctcgaa

SEQ ID NO: 66278 - DNA, 1017 bp, Homo sapiens
agagaatggtcagtgttctctctggaatgcattccctgccctcccctctctcccattagatttctgccaacccttcaaagcctagctcaacggtcacccactccactccaggaagctctcctggtctcaggaagaattttttttttccctgaattctgtggatcttgcttgtgcctcttgttgctatcctttctcctggcctttcttgcagcccaaatgtgagctgcttgtagacaaggactctgatttgtttgtgtcaccagcagggccaagtgcataccaggaaccaagaactatgtgctgaattaaatggaaactccaaacccctcattttacccatgggggagcagacctggagaggggtcaggatccccttctcttctggatctttcctcttagccccattccaccctgtatctctctctaactgggattcacacctgaacagtccagctccccttagaagtccaggtgtctcaaactccactcatctcaagatgattgcaacatttctccatctgctaaaactgttgcttttcccataaatcttttttttttttttgagacagagtttcattcttgttgtccaggctggagtgcaatggcatggtatcagctcactgcaacctccgcctcccgggttcaagcgattctcctgcctcagcctcccaggtaactgagattacaggttcctgccaccacgcctggctaatttttctgtatttttagtagagacagggtttcaccatgttcgccaggctggtcttgaactcctgacctcaggtgatctgcccgccttggcctcccaaagtacccagccccataaatgcttctctcagtacatgccatcaccatgcactcaaatcaagaaaggctaggcacagcggcttatgcctgtaatcccagcactttgggaggctgaggcgggaggattgcttgaatgcaggagttcaagaccagtctgggcaacatggcaagaacctgtctctacaaaaaattaaaaaattagctgagtgt

SEQ ID NO: 66279 - DNA, 1431 bp, Homo sapiens
tgtaggctacggaccaagatgtccaaaattattcttgagcactgatataaattacggtcttctttgaggtcaaaattcagccatcatggtaggcagtgcttgaatgagaaaaggctcctggtgcatcttcaaaatgagtcctaaagaacatactgagtacttagaagtagaagaacataagatgtatttctgactaaaacaaatggctctttcacatgtgctttattagactctgggagagaaaattaaccaagtgcttcagaacaggtttttagtatttaattcttcacggtaagaaaatgaagttctaatgaactgtttctcccaaggttttaaaattgtcaagagttattctgtttgtttaaaaaataagaaacctctttaagcaatagattttgcttgggttttcttttttaaaaacataatactgtgcaggcaaggcactgtaaaagttttaattccttccagaagaaccagtggaagaatttaaatttggcgctacgatcaaaactactgaattagtagaaataatgatgtctaaagcttaccaacaaaagaaccctcagcagaataacaaaaactttgctcaggacatttgaggtcaaattgaagacggaaaccggaaaccgttttcttgtaagcccctagaggcagatcaggtaaagcatacatagtagagggaaaggagagaatggaaataaaactcaatattatgcagatttatgccttattttttagcattttttaaggttgggtctttcaggctggttttggtttgtattagatctgtatagtttaattaactggtgatttagttttatatttaagctacaattaatcttttttctttggtgatatttatttctttgccttttttttttttaacaactttcaatcttcagatgtttcgttgaatctatttagagcttcaccatggcaatatgtatttcccttaaaacactgcaaacaaatatactaggagtgtgcccttttaatctttactagttattgtgagattgctgtgtaagctaataaacacatttgtaaatacattgtttgcaggacgaaaacttctgagttacagctcaggaaaagcctgctgaatttatgttgtaagcattacttaacacagtataaagatgaaaagacaacaaaaatatcttcatacttcctcatcccctcattggaacaaaaccttaaactgggagaaccttagtcccctctctttcctcttcctcctccacttcccacttattgtcaccttgtaatattcagagagcacttggattatggatctgaatagagaaatgcttacagataatcattagcccacataccagtaacttatacttaaagatgggatggagttgtaaagtgcttttataatacaatataattgttaaaggcaagggttgactctttgttttattt

SEQ ID NO: 66280 - DNA, 1029 bp, Homo sapiens
ctttagagccctgcttgcttggctaaagaatattgtgccattgccttttacaaccaggaactgatgacttaaaggcatagaaattcatttgttttctatagcaaatgaggtctggttatccaagtgcaccctttgcagcctgcttctcgttgttaatcagtgagaggttttgtgtttgtttgcttgcttttaaatgagcaggaaactcttagaatccctgtgtccttgcctcttcattttgagtcccattgactctaggctttttcctcatggaatatcaaattttcatttctttttctaacacttgagctttctacttgacacaggcaagaaatagagtggagctttattgtagcctctgctttcagaaacaggacataatattagttcatttccaaggattgggacatctaatattagttaattctaaggatttttaatttgatgttttcagtgtttcatattcaccttctagtgtatttccatatgcaggcatttttattaagccatatagtttgtagcactttgtattcagctcttcccacttgtaaatgttatatgttttcataaaaaacataaaacaggccgggcgcggtggcttatgcctgtaatcccagcactttgggaggccaaggcaggtggatcacctgaggtcgggagttcaagaccagcctgaccaacatggagaaaccttgtctctactaaaaataaaaaaattacctgggcgtgatagtgcacgcctgtaatcccagctactaaggaggttgaggcaggagaattgcttgaacccaggaggcagaggttgcagtgagccgagatcacgccattgcactccagcctgggcaacaggatcgaaactccattccccccccaaaaaaaaaaacacaacaacaacataaaacataatatgtttcaaaaacaaaacaacaacaacaacaaaaaatgttctattgagttgaagtatgtccccgcgcccaccgccgtttttttttgagatggagtctcattctgtcgcccaggctggagtgc

SEQ ID NO: 66281 - DNA, 3139 bp, Homo sapiens
ggctcacgccggaaatccccatattttgggtggccaaggcaggcggatcacctgaggtcaggagtttgagaccagcctgaccaacgtgatgaaactccatctctactaaaaatgcaaaattagccaggtgtggtggtgcatgcctgtaatcccagctacttgagagactgaggcaggaaaacctcttgaacctgggaggcggaggttgcagtgagccaagaccgtgccattgcactccagcctgggcaacaagaacaaaactctgtctcaactacaacaacaacaacaaaaactaaagtgctagggttacaggcatgaaccattgtgcccagcccagtatctggggctttctttttaaatttttaaaaaatgtgtaccacactacacagatgtagtatcttgggctaaaaaaaatcttaaatagacaaaggaactattcatttggactagtaatactgttactatgcattcttgcatatctcctcaattaggaattgttatctaataacgaataattgtgctggcaaaattagaagattgcattcaaggactttttttgagataggtgctatatgcagtctttcttcctttgcacctttactttgggttgctgtttgtttaaaaaaaagaggtatgttcatattgtgcattgacacgttttgtagctttaaaatgtttgtgcttactttaaccacagcaagtgaaacctggtgtatttttttttaaatccacaaatgtgattcaaatattagtacgttgttttctttagctgctgtaagaagtgttgaagtactctacttagaatccaacactagaaaagataaattttgttacaagtgtttctgatgcattaaacaaataaactttaggttaaagtgatcacaaactgaggaagcagtgcaaacagtggtgttgaaagctattgaaaggctttacagattttctggatgtgttgggacttactggctgacatactttggaaaatgctttctttgtcatgtttggtatgtgtaagtgatcaaaaaagcattgtggcaatgtgacaccatattatctgccatagctgtccttatatttcaaaaagttgtttttttttcaattaaatactacattgtactcatttgatcatgttcaaaaaatttttaaactactctaaaaggaaccttgaagattttattcttgtaatttgtttaaattgctgacagttgtaatcagataaaatggagttatgttgcaggcacattaaaagtggggtactaatgtgccagcccccttccaacttccagggcttttttggagggaggtgcccaccacctggggaggcatttttcagcaacactaatctctctgtctaccctcctatactagatgttaactcattccagcaaactacaaagtggattgatgatgtcagaacagaaagaggaagtgatgttatcatcatgctagtaggaaataaaacagatcttgctgacaagaggtatggagttattttatatgtgtgtaatgtttgatttctgtgatgcagccttttatttttgttcactgagaaattgttttgaaaggagacatgcttaatccttaagtttacgtcctcccctgcttttctttagcatgggaacctcaaatataaatgtaaatattaaacagccagtccttaagggaaatgaattttattttgtttaagcccatgtgtaaataactcttgtgcaagtttgtttagacatgaagccagtaaatattttgctttttttagatctcataagtatgaaaagtgttttgttaaagagcaagccattttggaaaaaccttatctttaaaaattgttcataatgattaaatgcacactcttttcttagtagtcttcttataaaacattcattataattcagtggtgtggatttttgttttttggttgttggtttttaattgtgtggctgagccagactgtgtagttgcactgaatagcttgattgtgataccttagtcaaatgagcaaagcgatattcaagtcacaggatgcaaaatatattaacattcactgtaggacccatggcttgaatatttgctttcagcattcttaagcgatttactgcatattctttctgctttaaatagttttgaccatactacttaatagtaagagcttttactatttatttgtttattcatgagatggatattgaaattcgggtaatgaacttgtgatattaattcaagtgttgcaaagaaagccagtgttaaaagacttgtggagatatgaagcccatttctgcacatggcacctcagttagaattggtagtacaggccgggtgcggtggctcacaactgtaatcccagcactttgggaggccaaggacggtggaacacgaggtcaggagttcaagaccagcctggccaagatggtgaaatcccgtctctactaaaaatacaaaattagctgggcgctgtggcatgcacctgtaatcccagctactcgggaggctgaggcaggagaactgcttgaaccaggggagcggaggttgcagtgagctgaaattgtgccattgcactccagcctgggcaacagagtgagactccgtctcaaaaaaaaaagaattggtagtacagttgcaaaaaagtctttcttaatttaaaagtaaattcaaagtgattgcatcttttctttataaaaatatgttttggacatgaactgctatgaaggaaattttcactattttatttatcctcactctagagactttgtaggtacttttctttttttgggatggagtctcattccgtcgcccaggctggaatgcagtggtgtgatctcagctcattacaacctccaccacctgggttcaagcgattcttctgcctcagcctcctgagtagctgggattacaggcgcctgccaccatgtcctgcaaatttttgtatttttagtagagacggggtttcaccatgttggccaggctgatcttgaactcctgacctcgtgatccacccgcctcagcctcccaaagtgccaggcgtgagccaccgcgccctgccagtacctttattttatttatttatttatttttgagttggagtctcgcattgtcacctgggttggagtgccatggcgcgatctcggctcactgcaacctctgc

SEQ ID NO: 66282 - DNA, 1048 bp, Homo sapiens
aaaaaacaggtttgaaagtattctagacccaataggaaagagacacattttagcttgagagaagctttcaaagaagcattaattcctttactctgatagcttaggctgctcattgacatttaccttaggtttttttgttttgttttgtttttttctctatttaaccatcaacagtctactttttgccacttgaaaggcatagggattcaaacaggttttaggtagggaaaaagggaagccatatttctgattctgtgaaatttttcccagtggcattttccagtcatttatgtttggagtatgcaaatttttaatatttctcccttttgaaaaaggagttttgtgttattttcattcctcactccctgcaacctcttgcatgagtcttctttctacttccttcccaccctctcccttttacaaaaaacattgtttcttttttctttttagtattagtttggtttttttttttttatttattttttcccatctcacagatcaggcttcagctgtgggatactgcgggtcaggaacgtttccgtagcctcattcccagttacatccgtgattctgctgcagctgtagtagtttacgatatcacaagtaggtatattgcaacgggttgacctttcttatttttcttgcttgtttgactgattttgttgttaggtacgattgcaattatgggacacagcaggtcaagagcggttcaggagcttgattcctagctacattcgtgactccactgtggcagttgttgtttatgatatcacaagtgagtggagggaattatgcatttctaatcttctttcaacctttagcttagctgcatgcatgttcttgtcttgtgcttgttttccttactggcatgtaaaaataagttttatcatagtaaattacataccagccaggtcagaaatatttgctttggtgtttataccaatatgctttatatgtaactgtgccaggttttttgccccagaaattttcttttgggtccaactatgaatcctcttcaagggtttcttagtatcctgttattcgtaaa

SEQ ID NO: 66283 - DNA, 1030 bp, Homo sapiens
gaaagttatgatgtttgtgagtctctggctgtctatggcattaggacagttgacaatatatcaacagtattttataaaactgctcttggggcagatacttaccattctgagtggagaacaatcagatactcaaactaaagttcaaatacaaatatttaaaccaaagttgccattgtcttgttatttgtaaaatgagaaaagtagggatgagaataagctacctggcaggaatgtataaagattagagatgatcatgtaaaaggcttaaaacaatctctgatatgaagcaagtgctgaatacatgaaaatcattatcactggaaattttgtttgtccttaattgtccttaattgactatgttgtattgatttgtttattcattatttcttccacaatcatgaatcccatttgaatcctaaactgctggccaccattaaacttattatttgttaacttctttgttttgttttacaggcaacaattggcattgactttttatcaaaaactatgtacttggaggatcgaacagtgagtaatattttcagtgtgcaattttctgcaacattccaggttagaaaactgcaatcaaagttatcaatgattgtcaccataagaagtacttagcaaagttaccaaagatagtttacagttgttgagaaaaactcttattaccgagtgagtagtacttggcagtcatcttgatttggaaaaatgaaaacaaagagctttacagagaattaaaggagaatttttatgaagaaattaaacctgctaaagaccttctaaatgccacccttgaggcattcaaaaagatttcaatttgtgaacttcaagattttttttgtcaggataggatgcgtatcaaagtgactgacaaaaaagaagttatgtgggcagggtgcggtggctcacacctgtaatcccagcactttgggaggctgaggcaggtggatcatctgaggtcaggagtttgagaccagcttggccaacatgatgaaaccccatctctattaaaaatacaaaaaattag

SEQ ID NO: 66284 - DNA, 1060 bp, Homo sapiens
aaaggaatgtttggctgggcgtggtggctcacgcctgtaatcccagcactttaggagtccgaggcaggcaaatcacctgaggtcaggagttcaagaccagcctggccaacatggcaaaatcccatctctactaaaaatccaaaaactagctgggcgtggtggcgtgtgcctgtaatcccagctactcaggaggctgaggcaggaaaactgcaacccaggaggtggaggttgcagtgaactgagattgccccactgcactccagcctgggcctcagagcgagactttgtctctaaataaataaataaaggaatgttgaaatacacaattggaagtttccttgaggagtctgttttgttactacctctggctattgtcttgagatgcagaggcagttttagtaatgtcactcagtggtttacagtagaagatttcactatatatacatgttaccaattataaattaggagatgtaatggcagagagaagcgcatactcagcctactactgtttttttcactttatattgccttttctttttttccatcaatgctgatcaaattgcaatatgttagataaggaaaaaatgtcttattgtcagagactagcagtactgaccagttgtttttcttttgagacggggtctacctctgtcactcaggctggagtgcagtggtgtgatctcagctcactgcaccctccacctcccaggctcaagtgatcctcccacctcagcctcccaagtagctgggacaacaggcacgcaccaccacgcctggctaatttttgtatttttttgtagagatgggattttaccatgttgcccaggctggtctcaaagttttgagctggcgagatcctccggcctcagcctcccaaagtgctgggattacaggtgtgagccaccacgcctggccagtactgaacattttatattggctagatcagtggtttttaaactttttttccccaagacccctttctgctcttacaaatttttgaggatcctgaagagctctgttaatgtagttgttattgttgttcttcttcctcctcctcctc

SEQ ID NO: 66285 - DNA, 1131 bp, Homo sapiens
cttcaggtttcctttgaatttcttgagtatttgtgtatgttctaatgcataatggagagttttatggcttctaatttcgtaccttgtttaagcctctactaccctcccccctccattactgaagcctggttagattttttttaatagacttcattttttagaacagttttagacttacagaaaaattgaaaagatagtgtagagttcccatatacccacacatctagtttcccctgttatcaacatcttgcattagtatggcacatttgttaacaattaatgaactaatattgatatgttattattaacttaagtccatagtttatttagatttttagttttaacctaatgtcctttttctgtttcagcattcaattcaggatgtgaagttaattatcttttgaggttactatattgtcaagtaatgccattcattagctttgacaatgaaagattgatctctgttttcatggtcagtgtctatagttttcttatgcgttagaagtctgtagactccatgtccttttgatgtaactcttcatgaattatttatttttaggtctgttagaattccacaattcagctttcaaagactgtaatctatggcaaagccttgtttcttcttaatagcatttaccacatttacaattatcttattttttatgtgtttgtttttatttcccacagaagaatgcaactcccatgaagataaaaactattcttttttgttcagtgtgtccccattgcctagcgtagagccaggctcatagtagctgttcagacatgttgggtaaatgaatgatggctgaatctagtagtaacgaaagctagtagcctatgttacactctttgacatggttacgcaattgatagtttaacaataacacttaaaacttacatcatttgattgtatacaggaatatatcagatacttaagggggtagagaaaccaatcgtttagaggcccaaccatttcattcaaaaaataggactgacctgaattttgtacttttttttgagttgagcaaaattcgtcttcctttattaaagttgttaaattatttgctattaatgtaacgcatgaaaagtattcaaattataccaatgatgtgctcatggaactgatttgaa

SEQ ID NO: 66286 - DNA, 1050 bp, Homo sapiens
tgaaaggggtagcgtcggcagtggagatttttgccccttaggttagatggggctgtggcttgtcggaaaacctcattttgttctcttgactttcatcactgacaattcttttggcaatgttgatgatttttcaatctctgccagatgctatgtcatgatcattttacttggaatttttctcatctcacctcccctttttctcttttcaacatgaagcagcgtctgagtctcatggtggtacaaaagggaattactggggaaatgttaattattcattccttcttgagtattttccaatgatatattgaggattcatgtgagagaaggcttggaataacaaacatctttgttttgtcggatttcctttggaaaatggagtagagtaggaacagactcatcatctagttacctaaattagatttaaataccatttgggctaaataattcttttatgcttaatattctgtactgtctgatgagtgaaattgttatgtcatttacctggtcaggttctgctgtcactgtacttttgtattagatactagatcctaattttgtgatggttgtatctacgattacttcttgtagtaattccagttttatgctgtattatacaaacttgacactcgacaattcagagatgattaccctcctttgtttttctcatactttgcatgcccatctttaaaattcagacattgagagattagttctgagtcatcaaacattgagtacctactaggtgttttaggtgaggttatagaaaacattagttatttgttttgactggaaggcatgtaagtgatataaattcgtagcttttattactactttgaactatttatactaatttgtatgccatcacagaggttaatactcttgcaaaattgcctccagttagaactgggaaatcatttttctcctttcatgtgtagattatcttcccctcctcccttttggggggaaaaatacaatctccctcctttttgcttatatattttcctgaagtaagtataaacttgtgtctttaggtgagtaacttggtagaac

SEQ ID NO: 66287 - DNA, 1049 bp, Homo sapiens
caacccctgcctcccaggttcaagcgattctcctgcctcagcctcctcccaagtagctgggactacaggcacgcaccaccacccctggctaatttttgtatttttgggagagacggggtttcaccatgttggccaggctggtcttgaactcctggcctcaagtgatctgcctgcctcagcctcctcaagtattgggattacaggcgtgagcccccacacctggcctagagtgatttttttttttataattaatgagccaatattggtatattagctagtgtccatactttattcagatttccttactttttctctagtgtcctttttctgttgcagatcccattcaggatattatattttatttaatcgtcgtcttttccgtaggctcctcttgactgatagtttctcagattttccttgtttttgcatactagacttttcatacatccatgttgaaagaattaaaattgttatccatagtgggcaggattttctctttatgttatgggaccttaagaacagactttttttttgtttctttcccgtaaaacaaacaaacaaacaaaagaacagacgtttgtttggaagactgaagcaagggaattgcttgagtccaggagattgaggctgcagttgctatcattatatttgtttttttgttcttacctccattgtgaagtatcattatcactgtcattttttaattttatttttatattttaatttttttttgagacagagtcttgctctgttgcccaggctagactgcagtggcgagatctcggctcactgcaacctccgcctcctgggttcaagggattctcctgcctcagcctcctgagtagctgggattacatatgcccgccaccatgcctggttaatttttgtatttttagtagagacgtggtttcacaatcttggccgggctggtcttgaactcctgacctcgtgatccacctaccttggcctcccaaagtgctgggattataggcatgagccaccgtgcccagcctatcactgttattgagagagacagtgtactataatag

SEQ ID NO: 66288 - DNA, 1117 bp, Homo sapiens
tttgaattagttttgtatataatgggtcaaagtttttttttttggcatatgaatattcagttgtttccagcaccatttgttggaaagattttctttctccactgaattatcttagcaccttttttgacagccagttgaccatgtatatgtgggtctatttctctgctctattctgttacatatatgcttacacctgtacccactgtcttgattagtgtagtttgattaccaactctaactttgttcttctttttcaaaattattttggctattctaggtcctttggttttccataaaaatttttagaattagcttgttgattctacagaaaagagtccgatgggatttttttttttttttaggattgtgttgaatctgtagatcaatttgggaataattgaaatcttaattgtttatattgagtcttctgattcattaacacaatttctctctccatttacagtatttagatattctttatctgctctgcttttatgcattttttggatttgttggaaaactgtaggagagggaagtaacatttactccctacctacctgctccagtctgggctctttacatatcttatctcagtatttcacacagtataggatgccctctggttttccttaaataacattaaatcccatgggtagaaatttcttccctttgtaattttttttttttaattttggagacagagtcttgctctgtcacccaggctggagtgaagtggcgtgatctcggctcactgctacctccatctcctgggttcaagtgattctcctgcctcagcttccctggaatagctgggactacaggtgtgtgccaccatgcctggctaattttttgtatttttagtagagttggggtttgccatgttgcccaggctggtctcggactcctgaagtcaggcaatctgcctgcctcggcctttccaagtgctaggattacaggcatgagccactgcacccagcccctttttaattctttttgttttttgtttttgttgagacggagtcttgctctgtctcctgagctggagtgcagtggcgcaatctcggctgactgcaacctctgcctcccaggttcaagcgattctcctgcttcagcctcc

SEQ ID NO: 66289 - DNA, 1098 bp, Homo sapiens
acatttattgctactgccaagcaggccttctctatggccaggcaacagggagtgctgaggaaggaattccatcgtcctgaccaactttttgctggagtaagagtatttaacaaagttcttcatattcaggcacctccaaacatattttctttatttcctccagagaacaggctttagtactgaggtccttgtaaacatttaacaaaactggtttaagaacaaactaaaagcatctatatccttgccctgtgttgctggggtgagtttatacaaggagaagttggaacaaatgcagtgggcacaatgaccttcttactcagttcaaagtaggtcttgggatgagagttccacacggccagtacagctgactttctgtgatttccaaggggtgcccaagacattaaacgccatggtccttgggaaggactgatgatgtttctgctcattgttgatcagggtcaaaccttttcactaaccgggactgctctttccaagaagtcagaggtcagaaagctggtagcgtcgtacaagaccgtctcgacagcatgtgtagatctgcttctcccatgtggctacctaaaacacaagaattcacagttcaaaggaagcctgggattcttccatttcaaaaagatggaggcttatgattgacacacactagtcccatggagtctgagaaggctttatgaaggcaacagaattacatccataattatgtgcttacaaaaattgttggcccatagtgatggatgcatcccaatcaccaatggttgggatgcaccatgactatataacagagaaactaattggcccaagtggaaagcaaacccattagtattgttcaggtttagcacagatggtctgcctctagggaggagatggttcagagatgggcttgactattcttgaaccttataaaattggatgcaaaaatgttctgaatatgtgtctttttttctgaggaggatttcatcaactcctcaaggaaaacagcatgaattctggagttagtctcagctttactaccaactagctgcatgacctagggcaactttctcaaccccccaggccccagttgcctcatttgtacaatggaaa

SEQ ID NO: 66290 - DNA, 1078 bp, Homo sapiens
cccccagggaaagccccgcaggacggccctgggtgccggggcggggatcacactttcttcactctgctggtttccctaggagacagatttcctaattactcctggcctttctctgcctcttcctactgttgctggccctggggaaatggacactaagccactgggaaggacctctgggagggacaggtgggcacgcctgcccagcttcagctttcttccccgtagctgcaagccccttactctgtttctcccggggaaggtcccgtccccgcagggcatagggatgcgtggggaatgtgccccagctcccacactgcctgccaggatgagcgagtcagtgtaatcctgggctccacaccccacgtcctccacctcagcttgcttctactgagaaaggcgggtccgtattctgtcttctctgtgtgtctagattctaggcagggaagaaggatgcttcctcgttattgggccccctcagaaaacccaacagtctagagacttaaggaatgatcctaatcaagcggggtgctcagccccacacctactcacggtcactcagcacgtcgtaggcctctgctatttgcctgaaaatctctgctgaagacggctcatttgacttcaacgggtggtgcttaagggcgagtctgcggtacctggaagagggagaattaatacaagtcttatcagctggtctgtttctgagggcggaccagagttcagagccggcactctgttcactcctgcctagctataaatccggggtgacttcaccagctgtggtggctgcggaggtgcactgctcagctcttgaagagtagctggtgcggggagcacagttgaccgacagttccagcagctgcccccctgggcatctgagctgaagcaactgcccctgagctgccctcaatgcttacgtgtggtggggataccagggctggcccattcctgcaagacacaggactcctccaacgggcaagctttgcgcgagggctccccagaggctggctgagctgctccccgggcctcgctgcactctccctccttcctcccctccctgtctccactcgcaggtgtcagg

SEQ ID NO: 66291 - DNA, 1070 bp, Homo sapiens
ggcagggctcactctgatctcctccccgctgctcctgcactttgcccactcaccttgccaagagggatggggttcacgaagaagaggttgtcattctccctgcggaagcgagggtgtagcttctcctttacgatgaaaatgatgtctgctgggatgatgttggggccctgggcaggggacgccaaaaggtgacaaggactagttggccgtgtgaccttggccaagttcctgcctctacttgtctccatgtcttcatctgtacaatggggagatgagagcaggttttctggaagggccttttcagtttggcccccatagcccagatggattagaagcccgagaagcttacccaaatgaatccccccagaattacttctgtactgagcatgcccaaaatagacacactcagctggaggggcggagaggcttcctcagacggcaggcaggtggaacactaagctgggcgtcaggcaactgcccgtatgtctctgtcttgctagtaactccaggcatgacacccctgtcccaaacttcattaagtcaccaaaactctgctgaggtctcttctgggcgctggggacagaggaatcagactggcccctaacactgacagtgaatcctcagcacgctcaagacatgataaagggaggcccagaggctggggctcagaggaggctgcccagagcggggaacactggagctgggttttgaagcgtgtttattcgaagtagatgttttatttgtattttgtctgtttgttttgtttttagacaggatctcgctctgttgcccaggctgaagtgcagtggcatgatcatacttcactgcagccttgacctcctcggctcaaaagatcctcctgcctcagtctcctgagtatctgggaccacaggcacacactaccatgcccagctaaattttttatttttagtagagacaaggtctcgctatgttgcccagactggtctcaaacttctgagctcaagtgattctcctgccttggcctcccaaagtgctgaggctataagtgtgagccaccaggccagaccggaggtagatgtttcataggt

SEQ ID NO: 66292 - DNA, 1574 bp, Homo sapiens
ctggcctcaagtgatctgcccaccttggcctcccaatgtgctgggattacaggtgtgagcctctgcgccccatcctcttgtttgttttttgagacagggtcttgctcggttgcccaggctggagtgcagtggggtgattaatggctcattgcagcctcgacctccctgactcaagcaatcctcccacctcagcctcctgagtagctggggctgactacaggcatgcacactgtgcctggctaatttttgtattttgtagagacagggtttttgccatgttacccagtctggtcttgaactcctgggctcaagtgatccacccacctcggcctccaaaagaagtcctggattacaggcatgagacattgtgcccagcctctctgtctctttaaaatcatgaaaactcgtagctacttaagtaattctcctgccttctggaatgatgggtgaagatcttgactgccttgcctgctcctccttggcagatgacctcccttgccacttcacttctgcctttggggcaggcttctgcaccactgtcatcgcctcccctgtagacgtggtcaagacgagatacatgaactctgccctgggccagtacagtagcgctggccactgtgcccttaccatgctccagaaggaggggccccgagccttctacaaagggtgagcctctggtcctccccacccagttcaggcctcttggctatgcatgtctattgtgggtgggagagaaccacctggaagtgagtagcagccaagtgtgactatttctgatcctggtcctggcatttcaccagcattcacctatccccttaattccttcctcccagaattgctaccatcactgtttattaggtgttaaatggagactcaaagggaattcatgcttatagccaagcagctgtgagctcagttcattgagtcctcccagcctcctttgggacagagcaactgggttggattgaataccaggcccagtgagggaagtgggaggtggaggtgcccccatgacctgtgatttttctcctctaggttcatgccctcctttctccgcttgggttcctggaacgtggtgatgttcgtcacctatgagcagctgaaacgagccctcatggctgcctgcacttcccgagaggctcccttctgagcctctcctgctgctgacctgatcacctctggctttgtctctagccgggccatgctttccttttcttccttctttctcttccctccttcccttctctccttccctctttccccacctcttccttccgctcctttacctaccaccttccctctttctacattctcatctactcattgtctcagtgctggtggagttgacatttgacagtgtgggaggcctcgtaccagccaggatcccaagcgtcccgtcccttggaaagttcagccagaatcttcgtcctgcccccgacagcccagcctagcccacttgtcatccataaagcaagctcaaccttggcgtctcctccctctcttgtagctcttaccagaggtcttggtccaatggcctttttggtacctggtgggcaggggaggaaccacctgac

SEQ ID NO: 66293 - DNA, 1326 bp, Homo sapiens
ctccttagtatgccatgccaaccctccattttacacatgacgaaacagagccccagacaaaaggttgtctttcccagatcacatggcaggaagaagtaaagctgacctgagatcccaagtcttaggaatcccagtcctcagaaagccacttctctctgagccttggttttcacatttgtcagatggaaatgattgtgatttctcagggctgttgagcaggtaaatgaaaatgttttatgaaagaaagcaccaagtttcattttggtcttagcccttgctatgtccctagcaagaagtagatattcatagggatattttgtttgatgtgaggagttcttacagcaagagcttgtagaaggccaaaagcttctggattctattcccaaaagcaggagatgacagtgacagggtggttttggtgaggagagatgaggtagaaaatgagtgcaagcccgctggccactgaccccatggctcgcccacagatgccagcattgggagccgcctcctagcaggcagcaccacaggtgccctggctgtggctgtggcccagcccacggatgtggtaaaggtccgattccaagctcaggcccgggctggaggtggtcggagataccaaagcaccgtcaatgcctacaagaccattgcccgagaggaagggttccggggcctctggaaaggtgtgtaccagttgttttcccttccccttttcctcctccccgatactctggtctcacccaggatcttcctcctcctacagggacctctcccaatgttgctcgtaatgccattgtcaactgtgctgagctggtgacctatgacctcatcaaggatgccctcctgaaagccaacctcatgacaggtgagtcatgaggtagacggtgctgggtctcacccttcccccatgccaggagcaggtgcgggggtctagctgacaccagaagaccacatcttttcatcctatttgccctttgcagggagagtaagatatctcttacttgccatattgaagccaattgggatgaagctcccactttgcacattgaggaactgaggctagattggcaaaatgactctttcaggtcctcagaagatgtctcagctggagtccctgtctgtttttgtttttttgtttgtttgttttttgttttttttgagatagagtctcactctgttacccgtgtaatctcagctcactgcaaccttctcctcctgggttcaagcgattcttgtgcctcagcctcccgagtagctgggatgacaggtgtgcaccagcacactggctaatttttgtatttttagtagagatggagtttcaccatgtta

SEQ ID NO: 66294 - DNA, 1047 bp, Homo sapiens
ttcccagggcttgggggctttttctagtgggctttgagctgctcaatctggcctctgcagggccggctcccagcccttccaacctcctcacagcccgacctgggacctagccaattcccggagagtctctgtcccatcgtgaccccctcacaactctcccactcaccaaagtctgatgactgtgctagggggtgcttatatagagtactgagtgttacaaaagcagaagtctggatgagaaccaatttgtgatattaagcaggtggggtgggggtggggagtgtacctaggttcattttccgccctgcttttcccctttccagtgtgtgcacttaaccagtccctgggccctgttccccatccccctccaaggcatggattgggtgggcttgtgtgtcttggggcaggtggccctttctaaactctctgcctttgctcacccacaggacacatagtatgaccattaggtgtttcgtctcccacccattttctatggaaaaccaaggggatcgggccatgatagccactggcagctttgaagaacgggacacctttagagaagcttgatcttggaggcctcaccgtgagaccttacaaagccgggtaagagtccagtccaaggaagaggtctcttgctgcctcctaaccctgtggtctaggggcaggagtcagcagggcattaacaaaaataattaccatccccacccccgacagtgaagtggctctttccagttcacagagcactctcacacctccccgctctcattctggcccttcagctgactcggacaagccaaggatcttggtccccattttataaaggagaaaactgaggcccacgtgtaacagtgattggccccaagtcatcccgggagccagcagaagagctaggacaggaacctattgttctaacttcatattgatgctagcttttgactatccctgaaaccgagattggtaatcagcccggctctgaaactggttatttgctggggactgtaaaataggattaactatttctagtcctgcattttaattgctgttagt

SEQ ID NO: 66295 - DNA, 1037 bp, Homo sapiens
gacacccagtatttcctttgctgatgcttgaaatccatcagacaaagccccgtggggaggacaagaaaagggccatggatgggtgcagtggctcacacctgtaatccaaacactttgggaagccgaggcaggcagatcacctgaggtcaggagtttgagactaccctggccaacctggcaaaaccccgtctctactaaaaaaaaaaaaaatacaaaaattagctgggcgtggtgcacgcctgtagtcctagctactcaggaggctgaggcaggagaatcacttgaacccaagaggtggaggttgcagtgaaccgagaccacgccactgcactccagcctggacaacagagcaagactccgtatcacaaaaaaaaaaaaaaaaaatggggtcgcgggagccaaatgtgcagagtgagcagtgtggctgggcaacaggctttcacccccaagtacatgtcacttcactcagtcctcaaaacagctctctaactctagatattatgatatctagagtttctgtaagttcagtgttttgcctctgtttgtgtagttaggaagtgattaaccacacaagaaatcccagaggtattgcaaggctactgctttcagtaatcaaaacaaggtacagccaataagtgctctgaatttagggacttcatggagaaagaccatgtgggctggggcagtcagggaaggcttcctagaagagacaggtcttggggtgagcacagagaattggcccaggctgtggacagctatagagagagagccaggaaagcctgtgagcagtgtgcagctggagatagagaccagtctcactgcgtctgagcctctgtggcctcgtctgtaaaacagagataatcaccccagcttcatggggttgtgaggaagatcaaatgagatgacatttgtgaaagtgcttcgcctacttttggcacatggtggaagcttaggaaatgtcagccccacccactctcctgactttcgggagcaaaccagtagagaggcaagcatgcagccactggggcaggcagagc

SEQ ID NO: 66296 - DNA, 1047 bp, Homo sapiens
tagcattgaaggctcttttaagacacatctattatcagagaggcctatcatgttcatgacctgggtgtccaggtactcagaaaggaacaggtcccatgtatggatgaggtaggatttaatggggcagcctgaaagcccctggcctactgccgtgcttgacacccggtccacaggaaagccagttctgtccttcagcctagtacagtcgtcaaataccccatccctgttccctgggaaggcccttacagatcagctcgctgaagtccaagaagaataagatcaaattccccccagacattctggaacttcctcaaccagcatcaacccctcttctagtaataggtttgtcttggctgttctccatacctgcagctcagcctatccacccccaccactttcctagcaaagaaaattccttcctcacaaaacctgcacctccacgtggcataccctctctcttcattgtctgttcacattccaccttcatgtttaagttcccgctccagggacttcaccccatggatgacacccgctgtctagactccaaggcacctgcagcccctccagctacgacgatcctgcttccatgtgtgttcctcctgcctccccaggaaggttgatgcctcccacaaagcccatgttctgctgacaactttcttgtgccctcaggtctacagccagaagtgtaggagtatttcagaggaatggatgatacatttgagggtatccctgctctggccaatttcgcctctggccaaccccaccagggttgtgtgttagggtagcagtcctgatgaaggaagaatcttcactactagtcaagatggtttctaaaccctattgaggtcaacaaaagcaaaatgctgctgagtgtgagttctctgtccttccacaccccgcccctgccctgtacacagagccaagccctgtccttgtccttgttctgattcctgggcctgggccttgcagataaggccccctaggtcattgggttagggtatcagtgctggaaggttggtgccacacacgattcagctccagggcaga

SEQ ID NO: 66297 - DNA, 1072 bp, Homo sapiens
ctgacctgaagtatagactgctttatgatgaagacgaggggaacagatctgagaggattagatagaggggcaggggatgagacaaaggaaatagaaagtgtaattagaggtttctgtcacaagttacccggcaggtgatatcatttactggataggaaacagcacatagacaggtttgggagacgatgcagattgccgtttggggcatgtgcctgtaggacatccaggaggagatgcaggaggagtgaagttgagggctgagctcagccataaaggtaggcatctctgggagtcgatgagggcagcaagaagagcctgggaagggggaaccaaacacacagaggcagactctgagcatctccagtgtgcaaagagaagcaggacagggcatgcccacaaaggagatgaggagagctggtcaggaggtgggagaagcagcggagagagaggtgccgtaggagcagatgctgcagagtttcaggacgtcgtggtcagcactgacgctgcacacaggtccgggagaatgtggctgacatgtatcactggttttagtgttaaggaggaccttacagtggtgggaatggaagccagacttcattagtcaaagcagctaatggtgaggacagtgagaacagacaactttttcacataaactgaggagataagaatagctgacatttatcgaggcaccattctaggcactttacatatataaattcatttaatccttaaaacaataagtactaatacatttaaaaatggagaaattgcggcacaaaaagtgaactttcctgaagttatccatctagtaagtgacagagagctgggtggtaactagaagacaatgcaaggtcagggggttgtttgtttgtttccctaaatgggaaacttgaacatttttatgaactgaggaacaggaatttaaagttcatgaggccagacatagtggttcacacctgtaatcccagcattttgggaggccaaggtgggaggatcacttgaggtcaggagttcaagaccagcctgggtaacatggcaaaattccatctctactaaaaatacaaaaattagc

SEQ ID NO: 66298 - DNA, 1031 bp, Homo sapiens
atatatatatatatatatatatatatatatatactgtaagttctggggtacatgtgcagaatgtgcagttttattacataggtatacatgtgccatggtggtttgctgcacccatcaacctgtcacctacattaggtatttttcctaatgctatcccacctctagcctcccacccctaacaggccccagtgtatgatgttcccctccctgtgtccatgtgttctcattgttcacctcccacttatgagtgagaacatgcggtgtttggttttctgttcttgtttgctcagaatgatggtttccaggcttcatccatgtccctgcaaaggacatgaactcatccctaaagagattgtttttaaagttccactgcctgcttaagaaagggtgttaccttattccagtactgtggtgaggtcaacataggtcaaagaattggctctgaacttcgtagcactagagtgcatccaaactcatcggatttttgcatttaacatagtgcttagaacattgttaacacttatgaaataatgaatgaatttagggaactacttgtaatcacatatataagagcctatctgatcatctagaatgctagtttattaattatatggaaaagcatacctactgaggggaccagggtattcttcctctctggtcaccacatcttggaaccataaagaaaatctatatggtaataaacagagcagaaaagaaaagggtaacattttgcaggtggcatttttgtgctgggtgcttttctttcaaacatttgtttagtacttgttacatatgcttggacctgggaattcaaagatgagtaagaactagttcctaaccttaaagagtttacagtctaataggagaatacagtagtaagtaaataattacaatgaagcatcagaactatgaaaaaggtattcttggtgctatgggaacacagggacatgacacctctaaggatagcatctcagtgaaagtgatacttgacctgagtttcaaaggatgtaggtataagtcaaggaaagggg

SEQ ID NO: 66299 - DNA, 1027 bp, Homo sapiens
gcactcatagtaccataaacatttcacttttaaagcacttctctctcaaagctctttctaaaccattatctcattggacaatcataacaactttgggagacagcactagcatcagttttcccatttgtgaggtaaggaaaccaaatctgagagaaattaatggcttgttcataataaaccactagttctagccatagccaaagagaactcagatcttccaactcctagcctttgttcttcccatctaatctcattgcctctcaatggtcagatgaacataaactccaactcactgtgggtatgttttctgttctgtcttgagccaggatgataggacactatggggtggagagtaagtaacttgttttttgtttacttttaagactataattgagaatctttattttctcccgtaagggatcacaggatggtatcctatcattttaccagaagacgggggcctacctcatggcctggagctcatgcagaagatcgtgggtggtctggagctttcgatttccttcacgcatcgtggagatagagaacgggtgttggaagctgctgagcatttgggctggagctttgagaacagcctgaaagattttgtcagaatggatgaaggggagccagccactgtcaccatctccaccccaaggctgtggctgcccatccattgtgtgctgcttgctggccacaaccacattcataagaatacatattgctaccttcgctacaagttctatgatcatgaagccttttggacccctctcaagaagcctaaggaatctgtaaacaaaaagcagattatggtcactttcaaggcatccaaaagagcagaagtcaccaggggcccatcactgctttggtacttcagggaggagaggctagagatccaagtgtggcgagcttatggcaatgacagtgtggagagaccccatcagacagacagctggattggctcagcctatgtggacctggccagacttggggagaggtcagcgaggacgctaactgtcagtggtaagtg

SEQ ID NO: 66300 - DNA, 1045 bp, Homo sapiens
taagagaaagatagtgtagagagaaataaagcaaatgtgtcagtgttaatgggtgtatcgagatgaagggtgtgtaggagttcattattatatttttgcaacttttctgtatacctgaatttttttcaaaacatttaatttaaaaaatgggctgggcacagtggcccaaacctataatcccagcactttgggaggccgaagtgggaggatcacttgagcccaagagttcaaggtgcagtgagttatgattgcaccactgcattccagcctggatgagagagtgagaccctgccaaaaaaaaaaaaaaatgaaggcattcaggctttgattggggcatgagcaagagcaagataatctctaatgcattttacaaaactaagatttagtgcatataaggggagggttgtgtggatatactgtaaactagccccttgatgaatagaccatcaaataatttttcttttttgcttgatttaacagcaagtgatataatcagtattgagtcatgcaaagagtatctgcttggagtagtaaaagttccaacaaaagagctgctgatcaagagatctggtaaggatcctggattatcactttctgatgccaccctttccctttcacttccctacaagaggtaatcttctctgtctctcatgtaagatattcaaaagaaaacacaaccccttaacacatgcttctgaactctctccaatacctcaaatgttttttgaaacttttttttttttagtttaaagatcttaattaattttatttgcaatcgggaatacttcatttcataaaataaaatgtgttccaatgagctgagcagaagaggttgattttatagatggagaagtcctgaagaaaggataaacacagaccacgcatggtggctcacgcctgtaatcccagcactttgggaagccaaggcgggcagatcacctgaggtcaggagttcgagaccagcctggctaacatggtgaaaccccgtttcttttttctttttcttttttttttttttattatactttaagttctagggtacatg

SEQ ID NO: 66301 - DNA, 1059 bp, Homo sapiens
ataaaaatatataaaatagccgggtgcggtggttcacacctctaatcccagcactttgggaagccaaggcgggtggatcacctgaggtcaggagttcgagaccagcctgaccaacatggagaaaccccgtctctaccaaaaatacaaaaaaattagccaggcatggtggcccatgcttgtaatcccagctacttgggaggctgaggcagaagaattgcttgaacccaggaggcagaggttgcagtgagccaagatcaagccattgtactccagcctgggcaacaaaagcgaaactcgtctcaaaaaaaaaatatatatatatatacacacacacacacatatatatatataaaatatacagtatacataaacatcccttttctctctaaattagtgattctccacattttgagggatttgcccttttgaggatctgatgaaaactgtaagacaccttgtcttggaaaaaatgagtatagaatatacactgccaattttgtatacaattctagaaaactcatagctccatggagtctatgtaaatgttgcttgtctcatttcacctttaacttcagcaagcattttataagccctcatgccataaattctaagcattatatggtacactcagagaattgttattccaagccaacatgagcagataggggattggtagaagatagcatgaaccaggaattcactgtaagggaggagaaggctagggtttaaagttaggagaggattaattcgaatttggagatttgaatgatattacatcctaatgcttccagcaggatggtgtaccctctaaatttatcatcagataacgaagtttagcctcctatatcaagttgctgtacatgcttgctaaagagtatctgccaaaacaataggttttatgtcaccataattaagattgagttgtttctcctgaccctccctgatcagcttattctgttattccataaagctgtccctgaaatgtgacagtaggatgatagaggttttataaaaaggtagcatgagaaggatatttcaggtggtgatggtaggagggtg

SEQ ID NO: 66302 - DNA, 1144 bp, Homo sapiens
aatcctcaataaatacacgattatttgttgttattacctttagtaacagtgtcttcactacctcccaaagtagtccttaccattattggacagtcctggtgttatacccaactgatttgaaatagtaattagtacctgtttgctattctgaatggccagactgaggagtcctgctggaatcgtggatgccactgtctgctgtaggctattagttttcctttttttcttaaattatgatattagtttggtctggtgttacccttcttccacttcacttctcattcctttgctgttctaaatgtagaatttattctaaatttacgatttattatttttcctatgaagggaacagccttctattcttagtatattaagagcttttatcaggaacaaatgttgaattttatcaaatgccttttcagcatttgtgttaatcatttttattgttccattaatgcactgaattacatttatggatttcctaatattaacccagtctcatagtcaagagtacatcctgtttagcctacttacagtgagtagttgtgagagttacaatgaaaattaagtgtctattttagtatcaactaattatacttatctctttatctatactcagacttcatagagaagcagaaatattctaagcaagttactctttaaagctcaccagtgtttctgtttcatttaataggcagaggaccgaggaaatggactgatggagcactgctttgagatccatatagagatggttaaagggctagcccctcttcaggcaacagtctggggagaagcagattgttatgtccagtactactttccagttcaacactctcaatccagtgtgctgaaaggacctgagttccttgaaaatggtaggtttagatattaggctttcttattcttatatggttcttttattagattatacttaagagttttttttttctgagtgaattttgtgttgttgaatatttctagtcttactgggcagtaaaacaggagataggccaagttttttttattttttaactatttttgtagctttttattttgatacaatttcaaatttacaaaaacctgtaaaaatagtacaaagaactttggtatactctttacctagttctaccaattatttgcattt

SEQ ID NO: 66303 - DNA, 1643 bp, Homo sapiens
aagtagctgggactacaggcacctgccaccacacctggctaattttttgtatttttagtagagacggggtttcaccgtcttaaccaggacagtctcgatctcctgacctcatgatccgcccgcctcagcctcccaaagttatggtgttacaggcatgagccaccgcgcccagcctaaactgttcctttttaattttgactcaagattctgatttttaattattttagcactgacctctttcctagcagccttctcatagttctgtgttttaaatgttgtgttttacattttacaaagagcacctttgtgggcattagctcatttgaaccttactataaccctataaagtattgttattatccctatattacagatgaagaaatttgtcctttaacttgcagaagtcacttaacctctctgactttcttttcctcatctgtaaaatgagggtgatagtagattacctatctctcttgtggaacaatcgtgaagatctagagagaaaatacatggatatgccttctgtgaacagctgagtattaatacttacaacagtaacattggaaatcatggccaggctgggtagtcctgctggaatcgtggatgccactgtctgctgtaggctgttagttttcctttttttcttaaattatgatgttagtttggtctagtgttacccttcttccacttcacttctcattccattagatctcattctttgctcagagtgtgtaaaataatagtaactaccagttactgggcatcttccatgtaccaagcatcatagttggtattttgtatgttatctcagtttagtcctaacaaccactctttgatggaagttttttcattgcgtacgttttaaaaatgacaaaacagactcaaaaatgttaaatgaattgcttgagtcacacagcaaataagtggcagagctaagattcagcatggcattataaatcatttatcagagcttgaatcccaacttaacctcctactagttgtgtatccttagctaagttacttaacctctttaaatttggcttttctcatccattaatagtggataataccaacctttgcagcgttaaaaggattagaaatactataaaatgcctagcacatactaagcacttagtagatggcagatattggcaatattttccaaatcttatctgtcagacaccaaagtccacattcttcctagtagaccacacttcctccctttaaaataatgcagtttagcaaagctccatgagatactgttcaaatcacagacactggacttgggtccataatgctacagagacatatcagacacattccttgccttcaaattgctacattttgaacttctctgcctggtaatttttatttggtaggttactgacagatgcacacattttttaaaaccactattacttttccagttgcaaatctatttttaacaaactgaaaaaatgagtcaagaaagaaataactctatgacatgattgatgcttgttatttgcttattcacaatttctccccctctagagatgctaagatttctcgcctgctgctggatgcccagtacccagttgttgctgtcgacagctacatgcctgtgattgatgtgttttcaggccaccaaaatgggagtcttc

SEQ ID NO: 66304 - DNA, 1125 bp, Homo sapiens
aattctttttatttaccagttaaaactccatggccatgagcacaaactcaaataccaccatcactttatccacttacacttatagttatagcagaaaccccttcctttccacccaagagatagactcctttgcctgacactactagctaacatcagtacctgataacttgtttgtgacagtaagagtgtccagaaggtaggcttatttttgtattatagttttttattccattcttctatttatccctcattgttccacctccaaccagcccccttcttttagtatactacctacaaactagtcttttaaaaacagtgctattacctaaaacccagtgaagtatatagatatgtctccttacacatccagtactcatatgattgacattcatttctcatggcaaagcggagcaacatagcactgcctgtcttctgtgtactatctccagagttttctctttgtccctgctcattcaatcctacaaccctagcactttctgtgaaagcacactgactcgatttctgcaggagattttaattaaatttgaaagggaggcaggtggtatcaaggcatgaattgatgatgacttcagttgggtggtgtgacatgtctgtgtgtctggttctccttacagaggtgaagttccagcagcgatttgtgtttccagtacagtttggtggcccaatgatagagcactggtggaattccaacctcactttccaaatttatgtaaagaaaactccacagaaaaaggtactttgagtgattttggcctttgccttaccttcacactagggatttggaggatacctaaaattatattcttacctaaactaggaatcttcaggtgcaggcagtactaataatccattgttattattattattattattattatcattattattattactactactaatctctgctgtttgtcatgggccagatataatactaaaggctctacacgagcacactatcaattttaatcaccacaactctgtgaattaggtacattattatatttgttttacagatgaagaaactgagatttagttaacatgtctaagatcactcaatctaatgaaagagccaggacaccatcccaaatctgctgtctttag

SEQ ID NO: 66305 - DNA, 1065 bp, Homo sapiens
tgtgatgacccatgcttgtggtcccagctacttgggaagttgaggtgggaggatcatttgagcccaggaggtcaaggctgcagtaagccatgatcgtgccactgcactccagcctgggtgacagagcaacaccctgtgtcaaaaataaaaataaaaaaataaaaacttgctgccctccctttttcctcatcttgcctgtgcaaactagattgtttcatgtgaagcctgtagcagtatgcctcactgcttgtgtgaactcctttcagaaatttggttgaacaacagatgctctcagaaactccagaagatgcccaaacgatgacactaagtgtggatagactggcccttttgggtagaacacattcagtcagaatcatcatcgaaaccatgggagttcctccagatagtcctcagatgacccctggcaaaaaaagctatgctggtccaccacctaaggtgactacagcaaaaaagcggtatgtctctaacatgagaaagctaaatttgacatttttggaaagtgtgtctgatggtaataatcaacaattgcataatactgtgatttgggatgtgttttcatatgcatcatttaatctacagaaatatattgaatccctgctatatcccaagaactgtgtaagtaagtatgggactaaagaaaattaagatacagactctgttcttacatatcttacagttagcaggagagagaaacatttaaatggctatctataacataaagctttagggcccaaaatagatgttttgtattaaaattgctgtgggaacacaagaaagggagcctttgattctctcagacagggttggtggaaggctttgaagaagaggtagggcctctgagtactagaggtcctgaaagtaagatttcaaatatatgttggatttatcagacggaaattaggtttattgtttggttagtttttaatcactttttttttctttttagcactttctttgtagaatatcactttcctgtgggcttttcggaaagcggattgggaaagacagctttgatcactgaggttgttcgactcgcctccagta

SEQ ID NO: 66306 - DNA, 1033 bp, Homo sapiens
tatacagcacctgtaagtcactgaacctgaagcattgagaattagagaacaaatgtattaataatattagtagctgcaggcatgacagctatgcattttacataacttaccttacttaattttaatgacaacctcaagaggaaagtattatcttcattttacagatgttgagacaggcctagtaggatttgaatattttgtgcaagaacatatagcaaataagtattagagccagaattcaaattcacatttgcctgagtccaaagcctatggtttaattaatatattttatggtttccttagagcttttataaggaagagctgatgtagttataccctcagaaccatccttaactggtatctgttaaaaatattccaaaaacacttcttactcacaggagacaaaactcttctggcctgtaagacagggattctcttttctggcagctctggttttttcaaagttcttttttctatcaagccttatgctcttttcattggcttagcatcttctagaatctatacatactatgtccaatccctgttccacaagtagttatttatatgtgtgaaggttcatactcctgattttccttttctccaggtcaaaaaaagatactgaaatacaaggtagtttatatcagcccagtagtaagccagtgagggctaccacagtttggaagaagcagggaaaacttttacatgagattgtggggaaaaaccataatgaagaataaagggttttaactgagattgaaagatagtgttttgagaagcagagaaaagatacaaaatgggcgtagaaagaatgacctgtgcagaaaaacacatttttgcgctacaagggacccaattgactagatgagaatttgtgtggaaaaggagttgataaggcaggctggcacattgcagccaatctgtgaaaggcttttcatgtcaggtgaagaggaaatcacatatcacaagagtgttctaggaatctgtgtctggcaaccctacagtggggcagactgaagagggaataacgagaagc

SEQ ID NO: 66307 - DNA, 1044 bp, Homo sapiens
tgcttgtgcttttgaggtcttacccaaaaaatccttgcctggaccaatgtcatgaagcatttcccctatgttttcttctagtcgttttatagtcctagatcttacatttaagtctagtccacttttagcttatttttatgtatgatgagaggagtctactcttattctcctgcatgtgggtattcagttttccagcactatttattgaagatatcaacttatgttttcttcatatactgttacatgccactaacttgggatatacagagataagagatggccctttcatttaattttccagaaccctgtgtaatacatactgtgtgatagatatgcatgagatactaggaaagaacatagaatggtccctcttctgtggggggctcattgggagcactttctagaaaattctgaatattcaaaccccttagaaattccaggagggttatactttgtcaattgtattctaaaatgtatagagaaaattaaatactaaataagaaaatagtctaaaaaggataaggaaaaaacatctaacattaccaaatgtaagaatttattaatattataaaatcataagcatataattttgtcagtggaacagattccagaaatagatccatctaactgaaaaaaaacttaacatttattgtttttatcctattctcatttataatatattaaatgttaaaatagtgacactttatattgatgacttaagggtgaagtgagtctggtttagtcatgcttttctgttgatgatataaatttgcatcagcactgccagacagtttggcattatgtttcaaaagccacatgaattactgtatatcgtttacctcattattccacccctgggaatttaccttaagtaaatactatgaaaagagaaggaagctatatgcttcagtctagtattggaaatacatttttaatattgggaaaatgaaaacaatttattcaacaatattaaagttatagtctatttgtggaatcttttatatccatagaagataaaattacatagttatgattgtgtggcag

SEQ ID NO: 66308 - DNA, 1360 bp, Homo sapiens
ttgtgaatactaaatgaaaaaaatgtttgtaaagtgatcggtctagtagctgacacattgtaggtacaagtcttataaaaatattaagactcaggcagcgtgtacagagatttgagatgtattccctgcccaaaaggaacttaaagattagttgaaaacaaaactgacatacatgaaacagtattgagcaatgccagacagtatataattaaatgtctgattacttgacacatatagtaatatcatatgaatattctaggaagttaataagggctaatcttatgttattaagaagccagaatcctgcttctactctatgctcttgctgtttgactttgagcaagccatttcatcttcttgggccttaattttcccaccagtaaattgaaagagttaaaacatcaaatgtgccagcacccaaatttcataattctagttaagaaagaaggccatggaaaaggtagaatttcaataggagacacatgaggtgaaccttataagtgacagtccaactgtagacatgacatggtttttttttttttttttttaagacggagtctcactctgttgcccaggctggagtgcagtggcgcaatcttggctcactgcaagctccgcctcccacttcctgggttcacgccattctcctgcctcagcctcctgagtagctgggactacaggtgcccgccacgacacccagctaattttttatatttttagtagagatggggtttcaccgtgttagccaggatggtctcaatctcctgatctcacgatctgctcgcctcagcctcccaaagtgctgggattacaggtgtgagccaccgcacccggccgacatgatgtgttttttagaaaatgaagcgataagaggctgaacgtggtggctcacgcctgtaatcccaatactttggtggctgaggcaggaagatcacttgaggccaagagttcaagaccagcctgggtaaaaccctgtttctacaaaaaaattagattccacatgcatagcaagaccctgtttctacaaaaaaaaatttttttaattagctgggcatggtggtgcacacctgtagtcccagctacttgggaggctgaggtgagagaaatcacttgagcccaggaagtcgaggctgcagtgagccatgttcatgccgctgtactccagcctgggtgacagagtgagaccctgtttctaaaaaagaaagaaaatgacagaaaatgaagagataagacatcaaatattagttcacaaaagtatgtgctctaaccaaaaacttggaaaaagtatgctatttcttaagctgtgtggtaggtattcgcattattattattttatttactcttttgtgtacatatttca

SEQ ID NO: 66309 - DNA, 1064 bp, Homo sapiens
gctcaactccgtctccagcacctaagcagtatcctcccgccatccctccccacggcgcctgcgttccccggcaaccggcgccgctgggcagcctgggaggcaggaaaaagcgactcttcctctaacagtctccggaaaacggtgcgaagagaaggcgccaagacgccttccctccaatacactacaatacccaggacgctttgctacaatacctctccggggttggctggggggcgcctccagctgcgcaagcgcatagggatgcgccctttgtggactccattgcgcagggtgcattgccctgaagagcgctcctccttccggtgaaagtcgtcgggttcccagccgggagtctgcggagttctcatactctgttacccagcttcctttgtatgagtgctgttgcgcacttccggtggaagcgctgaagcgagtgggtggagtttacggagccggtgggcggtaggcggtgctacgggtagctgggtgctgtccaaaggcgacagggcgtcgttaggggagcgagtcgtgaccggttgggccacactcaacgtgggacgaagcttcgcctactgtttgactacgtgcgtgcagcctcccctcgatgtcggccctcgaaaagagcatgcacctcggccgccttccctctcgcccacctctacccggcagcgggggcagtcagagcggagccaagatgcgaatggggtacgtgacccataccccttctccctatgggccaggccccagccgttggagaatggtatctctgggcgttcatagaggcacgggaaaggagtctactgataggagaaaatgttggcggcctggagatatttagatggagtagaaggcagattggggtactaggggaggcgccaagtcaatagaaattggaggaaaaataacgttgttgaagggagaggggaatgaggcaaaggttggggaagctgagagactaacataagggatctgagaatcacttccacaataaaggaggcttagaaaagggagtagaacggtgacaaaggtggaggagaatcggccagggaaggtggagggaagtg

SEQ ID NO: 66310 - DNA, 1050 bp, Homo sapiens
ggcgtggtggcacatgcctgtaatcccagctactcaggaggctgaggcaggagaatcacttgaacctgggaggcggaggttgtggtgagccgagatcgcgccattgcactccagccagggcaacaagagcgaaactccatctcaaaaaaaaaaaagttctacttttctattattatctcttaaattcctttttttttcttttgcaagagatagagtcttgctgtgttgcccaggctgaagtacagtggcttttcacaggcataatcttggtgcattacaacctcaaactcgtgggctcaagcagtcttcccacttcatcctcttgagtaggtaggactgaggatacatgctagcatgcccagctctgtagtgatttaactgacatgtatatagtagtccctttttatattctatgaggtaaactagggcaggagttaatattttcttttaataaatgagaaaactgaaatgttcattgacttgcctaagatcacagaatcattatgtggcaggaacaacattcaaacccaggacttcgtatttttagtccattgttctttctatagcttgcattgaagggtttgatatttgaagtgacaaagatctaagtttgaagcccaacttaggtatttacattggtcgagtcatttaacttctcatagtctattttcttatctctaaaatgagaatacttctgcttacctgagagtgctgtgagaataagataatacataaaaagcacttatagttcctgacactgacacataagctcttaaagaatgatagctagtagataattatacattgagaactgtgaagaaggttcatagtttatgtggaagctctcctttcagtttcttatgttatcagcttttttgtccccacaagctgtatgtttattcatatctgattagatagtctttcatccatcttcttaaatttattatggatatcaggcctcttaggaaggctttaatgagctattcacacagatggggaaataaagggcaaagtgaagtgatttgctcaaggtcacaaattgagttacta

SEQ ID NO: 66311 - DNA, 1032 bp, Homo sapiens
tacattttaaaatacttatttaaatgcatttacattattatgtaatacaatacattaaatacatttttaatatgatactttgtgatgaactctttatatctttaagagaaaatacctttgctgttttcattactgacttacatttagcatttattgaccaagattttatctctttatgcataatttttctgaaatgtctctctcttttttttcctcagccctggaagaaagcgggacttttcccctgttccttggagtcagtattttgagtccatggaagatgtagaagtagagaatgaaactggcaaggatatatcctttgcaaaatggcttattctttagtgagcttatgatgttgtctaagttaaaagacttgtgtagtttctaaaatgttctttattcctgctacttatttcaccttattcctcacttgttctttatggaatattgcctggaagtccatgccaatatctttcttggctgtaattctctaatgcatggagaagggattaagaattaaattcttgaaactgatatactgtcttaggggcccaggggaaggtttcatgagtcaagtgagttgaactagtttcatttctagaatccaggggttatgtcctcatgagggcaaagggaatttttttttttttttcattgaacaaaatggtcacacaggcttcatgcttcaaacagagggttagtgtctcagaaaagtctgcttacatctcttacatttggcagtctgcagttttgcatgtaagtttctagcggtattactatgattaaataatgaaaaactttagtgagcaaaaacatagatgttttatctttaactattcatacacttttcgagtctacaagagtggttcagagggtccagtcctgctccttctgcatggaggaggtcattctgccctttcttgggctgtgttcacggtaagtaggttgttgatagtacaagttaatgttagcacttttgaactaatgaaagtatagggacaaatcttggaagttaacacattctatttggga

SEQ ID NO: 66312 - DNA, 1050 bp, Homo sapiens
ttatttatttgattccaatgatgtgatacaatagatactgaataaccttctctcttcctttcttttctttcccagtgtgaagagtggccagattcgaaatctggagtctgcccgtgtctcaatggttggccaagtcaaacagtaggtcttactcttcccccttggtctggttagaggcggaaacatggtgagggaattacagattgcttcttttgtcttacaccaattctaccattccggtaaatgcctttattattttaaataattttaaaggtgagttcagttgggacagacatagattttctttcgcctgccttcctttctctccttcctttccttccctttcttttttttcctcctcatttaatactggattaccttagcaaaactctgcgtgttaaaaagcaaatcccagagcatagacattacaaattatgttaaccttagtgatagcagctgagtttcattctagtaacagtctccttctaagccaaacctggctgtgagggaattataataaaaaagctctggcatagcctgagtgaaagccagattctaagagtgagctaagattatttagcccaattgatctttcctgatagaattacatggcattctgggtattgctgtatagtcacaaaataaactttagatgaattgagaaaatgttgcccaacagaacagacagaagttagatgaaaatgataatggctttgagtgcttactatttgccaggcactgtgcaaggtattttatatgcactgtctcatttttaaaaccttatattatggaaaaattttgcacatataaaagaagagtgatacagtggatggaccccagtgttcccattgtccattttcaatggttattaacccataaccatgtctcatttgtttcatctgtgcccctatgtatttcccctagtcacaaaatattttgaagcaaattccaaacaaatataatttcctctgcaagattttcatatgatctaaaaataagggctctttaaacatcatcacgatgacattattacacgtaaaaaaattggca

SEQ ID NO: 66313 - DNA, 1027 bp, Homo sapiens
actggctcccggtagacgggcaccccgagatgtaccaaccttttcatgtattctgccaaaagcattgttttccagggcccttgaccaacatcggcttccccagtccagggctcccctgctcctttcccttccctgtactggggtagctcctgcctgctctccctgcgttgcctagggtaaagcctccagatttgccatactgagcccctcttcctagcatcaggcgatacatctgagttcaaatgtcttcccaggctcagggacctccattccttgagattgtcttggcatggcccagccctgcctcatgggatggacaatgcatggggtggtctttatttttccctttcaaataaaacactagtcaggtaccgttttatcccagtcgtactcttccaggtttggaagacccagagaggccaagatcccatccttagccatagcgagcggtggtggtggatagcatcacaagaaacgagcctgaaaatcaggtccagccggtccaagcacatggcctcccatctgggagagcccactgtcccactcccacatgtctgggcacctgccctgggctgaggccaggctgctccaggggcctcctgcgccctcacctgccacagagcaacccaggttaaatacagcccatgcacaaagccacaggccaaagcctatggaattgtttttaatcatcaaatttaaccattttcataactggttcctggaggtgtgcagtgcccccttgcctcttcaaacctacagcttctctttgccatttgtggatttcacatcactccacacagaaacattacagcctggcatccccagtctttgccttcttccagctgcctcgacacagcactgtggcctgtccctattgcccaggcacgccatttccaagggcaggaaggggcagtgtcctgaagcccatcttttctgtgactgtcttaggtgatgtgtagccccctccacctttccactcaacaacctcccacccctgtcctgctgcatggtccggagtctgggacct

SEQ ID NO: 66314 - DNA, 1132 bp, Homo sapiens
aaaatgcttttcttcccagtctctgctcactgatatccttttccttcttcaaggaaggcctgtctcagatgctacctcttgcatgaagctttctgagattcccaagtctcctcccttccctgtgccaccacagcatagtatacattttctttggagcactcatgatattctgtcccaaattagagttaattgaggtcatgttctcttttccttcagattataaattccttaagtgcaagaacccttatgtctcctctccacgtagtacaatgcgttgtatatagtagatgcttaataaattgaattaaaatgaatttgaaattaaaacctgccttcttggattccaaagtccctcttattctttgaattgtcattttctttttctacctgtggaataaggctttggcgatggtacttgtgttctgtgtaggtggcctatgacatgggggattattaccatgccattccatggctggaggaggctgtcagtctcttccgaggatcttacggagagtggaagacagaggatgaggcaagtctagaagatgccttggatcacttggcctttgcttatttccgggtaagggagtaagtgaagctcactgcttttattatactaagtgaaatcctttatagctgctttacaatttctaagtattttcatgtcttcatctgtttcatcttcccaataggaccaaactgagccaagcagggaagttattttatcatttccatatatcacatgtgagtaaactgaatctccaaaagactattaacttgtcacaaagcttatagacctaggattagactgttagtccagtgctctttccaatgcattgactactttacaatcattatttcccatgtaggaggcagtttgtcacctgtagcagcagctgctttattcacaaatagttaatgggttcataataaatgtagatcactcttttgtgctctcagcaactcataattcatcacagatattacccataatattgccatggacaaagaagtttgattatgagcttttcccatctgcagttgagtccaactgtaatgtgactcctgtctggttacagagctggagtcactgttctgtagtaccagccacagtgcctcctccaggtgttat

SEQ ID NO: 66315 - DNA, 1057 bp, Homo sapiens
gtcccatcactgaactttataatgtaatgtttattaagcagacatccccttaaatactcagtttctttggagagagcaaagcatatctctctgtggaaattatatataatgcctggtattttacactcaaagcaaggtgttggccaggaaggtaaagaaatggtgtctatgtagacttaatatcactagtctaagtgtcattttgagcctagtagcactaccttccaagtgagtcacaacaaatttgatcctatttggtatgtttttgtccactgttatgattcatcatgtatcttacaagagccactcaagcaagactctgcttctatgtatggtgaggccttgttgttctaggctagaataaactctttgtatgcctcattgaatatgccaggtaaaatttatgcagtcaagaatgaattatttttctgactaaagtgtgtagcagtagttcaaaattgtgcccttgttttaacagtttctgtcaacatcttctcatttttccctacaaaaacaccagggtgtattataagtactgcctgtgagaatttgcactttatgtatttgtgtgtggatttcttgtggttttagccaaatgaagtgttatcagtaataaacaggtctcttcataggcatgagtttctgtgtaatttttatttgagatactgtgtagttcataaagcttgctatctaaacaggaaatactcttgaaatacacacatcacataccctagaatccactttgcatctaaatgaatattctggcttagtactcaggaaatatttcttgattggtttatcagaagtcccagatgtgagaactaacattaacattcttatttttcttttctttttctctccttaagctgatctaatttgtttgcccatgttagcgccagctactataataagacaaaagtttaaagtttggaaatctctcacggtaataaccgtagatctatgcttcaatactgatgaaggactgagtttccaagggttcttatgaatctgtggtcctggtctctgttgcctgcctttcccagatcaggctcaaagg

SEQ ID NO: 66316 - DNA, 1032 bp, Homo sapiens
aagcaaacaatataaagagacacgggaaatgcttctcgtgaagggcaaatgtaacaccataacagtagggaataaactgtgtcccacctgtttacttgtgtttatttgttgttatgatgagtatgcacctaccattttcctttattgtgatcactaaaatgaggccaaggtttaggaggtgagaaaaagtatcccttttacggattcagttcctgctaggatgttgtatcagaatcatgtgagaactcaggaagaggtagagcagaaataaaaaggaagaaaatgtagattagaaaataagacttctgagaaaaagttcaaggaataaagattgtttgactctggagaggagaaagctgttgagatagtttgctaagtttgctaataaagctttattgagtcttttattgaagggttcaaagtaagaaatactatgccatagtgttctccatctctagtgaagacagaaccagagggaataaggatcttttttttaaagacagcatggaaagtttaagatttaggaacttcttgagaaatcttcataatatcttctattcaaaatcttttttttatttttaagggaataaaaattttaaaaattaagagatatacagatgactttttaagggtccttctttccagcacattttttttaaaaactcaggttagaacaaaaatgtcataaagggcactaaaagtaacatttgggtttcactccatatctagaagaatttagctcacaaaacaatttttgtgtgttttgagtaactgatgcataagtgcaatgaataattttcctgcttcactgttatttttaatttaacctggcaaattaagtgagacttgaacaaaattttgttcatcttgaagaatgtatagtggcttaggttatttgaggttttcgttttgaatatatatgttgttattttgatgtagatacgttagcagatggagaggttctaagagattggatactttggaatgtctttatataggaaatagacctcccatttcttaagcaagttgctt

SEQ ID NO: 66317 - DNA, 2009 bp, Homo sapiens
aaattctgatgtttactgaacataaaacaatagtggcaacactcctattggctttgttcttatcaaatttctcagtgccttctcagggtctggtgtgaacagaaaaaacagtgttcctgcatttaccataatttaatcagtcaatttgcagatagctaaggaaaatcttccaaaatctgtaggtgcttcctctatatcaagtgagtttgctgattttaaaatcttaggaatataaataaagatcttaataaaagcaagcttaatgtagttaaggatcttcatattagaattgtgtcatttatcaaaccttttattacagaaaaaaatctgaactgagaaaggagctctgaatttatttgacagtctaacttttgaattacatttttgtaagtagatttattcttttattttatgaagtaatgttaattttactaagaataaaacatccaaattttaagtattatgaaatactaaaactacatgttttaaaacagaggtccagtttattctaacatcttgctgacttctgtagaatttctgattgcatgactattatttatcttcttttagtgtagaaaataattttttacaaaaagtcacttttgggctgggcgcagtggctcacgcctgtaatcccagcactttgggaggctgaggcaggtggatcacaatgtcaggagtttgagactagcctggccaatatggtgaaaccctgtctctactaaaaatacaaaaattagccgggtgtggtggtgggcacctgtagtcccagctactcgggaggctgaggcaggagaattgcttgaacctaggaggctgagattgcagtgagccgaaatcacgccactacactccagcctgggcaacagagggagactccatctcaaaaaaaaaaaaagtcacttttggctaatcatgcagtcttctgaaaaggtttaatagagaaatgctgtttaggctgggcttggtggctcacatctgtaataccagcgctttgggaggctgaggcaggaggattgcttgaggccaggagtttaagttacagaactatgatcacactgccgcactgaagcctggatgacagagtgagaccttatctcaaaaaaaaaaaaaaaaagagagagagagagaaaaagaaatgctgtgtttaatcttcttaaaatgtatcttgtcctacatagttctcagaatacatatggggtatagttaggagataacaataacaagacctaaacaaattgcttatgggagatagcactgtaattagagaatttatttcatataaaataataatataaagtttgaactgattagaatgttccttaaatcatggtttcgtttgttgcagctgtcagctaacatttggttgagctcatataatccaaacctaattgtccaactattgtattgccactattgttaatttgttccttccttactttcttattgttggatcttatatgactgtatgactgtagataatagacagctagctaaatgtagagcaccatttttctcaatgagtttgttttcaaaggctttgcactggagaagatatgtgtagaatttttgttttatttttaaaatgtgtaaaacatcttttgttttatatgcttttaagaatgtagattgtaatttaggaaatggcatatattctgcaaagtggtataatgttgtatatatgaaaaacaggtatatttggtttagttctgtgtttcagtgactgataaacaaaaatgaagctaaaatgaatcaacggctcattcatagttactaaagccatgtcatgactgtcattctattatgaagaaaacagttttatttgagtgctttaatataatgcaacatttaagtcatcttaaggtgaaaagttattgaagtgttcttctctcaagttaacaaaattttacaaatgttcctgaagtgtatcgattgagggaattattttattctagcctgtcatgagtctgtctgagcatgatacttaacatgaacttgatgtagtaggt

SEQ ID NO: 66318 - DNA, 1057 bp, Homo sapiens
tatttttcaaagtatttcaggaagccattttctcctaacacctggtatttgtgttcaaagccattagaacctcattctcctgacccaggagaattctttagatacaccatcactcctctgtttatcatgtgccaaggaactcctattaatgcagttcaccttcagtttgtgatagcagtgttttctttgtgtgtaatttttttttttggtcttgttttgttttaaccaagtgaatttctcttttgtttaccaattgtttaatgactccatcaggacctcttaaaaaatcacactaatttaaataaattttaagcctatgaaaataaataattccaaaactcttcatcttttcctcagtgacactgctttactggaggaagaactgaagaaactcattgatgctctgatagagaattttcttcagcctagtaagaatggactgatctggcgttctgtttaggggtacaccaatatgtcatgacactgtgtgggcatatggaacagagcaaccgagaactgcatacattgaaccttgtgttagcattctctctctatctcatctggccgagtatctttttccttttattttctttctttttggtcaactggctagactaaacaaagtataagtttgaaatgaaatggtctagagggaaatgattcaaattttttcataattcaaacaaaagttattacactaaaagtattatagtaacgtattgtccttccgttaacagaaacatcacaattcaaaagtgagttttcttattatagtgtgattaagcctagttctgtatctcgtaattgtgtatagcatggtaaaagaaaaaaaaaaagacaggtaaatgttatataattgtagggttagttaaggaaattagtccataaaattggcaagaaaatggtactttccttgattgttatgaaaaagtgtcattgtgacatcacaggtattaatttacaaattagagtatttgaaataggatatttagcatttctgtagtttagaacagatgttacagtgtgtggttttggcatgtctgtttcaggtgccctt

SEQ ID NO: 66319 - DNA, 1034 bp, Homo sapiens
tatttagaatgacatcatagcttataactttaatattttggcaaaggcaccgggtagtagtaattatgtagcttatattctcattatatgcctattagattagttttagggtgtttttataaatagataatcatgtagtgatatctttcttcaggggtaataatgcatattgagtttatcaaagtctcttatatcactttttccattctttttgccttttgcagattttatttcttagtaaaagagccatcaaaagatgaatgagggaaaaagaggaaattgaaatatcaattatgttagttgttaaactcttcttttaaaaaaacttatttatttaaaattttccaattagggcatgaagtttaaataatcagtgattataagaaagggctatattaggatactatttattcagactaattataatatgaaacatttatgtggaaggttggtttttaaaaagtatggtaggcaaaggactaagttaaatctctctttttttaggcttgctaaactcactgctgcagtcttgctggccaaagatgttcctgtgtaccttttttcaagatatgttcctacaccttttgtagtaagtgtgttgtgttggtgatcatatagcttgctgctcttgaaaacatttcttaaatcaactaggattcaaatattttttgtgcatgtagttctgtattgagtaatataagggaccaatggaaggaaaacaaattttgctttgagtttattttcattcaacagacatttgttaaacttagctaagaacttgatctataaaagttgacaagtctacagttatagtgaaatatgttaacatcttctttcagaaattgattcattgggcagacaaaaatgatgaaggatagatttgaacacattgttaacaggcttgatctgggtgtgtgtgtgtgtatgtgtgtaaaaattctctattgagtgacaataggatttacattattattaagcagaatcacagtctcagcaaatgccaaagaactgcttatcaagccatatacctggat

SEQ ID NO: 66320 - DNA, 1068 bp, Homo sapiens
tttttcatttcgttttggtttatctgtggcattttctgagctcaacgagagaaataaataagaagggagcatgcaaccctgttgttgttagaatcctaaaatagtaggactgggggaaaaaaaaacagtatgctctcccttcccagcattcttatctaggtgaaaacaaactgcgaatgcagatttaaaggggagtagaaacggcttttataagagaaaactggaggagcgttcaggaaaggacagagacagttccatctctttgctttagtgacattaggggttcatgtgttgacggaatgtatatgaagctcagatcttttagaatcagctgacaggtggaactattttccttcccaaccatctgcacactctgtaaagatagaacagcgtcacgtttcaatgcactggatgtcttgatcatgaaattacctctactttagagatgttactggctcccattcccagattcccccgcctgttgtaatgcttgctatgattaggttaggttattaggttgtattatattattgctcctgagttcacaggaaattcttttttatccttcccccgccaacccccccccgccccgccgcccatttcatactaggctcttccaagattattttaaggaaggttgttcgattcctagactgttcaaatggaagaattttaggtgtctggcttagctctgcagattacagccaaggagcacaggcccagaggggcattgagtgacaaaggtcagctgaggagttagcagcagagcttaagtgtcctctccaatgttctttctaccactgacactatctcttttttggcaggtgattagcctgggatgaattctggcacggttctgaaaagcgtgctgtctttcttcttctagctacaaattcctcttttccagttccttcctcttctgtcttttctccttatattttgaatctcatccagcagccacaacaggtgttgggcctgcctctcaaaaaatcctacagcttggctggcagggtcctaggggtggagcatgtccttgcaccacccagttggctgccagatcaatttcaa

SEQ ID NO: 66321 - DNA, 1049 bp, Homo sapiens
atctcggcccactgcaagctccgcctcccgggttcacgccattctcctgcctcagcctccagagtagctggggctacaggcgcccaccaccagcccggctaattttttgtatttttagtagagatggggtttcaccgtgttagccaggatggtcacgatctcctgacctcgtgatccgcccgcctcggcctcccaaaatgctgggattacaggcgtgagccactgcgcctgtccccaagcttttttttttttaagtattggaatctgttaaaagacatttcctggaatcctcatgatgagtgcagctgcttgaagccacgcaccccttcctttcatttgtttccttttcccatctgagtacaatcccttgtttctccagaaacaaaatttgaaaaccggtgatctaatccagttttctcatcgccctgagagggacaccaaagcccggagagtggagggtatctactctaagaccctttggcttgccttgcaggagtccgctgtggaaggcacatcacatcccacggcctggctctcaactgctctaccgacctcacgtggtttgagcacatcgtgccctgtggactggttgggacaggcgtcacttccttgagtaaggagctccagaggcacgtcaccgtggaagaagtaatgccacctttccttgtggcctttaaggagatctacaagtgcacactgatctcagaggacagccccaactgaagagtactcataacagccaggatgctcctgccttgggaagcatgaagtctgacttgagtcacctactgaaacccagattttagacctggcctgtcattcactgatcatgaaactaaggacataccatgagctctgagccactattttcatatgtatcctgttttatttatatcttccccacctacctcagagatactagatgtgacaatactgtgaaaagcaacacatgctatataaaacattagcactgctattgacagcagtgtctcagagaaattcagatgtcatagattgttatttctcgattgttgatgtcatagattgtc

SEQ ID NO: 66322 - DNA, 1052 bp, Homo sapiens
ccagttggcagcactactaaaattacttgttttcaatagtctcccctttatcctggctttcccgggtttcatcacgcgcagccaacctcggtagggaaatattatacccaatgacatctgttgagagaccatattcactaatgtttattacagtataataataattgttctattttatcgttagttatttttgttaatctcttactgtgcctaatttataaattaaactttatcataggtacgtaggtataggaaaaaaccagccaggaggccccgcacttcggtgttttctactagctctgcctacctccgtctgcgccgtctccctgactagtttgacccttcgagggccgccgtagtgcgtcgcctccgttgccggggaaacgacccgggacctgggagggagcaaagacgtttcccgccggcgggagctgtggctgtgattgagagaggggttagaggcgggtcccagcgctgccgcaccatggcggaccagctttatctggaaaatatagacgagttcgtcacggaccaaaacaagatcgtgagcagctactactggggaacgcgggcgtgcgaccggggtcctgggcccggctagggcggcgggagccttgaccctctgtctgcttgtggcttcgtggggaccaggggagacaggtccccacgaggggacctgggcgagctctgtgccccagagcgagcgaggactcgtcgggaaggtcctccagcacacacggaagtccgcgtcccttgggtgggcgtgctgggaacagagcctggggctggagccgcggagaccgggcgcggagggagggccgttggctgagagttctaaggcgtccctacacctttcttttaaggtggttggcgtttaaagttttaagtttacagttgaggaaatcgtgtcttaactgtgttaagttacaagttgcgtaacctccagatactgtttcctcttcctggaaatttaagcattgatagaggtttgatccgcttcacacgggtgaggaaaagatcgagcgaattgatggatgtgagtgcactttgca

SEQ ID NO: 66323 - DNA, 1188 bp, Homo sapiens
agcagaagactcagtggggcatggttttatggaagctgagagagcaggctcttcaagaagagagtgaacagcaatgtaggttgagcttctctggggatttttaaatttctagctatgcttggcagaagtatattatagacagattgtaaatgtttctcaaaataaaagacatgtctctttgttgtttttaaactagattattgaagggagccaacttctgatacttgctggatcatagagtaaaaatgaatttagagattttactaaaagcaacattatttctgcatttagtatttggctatctcaggttaatgaattattctgaatactgggcaatgtgagtaagctgttacattctgcaattctgaaccggcattaaatctgagtaatcataaaattggaatttcagagctggacatttgtgatcatatacttagtagttcttaatgttttggagtaattcactcttcagaatccattgaaaaccctcacacatctcccaaaaaagcacataaacatttgctgaaactttaggattggagggttatagatggccacctgaatcccaggttaaaagaatcactaatctaatataaccctcctgtttacgccttgggatattaagaggcctagacaaattaattaacttatccagagcttagacagttaccaaactacttcttgattcagtgttctatttattatgtatcattgccactgttttaatgcaggttcagtccctcttggtctattattaatcttatttcagttaatgtactgatcactgtgccagctccaaacacatggactctactccccatgtcctgtctgaagtccatcctttttttttttcaactgtccataggccaagcaaaaatgctactgttcagaaaatttgatggactaccagatttcatttatcttttaagtcattaattaagagttgatcatgtaaaaactcttactgatgtcttacttgtgccttcttttctttggaataggatgctgtatgattatgttgaaaggaaacgaaaagaaaattcaggagcccaactgcatgttacctacttggtgtctggcagtctcattcagaatggacattccgtaagttctcagagccttgtaatgagcttaaatgtgtttgtgttatgaagagtgttataacatagttcaggggagagaaaaaaa

SEQ ID NO: 66324 - DNA, 1052 bp, Homo sapiens
aaatggactattatatgttaagcacttagaatagcacttggcacatagtaagcactatttaatgatagctgcttttcaagggaagaatagaaaaagaggggcccaaggggagccaccagagataagagtatatggggtttcagcccctaaggaaagaggttcaagtaggaggaaccagtcaacaatgtcaaacaatgctgagaagccaagtaagttaggaagtgaaaattgtccatgacatttagtgatagccttggtaagagcattttcagtggagtgaccagattctggtgagctaagtaaatggggacagaggaagtgagacagcaaatatggacagctctttccaggagattagactgcaaagcagaaaagagggtggtagctaaggagggattgagacgggaaggatatatacatttcttaagttgagaatgacttgaacttgggttgttagaaaggtgctgtaggaagaaaaggttgaaaatcctggggaggtggtatgactgataaagatgggtcctcaaggagagaaagatatagaattgccatagtttctataagttccatgagaatagggatcgtgtctaaattgttaactatatacccaaaatagtgcctggcacactaataagtagttactgagtgaattaatgatagacattagttctttttttttctttagctcaaaaccttgagtataataagcatacaaatatttattaaataaatatatggccaaagaggaataatttacaagtctcttatcttttagggaaggatttcaagaaaatattaacaccctgataagtttatttgaaatatattactagatttcaaaaaattttaaaatctagttgggtattccaggctctaaaaatcagttcccttgttatatctagcaagtaagcaaacaagaataaaagtgacgcaaaagttcaaaatgaaatctgccagggcccactaaaataaacatggcaagtagaaatgtggtaataggaagcacttcagtgaaactttacctaaatacttaaagtatcctcagtagaaaa

SEQ ID NO: 66325 - DNA, 1031 bp, Homo sapiens
tatcagaggaaggtctttaaaaacaaaggctatttcatttcccaaggataatgaaattactgcatcttttattattgttggttgcattcctactcttttgaattagaatacttttatcaaaaacaagaatattcaattagtggtagaaggcacctaattccaatcctatctattactaactagatgtataacctagtaaaagtgactcacttctctctaatatttgtttctttatgtaatagagagtttcatacatttttctaaagtcgattctaaacaatattagagttaagtattgtgtggaagaagcaagagtttgaaaataaagttttatactgacattagttttttttttctttttttgttgaaccacccaagaatgcatatgctgacattaacttaatgtaacatttctgtccccagatttagtgctatacaatgtgcagctgccgtccctagagctcctgctgaatcctcttcgtcttccaaaaagtttgagcagtcacatcttcacatgtcaagtgagacacaagccaacaatgagctgaccaccaatggtcatggcccacctgcatccaagcaggtttcccagcagcccaaaggaattatgggaatgtttgcctccaaagctgctgctaaaacccaagaaaccaacaaggaaacgaaaacagaggctaaagaagtaacaaatgtaagtcttctttgaagataccccttcattgcagctcagagtgggtaactagaaaagcattaatggttgcagtggtagtagtttatttatataagattctgatattcagttctgatttttctactttagtttgaaccctttaatacttgatattgttatctgaaagagttcttttgcttttgataatgattctcaccaaaccttggatttcctttgcaaaatggtaatgcctaccttgtgcacattacaagattgttgtgaaacccagatgaaaacatgtgaaaacacctcgagaattgttgacattcaaaaaaatgtttatttgcaatatgtctttctg

SEQ ID NO: 66326 - DNA, 1112 bp, Homo sapiens
atctaacacctacgcgttttggcatgattatatagagactataccatcgcaacagtttgctatagaagagtttgtttgagactgctacttcatgaacagcctaaatgccagcaaaaaatcatatgtgttttctgtgcttgtaggcatctgcagcaggcaacaaggcaccagggaaagggaatatgatgagcaacttttttggaaaagctgctatgagtaagcatgttcttacctcactttgactaacgaatgaatgttaatgtaatgacatattatacctgaagtgaaagccactttgtctagtttttgccaatccaagagactacctgcattctaacaaatttccagtgtactgcccaatatattgatgaaagtaactcagctagaactttatgggtgagttaggctcagttgagatctctttgagagcagtttattattcctggtttaacttcctgccttgaaaagataatgaactatttgcttcatagggcccttgaaaatgggtgattaaaataaaagggaggctgcctggctacgcagtatagtgttgaggttaataacgtggatgctagagtcagtttgcctggtgtgacctttatttcttctatctctcaagggtccacaaaagcaaatattttgcctttcttcagttattttttgcagattactcacagtaatgaattagacttccagtgtgaattagaagggcccaagtagtaatggacatttaaaaatcttttttgagaaagcaaaaatcttctttatttttaaaaagatacttaagtaagaattctttcgtatggaaagaaccagtagtcacatattttcatacttctcatatcaagtgtacatcccctgagagtatgtggtagaataccaggaagaatgcaggagccacaggataattatggcacactttcttggagcatcagttttacaaagatttttcaaggaggcattttgttacatgcctatgcaagcaaaattagttagaattctgcctttccatgatggctaaattggtggtcacgggagggattgaagtgacttttttttttttttcatattctgcttatgtaagggtgacagtttttgtgtttgctgtaaaa

SEQ ID NO: 66327 - DNA, 1021 bp, Homo sapiens
atgccacagaaatccctggtgtggtttaggggccatccctgtgtactcccataatatctgtctcagccctcactacactgtattgcagtggtctgctttccttctctctctcctccactaaggtccttatcctatatgtctttttaaccatgctgcctgcactacccaacaatagtttattgactgaatgaacagaacacagttctttcttcagcatgctactttccttcttatgaacaatgaagtatcaagcctgtgtatatagtgggcgtaacttgtctgtgtgatggggttggttctctaaaactaatgtagagtttctctttcaactttttatcataatggagtattggagagtgattagtatagatttaaaagcttttgttatttttctgtataacataattgatccagcttaacattgtatcctctgaccttttagagctcaagtggagaaaacaaaagaaaacgaaaacgcgtactaaaatctaaaacttacctggatggggaaggctgcataggtaagacaaatatttggctccaaatccagagatagaatctcttattaccacagaggcaccataatcccttttagaacaggtacatctcaaactttaatttacatgtgaatcatgcccaagtggtactgatgctgtttgtctatggcatacactttgtgtagcagagtgtaagtcagaacacctaggttcttgtttaggtcatagactataaaaataagcactgagatcttggctaaaagttatgtcgtccctggtgaagagtttcttatctatggaatatctattttgcctaaatgtgcagttatgaagattcaggtggcataaatatatccaaaaacaagatggaaaccacagtatgggcttaagatgttatcatagacattgagaagcttttttttttctagaatatttgtttttataaatttgaacagtggaaaagaagctacagatgattagactgtaatcaagagtcatctttggtatttggttccatttgttct

SEQ ID NO: 66328 - DNA, 1033 bp, Homo sapiens
ccctgttactgatttttttttttcctagttcagacttgttttgaaaagattggctctgaagaatcaacctttccaggttcttaaaactagtgaagacattttgtcatctgtgctccctgtcccactattccccacctcccagtcctctgaaaaggcctctgccattttaattgtaacatgtgattggggagtaaaattctttacgtgtggaaattctgtcttttcagtgccaaatttcttgtgaacctgtgaattctggactttgaatgggtttttttttttctttttcttccttttttttttttttttggctttcagtcttttaatagttgccattttcaagcctcttggtttggccatgggtgataatatatgtgtttactgttgaatttcttaattcaacagtgcattttttaaatttaagaggacaaaaacattggtgccagttttttcctcctctttctgccccaaaagaaaaaagtcaaacgtctttgtgagagtgagagttcattgggaatttgtgggtaattatttattgctttgtttaaaatatagtactcgagttttggccaggtgtgtgatgtggacttttttgcactcctgtctccagacaggactgttaagagccttggatgcagcagtgaaaactgtgctcacattgcacttttttttttttttttaaaggtttttggtccaagctcaacctaatgaatcttggctttggttaccaacaaaggagttctgctttcctctctctgctcagactgttccaaatgtaccagcatagggggcttgccctgtcctgtgctggatcagatttgttctatgggtttagaaagctcatctttctctctttgtgactttgcagcagaaattgggtagttgggcccctgagataagtttggagtagacttctggacaagggaatgggtttctaagagcaaagcagttaagtggaaaagaaatctgatgttacccacgaaaaccaggtttgtttgcctttttttaatggcaacccagaaaagtggcatgt

SEQ ID NO: 66329 - DNA, 1049 bp, Homo sapiens
gccctggtccgcatatggcacaggaattattccttcttgttcctctgtattctaagaattcatgtgggtgtttcttatccttacattctgctggatacgtttacccctcttgtcttcctgcagtaccacacttctgtcccctaacctcctgaggctgttctctgtaagtcttttaagttttggttggactaaaggctgaagtgaaaatctccctgtaatcctcttcctccattatgcagtacacggacacctggctacagaccaggacgtggcttgtgttctgttcctttcacaaaagctctctgggaccttcacttgcaattagtggttagggaaaagcctcaggcagaacacaaatagaaatttaatgatgtgttcaactccaccagaaattacctcgagtcagcattgacgatattggaggagctgccgtgctgctgatacggggtgtgctttatgctgctctttgcggtttgttgatcccctcctcccccactctcaatacctagagagtgaaacccgtacaatgagataaagactaaaaagagaaatcccttcctatatacagtgtgctacatttacaaaaaatttctccttaagaaaacagaatattcaaaaacagcacttttccaggaagttagtgaggaagataaggcacacatttatttataaatggatgttgctcctttgtatttttagcttccctatttgcttaaaagtacaggctccctaagagaggatggagagggagagactgaattgttagtaggtctaaacatcaaagaaaacatttttattagttacttatggaaaatcatctattacaatgataaccttcaagtgacttccattatggctggacaggcggtgagctcagtggattgcagtggtgtgctggtgattttgcacagtgagctctgcggaaggggtcaggctcaactgctgatgtgtctcacacgtagcagacaaggggtgtctgactggcttcttttgcctcaagatggtgtatgtcgtaagtgatgcaatcagctgtctgctttttaaggttg

SEQ ID NO: 66330 - DNA, 1088 bp, Homo sapiens
gagccacgatataaatcatgacaatttggcttcattgccctcagtcttaaccactgtgctatattgcctcttggctatgtattagttcatacttccataccgcccagtgatgattgatgttttttttttttttttaagacagagtctcgctctgtcacccaggctggagtgcagaggcacaatctcggctcactgcaacctgtgctttctaggttcaagcgattctctgcaacctccgcttcccaggttcaagcgattctcctgcctcagcctcccgagtagctgggactacaggcgcatgccaccacacctggctaatttttgtatttttagtagagacggggtttcaccacgttggccaggctggtctcaaactcctgacctcaggtgatctgcctgcctcggcctcccaaagagctgggattacaggtgtgagccaccgcgcccggcctgattttcatttttataagtgaaagtgcagctggttgttgagatccaagattgtcagatttgaaggcaatcttaatgcttattcaaatcaacctcttatctgatgtctgcatcttctctgcagcatccctgccaagtggtctggaatctataaacaaagattcaattatgttcagtataccatacttaactaaattacaaagttagataagtaggctaataaatgttaagaatttaaagagaggctggactaaaattaagttttctgattaattttagatcaccaggaaacttccaaatagagcatactgctgtaagcagtccatttaattgctttcagtttaagtcgagaacattgttttccttgaaaaagcttgtctgattcttggccttgcctctgacttaacatttataagaaaatcaagaggacatttggcatttgtgccctgtttaagctatgctacaggttcataggttgaaaagtggtcctggggtgcttgcaagtgggttaggccagggtggtgttctccactttgaatgtcagagccttgttttcctaggatacttggtttcaagcttataaggtatgtgaagattacataaacatagcataatgacggtacagtgcagtggtcccc

SEQ ID NO: 66331 - DNA, 1061 bp, Homo sapiens
acaaacaaacttgctcccctctgagacataagctctgctctgggctctggcacccggtgggagaggcctcttaaggaaatcagaagaaaagcctcagctcctcagtggctgagctgtgcaacccggagaaaggaactgcatttctctgaacctgacttttccctctggcacatgacagacatacaggaacatagaagggcctctagggagagaactatcaaaccaggaaaggcagctctgttacctgttaaagggcaggaaacagggtggggactgttcacatttttttctgccttggacatatatgcttagattcatagaatcgtagaaagctagggactcagagacatccagtcccctgtttcctttgtgggaaattgagtcccagagagagatcaggacttgactaagcttgattcactccagcacaatcttcaatgccagtcgtcagatgtggagagaatgcttacagggacacccatcccctactaggcaggactagaagaaatggccttaatttgtaaacagaaggcttctggcgagacacaaaaaagaactcctgagtacaagaatgaggatggggtcctggacagaggaagggggacgcctgaaatgatctctgtactacacctcccaggggcaccgctgtcatgccagtccttttctttgagaatatgaaggattcaaggtccctctcccagagtccggcgccatggttggcggctgggggaacttgagaggccagtcctggaacaggtgcaacagctggagcaactgcgcagctgttgccgggctcaggctcagcagcctgtgcgccagtgagtgaggcagagacctctgctggtgggagaggagaggtgcagaacggcccagtcagagatccagagagaagtcagcctggagccggacttcaggccttcacttaggtgctccccactgcctcatgcacacctgcacaggtagatggggatgcgactaagctggacagacaagcaggtcccctctggccggtctcccactaccttcactgccccaggccatccaggcacttttttctggtg

SEQ ID NO: 66332 - DNA, 1314 bp, Homo sapiens
ttccttctgggcctcaatctcctcatttttaaaacaagagtattgaaggcttggtgctgtggctcacgcctgtaatcccagcactctgggaggccgaggcaggcagatcacgaggtcaggagaccaagaccatcctggctaacacggtgaaaccccgtctctactaaaaatacaaaaaattagccgggcgtggtggcgggcgcctgtagtcctagctactcgggaggctgaggcaggagaatggcgtgaacccgggaggcggaggttgcagtaagccgagatggcaccactgctctccagcctgggcgacagagcaagactccatctcgaaaaaaaaaaagagtattgaaagtcatcagttctcgccctttccctcctgccgccgagtcgcgcggaggcggaggcttgggtgcgttcaagattcaggttcacccgtaacccactgccatggccgaggaaggcattgctgctggaggtgtaatggaggttaatactgctttacaagaggtgctgaagaccgccctcatccacgatggcctagcacgtggaattcgcgaagctgccaaagtcttagacaagcgccaagcccatctttgtgtgcttgcatccaactgtgatgagcctatgtatgtcaagttggtggaggccctttgtgctgaacaccaaatcaacctaattaaggttgatgacaacaagaaactaggagaatgggtaggcctctgtaaaattgacagagaggggaaaccccataaagtggttggttacagttgtgtagtagttaaggactatggcaaggagtctcaggccaaggatgtcatcgaagagtatttcaaatgcaagaaatgaagaaataaatctttggctcacaaaaaaaaaaaaaaaaaaaaaaaagaaagtcatcagttctcaacctgggacacacctcagaaacacctgtatatatcaaggtcccacctcagatctagtgaacccagaaacccaggtgggggataccaggctgtgtatttttttttttagtgccataagaattctaatgaatactcctaggtaagaccactacaatagataaattcaaaggaccattccagcactaacattgtagaagtccaacttccaatttccagcctcttctctcctctatgccattgctgagtaatcttactaaaagcaatagtggtgacagagagcaaggcacacctaagaaatctggagagccactcactatgtgggaagctaataacaatgaggatgattctaaagtttcaagcctagcagcctgggattgtgatgaaaattgaaaactgacaaaaatgc

SEQ ID NO: 66333 - DNA, 1095 bp, Homo sapiens
gcttgaaactttagaatcatcctcattgttattagcttcccacatagtgagtggctctccagatttcttaggtgtgccttgctctctgtcaccactattgcttttagtaagattactcagcaatggcatagaggagagaagaggctggaaattggaagttggacttctacaatgttagtgctggaatggtcctttgaatttatctattgtagtggtcttacctaggagtattcattagaattcttatggcactaaaaaaaaaaatacacagcctggtatcccccacctgggtttctgggttcactagatctgaggtgggaccttgatatatacaggtgtttctgaggtgtgtcccaggttgagaactgatgactttcttttttttttttttttttttttttgtgagccaaagatttatttcttcatttcttgcatttgaaatactcttcgatgacatccttggcctgagactccttgccatagtccttaactactacacaactgtaaccaaccactttatggggtttcccctctctgtcaattttacagaggcctacccattctcctagtttcttgttgtcatcaaccttaattaggttgatttggtgttcagcacaaagggcctccaccaacttgacatacataggctcatcacagttggatgcaagcacacaaagatgggcttggcgcttgtctaagactttggcagcttcgcgaattccacgtgctaggccatcgtggatgagggcggtcttcagcacctcttgtaaagcagtattaacctccattacacctccagcagcaatgccttcctcggccatggcagtgggttacgggtgaacctgaatcttgaacgcacccaagcctccgcctccgcgcgactcggcggcaggagggaaagggcgagaactgatgactttcaatactctttttttttttcgagatggagtcttgctctgtcgcccaggctggagagcagtggtgccatctcggcttactgcaacctccgcctcccgggttcacgccattctcctgcctcagcctcccgagtagctaggactacaggcgcccgccaccacgcccggctaatttttt

SEQ ID NO: 66334 - DNA, 1627 bp, Homo sapiens
ccgactcagaggtgctgggcgagtgcgcccgccgcagccaacccgagcgctgccgcccgcgccgggacgggggcgcggctgccgcggggcccaggccagagcaggagccgcgtgccgcgcctgcggagccaggtggagcttccccacttccccttagggtctggagcgaggccgagcgcgccccggcccggcctggtgagggggtggagagtcccgggccctactcgggcgggtgtggagagttctcgtgggattagaacccgggctctacccaggtgcagtgtgtttgtgaattttgaacttcagagtgaaggacaggcacgttgcatgcggaggggcggtgagggcaccctgtgccttacgtaagtccgaagtttggagggaaacagaattgttggaacaagttaggggcaggttggaattggtgtgtgggagtgggaggggccttggatcagagaagtgcttggtttaatgttggatgaagagtttgggggtcatattgcttggagagatgtggctcctggccttgaaagggtcagtgaagggtgtggagaatccggagtttagggaacaggttgaatttgaggatgtgaagggagcttttcagactcgagagcagagggggttgggagcacacttgtgcagttgttttcatacattttggaaaatgtatgcttagcacagaacttggcacatagtgaggaagcagtaagtgactgtcgtttatatttgtaatactagtactactaagtccagtagtgcctgacagaaaagctggcttgggtttaaaagttttggaaacaaaggttgggtggcaggggctgcttctatctccttggcagtatgggtttcctactggcttgctggcaattaaaagtctgttgtaggactcttgccttgaacttctttcccctaacaccagcagcctgctattcctcggttctgagctttgaaatgcaaagtgccctgtataaaataagactgttataacttaggattcttttggggacacacccagtcaacataacatctgcagctctgtttgataaaaaatgcttacctagaatgagattttcaagaaacataaatcacgaaaggccagatatttgtaccttctgttttgggaattctgccatgtgtttttttgggtaaggaaagagaggcattgcttgtgtatacaagtgcagcttctagaaaccacaggttctagaatgcactctgttttgattcaagccgccagagacacctgtcactgtcctaggatattgggctattttattcctggggttgagggggacctgcatcttactttctatgttccttgtcactcccctcacctttttttttttttttttttttttttttgagatggagtctcgcactgtcgcccgggctggagtgtaatggtgcgatctccactcactgcagcctctgtgcaccaccccttcaggttcaagcgattctcctgccgcagcctcccgagtagctgggattacaggcgcccaccaccacgcccggcttttttgtatttttagtacagatgaggtttcactgtgttggccaggctggtcttgaactcctgaccttgtgatccgcccgccttggcctcccaaggtttttttttttt

SEQ ID NO: 66335 - DNA, 2189 bp, Homo sapiens
aacagcaacaggattactaggttggcacaaaagtaattatggtttttgccataactttcaatggcaaaaacagcaattacttttgtaccagcctaatagcaattttagtaatattcagagatatattgcttagttgtattctcatcacatagttggatcaattgataaaggaaacatcaggcctgctggaaatgaaattttgtagtaaatgcactggtatttaagtgacgttcttaattttttttttattttgttgaagtccagtgcctctttaggaattgctttgtggaaaaagtgtaaagagtttgtgttttcttgaaaattttggttgcactggtgacatttttgttctttgcctgcttttttggcaagctttaaggttcagaaccttaatgacccctgtgtacatgttttatttaattcttttatgcattcacggtttgcttttggatatagtatcagtttttgttgatttgtgaaactgtgtgtgtaaaggctacatcagtgatcatttcaaaatgaactcagagttcaacttcatattctttgaggatctgcaactcgtatatattgacatattaaatatttggaccattttgagcaatattcaggaattatgtaatatgtgtctactctgtgccaggtctttgggaaacattagtgaatgaaatattaaagatctctctctctcatggagcttatattctaaatttagagacattccttatctgttgatttaaaaaacatacttaccatacaggcttacataggtagattttgaactatacattgcagccacacttaagcatcatttaaaaatgattaatgaattttaagaattcatttagtctgtttgaaatcaaggatggttattccaaatcatactgcttttagatttgaaaccgagacctttttactttttaggattctttttcttcggctatgggtaatgactgaagaaaagctagacaaaggctggtgaatcttttaaattggcagtttaaatttttttatcttcgtggtgttaaaagtgcttttcagaaattgaatagataggccaggcgcggtggctcacatctgtaatcccagcactttgagaagcagaggtgggcggatcagttgtggccaggagtttgagaccagcctggccaacatggggaaaccctgtctttactaaaaacacaagaattagccggacgtggtggtgcacgcttatagtcccagctaccgggaggctgaggcaggagattcgcttcaacccgggaggtagaggttgcagtgagccgagattgcgccactgcactccagtctgggcgacagagcgagactctctctgaaaaacaaataaacaaaacacgaaaattgaatagataaacaattgaatagtgccttacttatcccttctcatcccatctcaacttccctgttcacttagggttaacatttctgcatttaaaaaatttcccctttctgtgaaaagcaagtagttctggtttattactcagttgacagacaatgtttgctatgtgtgcagcctaaattacatttaggactaatgaataatgaaaccatgtgattgtagtgcaagaggacaggaattccctagtctgtaaggatttgtttaaaatatgtaaaatgactcatttctttatccttaatgacacatatccgagaatttgagagtgtccttatgtgttataccaatacaggaaacatttgccttgtgctaagatgttttttaaagctcttgatgagattacatgcactctaccaactaaacagtaattactattgaagaatagctccaatgtatgaattcagaattgaacagcaggaatttaggaggtatttgtttattcatattttcactccctgtcttctagttaatcctgaaagagttgcctaccttgaattaatttgtatctgagttggcttgagtatatgatgtaggatatgtttgttaaatttcattccactaattcagtgagcattttgaggggcacacattgtgcaagatgatgcaataaaaaaagatgaataagacatggtaccttttctttaagactccacagtgtggttggggaaacacatactcaaataacaatacaacgtgttaagtgaggtaaacagacaatgctaacagagtagaggaatgggctgactgacaatttgcaggaagcctgaggaag

SEQ ID NO: 66336 - DNA, 1046 bp, Homo sapiens
ccatttatataagtaaaagtacggaagataggagtcatttcaatagcttgagtgagaaatgaagaaacaatcagccaatgtagactctactctccttgtaccccccaacaaggtctccctctgacatccaggctggagttcagtgatgaaatcatggcacattacagcctctacttttcaggctgaagcgatcctcccacctccaaagtaactgggactacaggcatgtgccaccgtgcccaactaattttttgtatttttagtactatacagggtctcaccatgttgcccaggttggtcttgaactcctgggttcaagcaatcctcctgcctcagtctctcaaagtgctgggattacaggtgtgagccaccatacctggctttagactactgtttcacagtttgataatgaaaggaaggaaatagagtgcatgaaaaagggaaagtacaattgtaagaaccaagagcagaacagattttactcagaatttgagttcagggtactcttggagagcccattcctgggccttgggcagaacttgagagtctaagcgatagccatcgtatttcttttttgatgtatactgcaggaacagtaagctgccagtttgcttataaattgccactagcttttcaaggggctggaaatatttatctcatcttggtagaaagcaggttatggatataagaattataattcataggagaaggtagaggccaggcttagtattactgaggccatttgttcattttagctgtagatatgaaagatatcccccaaactgttaaattgtggggatacatggttactgacatctaaacatatctaccagtagctcgctatttttttcaaaataatggctcgcagttcctccatgaataatgtacatgagtatgtttatttcctgtgttacacagtacttggcatacgtttagcctcttggctagtgtgttttcattagataaatgactaggaagaacagaattctataataaatgaattaaatcagtatgttttcaccttacagttgcaggtttctcttacc

SEQ ID NO: 66337 - DNA, 2188 bp, Homo sapiens
tgtaaaaagtaaatactacaaccacacagggttattataaggcttaaataagaatatgtgtggaaacccctagcacagtacttggcacttaatccttcagtaaatgttaatttactactagggatgctggtttttttttttttttttttttacttttatgtattgagctgtgctgggccctatactgtaaagctcttttttaccctgtgagttgcatagccaactgcctggtttaaattctgctccctcagttacttagctatttttgaccttgagtagagcgtttagcttttctgagcctcagcttccatatttgtaagtggagataataatggtaacagcctcaaaggattgttgtaaggtttaaataggataatcaatattgtttcatagtgatatttaaacagtaaaatcagattaatgggataagattagcatttttttaaaggaatagaatagatactagcataatgaaccatttgtttcagttttacatgtgtttgatcatgaactggggagtgatgtaaaatgtatttcttactgtggattgtactaaaagttccaaagctattggctaggtactaatagtccatagtatgtcatcaataaatgttagtgacaatagaaatatttaatccgtaatggagatgtactgtcaaaatagatatatattggtttaggaatccagtcatacaaatattttatcacatttgctagtgaaaaagtacttgtattttgtactttctaagaacttaaactgagcttttggtgactaggagatttgtcctgaaatgccgagacctggggtagcatttggggaggattacgatttgctgagacctggggtaggattggcctggatttccatggtgctgcaatatctggcatatagtaggttcataaatatttgtgcgataaatgactttattgtagcctcaattcagaatttctcaactagtcaatctttaacaccaatctgatcaattcatggactgagatttactgttctgttgcatttctttctctaatacctctttaaagcctcttatatgtgtttatcagcttagatgacttgattatagcatttaggataatataaaataagatgataattgtataagctaaatacgaatgaaaggagggagaaagatggtcatttgtgcaaatgtaccaccaggccagttttctttttgagcttgcctggatgtttcacctactgaatcccaggcacaacaatattcttacatgtttatttttctgatgaggtcagaagggttgtaaaatgcctgcaggatagatgaaatttttcactaaatacttcagtgtgaaaacattttgcatcataaatagtattctggaaaggagacaggattggaagttagtggatctgagtttgcatactggtattctactacttagtagctgtgtggctttgggcaagcatcttaaactctgtgcctaaatttcttcttttttagtatgaggataataggagctattttgcagagttgtgaggattaaatgaaatgatatgtgtaaactgcttatagaaagtaaatacctaataaatattagctgttattatatgcagtcattcattttgtaccccctcatggagcacataccacatatttgtgccaagcactctgccaggtgctagggatacaaagatgagtaagacacaaacctttgtgaaataatgttaagctaaagctgtccaggtgcagtcgctcatgcctgtaatcccagcactttgggaggccgaggcaggcagatcacttgaggccaggagttcgagaccagcctggccaacatggtgaaaccctgtctctgctaaaaacacacacacacaaattagccaggcatggtggcacatgcctgtaatcccggctgctcaggaggctgaggcagcaggatcgcttgaacccaggaggttgaggctgcagtgagccgagatgacactactgcagtccagcctggatgacagagtgagaccctgtttcaaaaaaaaaaaacccaaaaaaacaagaaacaaacaaaaaaaaacctgaagctgagccagtttatcccagattgataacttaaataaggctagtattagatattttaattttaaagttccctagtttttaggctaagtaaagattctgtttgtatatcagattcaacttacccattgaactctttt

SEQ ID NO: 66338 - DNA, 1692 bp, Homo sapiens
tgcaacctcaaaagattggactctattaaagttgatgataatgagactttgactttaataaattcacctttgccttaattataaagaaaaactttacaaaattcagctaccttcagaaaacgaattctttaaaagaccatagtgcaaaatgatgctgtcatgaatctcattggttcattcagccaaaaaaaaaaaaaaaaaaaaaaatttaagccattgtttgacactgagacacatacctagagatcatccctaacttcaagttaggaagtcagaggcaaagtaaagtaattataacacaagtagtaaatgttactgcaattgagataagtgcagaatgccatgagggcctacaggaagctaatgtaattctctctgggttagtgggaaaactgcaaaggagagagcagtgaacagggttttgaagtatgaatagcaaatcatagtgaaaggggaagaaaatcattctgggaggaggaagtggcatatataaagtcctagtggaggcaggatatggcatatctaggaatagggagatgtgtaagggctggggagaaaaggattattgaaggaatagtagaagattggctgaagtggcagattgggtcctgtttacaaatcttggaggcagtgggaagccaataaaagttattaagtggaagggtggtagggtcagttctcttcataaagaaagggaagcaatgttaaagatagatggaaagacagagtctaagagacagggaggccagttacttatcattgaatgcccacaatctataccaagtaggtattggaggattaggtgagataaacaactgtgttgaggtaagtgctactcccattttatgaatgaagaaacaggcttagcaaagataaatactggtaggcacatagtcactaggtgactgcaggtctgtctggttccaaatcctgcattctttttaattctggtatcattctaccttgtggactaacaggaataattctttgcctcaagcagggcaaaacttaattccaaaggattttgtatcatggtggtggtagatgtggtagtgaggacaaccacatgggcttggtctgcctaggataaaaggccataaggtccaaagccttcatcttagcagcattcccatgtctgtgtttgattctgtgacctcctttatcatgtgcctcttgctgctttgactgtgctgatccagtgcggattacctaacaacaaagccttgttgttggggccatttctggattcaacaagaaaccttattcactttgactctactcttatacctgcttttgcaaatcctgttggtctcggttgtcttaaatttttttttttttgagacagggtcttgctcttttgcccaggttggagtgcagtggcacaatcaaggctcactgcagccttgaccttccgccttagcctcctgagtagctgggactacaaatatgcaccaccatgcttggccaatttttaattttttgtgcagatggagtctcattatgttgtctgggctggtctcaaacggctagtctaagagatcctcctgccttggcctcccaaagtgatgggattacaggcaggagctaccacgtccagcctcaactgtcttaatttgtctttctcactaatccagagattagcaaactacggtcagcaggccagatgcagcttcatctcatcttgtgaaagca

SEQ ID NO: 66339 - DNA, 1430 bp, Homo sapiens
cggctggtggagagttaagtgtggaaagtgagggcatttcaggcagaggcatagaggcagaaatagcatggtttagggcaagaatcatagttgttgatggaatgtaaaataggcagggcatgaagtggtatgaagatgaagaggtaggcagatccacgtcatatagatcggggtccccaacccctgggctgcggactggtaccagtccatggcctattaggaacacggccacacagcaaatgagtggcagcattagattctcataggagcatgaaccctattgtgaactgtgcatgcaagggatctaggtaggctgtgctgtcctatgacaagctaatacctgatgatctgaggtggaacagtttcatctcaaccatctgctccccccgcaacccctacaccagtcagtggaaaaactgtcttccagaaaactggtcccttgtgccagaaaggctggggaccactgatatggatggccccttatggcatgttgaaatataagtggtatagcatcaactcttctgattacagaaaattgtctctgtgtatttaaagaaaacacattagtcctcagttaaccattttataacatattagtataactatattatatataactatatatttgtgtagtgctaaataatttggcaaacagcagtttacaagcttttgaattcatcattaatttaatcttgtctatagttctgatatatggttgtattattaccaagttacacatgaggaaattcatgtgcaaagaggttttttttttttttttttaatttgttcaaagacaaatagctagtaagtgggactattcaaatgagtgtcttggtcttgggactcagtaagtccaaaattctttttcattctgctgcactcatagaaaatgaatgtacaggggtaaaaactcacgcatactcaggtaccaagggatgctttcctttggatttgagtttttgggatagcatcttcccatcacagttgagtgaggttcttttttaaattttgcattgagtgtggatgctttggcaatgacacttcattcctgatggtttaatgcaattagcaacatgcctatcttgtagtttgttttgtttttttttttgcctttattaataagcaatcactctggctgagagaaaatcctttttcaggaaggatcttcagggaactatagctgttcctgtaattcacataagattcattttaggtcactggccacaggtgcatgtcattcttaaggcatcatatccttagagcgttgctcttcctgttaagtatagtaatagtcaaaggataggcattaagaaagtacttcaaccattagattcatttatgaatgctaagatattcagtatctcagtgacacctgaagtagtttccagcatttctgttctgtgaggtgaaggaagggtgagttattgctt

SEQ ID NO: 66340 - DNA, 1138 bp, Homo sapiens
actgaaaggttcataataactgtcttggcataattgatactgttgaatgcatacatgttctccattcatctttaagagatgttatgagactttgatttaaaagggggagatcttcatttttctggccttttcctggttcctttctcataatagtccaggtagattgaaacaccacatttcacaaggcttcaaataaattattttgatgttatacatactcttaatattaagtttgaaatcctaatagcattttacctataatattatactttaatggagatttaaaaaatttagagaaacatattgagtaggaaataaaagtgaaatcaaagtattgttactgaatcactaactttagaagttatctgatgtgttgccttcatttctgagattgaaactatgatctaaagagattttcagttcatgacatgtgttgtatgtgtgtgttgggaggtctccaagaccacccacaggttcactgatttgctagggggacttaaaggactcaatacgtagttgtattctgtgctgtgatttattacagtgaaaagacaccgagcaaaatcagtagagggagaaggtgtgtgggacaaagtctggggaaaacccatcacaagcttctgaagtcctctctcagtggaggcacacaaggtgtgcttaataccctagcgaggagttgtgacaacgtatgaaatgttctcaaccagggaaactcgttagagacttagtgattggggtttatattagctgatcacataggcaccctctacctagcatgtgctagaatttcagattccccgcaggaaagcagatgtttggcataattatattgtttctgtagtttaggtacagtgaacaactcatcagttaaggagggtgggaaccctcctaacatccaagtttctaggcaccagccaagggcaagccttggaagcaggcctttttaaggatagacatcttctcccactgatgtgttagaaagaaagaaaaggatagacaggcctgctgtgtcaactctttgctgtgtatgtgtacgtgtacatgtgtgcacttgtgcatatgcatgcatgcaacatttagcatagagtgtgcttttcattaaacgttagctgtttttacttatttattatggggattc

SEQ ID NO: 66341 - DNA, 1051 bp, Homo sapiens
aggaaatgcatatgcatttcatatcaaaggaaatgcaaattactcttaaccatataaaaacactcaatttcactcataaaatataagcatataaaatgcaaaatttcatctgttagattagcaaagcgaaaaggtttcagcactcatggtgttggaaaagatgtgagtagatcggcttcttgggaggcttaaggcagagggatctcttgaggctgggagtttgaggccataggtcactatgattatgcctgtgaatagccactgcactccctcctgggcaacactgtgagacctcatctctaaaaaaagtgaaaaagaggtgtgaggaaatggcactcccatgcattgctggcgggactataaattgatataggcttcatgacagaggggcaatttggtgttcctctcaaaaagcatgtatcctttgacccaggggttctgattctagcaatttatcctatgggtacatctgcagacatgtaaaatgatatatatgcaagatattcattacagcattctttcaatagtctctggagatttaaactcaccttgttgcctgtatttagaactttttattcttaatataattttatcttctctcttttttttcttaatcagttttactagagactgatttattggttatttcaaggtaccatgtaaaaaattgaatcagctagggttgttagttgcaatcgacagaaatctactctggcaaatttaatcagaaaaggaatttattgaaaaagaatattagcccaaaattaccaccttggtaggtagaaaactaggcttggaaaatggcatccaggatcaaagagcaaagtctgtgtaatacaaattctttgaaattttttgaagcatctttatgacctaatgtatcatcaatattttaaattgtttgccttaagagatatgtattctattcattgggggtttatatatacataaacataaacacacacacacacacacacacgaccacattaattttattgttcaatttttctgtatttttgccaccttttggtctgcccgatccattttgttt

SEQ ID NO: 66342 - DNA, 1063 bp, Homo sapiens
ctgttttctatatttgccttaggtccagtgtttctatctaaatatcttctaccttactcagtatattaattaagagtctttctaaaatagttgattcctctgtgagggaaatgcagggaaaaaaataagatagttgagacaactgaaaaaggacaaaaggcaactttttggggagactattttctataacaagcatttatcaacctcagtgggatgtagatttattagtaagtcttaaaaattaatatatatttagaccaccaaatatacattgagggtataaagaagtgtcagaaggagacagaagtgtatactttcctctacctttttgatagtatttaagacttagcgtttattctgttcttagctttgatttttatcatctatttatataacccacatgtattgtgcctcctgtgggtcttcctagaaagtcatcttaaaaagtattttcttttccctttctttcagactttatattcagagcaccaatcaaattaagcaagcctggggaacttcgtgaggaatatgaaagcttgagaaaggtatagtattatcatgtcattcattttcttaaagtagattgaaataatgacattaaagaatgcttagtgggagttttgaccaggttttaaaaaatttataatgcagagcctttcttcacactgccttataccagcctagttagatttggagctataatggcagcagagcaaaccttaacccaagattccctttttagttgtcttttcaaagatgaagacgtagttcacagagcctgtcacatgccagctgcagtaactggccaccagagaagtattcttggtacttttaacaggtgcccttgctaataattgcttgtattatttttctttatctcacaagtttcttctaattacatgtagctggtgttatccattattgctcactccattaaatactccaaaagaactgtcttgtaggtcagtaaggagatagtgaaataatttcctagttagaaaacaattaccattgggaaagcttttatctgtgtccatatcatcttatttatgatgttttcaaa

SEQ ID NO: 66343 - DNA, 1753 bp, Homo sapiens
agtacttgatgtctgtcacccacacctattcacacactccctccccttttgaaaatctctaataaaaacttgctggtttttgcggcttgggcatcacggaacctactgacatgtgatgtttcccctggatgcccatctttaaaatttctctcttttgtactctgtccctttatttctcaagctggccgatgcttaaggaaaatggaaaagaacctacatgaatatcgggacagattccctgatagtagtgagacctcgtcactacaaaaaattttttaaaaaattagccgggcatggtcgtgcatgcttgtggtttcagctactcaggaggctgagctggggagattgcttgagcctggaaggttgaggctgcagtgagtcgtgattgcatccctgccctcccaccttagcaacagagcaagaccccgtctcaaaaaaagaaaaaaaaaaaaagatttccagtggttttttttttttgctacactattgctattttttcttctttcttttgaaatgttatataattgaagaaatgcccacttttagcatgtgctagcatatctctttctagaaccagaaaataagtatagaatctcatagtatatctttaagatatacaggtaacaggtgtggtattaaggagaaggaaaaattctcaatagaatgtttaaattttaactacatgagggaagaacagttaatttataggatgttcagaatccaagaacattagatatggttgttgtctccttttgctatttataactacccagatgtggagaaacagttttatcaaataatgtgcttttcaaagaaaagaacacacttggagcattcaaaacacgatcaaattcaattagaatagcaggttactcaggttatttctgcagtgtgctgtttttcctcgtcttattgtttagggtcaggatcagtagttataaggttactatattagtataattatttttatggtttaagtattaataaaatcacttaactactacttggaagccaaattaaggaattttccagaagctgttacaactgttgtctctagtataaaataaaatattttgttaaaatatgtaatgagtgaagcttttaataaattagaatagctttatttttttctgcttatgaacataagcagaattgtgcatttctgttaattgggaaaaaaccttcaggttatcaaaaagttttaaagcagaaagggaaaatcgccagtaatcctgccacttaataaacatgtttaaatgtttatcaaaaatttaagcttaagactttttaaaaaatagattttagatcacattatgcatgccacttttactgcccttttaaaatttagcatctcgtatgaagttttccatattaatatagatctatgtcaacatttttaatggctatatagaattatagaaaatattgtaatatatcacatatatgccaatattttccctaaatccaaaaccattcaagagtcagaaataacttttaaaaatataatatgtaaaaaagattccataagataaactgatttttaaaatacccatctctagccaaatttgtttaaaaactcacaagtaatctgctttcagtgatgattgttcctctaaaattgcaaacttggttatatttttccagattcaaatcagggtttaaggtcttatttgctgtttacatttgagagtaaacttttttgtttattgcagactttttaaaaaatgcaggtgttcaacaaatcataatacag

SEQ ID NO: 66344 - DNA, 2497 bp, Homo sapiens
gttcaggcttacaaaaatcagacctatagaaatcagaaacataaggctaaggctttgttgttgtttattgttgtggggtttttttttcctgtttttgtgtgtttgttttgttttgttttaaacctgaggcagcagcctatcaaaaatatccatttgttctttagcttaatttttttcttaagaataattaaaaatattagtagcctataattgctttgatatacatcatcttatttaaatgttattaaaactctagacagtgaaaaaggaaaaaaagtagaaatggaatcttgatgtactataggtacacagcaagactctgttaataaatactattatattgttatctcatttactcctgcaggttaagttgcactatccctcttttgaagacaagcaaatgatgcttcctttgctcacggtcaccaaggttttcattccaaagcccatgctattttgataatgccatgccacctccccaaaataaagagcatatctctctgccataaatttctttgtacagccaggttcagtggctcatgcctgtaatccagcacttagggaggcctaggcaggcggattgcttgagccctggagttcaagaccagcctgggcaacatagtgagaccccatctctactattataaaattagaacaaaatttctttgtagaccgtgtatcttgacttatcctgtaactgcaggataagagcataaaaatgtaggacattagaactgcgttaagtcactcttttgttgccaaggaggcctcgtccagcttctctggctttctgtggccatctctgctcttcttctagtccaatgcagttacatctggcttatgggaataaggaagattttcaggcttagccctttttggctatgtgactatactttattttttgataatgtgtattatcttagcttttatgatttcatattgcttaagaatgcagagcagttaaatctttagccctgaagagtatgtttggcaagagccaagtaaaagtagatttacttagaaatcaagagggctctatagctgataagaaaaacagtctcaaaactgccatgtgatctgtttgttctaataaactacagagtaaaatatgtttttaagtttagagttgcctaaaactactgtgtttgcataatttatatttttagctgagagaagaaaagttacaagaggaaaaaccctctgaagatcaaatccacaagctgttaccagaggatacagaaacagggaaaaggaaaatggatgaacagaaaaaaagagatgaaccattagtactgaaaacaaatctggaacgtgtaagtaaatcacctttttaatggatacctgcctcaaaaatcagtggttagcccaggtgacctggacctgaaagacctatgttggtaaattgtgagaccagtaacagtcagtgactgtgcagcttaagagtagtgaagaacttacgtccaggccagagcttgagaaaataatttttgaatgggatattaagacttgtgggaagattaaggaacagtgggaaaagcaggtgagtgagaggaaaaacctagtatagtttactacttgtgattagatttatatgtatgttgttatttggacttatgtgttatttgacatttaagatttgtacattgtcttctgtcctcaactagattttcttaaagcatgtattttactttcctttatttgttgtaataccctaagcagcacagtgtagatataaggtaggtttagatacttagtctatattcaattagacttctaattgggccaaatcctgcctgagtttgtttcattacttatttgccaagtaaattactagaaaaggttgcaagttgtgtatttaacttacataaggaagcacttttggaggatccactaattatacccaaatggataatcacaattgagttttatttctttagtaagtcatattggattggacatatattgcttatgtatgtacttagcacatctttagactcctatcttttaaaatattttgtgattcaggcttgttaaaatttcaggttgtctttctggtcagctggaatcgataaagctttaccatctataatgacaggcaagatagcagagtggaggcaaaaaaaaaaatctctggatcagcagtctacctcttatacaggtcccagcattgtaactgtttgtacacttcggccaagttacttaatttctttgtgcttctgggtttatttatttttatttttctggagcagggtcttgctttgttgcccaggctggagtgcaggggtgtgatcatggttcactgcagccttagcttcccaggctcaagcaatcctcctacctcagcctcccaagtatctgggactacaggcttgtgccactatacccagttgtattttttgtagagatagggttttaccattttgcccacactggtcttgaactcctgggttcaagtgatctgtccacctcggcctcccaaagtgctgggattacaggc

SEQ ID NO: 66345 - DNA, 1318 bp, Homo sapiens
ttactttttttattttgtagagatgagggtgtccctatgttgcccaggctggtctcaaactcctgggctcaagggatcctcccaccttagctttccaaagtgtgggattacaggcatgatcatgccagtgtgcctgggctgcttttatattttggaggacttttaaatggctctaatttaagagttttcagtgttgagcaaataattccatttagtttggccagactacattcaaattgagacccaaaagaatcttaagaaagctgaccaaaggattattttttatatagaaactattgtgattagagcgagactgatcatttcactctcctgtcccccaaattttaatgactcctcttttcttgtgaaattaaatgaagactcttcaccccaacatttaggccctcagtgtgattctagcttatgttttcatccttgcttataccccaaaactctaaggagtatatatttgctttcccccaaatacatacactgtgctttcccttttcaaggtctttgctcttgcaattttcatctcattgaaatgccatccagcttacctgttggaaggttatttatctctccatgtccagttcaaaagctatcacattcatgaagcctataggagttcctcttctgtttctccacttctatcagccactcccccaaacccccactttgtaacttttacaagagttctgtcattttcctttacatcatggttttttgtgtttgtgtttctctactagattgtaagtttgttgagtataggaaatgtcttatccatttaaatctcctgtagtaccctgcacattggaagtgtctgatacatgtttatgaaattaaatttgaatggaaggaggaaggagcttactctagaagcagattatcatctgttatttttttagaatagaaataaagtgagcacagtgtttaatttattacaatttgttatggtacatttaatccaataataatgcgaattattagaaaacaattggatacagcagttatggttatactaaagactagaaaacaaaaagggaaaaattacttgtcatcccacaacctagaaatgagccctataaacgttttgatacatatccttatagatatgtaccatatgaacatatagaacatatagatacattcatttctaagaacatataaatacacaccatatattgtttttcttttcagaaaatgtaacctagtatacatactgtttttcttttttgagacggagtctcgctctgtcgccaggctggagtggtacagtggcgtgatctcggcttactaccacctctgcctcccaggt

SEQ ID NO: 66346 - DNA, 1018 bp, Homo sapiens
caggacagtgataataaaagtagcactgagatcccactggaaacctgctgttcctcagaactcaaagggggaggcagtgggacttctttggagagggagcagtttgaggggttagggtcaactccagatgccaagttagacaaaacctgtataagcagagccatgaaaatcaccacagttaattcagtgctaccccaaaacagtgttttgggtggagtcctcaaaacaaagcaacaattgaagacattaaatcattttgatctgactaatggtgttctagttgagagcctaagtgaagagccacttccttctttgcgtcgaggccggaaaagacactgcaagaccaagcacttagaacaaaatggctcccttaaaaaactgcgacaaaccagtggggaggtgggtctggccccaacagacccagtcctgcgagagatggagcagaagcttcagcaagaggaagaagaccgacagttggctctgcagttgcagcgcatgttcgacaatgagaggcggactgtgagccggcgaaaaggaagtgtggatcagtatctcctacggtccagcaacatggccggggccaagtagcacctaatgaagtgttacctatttttaaaaggtcttaggccttgatcatttatcctgaagagctgagtgttctcactttggttttattttaatggcaaaacactgtctaatatggttctgagaggttccagggcctttgtagtcaatatccaagggaaaagcatctccgtttctctgtgacccaggccagaagcctgagtgacccatccctaagggcttctgggccaaacctggcagcacccactgggaatgagatttggaacggcctcaggagcataatggccacagttagtaatggtaaagaggggataccttcttaaactgatagacttcctgacttctttcagcagggtattgttttaaatcagccttgcagataaaaattaattccatctttttcagacaagtgaacaatttagttccttggcag

SEQ ID NO: 66347 - DNA, 1002 bp, Homo sapiens
taaacattgtggtcatcattgagataggtggaatctctttggtgactacgttggtggggaacatcactcacctgaatgtatgcattctgtgttctctgtgtgtgtgcacatatgcagatgtatgttttaaaaacatttaccaaactcatgattttgtagtcacaccacttcagttctgggccctaccaacaatttatgtcctccaagagctgctggagggcatgtttgtgcccaaaacagaagagctggctctggtttacagaagacagggagggtgaccttactataaatgcccttagaggaaacttatcagttactgccatttcacgcatttcctttttgatcttagtaaatattattggaaggctagtcttgttggtaggagcaaagacacttatttttccacttgccatctttctctatatctccagtaatttgaaaaacacttttcagttggaattgatttttgtctttggtaaaaagaaatatttttaatagataaaagatatatattttaaatatttccccaaattaatactttcattttaagaattgcatagcagttgtaacaagtgcagaatgaagaacaaattcttgttaagcaaatagtccaaactctaggtccagcttactgccttccccccttgtacctacagtgatgcctaggatggtattgacagttgttttctaaacttcctgctgagcaacagtccttcaaatataggtagagtggtctaggttaaggagggaggagggttgatctttaatcaggttggctttggaggaaggaaaaaccactaaggtattatctgaattttaagatgcttcccatccttaataactaaaacctgaatgcttttctttctgaaaaatctccctctctccttccatgattctgaagttggttaaaagtcgatatgttgatgtgtattatttgggggaacagaaaaggacaaggaaggaaacagaacgatgggaagggtttgtgagctagaataagag

SEQ ID NO: 66348 - DNA, 1033 bp, Homo sapiens
tgaggggaaatccaggaaatgtggtgcccttagaagggggctgtcagctcttttccatagagagggaaagaaactttgagaaaatgttcttgacccattgattgtatctgctggaagaagtcatctgggcctgttgggttggtatcagatcaggggattatgcatccagcccctggcccctttaatctatttgcctctttttaaaaaaggttaagtcttcttgggtgaggcttgccagggaaactcctaagtggcttcacttattttttaaattttaatttaatttttaaatttttgcttggaagcagcactggtaataaatgttttattttttgttcattttccctaaaggaaaaatgtccttaagagattaaagctcttaattgattactgtctggttacaaactggcaaactgactaaaatgggaagctgccaccgtgcctgactcatgtagctgatgaccgaaggctcatcctttcttttctatttgacagacatttactgagcttcagacttgagccaaccctgagctggactgtggagataaagcagttcctgctcttgaggagctcaatgtctaatggaatgcatttgaatgtatgtgtggctggagagttcatttatggtcttaggaaagccatttctggtcccatttagaaaactgaccagcacccagcaagctgcattctacattttagagaccccattggtatttgtgaatttgattgcaccaccgcttttcctttactaagtaatgttatggaaggagaatgaattttctcctctagtgattacaggacattaacatctcttcagaagctgcttttagcttaagccccaagaagtgaggtgggttgtggatcactgacatggtcaggggaggcccacacctcaattcagtaaccacctaatctctcccccaacctgatctctcatcagagctggcagcaacttgggattcctttcctttttcctgcctaacttttcattgaaatgtctagtaggagagtgagaaaagagaacaaaggctgg

SEQ ID NO: 66349 - DNA, 1036 bp, Homo sapiens
ggacaagctcctgcccactcctttggaaactccacacctgggccggagaaagactcgaattcgaaaactaagtttcagtcgcacctgcctccggcgtcgcttcagcctccgaggggtctgcggaggcgacgtcccagtcaggagggatgcgcgcctgcgagccccccggggatctcggagccgctccactgcggtgcctgccgctatcttccccacgccttagtaactgcgacgcgacggcagacagtgtaggcggcaaccgacggccgggacgtctaacctcaagtcccagcaagccccgcggccacgtcctctgactacctcgcgccagcaagacccaaactacggatcccgattgactccgcgcggcgcgtcacgctgtcagctccagccaatcggcttcagacaagtcggaggggagggagacgcagaggcggacaagatggcggcggcagctgtacagggcgggagaagcggtggtagcggaggctgtagtggggctggtggtgcttccaactgcgggacaggaagtggccgtagcggcttgttggataaggtgaggagccggttcttgggaacagttgaatcctggggaggcctgggaggcggcgagccaaccttcccatcccggtctcccttattttctacggccttttgaggggagcccttgtgtgaccactatcacaaccctacgcacgcttggagcctgcccttgccctcatcacacttcaaacctggacccggtcctctttagaacttcttcttttctcgcaagtgttctggtcctggtcgccacacctttttcggtaatttgatttttcctatatttaatcgtgtccatctcttttctcctggggggctgggtgcactgttgtcagtgcccatttcacagacacggaaaaccgaagcccaaagattaaagaatcagtatcccccaaactctctaccaccatcacccttgcgtgctgctacagattccaaagtgcttcttgtccttttgcttactgaagtttttaggcgttttatcatgataggc

SEQ ID NO: 66350 - DNA, 1654 bp, Homo sapiens
tttggtagagacaaggtctcactgtgttgcccagactaatcgtgaactcctggcctcaagtgatctgcccacctcagcctcccaaagtactggaattacaggcatgagccaccgcacccagctctgttccctgtcctttggaatctactagaagtaaatgttctttgtaaagggctgtctgtggtaaaaaatagaatgacaaggtgatgagaaccccaacatgagtagcagaaatagataaaaggtctcacaaaagagtgcttggaagatttaaccaataagtgagggacagaagagaatagtcaagagctgcttgagtgccttttcttggaaaacttagtttcagccttacattgaactgttccctccctgaattcctctagcacttacactgcacatgggaattaagctgtcacttaatatgacatactgtcttgtattatttcaccaatttgtatttgcccgttttcctgtgagtgcttctctgtagtgatcaacacaagataagtacttttagcattgaatttcgcagagaaaaaacttgagatctgccacctcagtcttcagaaacagctttagaggatggtgcctctaattgtttgaagactgagggtactgtgggagagaacttggggaaaaaaatgttattctcagtggagcaggatctgaatgaatagagaggcttttgctgtgtgggaatgagaagctattacctttaatataatttttttttttttttgagacagagtctcgatttgtcgcaatctccactcactgcaacccccgcctcccaggttcaaacaattctcctgcctcagtctcccgagtagctgggattacaggcatgtgcctccatacccggctaatttttgtatatttagtagagacagggtttcaccatgttggccaggctggtctcaaactcctgacctcaggtgatccaacggcctcggcctcccaaagtgcggggtttacaagcgtgcgccaccacacccagcctaatataatttatttaatttgatgtgtcttgatttgggcggggagggtttttattttatttctgcagctgtagtttcacttgccataaagaagtgtaataaagagatgcaaatatgctcctagttttccctaagcagatgtgaatttctactcttatgaaactgactttaagaacacagcaattcttgtttcctgatcttaaaaataagtatgcaaatataatctttccgcctccatcacagaataacttgacttagatcattgcagtatgttattttgccccaaatacatcaaagcattttcttctgcctggcagttataaagaaaagctgcttgcttaatttgttttggctattaaagttgatatgtggtgttaaaccatgctttccagaagctattatctagacccttttagccttatacctggatttctgtctcctggctggcctgtcagcctgatcttaaagcacagctttaatctgtttacatcagactcctttgagaattagttaaaattaacagatttttggacctttttttaggcctgaatatctgcatttttcttcacatgtctctattacctctgcattttaacagttacctccaggttgagaactactggcttaaatgattttttaaagtctcttctggttct

SEQ ID NO: 66351 - DNA, 1029 bp, Homo sapiens
ggatttgttttatcagccagcttgtcagataccagccaagggccaaccttgcaaacaagccttgctaaagatggcagtcttggacccaggttcacttatttctgcacactgcccttctttttaatttatcctgtgaggtcccacataaaagaaactaatttttgctttctctttttattattacaaaaggaaagcaatttgcaattagtgttgaggaagacaaaattgaggcaaaaaaaaaaaaaagatagcttttaaaatacccgaattagtagtagagagaacatgaggagcagcatacattttagttgatgagcagtttttgagcatgatgagaagtaataatcagaaaaagaagcacctaatagcaactccccttcttccagatggttctccatactgtagtagagacattacttgcttcgaaatgggctgtgttgccgtaaagtcaaattataacctttcttgtgatttcatgtaattcactggaaatgtttcttttccacttactgaagattgcttctaggtaccaggcagtgaagttagagctgaggctatttcaatacattgtaatggctgcttctgcattttattctcccaaattggttaagacattatcctctgacttttaaaggcaagtttcttttctgtgatgcaatgcaggcagtgaagtgtggctaggtgtctgagaatatgattttcctgtttttgaatgacccataatttttaaatgactttattctgactttatttcacaaataattcaaatgctatggtggatttggctctacaagttggttcttttgcatgtcttcaaagagggatttacttgacagtgtaaatgagctatctagctagaaaacctgctaatttctttttggttcagtttgtatctttaaaattagatgtcgtgtttgatttgtaggctggcagtctatggcagtcaatagtgcagtatgctgccatgagtaattttctcaaagaaaaatttttgcttttacagggcaccaagggggaaaaaaaacttga

SEQ ID NO: 66352 - DNA, 1026 bp, Homo sapiens
tacagacaatgctgcagtgagtagccttgtatttcatttcacatgtattcagttatagaaacattcctggaagtgggaagttgaattcagggtgctaagttggcattcgtaggtgctgtaacattttgaacttctacatgagcagtgagagaattatttgcttctgaatagcagtgtttgggaaactttctaaacctctatagataagggaaatagaagtagagtttgtccactcaactcgtgttgggactgagtctgggacttggtttgtaatttaaaatgtagtgttgtttccaacaggctatcctggaattgctatcttaaagttaagacatgctggtaaaataataaaagttgttagctgacaaagtgatattaaaggagatcctccccattttgttagtatctgtaaattcatgtatctgtattttctgagttttgtggtcacagaaagaaagaatgaacaaatagagtaattttctgtactcacatttcggtaaaatgaaggtgggatatacaagtttacacttacagtctgtgcagcccatatacgttttctggttctggggttgtttttatattctctgcatggagactggcaacatcagcatcacatgagtaccacctgactctagtgacctagtctctttcaacctgatttttaattgtttggtcttttttgtttgtttttaactgcttcttgcagggctaccccataggagtgtgcccagaatagcctgttttgtcttttagttctgcaacatcagaagacaaagagtaaatattatatgtgcatgagggatgctcttaaaaaatggttcattttactttcagtaagaggccaggtttcttgatgcacaacttttttgtttgttttacagtggaagatagatgataagcctgtaaaaattgacaagtgggatggatcagctgtgaaaaactctttggatgattctgccaaaaaggtactttcttgaggaggggttggttagtatctatacagctgatggccatctctcctgggaa

SEQ ID NO: 66353 - DNA, 1068 bp, Homo sapiens
aaacattttagctgtgggaaaagttgaggagtttaaagttttttatatgagggattgatgaactttttctcttggttctttatagaaggcttgagttttacttgtttggtgtggtaaaatcccaactggagggaactacttggtaattcatatgattcttttatcatggaaatcaagaataaaagcacatactggggaggaagtattcctattagcttgattccttgtttttctcaccaggtacttctggaaaaatacaaatatgtggagaattttggtctaattgatggtcgcctcaccatctgtacaatctcctgtttctttgccatagtggctttgatttgggattatatgcacccctttccagagtccaaacccgttttggctttgtgtgtcatatcatatcctttatttatgctcaggttgttttctagtgactatttttttaaatctgctgatatttctccctacaaaaaacaaaacggactttcatattagggcttgctaatgttagaattcaacattttgagctgtgatgtttatatagtaaatatctatcagtttatatagtaactgtcactgatattttatgttttgtatggttattttatcgtaattcatttttgttattaatgtagaggttattgtcctaatatgagcacttaatagcaaaacacatagtaatagtgaacccagctcttctcatttctagcccagaacttttcccgttagacgtggctgcttcaagccactcattctaggatattaggaaaggatctgattttggagactcagatctgtattaagtttacttgaagctgaggagctgaactggaaagtactgagcatgagatacaagtgtggcttgtattacagtggaattaagaacttattctggagctagagaatatgggtttgaaatccaaggtatctgtgatcttgtgctaatgaaaatttacttatttttgagatgatttgaataccactcatttataaatatgggtagcattcagaattatcataaagattaaatgagagattttatattgtatttgatacataatcatt

SEQ ID NO: 66354 - DNA, 1019 bp, Homo sapiens
ttcagtgttttggcagcaagacaaagctgtcttctttaggactatcattatgaaagtttttatatctgttgcttgtcaatttgtgttacttctcttttatgtttgggtattttccccttaactttatttgaacctattttgtgatgatggggattctgaccatttatacctcatataaggagaagagcatctttctcgtggcccacaggaaagatcctacaggaatggatcctgatgatatttggcagctgtcctccagtcttaaaaggtatgactatcctcacagatttttaaatcctggtgttggatttgccctggcatgttgtcattatcaacagaagacttattatgtgcctactctatgtggatcatagggctagtcatataaaatgaagaaaggagtatggatgatctagaaggtttgtcctagccctatagttctgagattgcgttatcacagaaatgctctgaggataaactgtgggagaaggtactttttcctgtggccagttaacagagacgattaagcatacaaaagtataaaggccaaagatgtgagatcagttatctttgaagaattccattagcttctgtgtcttctatgatcctgtcttctctccacgaatacaatcaagaatatctggagcagtgcactgggcaactcaaaaaaagcacaatctagagtctgtttctgaccagtgtcaggtataactttgtgcagctgacacacatgtgttttgtaggtaccaagaactaggttcatgttccaattcagtttctttctagctgtataactttgggtaaatcatataaattatctgaggtttagtggggtcaaaaatgatgcctagagtttctgggaagatgaaataccaattataataatagcaaatgtttattgaacatttactgtatgttgggtattctgctaaatgcattatctcattaagttttagaacactcattttatagataagaatacaggcccaaagtttaaatcaactcttccagtatcatat

SEQ ID NO: 66355 - DNA, 1027 bp, Homo sapiens
aaaggatgtgtttgttccctgtatcaccgtgcccagcttactccttttcttcggaaacacttggtgccgtattgttactggttgaatctctgtgtttggtttttaatttgttatctttgcccccatgcttaggtttgatgacaaatacaccttgaagctgaccttcatcagtgggagaacaaagcagcagcgggaagccgagttcacaaagtccattgctaagttttttgaccacagtgggacactggtcatggatgcatatgagcctgaaatatccaggctccatgacagtcttgccatagaaagaaaaataaagtagccaattctaaaagtagccctctttctcctggatcttgctgaattagtggcttggggggtgggggagataaaaagaacttaaaatgggtaaagtaagaaatgttaaaaagtccctgttttgtcctgaaattttagtctattctgggtaaataggattttctgacacagatatgagaagttgtagctctgatgtctagctgtagtctccttgatctgctgattgcattattttaatttgcttttctgggaaagcagttttgctaaaagctgtacagactttttcttttgtacctagcagtactttatatagtatagctttgggccatgtagcattttaagactcaattttaaaaaattattaatctgttgctgactcttaattcctatttcaatatgtgtttccttgaagaattcaggatacaacttcttgtgtatgacagctttccttcacacactatttttgtgggtgtgtatatatctgatttgggaagaatttaaaaaacacatagctttttaatttgtttgaaacagactttctgcctgttacatttttgcttttaaccaattaaagaagccaatggcattttagttttatattgtgttttccactagtatatccctgttgatttgtttgtgccttttattaactgccattttctaaaatttttttcaataaaaggaaggaagatgtgaaaaaaatggagtcata

SEQ ID NO: 66356 - DNA, 1050 bp, Homo sapiens
tcatggacataggcctatgcctgttctgatatctataattttttaaactcaaaaggaccaaaacactcctgaaccctcatctatacggcctgcactgggcttggtgtttcctcctggcccaggcagctccatctcttctgccattcctcctggacgaaagtggcaggaccccacctctaccacttccccacagggtcactgcacagcggcttcaaagacacgccctgttgaaggggaaacatcctccccccatcacactccaactcgtcaccccaaaagggaagtcaaagcacaggtccgtggggcctatggtttgtagacactgacacagtggttttcaaaccaggtgctgcggaacccctgatattccacagagctttgtcaggggatgctaaagtgggaagatgggagtggaggcaaaggataggtttccagccctcctcccatttccgccgccaccagaataactctgcttttatctgtcttgcctactgagatttcattttcaagctttctttgaagaagaacttcaaaccaccatctcgaggtttgatcttagaccagccagcacaggttctattcttgctgttcatgttggaatggctccagcgttccagtacaaagtgtctttgtgttggaacttgggtcacagacccaggcacaagcatttatacacacacacacacacacacacacacacacacacacacacgtacatagttgatggtttttctagccaacccaccctgaagctctggccaaggtttgatttggacagggacctggtgctcagtggggatgggtcgtgaccctgatattggcccatgaagcatggggagctctggagcaaggaaacaggctcaatcccccactgaggacttgtgtctgcacccctatctggcaccccactttcctggcctaggcccaagggacacagcaggagaagcagtgtgataggagagaggctagggttaaattcatctttacacagcgccggatggatggaaatcttggctcacataaaagacagactcagggaggattttatga

SEQ ID NO: 66357 - DNA, 1068 bp, Homo sapiens
ccccaggcaccatcccacagtactggcggtttctctgccaagtgtttggggcctgcactggccaagccatccgtcactgggactttgcagtgtgccctgtgggtggcgtgtggacaccggtccgggcaggaaggaaaagcatgccccggtgaaaacccaccgagcagagagccagcgggacctcctcagcattccacccaggggaagagttcagtccccatgaagataaggactgagttatttggctgcacctctcctcagcctcaaagctcagacctgctagagtgggttcacctggctgttggttctgtgggagagttcctgacaagctggttcctacatggtgcagtgaaaggaactctgtcctggaagtccccaatgccgcctctcagtcctgcctgtcaccaaccacctggggggcttgggcaagctactcaacctctggggctcaatttccctaactgtaaaatgggattgtaatcccttccctgcctgacgcaggaattgttatgaggcccagatgagatgaaagtcagcggtcagggctctgtaagttgaaaatggctggatgtgtgtggccctgccactgcagggatggcccaaggtcacacagaaagtttgctgcaggaggagccctccccaccagtcttcatcgcttgccctgcttctcacttaggcagatgtcaaccagaatgagatacagccaatttggctttgatgacccagctgagagggaaatttagatacaattcaggaatatcatgcccaaaaatagtggtcccagcaaccaggacacagagggaagacctggatattgtcagtgattggtggagggggacatcttggaccctcctaggcctggtgtcacatctcccatctctcagaccccacagaggccaaggggccttggctctgacccaggttaaagagagccaccagcccccaggctcagggagctgaaaccacccatccgcagaaatctaagggcaaggagaaatagaaattgtctgttccttcccttcaaagtgtaaggcctcttccaggagcaactggagccaccacagcttc

SEQ ID NO: 66358 - DNA, 1121 bp, Homo sapiens
atccggaaggttcagtatgccccagagaggcctggcccccagcccacagccgagaccaccaggcagttcctcatgtcggacaagcccttgcacctagaagcctctctggataaggaggtaggaggctcggacttggcagggggtgggggctgctccaccagggcctgggcctcagatcccagctctctcctggcctgcaaggatgcctcaggtaggagcttctatccccagcccaaggaccacaggggtcagggaatctgagacctctcatgggggatttggagaagcctcttgggcctaaaggagtggcaaagggggcatgaacttgagagatgtgatggacttccgaagtgaggagcagaccttcctgaaggtcctggacatctcccccacacctccaccagctgcctgcctcaggccgagtgctgaaggtcaaccagcattgcagagggggcacggtggggggccgtgaccttcctgccaaacactgagcgtcagggcgacaagccctgcagaaggaagggcctcccctcaaactctgaatcaaacccagctgactgctgtgagcttaggctggcccctcctcaaggtgtgggcaccccctctctctcggggcatggctgaagggaagtgccttggggcaagatgcaagttgaggtctttttgtagggattcagagctggctccctcagtgagctggtgagcccatcctcacctttccctgcttcttccagatccttctgtggacagaatttagagctggcagggacttcagacatcacctagtccaaccccttcgttgcacagagggagaccctgaggcttagataacctacccacggtcacactgctttcatcatcgtcaatgttattgttgttattgttgtcacaattactgctggccaagccagggctggagcccaggactatcaccttccaattccgttatctttcaagggtcccaccagggaactgaaggctaatgtgcttggtggctttcatgccaccttagcagcagtgggaagtggctgatgaacttggggcaaatgtcacaatgccttgggggattcggagaagcctcttgggcctaaaggagtggcagagggggcatgaacctgagg

SEQ ID NO: 66359 - DNA, 1119 bp, Homo sapiens
gatcgatgctaactaatagcagttccctggagctgccgtgagtaggaaagatgactgtggaagttgcttgggccgggctcagggctggcacccagggagggccagtgttgtcctcacagtgggactaaggaagggcctgctatcccctgtccctgatgctttattccactttagccaggagtgggtgctgataaagtttgatgatggggatggtgctatccatggccacgggggaagaggcttgctcagttactggcagagccaggtgtggatacccatctgggtcacatccagccagagctggagccatggcctgtcctgggatcctcttgtcagggatccccctgttgccccctgccatctctccagaggttgctggcctctgcccagacacacagctgacataaatatggcatggtggcttcagttcaatggagagcataaatggggagttggagtgggaccctgggcaggggagggtgtgagcaagactccctgtcagttctgctccagagggaagaccttccccgtgtgttagactgagctgaagtctgtcctgggagcttctggggagagggagcagatggggatcgtgccctctgggagctcctggtgtgatggaggaggcatggccctgtcctccaggacactcctgtctgatggggcaccatgacttctgtttcctgggactctctgtgtaacagaggggacacagtcctcttgttctgtaggagctgtgtgcctgaggaatgaagcatggcctccatcctgcaggagcctccaatctgatgggggatccatggccacttccctcagagagattccctatttgagagaggagccctgacctctgtcctcaggaaggacccctgtctgatggaggctcatcttgtcctctcactcaagaaaccccatttatggccttcacctttgaccccttcactttgaccccttccgctccctgattcatggggagctcaggtcccacaggcagcagctacggacggagatgggcacttataaacttggctgctgtggggcagggaggaagggaagacaggagactccttacaggagactgcaagaaggccctctgcagcaagtgagggtgacatagaa

SEQ ID NO: 66360 - DNA, 1017 bp, Homo sapiens
gagctgtccacaccaggtggccagcagttggcacagagcccagaatgtggtaacagatgcccagggaaggcatgacacttgggatgggtgaatggctggtgggagacaaggatgtaagaagggcactttcatttgggcggcaggggcttcagttcaagtcaccatctgtatcacaaatgaacctcaatgttgtcttctggggaatggggatgaacaactgtcctcattcacagggttttagggaggaggaacaggcagcaactgactattcacaatagccaaaaagtgggaacagacagcctaaatgcccatctgcagatgaatggataaacaaatggtggtatatccatgctgtacaacattattcacccatgagaaggaatgaaatactgatccatgctataaagtggacgaaccttgcaaaccttacgtgaaatgaaaaaagccagacacaagaggtcacctatagtatgagtcaacttgtatgaaatatccagaatagagaaatccatagagacagaaagcagacactggtagttgccaggggttggagagaggaaagaatggggagagactacatagtgagtaaggggttttactttggagtgatggaaatgcgttggatctagatagaagtggcggttttgcacaacgttgtgaatggactaaatgccactgaattgttcactttatgtatttattttatttttatttatttatttgtagagacagggtcttgctgcattgcccaggctgctgtcaaactcctgagctcacccaggcgcaatggctcatgcttgtaatcccagcactgggaggccaaggtgggcagatcacctgaggtcaggagttcgagaccagcctggccaacatggcgaaaccccgtctctactaaaattacaacaattagtatggtgtggtggtgaacgcctgtaatcccagctacttaggaggctgaggcaggagaatcgcttgaacccaggaggcagaggttgcagtaagccgagatcacgccac

SEQ ID NO: 66361 - DNA, 4223 bp, Homo sapiens
ccagctaatttttctatttttagtagagacggggtttcaccatgttcgccaggctaatctcgaactcctgacctcaagtaatccgcccgccttggcctcccaaagaggagtcttaaatgagtttcactgagggatttcagcagattttcattacagtgtccaccctgaaagtgtaggggccagagttccacgctggttaatctctcttgctgtgtgaacttatacctgtaatttccacctctgcacctcacattgcttgttttgaaactatgagaattgaactctaaggtcccctgaagtttagaagtcctgctggatgaagcccctttcctgttcctgcctacattcttctttccctggacgccttacttacgtaaaaactacatttcccatgagcacccacaggcgtgcacgcagcgcagccctccgtcgtcgctcgcgccctttatactcacttccgcccgcgagccacttcctttcctttcagcggagcgcggcggcaagatggcagtgcaaatatccaagaagaggaaggtgagcctctggggactgggttcggagaacgacggcgccgcgcgggtcgagggcttctcggggtgccaccgcgaggcctgcagctccgtggcctgccctggaagcggcctaggcttcctggcgttcctgcgggccgcggatggcggtggattgagtgagaggccccagccaggagggcgctgtgtggccgggttccaagtgaagcgcagagagatgggcaccaggcgccccttctgtcccggagaaggcgtttgtgagcatttgtcggtcaacggaattagtaaacgtggtattttgagggcgtgtgtcatttccctcatgtcttatcccgtggttttgggaagagaaggcagcagtgtattcttgccttaactggtcgtttctgggtacagtccgctggccccaggacctcaacttgaagggttgctgacggttgcttgctccgtctggggaccccgggaggaagctgcctcggatttaacgccttgtcattacatgggatagaactgtgtaaaaatcattagctttaaaaatagacagtttgtcatttcgtatatacacttcgatgtcaaaattaaatccacaacttctcgagagttaggatttgccagctctgttggtaccgtaaagccaaataacatggctgggattctttagacggtgcaggttgtgtctacaagtgagagagcttatatgttaagtctactatctattccttaacagtgacaagtacagtgtctttgctgtgctgaatgaagtgtaaataggccattagagcagtttcttgttttgcatgtggaactgttttaaacccttcgatgaagagatgatgacgagtctgacttggggatgttctctttgcccaggtggcctactctgtgctgcgttctgtggcacagtttaaagagccctggttgaagtaatttcctaaagatgacttagaggcatttgtctgagaagggttgctgcactcctgttggaacaagggtttggaaccattggttggaggtatttagttttggtgagggatgcattgactaataagactagactggctcaggcgaaagtgagcctacaccgatctcctaattttgaactttgctttgtttggattagtttgtcgctgatggcatcttcaaagctgaactgaatgagtttcttactcgggagctggctgaagatggctactctggagttgaggtgcgagttacaccaaccaggacagaaatcattatcttagccaccaggtaaaactcatttgactggccatcacctataattgttataaatgctaagttggtttatttatttatttatttttttgagacggagtcttgctctgtccccaaagctggagtgcagtggcgcgatctcggctcactgcaagctccgcctcccgggttcacgccattctcctgcgtcagcctcccgagtagctgggactataggcgcccgccaccataccttgctaattttttgtgtttttagtagagttggggtttcaccgtgttagccaggacggtctggatctcctgacctcgtgatccgcctgcctcagcctcccaaagtgctgggattacaggcgtgagccaccgcgcccggcaggtttatcctttatgaacttaaggggacagacggaacagtgaatctgggcttagtgaatgtaattgcttcttaaaagctagattttaaggccaggcgtaggatcacttaagctcaggaattcaagatcagccggggcaacatggggaaacccccgctctacaaaaaataaaaaagggtgtggtggtgcatgcatgtggtcccacctattccagaggctgaagcaggcgatggcttgagctcaagaggttcaggctgcagtgagccattggtgtgatccagcctgggtgacagagtgagaccctgtctcaaaaaaaaaagctgcgttttaaaaattttagtttttgtcaatgaaaattatatgctttgtggcagagattttgctaccacacatatatgcaagatttaaagttacatctagcatttgtgagaatcttgaattgtcacttttcccccccagaacacagaatgttcttggtgagaagggccggcggattcgggaactgactgctgtagttcagaagaggtttggctttccagagggcagtgtagaggtgagtgattctggcatatgccagaggtaatggctcttcagaatgatacttctaaaaactctcaacttggagactttaattgtttgttcattacaaatggactggtataactgttgaaattctcttaatgaataatgggcttaactttgtaagcctattctgctaatggctgatggttaaaggattttacattcaacttgggtatagaaatgatgcatatgatggattaactgtccccattggtgtacttggcatggccaaaggagccagggtgggagggcaaggaacctgcattgtgtgtaggtggtagaagtgctttaggaattgagggatactgaaattatatgctgtatatgatggtggtgtccgatcttttggcctccgtaggctacgttggaagaagaaatgtcttgggccacactactactggtagcgcaaaaaatcacgatgttgaatttgtgttgggccacaatcaaagccatctcctgggcagcatgcggcccgtgggttgggcaagcttggtgtagaaagtgatacttgtgtggcaaatgccaaattttcaactttcagttgaaaataatggtgatggtaacaggatatcccttgcttcctttaaagctttatgctgaaaaggtggccactagaggtctgtgtgccattgcccaggcagagtctctgcgttacaaactcctaggagggcttgctgtgcggaggtaagtgtcctgagacctaatggtcatgaccttttgtgtgtatcaacatacatgtctgccatttgttaatttagcagatgaactgttacaaagttacaggatctgctagtctcccagggttataataagatactaagtcatgccctcactgaactggcaggctaacaagactactaaagcagcaagaactgtaaagggtggtcagtcctgtaatggagaagtgttctgggtgctttgggagttaaacacaaatagaactgtccaaggaggggaccaactcctgttggtcttcttgagaaggctttacaaagagccctgttgcggggggcggggcagtgggcaatgaggaataattaggcctgttactgggtgtgttacgtatccctaggtagaagtgccttagtactagttaggataccatgaaactttagtagcaatcattcaaatctgcttagtgtgttcactcttaagatggtattgtgaagagataagatagacctgatgcaaaatagcttaaaatctagacacttaacctctgagttgcatgcagatagtagtaatgtgagggtctactggtaagatttcaacaggaagttctttgtgcagtttgactgtatgtaaaggcactgaaatgccttgcctagaggaatgacaggaaagctgtgctgtaggaaggttgactggtagggatgggtagtgtaggcaaggctctaggtaaggacatagaaaagacggcttacctggtttgagtgccagctaggctgcttagaacaatggttctcaagattaatgccagccccagacccaccaaatgggaaac

SEQ ID NO: 66362 - DNA, 1981 bp, Homo sapiens
aggatcctaggtgggtaagctttcctagtgaatgagacttcggaggttgcagagtatttcaagggaccacaaagtgggtaattgtggagtgtaaatgtggttctcagttttggttatacatgagaatcacccagggagcatttttaaatagatattcctggactttgcacatttaattggcctagagtagggcctagatgtcagggtttcttttgttttttattttagccttctgaggtgattccagtatgcagccagggttggaaagtacatatttaggagcttgacatacttgatgaatattaccctaaggttcggaatgataggtgtggaagagaattggtattcttggggccggactctggtcaaattattctccattaaaggaacattgaaaaccaagtctttgttttgttttttaaacttggtggaggtccttggcaataacacagtggctctcttctgttcttttaaagggcctgctatggtgtgctgcggttcatcatggagagtggggccaaaggctgcgaggttgtggtgtctgggaaactccgaggacagagggctaaatccatgaagtttgtggatggcctgatgatccacagcggagaccctgttaactactacgttgacactgctgtgcgccacgtgttgctcagacagggtgagcagctgagagtgcttggcaaagggcatttgtggacagatttggttttccacagacatcttaagtatttgggggagtttatcatggaagtagctgggcatgttcatattccttggtgtatcgattgccacgttgatctgtaagaatcgatttgctgagatctgtcagatccaagagttggtttgtccttgttttagccatctgtgtacccttcagtgatgacacgatgacgagtcagaaaggtcacgtcctgctcttggtccttgtcagtgccatgttctgtggtgctgtgcacgagttcctttggcagaagtgtcctatttattgatcgatttagaggcatttgtctgagaagggtccagacccaggggtgcttgagtaaactgcttgctctctttggtcttgtgtgatgggggcctttgagaccccagctgtgtgctaacaactgtggtgtcctctaggtgtgctgggcatcaaggtgaagatcatgctgccctgggacccaactggtaagattggccctaagaagcccctgcctgaccacgtgagcattgtggaacccaaagatgagatactgcccaccacccccatctcagaacagaagggtgggaagccagagccgcctgccatgccccagccagtccccacagcataacaggtatgtctgcaagggcaggggcctcttggggcataatagggtccttccgagtctttctgttaatacttgtatcccacattctggtaagcgtttggtgaataaaaatttcatttatttgctttatgtgggagaatacaagttgaaacctggggtctatttaacccttggttccaatgggacaggtgttgcctttattctttccagaaagaagttcctgcttttactcgtgtatatgaaatagttttcccttatcctcccttatttgctcaaaatttttggctcagtgcaacctctgcctcccatgttcaagcaattctcctgtctcagcctcccgagtagctgggattataggcacctgccaccaagcccagctaatttttgtgtttttagtagagacggggtttcaccttgttggccaggctggtctcagactcctgacctcaggtgagccactgtgcttggctgctcaagattttctaggcacttttgctattctgtcctttagcagcccctgtaaaacactaacaagcctcctgtggtcaacacttggggtttttttgtttataggtgttgtctctccaggtgccttgtattttttttttttatatgaaaaaggacaaacccttatgtatgcattttattaatgttgctgcaaa

SEQ ID NO: 66363 - DNA, 1085 bp, Homo sapiens
cctcatcgtgggcatcttcgtgctccagaagtgagtaggatctgaccacttccgtggctgtccctaccctgcagcaggcccagcccccaccccagccaggtgaaccctctcctgagccctgggcctcagccaggagcaggcctgaccagggaagaaggacggactccggtggccccatcctccctcagacagaggctgggtgacttctggaatgaacatgcagctgggatcccagagccaagctctgccttgggtggctatgtgggcttaggtgaatttcagctcctcaccgggctggcctgctcatctgttagccagggcatgggttcccaccagccctcagcaagatagctggggtgtgctcgcagtggggaggtgtggttggtcccagggagggtctagggccagcctggggcccccacccagccaggaaccaaggggctgggattttattcttgactgatgttctctctctgtcccatcctgctctgatcggcgcatgtccctcctctctccccctccccctctctctgctgcactctggcatctcacagctatcacttgatcaggtaattctggtgtggtcttcctcctccttctgttcctctttctccctcttgccatcccttctccagttctgtctaaaaacccaccgtgcaccaagccctgtgcccgggccacctcgcagacagcgcgctcgcctgaagcctcccttacccccgcaatcctcttttctgctcctcccgtcccactgccgtgtgtgtccctctgctccctgttcccacggccgtttctgcaggtggggaccagcgtttccttgacagcttcctgacctggcccctctctgcaccaaagtgtctccctgggggaggggaccctgcctgggtacccccatccccctgcctctggcacttacaggggccttcaccacttgcccagggcagaccctaccaagtttctgcctctctcttcccatcttctccctccctggctctgcctctcccactgttcactcttcctgtttacctttctctgcctctcccatctctttctctctcttctttacattctatctctaacaccca

SEQ ID NO: 66364 - DNA, 1053 bp, Homo sapiens
aagtggagatatgggtgcagacaactctcagaagtttggatgagaagggaggagagaaagggaggagagctgggaaggggtgcaggggatgaactgcatgagccccaggcctgctcactgctgattggaaggagccagaagaggagagaggagaggccagagggaggagggagggtgaagtggtcatctgtagacacccgcctagtcctctgccaggggcagggagggtgcctggagggggtggtgctttctggaggaatggctgtggagggctgagggtgaaggaggtgcagtgctgggcaggcagccttcagtcttgccctgacctctgccagtcttcatatctgcagggtatggtggtagcagccaccctggggtgtggggaggatcccaggaggcagaagctccactagctcagagcatcctcgtaaaccaggttcaggtcaggagttgaagctcagggctgggcggggttggcctctggtggtttttgcatcttcagtgctcaccaaagctgtttcgtagacactgcaaacaagaaaggcctaggaaggtcaggacgtggatggcctgcttccaaagaggccacacccaaccccatctctgggcccagctctcaattacagggaagttcttcctttgggtctagcctaagtctttcccgctgtgtgttcccttctggtgaacttgttcaaccctgctccatggagccaagcctatcagctggccacttggagtggcggtcagtatttttacaacttgttttcatgaagatgatttgaagtctccttgcattcccagaatgtcagacccgccctgattcacaaggattgaccaaaacagggtctgagccaaccagaggaatttgaagacttagtcatcccccttggatcatctgcacattcttctcctttccttccagttaaaaaaaaaaaaaaaaaaaaaaaggaaaagaagaagaaagaaggaaagttagcctagatgaccagatgtccaggaagggacagtggcatttgggggtataaaccagctcagatgatgatggctgtggac

SEQ ID NO: 66365 - DNA, 1210 bp, Homo sapiens
aaaaaaaattaagggtggtcatggggcactccctgcccagggcacagctgtcccccaggtaccagggagggtagaaagcccacctcagagcatgtttccaaaatatctgacaagtgctagagccgggggtggccatagaggtggctgacctgagggcggaattaattctctatcatatgggagcagcaggcactgactgtagggaaccgcatcctcagatggcatgtcctggggccaagaccccttcccaaagctgggaacatagactctgtgggctgggtgctctatagctgggccctgaagaatggagcaaagacctgtggcaaggataaatcaaggtctgcagccgggggtggctgtgggctgtgattgtgtttgggggcggccatgtgtctctgaccctgtgttttgccccaactacagcacactgggatgagaaattccaccacaagatggtggacaaccgtggcttcatggtgactcggtcctataccgtgggtgtcatgatgatgcaccggacaggtaggtgctgtgaggagcagggtgtcaaggtgggtgggggtccaagggtagttggtctgacccacccctgcacacagggtgcccagtgtcctttccgctcctctcccaggcctctacaactactacgacgacgagaaggaaaagctgcaaatcgtggagatgcccctggcccacaagctctccagcctcatcatcctcatgccccatcacgtggagcctctcgagcgccttgaaaagctgctaaccaaagagcagctgaagatctggatggggaagatgcagaagaaggctgttgccatctccttgcccaagggtgtggtggaggtgacccatgacctgcaggtaaggggtggcccagcctaggggcctgcaggccttggagccagggggaggtgcttgggggacccactcaccaattcagcaggtctgtcccaagaccccctggatgtccaggcagtgctgggctctgtgatgggggaagctggggcaggaggtgtgggccatgcccttgggaagatgatgataataccagcagctaaatataacggaacattcctgtatgctaggcgttcttctaagcactttatatgtattattattattttttttttgagatggagtctcactctgttgcccaggctggagtgcaatggtgccatctcgactcactgcaacctccacttcctgg

SEQ ID NO: 66366 - DNA, 1612 bp, Homo sapiens
gagtgatgtggacatagttgtccttagatcagtctttctcaaacttgagtatgctaagaaagcacttggggagtttgtgaaaaggaatccatgcccactcccagagattctgattcagggggtctgggctggggtcaggacatgagcatttgagataagctcctgggtggtgcccatgctgtctgtccctgaactgcagctgggcagtgccgggatacgttctcacttgtttttctgagtctcagcttcctcatctgtgaagtggcaattagaagcccttgtagggttgcagtgagaattgagaaagctgtgatttgaagtgccagtgccatgcctggcatacagaaggtgaccagggggtggttctctcctctctgaggagcggtcagggtagtatggggtggagggtttgagggtggaggagcctggcagccatggcctcacctggcacacctccttgttcccacagaaacacctggctgggctgggcctgactgaggccattgacaagaacaaggccgacttgtcacgcatgtcaggcaagaaggacctgtacctggccagcgtgttccacgccaccgcctttgagttggacacagatggcaacccctttgaccaggacatctacgggcgcgaggagctgcgcagccccaagctgttctacgccgaccaccccttcatcttcctagtgcgggacacccaaagcggctccctgctattcattgggcgcctggtccggcctaagggtgacaagatgcgagacgagttatagggcctcagggtgcacacaggatggcaggaggcatccaaaggctcctgagacacatgggtgctattggggttgggggggaggtgaggtaccagccttggatactccatggggtgggggtggaaaaacagaccggggttcccgtgtgcctgagcggaccttcccagctagaattcactccacttggacatgggccccagataccatgatgctgagcccggaaactccacatcctgtgggacctgggccatagtcattctgcctgccctgaaagtcccagatcaagcctgcctcaatcagtattcatatttatagccaggtaccttctcacctgtgagaccaaattgagctaggggggtcagccagccctcttctgacactaaaacacctcagctgcctccccagctctatcccaacctctcccaactataaaactaggtgctgcagcccctgggaccaggcacccccagaatgacctggccgcagtgaggcggattgagaaggagctcccaggaggggcttctgggcagactctggtcaagaagcatcgtgtctggcgttgtggggatgaactttttgttttgtttcttccttttttagttcttcaaagatagggagggaagggggaacatgagcctttgttgctatcaatccaagaacttatttgtacattttttttttcaataaaacttttccaatgacattttgttggagcgtggaagaagattggatcaggagattcttacaccattcttcccaggggacaaggtctcctgttaaggcagactcgctactgatggctcatatcaggccctggaatgctggcagatcgctggcagatca

SEQ ID NO: 66367 - DNA, 1009 bp, Homo sapiens
ccccttgccccttcttgcagccagcacttaacaagggggtcagggagtcagggaggcaaaagaactttgaaggccctgagaacaagaaaagagcaccctggcctgtgggggcatctggtgggcagctgagatggggctcccaggatgggcccaacgatcctagaagaaaaagtagggacctggatggaatgtggggtggacgggctgctgggatgcctactggatgactccgagtccagctacagtactgccattgtcaccagcgtgccaccccctgtgccacgtgcaggttataatcaattggcaagcacattgaatgactgattcctgagccttcacctcacccccctccctcacccccgcccacattctgtactaagaacacagaaatcatattctcctggctctccagcaagagctgcccggcccaggctccactaggccaagacttattaggcaatctgtactctgccctgtccctgcctgagctctactctcacagtgatcacctctctctcctttgcaggagcctggctcaacccgtcagtgattcaagtaagactcaaggtcctgtagccacagagccagacaaggatcaaggttctgtggtcccaggccttctgaaaggtcaaggtcctatggtgcaagagcctctgaagaagcaaggttctgtggtcccagggcctccaaaggatctaggtcccatgatcccattaccagtcaaggatcaagatcacacggtccctgagcctttaaagaatgaaagccctgttatctcagcaccagtcaaggaccaaggtccctcggtcccagttcctccaaagaatcaaagtcctatggttccagcaaaagttaaggatcaaggctctgtggtaccagagtctctaaaggatcaaggtcctaggattcctgagcctgtgaagaatcaagctcctatggtcccagcacctgtcaaggatgaaggtcccatggtctcagcatctgtcaaggatcaaggtcccatggtctc

SEQ ID NO: 66368 - DNA, 1092 bp, Homo sapiens
gccccacactcccacactttccctggaaggcaggagattcaaggacagggtccataggctccccactctctgaattatgccctatgccaggagcattgccacagctgttggctgctttgatggtgcaacaggagacaatctgggaagaaaaaaaccacgtggatggactataggactggaattgtgtgcaagggcaggaatcagtgggagggagtgaagtcctttcaccatccagtggaggacagggctcagtaatcctgctgctagactctggaaagtatggatccaatgtcagtgtgtgtgcactcaggaggcattaccttgtctccatggaaacaggaagaaggatagaaaatgaagtgtctaagacaagatgtctcatataaccttggaacattaagttttgcaaataggacagagcctggcacagaacagtctgttgtttattcattcactcaagtattaagtcagaacccacctgggctcaggtactgttcatttaaggtacagaggatacaatgatgtgcaaaactgacatggtccctgccctctggacacttcagtctagtgggagaaacattaatccaaaagaatacaaggaattagctgagataagagaggaaagcaagtgccagggactaggagagcctgtagcagggggctggccatgactgtggggtcagggaagccttcccagggcagtgcttcagtgagctgagagatgacagctgagtaaacactagccaggtgaagagggaacaagagaatattccaggagcagacagctgcatgtgcaaaagctgtaaaatgggaaggagcagggcgtgccgaaggaacagaatgctgggcacagaaagccaggaaaggcaggaaggagaggggtgaaggggtaaggaagtgggtagattggccagctaggtggggctgtgtaacacattttcttctttgttcttggtacaaggagaaggtattgaaaggttgtgagcaaagaagggacaagatagggtttgctctcttaaaagatcattctgatttctgtatgaagaatgggttggaggagagcaagaatacatggaacaggggacagcagtc

SEQ ID NO: 66369 - DNA, 1014 bp, Homo sapiens
gaatgctaggaagtaaacctggtgggtagggggagctgtgcagtgggagtagccagccaggttgttgggggcctgggcccagaggggcaactctctaaggagatgcagttgggagctctgagctggaacctgcagaagtcattggctccagccagagccagtcagagtcatctcaagccgagcccagtccaggcatctacagacaaatttggaatctctatatctgtatattccacaaggagggatactatagagaggaaagagctcctccattaaggtcctgactttgcccgaactcactgtgtgactttgggcaacttacttcagctttctgcaccgcgttttcgcttctggaaggtgaggagagggctttctgtctgcctggctgacaccattgttgtgagaatcaaatgccttgtatgtaaagttatctcagaaaccttaaagagatgttatcatttggagggccaaaaaaggtgctaagttaaaaataggaaaacattttcatgtcatgtaaatgcggttgttagaatttgatcttgtatgagctattttaaaactcctcattgagaaagtaggcctcctaccatgtgccagccctatgctagtgatccctatggcctggcacatagtaggcatttagtaaatgtttgtggaagtacggaaggaggcaagaggcagggaagagagagaggagaggaggggagggagagagggaaagagagatgaagcaggcatggtccctggcctgaaagtgcccagtctagagaggcagatacaaaactattgaagctgatctgatagggctgctgccaaggtgggggtgggggtgggggcactgtgggaacacagaaaaaggaagtagaggctcagaggttttttcactgaggaagattcttcagttacggagtagaggttgctaagtggatggcgaggggtggtgtttgggcagccagcactgataaagctagagctgcttgggctgatcattggaggtatagactccagggcaga

SEQ ID NO: 66370 - DNA, 1048 bp, Homo sapiens
caccgagcaccaccttgccacactgggaggctgggctctgactctctgcctccttcctgtcgactggcaggactgtcatttctggctttttctcctcccaagggatggcagagatgccttcacttgctcagttaatctatggtcactgtggatgttccacccatagggggctggctcactgtgggttgtgggggtgacagtcgtgtgtgtgccttatgtgggggtgctgaaacagccaccagacaggccaccaagcaacaacagatcaggtagttgggaactcagatgaaggacaggcttcttccaactagggctggggagttgcggaaggctctgtggcagagggagccctggaaagcagctggggtgtggatatgtaagggcaaggccactgcagggagcaagtctagaaatggaaaactggggggctgggtgggaacctgaaagctaggaccaagtttgcccactttgttatccttctggtaaagtggaagacaaaagattttatactcttcatttttccaacatatgttgattgaatacctattatgtgccaggcactgtgctgggcactagggaaaccaggatgactgagaccccgcctctgatcacagtggggcacgaaggaggaggccattctagctggttccatggatcagggaggacttcagcaatgggtaggtgttgaccaggtgaacagagccgggggtggccaaggcatgctagatagaggggtctgcccaagcaaaggtcggaggggggccatcaaacaccaggtgaacttcagttctgggggggtagctcccttgggagggtcatggcacaggctggagagtgacagagctcggtggtggagaggcctggtgcacgtgagtgggcggttgctaactgggatctccatttccatatgcccaaagcgtacctacaccctgcatgctcccttgtcatgcttctcttgcttgcttatgcgtcaggcaacactacagatcctctcttgctctaagctaggagccctagggtggacttttattgctggacctgattgctg

SEQ ID NO: 66371 - DNA, 1047 bp, Homo sapiens
gttcagtctctcaagatttggcattagtcagacatgttgatgctagccacaatttggatttctccatagaataatcatttatttttgcagatcaaataaatcagagtttacaatgcacaggggatcatttatttagcattcccttgctagaagcccgtgtgccaggcactgtgctaggcgtggtgggcagtataaagaaatctgtctccacagccacacaaccagagggtgcacatgacttgatccctatgaccaagtcaagttggtgttgcccaaatcgcagtttgacataagggtcccacaggcttccccaccccccgcccccactcactgccccagggaccaacttcctaccctcacccaaggctttagaggacctgtagcatgtctttttcaacctgtcagtatccccttctgcttaacacacccactgagaaaaccctgtttgtagttcactttgactcttgaatgtgtcactttactggcaagagacttcctttgatttctactgtttacaaataaaactcagccagtctcattctatatcccaaacgtactgaatgaaactgattttggttccacaagcagtgtttgggtgttgccttcctgaaggtgaccaagcttccaaagctcgtcccactggcctctgtacatttccctgtggttctccgtccttccctggcgagggagctgggactgaagctttcccgctgtttccctgcctgcaaaagcagccccaagagctgcgcattggcttccctcagcaatctgtcctgtctgtgctcccattcggtccacatagctttctttgcctctctgaggcagacaggaagtgtctaattacgattttgtggcctgggttttgttgcataccacagattgtctatgtaacatgtagcgcacacctctcttggtgctatttcattcctgctgtaagagaatgacaaaaatattcatgtatagccaattgattgtgacgtgcttgtggtctgtgcttgctcagaaaaacaaacaaacaaacagtttttccaattataaataaatgct

SEQ ID NO: 66372 - DNA, 1114 bp, Homo sapiens
cattgactaaagcaaaatcctatgcctgtgggtgagttgagcaacgtgatgaggtgttaacttcctacagggaggggctcaaatattgcccaacagtggtatggcccactgcctggggtggtcggtggaaggctggcaggacaagggagaccacgtggccagtgggtgctgccaaagtgacggaacagggagttcagacgggagatgccgaatgccctaatgtccttgggaacaccttatgcactgtgctccacctgagccaacctctgtcattaccgtcattccttaattaaccatatcttttctctctaaattccttcccacgccccacctttttgtgtttctgtatttgcggtctgtctctccgtacaggtggaaaaacctagtgttcagagttccaaaccaaaaaagacctcagcgagccataagcccacgaggaaggccaaagacaagcaggcggtgtcaggccaggctgccaagaaaaagagcgcggagggcccgagtaccaccaagccagacgacaaggagcaaagcaaagagatgaacaataaactggctgaggcgaaagagtaaatttccctgcactttccttttactcttctctctctctccctccccccaactttttttttttaaaccaacaaaccaaaaaaggccacaaaattaattagaggcttctcatctgccttggtcctgagtgttccaggagctctttggtttggcttcttttgatggaagaatcctgcttcacagactgagtggcaggcctcctcctgagggcagcccctggagcaccaggaagcgttgccgctggctgtgccctcccctggcactctgactgcatgctgatgagcaaggcaggcaggtctgagaggcgaaacgaatctcccggcagtgcttggaagtgtctgtggggtctcctcctcccagatccccaagatctgtgtcactggtcgattttgaactttaggtacatgtgttcttttcaaaaattcagagaatcgtcatgtgccacagaagctcagcctgggcttcagcaattgacaaaatttgaagaaatattaaacaaaaataacaaaaaaagaaacaaccttggccttaatgtcaataaaag

SEQ ID NO: 66373 - DNA, 1010 bp, Homo sapiens
atgagataaaaattcagaagggcacttaaaagtacaatacattcttgtaattcctgctttcctctgatgtctggctttatttgggacttggtttcaagtcctgcttaccatgtattaactatatgatttagagcaagttacttaatcactcttttctgattttgtttccttagtggtaaaacagaatcactaatatctaccttacaagttgttgaaagacttaacattccattaagtctgttactatcttacctatcttatttactattgtacctccagcacctagcttagtgcatggtgtttaatagatgcttaatagatatgaattaattgaacaaatgaatgaaagatgtgtacatacagtgctcagcacagtgcctcgcccgtagtaagcactcaataaatggcaactatcctcatcatcattgtccctggtgggttgagtactacttggctaatatacagaggtcctttgcccttctcattgcacacattctgaatttctgggtaaagaaccattaaatgctcaggtcaaagattttctatgtgtatttttttagtccagcaagcatctctgagtcaccatgttctaatctacctgtgcaaatatgaattatttggagaggcctggcttttgccactttgcatacacaaaaattatttattttattgcatgagtaaaataagaatcataaaattagaactgtaataaaagcaattagaaaagaatgatttttagcaagtttaaatttgctctgaaaatgaattcagaaatgtttctgtgctttgatgttatctaatttttgccaaagtctggatttgggtggcatctaagtgccacaggtcagagaatgggttaattgtgtacaaactcgaggtcgaattttccttcttggattgtgatgacttgctagccaagtatctgtgccactctgacagcattatgcctgcatctcctcaaaaagcccaggggccccaaggactcctcccgaggatttggtatatttcac

SEQ ID NO: 66374 - DNA, 1047 bp, Homo sapiens
atcgagaccatcctggctaacacggtgaaacccccgtctctactaaaaatataaaaaattagctgggcgtggtggtgggcgcctgtagtcccagctactcaggaggctgaggcaggagaatggtgtgaacctgggaggtgaagcttgcagtgaaccaagatcgtgccactgcactccagcctggcgacagagcgagactccgtctcaaaaaaaaaaaaaaaaaaatagtgtctccacacattgccaaaagcttcctagtggatgagaaaattgatcccagatacaagtatatttactgaatgattccatttatacgaagttcaaaaacaggcaaagtaattgatggtgacagttgttggaataatggtaatctctgggatttaggtgggtaattggctgagaaggagcacaggagaaacttctgaggtgttggaaatgttctatatcttgatctgagtggtggtgacatgggtttatacacacaaacaattgagacttatggacgttattctctgtgtgttatacctcaacaaaaaataagaaacaaaatacaaaagaactaaatggagatagagcttgaagctcaggagaaagggtagaacagaaaagaagatcaggacaacatcagcctgttggtgagaatcaaacccataggtattagggtgggtagggaagagagagggtgagaagaaaagaatgctgaggtcaacgcccagcaagcatcgatatctctggtatgtgagggaggagtcagcaaaggatgagctcttggtgtctgtgcttgcctctcctgtccaaaagagagcaggagcataggcctcactgtggtctcaacctccaacctctggtgctgctggccttgtacattacacacaggaactacccgtgctgtgtattacataatacacatcgttattatctttgctatccttcccttatcttagcatagtccactgtcagtgggtatttgttttcaaactgaatgaagaggcttttgcaggattaggcctggtgtaacctcttttagtgggaaaattgtgcccaaac

SEQ ID NO: 66375 - DNA, 1599 bp, Homo sapiens
tgatgcataggtgccttgcctagaaaatctgatttcattggtctggggtgtagcctgggcaaccaagtttttaaaaactacttcaagtgattctaatgtgcaactcacgttatgatctacttttataaggcatcattctcaaaatttagtacacaaaagaatcacctggagagctttctgaaatgcagattcctgggccacatcctcatacattctaattcaatgggcttaaaatggagcctaagtatctaatttttagcaagcactctagataattttaatgcagatgaatgcaagctttacttgggaaaaaattacttggtgaggtttgccatctttaagctattgagttttcccacatgcaaacatggcaaaggttgccatttatttaagtcttttatgttcttcacttatattttgtaattttctccacaaaatcacatacacatatatactcatatatatacacatatatacagttttaaagttttatttctgtatttaaattgttaataatctaactagattttatctttatgaatggagtgaggtaagtattgaatttttccgtatatggaaagtcatttatccttacactgttttctaaagctttgcttttccccactaacttatgatatctcctctatcacataagggtcacatatctttagatattatatctgggttctctgttctattccatcagtctgagctaatactatattatcttattttattttattctgagctagcttttaattattgttcctatcatgaagagttcattaccttttctaatttattattgcccatatgcattaagttttgtatgttaatcttgtattcaggaaacttatcacactctctaattagttttgtttgtagactttcctggattgtctgtggagataatgtatgtttttagcaaataacaatttattatcttcctttccaagatttatatatcttgtttttttgtgtgtgttgctctgttggttaggacatctggtatggtttcaaatagtaggtgataacaaacatccttgccttgggatgtgggaaagtttctaaagttttatcattaagtatgaggtttgctttatgtttttataagataaggttaagaaatttctatttatcttagtttgctaggggtttctaaaaattagtttggctgttgaatcttattgaatgctttttctcttattgaaggctcagcatcagctgagatgatctgtgatttttcttttttaatctgttaatagattttttttctcatattgaaccatctttgcatttctgggataaatcttgtttagataaaaatatattttattatgctgaatttggtttgctattttttatctgaaatgcttgcgtatatattcataagtaagattggcctataatttttccttttttatattagtcttatgtactgttggaatcaaggttatacctataaaattaaatgggtagattcccctcctttttagttatttgaaaaagtttatataagaagggctcctcctcaaatatctgataaaattctcctgtaaaacttgctggacctgttgtctttttcatggatttttttta

SEQ ID NO: 66376 - DNA, 1087 bp, Homo sapiens
gattacaggcgtgagccaccgcgcctggctggaacactgtttttcttaaaatggggctgtttcagcatggcggtgcctccatgtggccttttggtgtcttcatgttatatcctgtccaggtggtgttggtataaataattctaggcaccatcatacctgagtttctcagtagccctaggaggtagcagggacaggtccaaatactctattgccactttacaaatgaagagcctgtaggagagggaagcaatttgtcccaagccagcatcaagtctgtggcacagccagcaccataatatctccaggtgctgtcacataccatatctgaatcttcgtaagaacccagggtggtcagacatatggatgaagacctggaggctcagaggggaggtttcccaaggtcacaccagtgagtggcagagtcagggctggtacacaggccccgccctggctcagcaggttgccgtccctgcagctggtcaagactgctgagctggacccctctcggaactacattgcgggcttccacccccatggagtcctggcagtcggagcctttgccaacctgtgcactgagagcacaggcttctcttcgatcttccccggtatccgcccccatctgatgatgctgaccttgtggttccgggcccccttcttcagagattacatcatgtctgcaggtgagtctttctacccctgagcagctcaggaaggtaacaaattttcggaagggttgccaatagttctgtacttcttccaagagcgtgtgcagtaggagaaggaggctaggcccaaagaagcacttcctacagcaccatgctgggcgctgagtccatcagggggttgggaagagggagaagactcagggagctcctagctggaatggggtgcagtgggggaaaaaccccaggcctcagtaggcattgctggtgatctctttatgggctacatgtactttcatagcccctgctccctcaccccatacctgacccacttttctctttccctagggttggtcacatcagaaaaggagagtgctgctcacattctgaacaggaagggtggcggaaacttgctgggcatcatt

SEQ ID NO: 66377 - DNA, 1062 bp, Homo sapiens
gaattacagttatagctgctaatcttggtgggtttcaaatacaaattctgcctgaagttagcatgttaaagtttaatgctttttaatgacttgcaccttcttaaggaattatatagagcttactatttgaaagtgcactcttgtttgcagaagaggaagttgatacatgcacaggagagggaagctgctttttcgtggtatgaacagtagctttagggcagtgaatgaagtgggtggaaaagaagcagcgtatgccaaagaaattgtgaagaaagaattgatggatctagatggccaataagaaatgggggtgagaacatgggaagtttgaaatgcaaagatgtctcaaaggttttgaaacagggtgtctgggaagcgaatacatggtgtacccagcccaggagatcaagcctgtgtccaaatcttgattttgctacttattaacaatgtgaacatgggtaaatccctttacttagggcctcagttttattatctgaaaaataaggaagatggcctagatcagtgcttcttaaacttaaaatgtctatatgaattacctagggaatcttgttgaagtacaattctgattgactaggtctatggtgggacctgagattctcagcattttcactacaagtgatgcagagtagcaaaggcttagatgaccttcaaggtcctttctggttctgcagtattatacttctatttgttgaaggtgggtttttttgtttttttttttaagacagagtctcactgtctccaggctggagtgcagtggcatgatctaggctcactgcaacctccgcctcccgggttcaagcgattctcctgcctcagcctcccaagtagctgggactacaggcgcacaccaccacgcccagttaattttttgtatatattttttttaagtagagacagggtttcaccatgttggccaggatggtctccatctcctgaccttgtgatctgcccaccaccgcctcccaaagtgctgggattacaggcgtgagccaccatgcccggcctatttgttgaatgtttatccttcagagatctgttata

SEQ ID NO: 66378 - DNA, 1026 bp, Homo sapiens
tcggcctgtgttatcagattttttggtctgtgccaattttagtgtagttttaacttgcatttctcttatgagtgagattgagaatcttttcatgtttaagagctatttgtgtttatttttctgtgaattatctgttaatgttctttgccatttttttctgttgggttgttggacttttgatttctaggaattctttatgttttagtgaaattgtcttttttatattaattaaaattttttcttaggttttttcctttgactctgcataaggtagtttttgccatgcctaattttaaagtgttttatgtagtaatttttttcttttatagcttctgaatatcatttttagacctttgtgtttataaaataattgttcatggtttctttgggtactttctgctttatgtacattaaatatttttaagccttctggaatttaatgtaaggcataggatgtgtgtgtgtgtgtatttttgatggctaccctattgccctaacacctttattgattagttctcttttccctagaggttatctttgacttgtttgtctcttttttcaattttctcttcatccctaaccacatccattatctaattagttatcccagtaagctcagtttttctttaggctcctatatgttcttatattttctttctgttcctattgataatactttaaaccatttttattgtggaaatttcaatgtctattgaaatgtatattttatatatgaatatattcatcagtatatcaatgtatattgaaatgcaagtagtgtatgtgtgtgtgtttttgtgtgtgtgtgtatatatatatatacacacccccacacatatatatatagagagagagagagagagaaagagattgagagaggaatataatgaactcccaggtacctgttaccccacttcaataactattaactcatgttggatcttgtttgatctatatgcctacctccttgtcctcctttcctccctccaattattttgaagcaaatcacaggcatgctattactca

SEQ ID NO: 66379 - DNA, 1049 bp, Homo sapiens
cagattgttatatttttattttttttgtaacacaagtgattctcagtgcctcctgcttttgtggcttctcggaaacctaaattgttatgctgtctgaaaatatctcatgagcagttgggatgtatactaaagaaagatggcagttggatagttctttcagataactgagccttacattgatacgtttatcattcctttatgaatgttagctattaatggtctagcagctagcatttcaagtagattgaatccagtatcctgtagtaattttacttttataaaaatgtaataaatttcttttctttaatattatggtaaaatagggacctagtttatatcttctcgtatctgtaattccctgtatatatgggatctttttcagaagaatggcatggttttctctaattcagttttatatattgtactgtggattcttctgtaagtgaaaaattctaagagtagaccaaatatttgattaaaaatggcaaccaccttcagaatgcatattagatgagaggcactgagacataatccgttggcttaggtgggatggtgtaagagaggaagcatggtaaaatgataggaatgttggattatgatggaaaatacttccgtactagttctagcccagctactcactagcttcgtgacttttgataaagatcacggtttttggaacttcactctccccatttgtaaagtagagataatgatgtcttatgaagtaggcaagacagatttttatgaggatcataaaaatctcagtaagatgtgattaaagatctatttatgctaacaaaaggtgacatcattttaacaaaaggtactgagacttatttgaatcttgtcctgtggcaaagatgaaaaattcaagtgatatttatttatttatttattttcgagataggatctcaccctgtcagccaggctagagtacagtggcacaatcatggctcactgcagctttgacctcacagactcaaatgatcctcctgcctccatctcccaagtagctgggactacaggtgtgagacgccactccaggctaa

SEQ ID NO: 66380 - DNA, 1070 bp, Homo sapiens
ggtggcattacaggcatgcgccaccacacccagctaatttttgtattttttgtagagatggggtttcaccatgttggccaggctggtcttgagctactgacctcaagtgacctgcccatcttagtctcccaaaatgctgggattatagatgtgagccactgtgcttggcctgaattgtcctttttagatggaaaggggactgggaaatgcagtcttactatgtgtccagaaagaaaatgaaacaatttggctactatttggtttaagggtttaagcatttttgtaggccttaaaacatttagtctactgctcactaattggttatatcactagcaatgtatgacagtgccagagtattttaaatttttgatgagtgtctatataatcagtcctggttaccttaacaaaacttctgtgttcttgccccagtgttacctctgataatagtaattaacaccagtacttagcgcattttgggaatttggaaaatgatagcaattattattagaattataataatcataatagtattttctaaaaagaatagtcatggggctggttgaagatcatgttaaaaaacttgtctagagatatgatgaaagcaaagtgccttttttgtttttgttttttctctcttccagctcagattatatcttgaatttaggagttgtcattgactgttttttgaagttatctcaatgagatatctcaatccaatcctcaacacagttagggaatagctggtgacagagcacggggaagtccggggtctggtgttgctgttgaatctggcactagctgtcaagcctcttgagggcatttactccctcttgcgggcttcagttaatttatcattaaaatgaagggattggtgatttctgagcattcctcccattccaaaatgtcatggttgagtgaagcctattcatgaactttgttgggctttacaaacttttaactaccataggaggagctgggaagccctttctttagtaattctagttagtgctgtcgtatcttgttggtcggacctattatgacaaacgtgaatatttgatgatcattgtttg

SEQ ID NO: 66381 - DNA, 1116 bp, Homo sapiens
cttgatcactgactaacccttttataaattgtgattattctcctctgtcttctgtgctttatttttctctgtggtacttaagatcacttgacatactatatgtttaattatttgattattgtatgtctcttcccactagaatgtaaactctatgaaggcagagattttcaggtcacttttgcttattgctctgtccccaatatgcagaactgcagaaccatgcttgacacatactaggccttcaaatatttttgtctttttaatttaattttttaataggtaaaaaaaaatatatatgtgtatatatatataaagatacaaaggttcatattaaggcctccctttcaccagccttctgtcaccctagttttctaccccaccctgataaccactgttactcatttcttgtttgtctttcctgagattctttatgcaaatacaagtacaaatacaaatattcttattcctttctctcctcttttttacacaaagtgtaccatactatttatgtttctgtaccttgcatttttcacttactgtcttagggttttctccatattggttcatagacagcatccctgtattttgtttttttctgcatagttttgcattgaatagatacaccataatttatttactggctcctattggtggacacttaggttgttccagtcttttgctatacacacagtattgcattgaataactttataatacattgttttgtatgagtgacagtatattgatagggtaaatttcataaagtggaattactaggacaaagagaatgtgtacttgaagttttggtagatattgcgaaattgccctccgtgggagttgttttatgtgtgagtgcttttctccccacagcttcaaccaccaagcctatgcaaacttttgaatttttgccaccctgttaggtgaaaaataattttgcagtatagcttaagtttgtatttctcctattatgagtccacattcatagtaggagatagttttgctttgaatagatacaccatatctatgagtattaggatgaggcacttaagcatttgttgaatgaatggaatgctgcagaacagccaaaatatgccacttgaaacatactctgcaatc

SEQ ID NO: 66382 - DNA, 1102 bp, Homo sapiens
gtagaatatgcctctgaataccctattgttcaggaatagccattccataacaacctcaagaaatgtttgtgaaagatatgtgagtgatggtgcctgtgattgcatgtgatagttttgcaaggcctttgactaaagcaggaaatgctgaattgatcacctggtcttttgaatagtgattggttttctgctagtatgtttagatgtagtcagccggtttctcagtattgaagtagatcctgttgtaactgtcattctctggttgtattaaaacatgatcggaataaaaataacaaatactgtattttcctcctctcttagattcatgcccgaaaccaaaatgaaataatttttgggctgaatgatggatactatggtgctccatttgaacataaggtaagaagatccttctaatgttatgaattttgtttagtgcaggtgtgccttgcaggtgtacagggtagatataatcctgaaaactctgtgtaaatagaatcatgctttaaatttgttgcttagtgtggcttaaggtggatgctttttaatgggaaaactcattctgtaaggcacataaccatccagtccatcttttctaaatccagattatattaatttttctacaggaaatctggagctagctgttttctcttattctacataactctttgggggttaagaaaggatggtgaattttgattaaatgcaatacagttttatgaaatgtttcagatatcttttataactttcaatacatttaagaaactatgaatcggttgttttatagtcagcattatctctacatctaaaagttattagagaaaggaaagggaagcgaattcacatttaccaagtacctactatctatggtactgtgccaggtgattcttgtccttttcctcacttaatactagccaaaaccaatgtggtttgttttgtcctctccattttatagttaaggaaaaaagttgtttgagatgagcttcgtaggttcacccatctagaaagtagctgagctgaaatttcaggttgcctgcctctaaagcctgtgctttttctattctactatggtgttctacccaacaaccctgtgcattatttgctctta

SEQ ID NO: 66383 - DNA, 1019 bp, Homo sapiens
ctacaggggttttctaggtgggtttaaccgctatgatggtgattaggggaggatgataaataaaaagctgttgagtcagtaagctggaaatctttcagatccctattcaggattttgcctttaatgtatacaggtaagattatctttgcctttatttcattttggtgaccactcgtcttttgtgggactgctgacagctgctttttatgaatgcacagtcctagtcgttaggaatatggatattggagtcagattgatataagtttaattataggcactcctgacaactattactccagtaaatggaaacttctactcactaggctctaaatcctatgataagaggaattacatctctaatgcttaccattgtattaacactatatctctagcacagtgcctggtatgtagtaggctctcagtaaaactttgttagtgaatgaaggtgaatgcttgctgtgtttagggctatcacagcaatcattgagaataaaaatcttgagtagatgatatttgttccaccctgggttacctccagcctcaacttttggtatttatttttatgtaactcatattggcataattactccaacttttgtgctattgataaggtgcaaaagcattagaccagttgttataaggctggagtgaaattacttatagacaaatctctaaagattaaagagctgtgaaggtaagtatatagatacatagagatacaagtaagaatttcatttttctgactagaagctacagcggtaatatctttagagtccagtagatggcaatactttctcactttaatggaaaaaattagagcaggcatagaatccaagtcaaaaggagcaaatctttgtggatgaaagaaacccaagatattgaaatagcaatttggtgatgaatttcacaaaaataaccatataacttgatcgtctcgagtacataggctgagattgaagatttaggtataaaaagtttcaggatctgttttgaaagcctgaacaaatgaaaactcctta

SEQ ID NO: 66384 - DNA, 1027 bp, Homo sapiens
ccaaactgagctcagttcccttcccctctcacaacacttcctcctgctgtgtttcttagtgaagtgaatggtaccacaatccatctactttctcaagtcagaacatagagttgtcctgagtcccttcttctgtgtttccatcactactgatggtggctgctacttttttcctggttcttgacattatagtcagatttatttttctaaaatgatcatattcttcctttattcaaatcttgtcagcagtgtttgccctcaataattaatgacttatgaggtcttgctattccttatttctaaacactccatccttaacactttctcaggctaagatttgttcacgtcagttttagctaaggcctcatttctataggaaggtttttctgtgatatacctcttaagtccagtgtggatagatcccttttatatgcttccgtagcaccttgtattacatttccctcttcactgacccttatcctattatattctgattgcccgtttgcttacctctcttacctgctacactgtaaactgtgtgagggcaaggacagtgtctgttttcacctgttgatccctagtgcttagcactgtgtctggcatgtaataataatccagtacattcttgtcaaatgagtgaatgaagcttctgtagcagcagatcattagaaattctattggaatacaccacttggttgtcatcagtagtatagctcagcagtccccaacctttttggcaccagggatcggttttgtggaagacaagtttttccagggacgggagtggggacggtttcaggatgaaactgttccacctcagatgatcaggcattagttagattttcataaggaacgcacaacctagatcccttgcatgtatagtttacagtagggttcgagctcccatgaaaatctaatgcccacgctgatctgacaggagggggagctcaggtggtgatgcttgccctgggggttgggaacccctgatatagcttgttactcaaaattgtaattctctgtcttagtggtt

SEQ ID NO: 66385 - DNA, 1017 bp, Homo sapiens
tggaaccttcactgggttgtgttctctatgaggacagtagtaataattgcctaacaccatctatgtactcggtgttcagtaaacactgaaaggaataagtatatgtataatgctatttgcttcctaatcagttatcctactaactgcgttatttctgtatacattttgtagttttaatgaagttaaggacagtcttgtgttgttgcagctaaaaactctcaaaatatatagtaacatgttttaaaacgtgactcatccaatgaactagtacagggataagcaaactgtagtccagcacatatttttgtatagcttgcgactaagaatgattttacatttttaaagaattttaaagaaaaaataagactatgtgacagaaatgacatgtggcctgcaaagcctaaaacatttactatgtggccctttatggaaaaagtttgctgaccactcatctagaaatacacctgacttgcctggaattactcctgctcattggatatgttaaattatctatttccctgagcagtttaataggcactcacccagacttgttactattctgttccttgaagaattgttaggcctgacttcagaagaattttgagtgacatgtaaatctcttctgggctctttggcacttggcagtatctcacacagataaccagatacaaatgagccgtttctttccattataatccttcatcagaagtctgttgggatcgaacatctggtgaagttagatgtcattcagaacaaggctcttagcatatttcaagaatgttaattgctaagtgatggctgaaacaggagggcttaataatgtccttaaattgccttaaatgtacatggactcagaatttttagaattggaaaaggtcctagagatcatcaagtatagcctggttcttaagaacacgggctgtggagccagactgcatggctcttctctttaatcctctttgtgtctcagtttccacacctttaaagtggggatattaatagcacctgtttcacagg

SEQ ID NO: 66386 - DNA, 1045 bp, Homo sapiens
tgtttggcaagccaaaaaagctttgcatgtatctaatgctcagaggcttaaaggcctcagctctatattttcataatgtctgggcttaattttgaaagattttaaaatctggctttaattttaaatgtgatagatcatcaaggatatttttccagggagcaagccaccaaaataaatgcaattccaaataaagttaacagcaacactcaaccaatgttcaccctactcagacagattgttcattgaaatttgattttgacagtattttctaatgtttacgtgacacataatacatttcagaacattagacatcctttatatatgtacttgaggaagaatccagaaggatgctcggagaactggttattttagaaactttacaaaattggcctttcgtttgtgaaacttgaatcttattacacatgatatagagtttggtcacatggactgtgtccattaatcttaagaaacatgattttgactaaagtaaccatatacattttctgagttttggttcttgcttgagagatgcctacaccttgactgcttaggatatgtagcagaacacacaggatttagaaattagagggtggagattgtagtaaacatattttaatgcctgttcagtttgagacacacaaagttttaagttttgaaaagaagaaagttcagaaattatttgaaatatgagtaagccactaatatttcttgatctcagttttccttagtaagtaaaatgaggcgtagggtacaattattttaaagatatgttctaaatgtgagattgtgtgaccttattagagaaaacagtagaattaaaagaaaaaatactaagtcaggaagaagaggatttgggatagtgcagtatcatagatgctgaaagaggatagtttccaggagtagcgaacactgtgataatgtaggagagcaggaactgaagaaagactgttggatcttgtgaagcagtgtggtatcatggaggatgctttgattaatcctaccctgcctttatctttgatttatcctaattcatttaacctctgat

SEQ ID NO: 66387 - DNA, 1034 bp, Homo sapiens
catgcatcagggatgatagatagcccttgtcttgattgtagaagctgaggccaagaggcattaaatgttttatctatctgagggcacacagcaagtaagagccagactggaggatgctttgacggttttctgacaatgtttttgtagatccttttaatagtctcaccttcctaaactggtggttacaaggcacacatggcataatgactgtggacattctttagaaaacacaatgccctacataaatgcaaagtcatcaggctaatttagtagttgctcagttattgaacattgatcttgcaatgatttggctcttggggagttcatatctagagtatttttcagactcttcagatgtgtcagtaatttgaactgccttattaacagtggtctcctcatgcctattgtacaattcatgcctagctaataacacagatatacttttcctaaaccagatcacgtgactatttatcaaccaaatttactgaacccagggagttgttctggaattggaaactttaaattgcacttattaaagttgatgagtcagatgggactttggtgatagttctctcagacattagtaaagagtacccatcatctgctctattaaatgatcctcttttcccatagtgtttgccatgatatatgtgaagtgctttctaggaaacttaattgtgtgcctattgaattaaactctagttcgtggtttcctctctaacattgtccttggctggagtcattttaaaaaatatatcttttcttttcctgatgctttcttggtttataaaattgctgttacttgatctgtaattttgtgtgaaaacacacagtctaaattctttaatgccacttaactctataaaattctgcatgctgtttagagtcatgtttagaaccctggtctcctgattctgttttttttgagacagagtttcgctctgtcacccaggttggagtgcagcggcccgaccttggctcacttctgccttcatctcccaggttcaagtgattctcctgcctcagcctcccga

SEQ ID NO: 66388 - DNA, 1036 bp, Homo sapiens
gcattcagttttaggagttaactaaaaaaatctcttagtatgattccttctaggttaaggaatacaggcttagtagatagctttctaataggcttattaggtacctttctccttttggttctgtttttttaaagtcctattgatagggaattattgaaagattataaagagaggaggagtaaatgacatagtcaggtttgcaatttagaattctaaccatggtgtcagtgtggagtggacctgagggatgagcctggaagcaatgatttctgtctaatcatttcttaatgtgtctaatcatatctaatctgttctctgactgagagattatttttagtgttaactcattttttggttgttttttcttttatactttttcaaagagataactctgttatagtaagaaaagtaataattctggtttttttctagtatagttttcattgtttttttccccttcttcttcagaaatatcctgcttttgccagtttaataagtggaagtatggtggaaaataaagggctttggtccttcacctaaattccagtcctaaaactgccatgtgtaggtagactggatgcaagactttgagcaagtaacgtcaactttttgtataccttagtctgcttttgtaaaatggggctaatatttgtctcttctattaggaatattgttagaattaaataagataaaatatttgaaagatcttaggatagttactggcatatagtagacatttaataaatgttagttttcttcttcctctttacttacctggtcttggatatagctttctcctctaagccagtattccttttccttgttaccactagcttttctacttttcagcatattttccctttctctccccagcattctagtgttttccatatctgcttttataactgcatgatggattcttcttgctcactgcccagaaaagtcaatgcattgagaacaggttttgcagcaaagaaagagtttaattattacagggccagccaaatggaaggatgggagataattctcagatccg

SEQ ID NO: 66389 - DNA, 1026 bp, Homo sapiens
ttaaattaactgcagtttactaaatgagtaaaccagtagtcaggacttactgatagatctcatagtctttaactaggacctcttataggcaattatgctactaagttcattttctctagtttactgaatgtttaatagagaatggaaatgtaatgggtaagttaaatgagcccttcccaaaacatgttcagaacttttggcttagagcaaaagtcagctttcaaatgttgaaaaggtgaatgaagaataaaataggaagaataaaatcagcgtaaagaagtaaagcattctttgagggcagttaagtatatgtagtcttctgcccaagagatgttctctgtctctgcccctgtcctttaattttggcttgaattcacagagttactggactaagactgctttgtttgagatgtcactgcgaattaaggcttcactgtcacatctctcatagctgccttgtaacttctacattcccgctggtgccaggcatgttccaaggcagcattccaaggtttagtgatttcaccctgatgtctctgccaataaaaataaccagttaccattaaaacctaccccacccataacttgatttttacatgccgttttattaagaaaacttattgatgattttaggagaattaatacattaagtttatcaggatatcaactggcccttggagtaacttttgttctaaaagtggatgtttcaccttggaagagaatctgagactcagcatgtttatctattgagagtggactttgtaataaccttattcctacagttgattctttatgactggaaatactctgttaaaatgagaagccagattattaccttagggatttatattctagtaggacagataacagatacagcaaacaaagggtctttcattcgttgagaaactaataataatttctaaatatgttgtgttctaagaatgagtcagaatccgttccttttctacaaagggcctacacagggggtggagaaggaaaataagatttgaatattaaaaattttca

SEQ ID NO: 66390 - DNA, 1034 bp, Homo sapiens
aaaggtggggaatgcttgcctgacacgttaaatacattcttagagatgtagatcacattcctctgctttaggaagcattgttggatctcacttcgttcctgtacccatattgcacatagaaagtattctgtgccctggatactttgcgttattcaccttacattatcatatagatacctccttatctcctcaatactagtcacaactttttttgattgcctgtcatttgcaaatattgtgctaggtgttgtatatattttatcattctatttaattctttcagcaaccagggacattaggcaaatgaataaattgaggctcaggaaagtttaacaacttgtctaagattgtacactactttcttagcaccttccaaaagcttgaggcttcttctgttccatggtgttttttaacaggatacatacttcagtagaatttgtatgcttaatgaaagtcttttatactttttttaagatcttaccacaattcctttcttttttgttgattatttgatcaaagggccatgtaattctaacacttcttgaaacattggagctgaaaagtaagactggtgaaatagctgactttaaatattgcgttttcaaggctaaaaatgagtgtctaacttactgattcattgtatgataaactaatattatagaactgtttttatatagagcagacagaaaaagttttataattgctctgagaaaaaaatatacttactcaaaatgtgttaagcattccaattttgatgcttcaacacggagctgtcccctgtagccttggagaccataacttcacagtgcttgtttttaaagtaaggttttcttttgaatgtaagcagattttgatggtagaaagaagttgtcgtgtggaattattctgtggagccatttgaatagacttgaaacattgtttatgcataaataaattcaccactctgaaaagtattctgacaaggcacggcatgtgttggcatctgcaagtcagcctgtactgagttttcactacccacaagaggtggtgaaaac

SEQ ID NO: 66391 - DNA, 1115 bp, Homo sapiens
ctgtatcattttctttgtcctctttgttcttgttgaaacttgaaccaatcttatgggaagctgactatgggccaggcagagtagaatgggagttagattcatatgatctgattccttcccatagagaactcagagcttagagttacataatatcctctaaatcatagctcttaaattggtagaactgagttttgaaccatatattttggccttcccgttgaatgtctttttcactatagcagtgttcttgaataacccccatacatatacatacatagactcacacatatgcatacatacacacacacatacacaccctttgtaactcaggaagcctcatgagcatatggtctaaagtgttcacccccttcagattgctttttgcttatcagtgattaaaaggcttgggaggcatttgagaatgtgtgaggctggtaatgaactggaggtccaacgggatgaaaagggaggaaaaaggagagtgtggtgtcttattttttggaacagacttcaataattataattactagtatgctggtataaacttgcctttggagacactgtggtaattttgatttatgtccagttaaaactgcaacaaaactgccaatacagaaggaattctgtgtttactcattttcttcagatagtaggccaaatggagaaattcgttaagccaatcctgaaacactataccaaaaacttaaatgagcaaaattaatcacatgtattggcaataggggattccatgaaaatgtttcaacttctggcagcaacttttaaactttctaatttcagtaataaggctatttgcataactctaaatgtagcaggcaaatggtacaaagaagaaagaagacagtgtggtgtagagaaagaagggaactggaaattaagaaacttggcctttctaaactggcatagctttgagacattggacaagtcattgaatcttaactgtggtttcattttcatatttaaaacgagagcattgaattaaaagacttctaaaataactcctagtactaacattatcatggtcctttgactataaaggtgaccttaattgacttaagagtcagttttctagttatttctaaaactaataacatttt

SEQ ID NO: 66392 - DNA, 1087 bp, Homo sapiens
ttacagtgaaagtcatagtccaggagaactttagatgtggaacttcagggccaggtggaaggccattatgaactcttgcattggctctcttatgatcataagcctgaaagtacagaatcctggaaaaggaggcctctctctgcacccatgtaatttttaaaaaggagagaaagatatgaagggtgctaaagcttgatcctaaaagatcagggcaatgaaaacaaatgataatgaataactagtactagaattaaaaatgtaaggcattttaaagagatggggtgccagttataattcagttttgaatactacattgcaaaagaactatttttgaaaatagttaagggaaaaaatatctgaattgttgaataagttccccctatttattcctggtaaacttcaatcccatcttactgcttcattctaagttcttgtggagtgtgaatatcagcaattttctgaccttcaaagaggaacttgaataatttcattggaactctgtgcgttttttgatagtatgattctttgagtttcttgggatgtgttgtcatttttaccttgcagtgaacctcactattgtcctgtctaatgactttgaataaaatatatattttttctttcttgtccctgaagtccatggtggaagcttttgcctcttgtttagacatgatggtggtggcttttctttcggatctccacaaacagcagattcacagcgggagagtctttctctctgagacttacaaatccatgttttttcttcacagctcaacaccactgctttctgttaagatgtaaacaagtctaataatttctttttcaaatgccgttctgatgaaaacctgagtagttaaaaaatactatttaaattacaatttaaaaattgtacaattattaagtgtacattaaacacttgctaagtgtacagctgtttatcagacacaatacaggaggggatacaaaggaagaagacaagaagcgaattgtctagttgaataagatttagcttgtggaagaattagtgtcaagataaatgtattcaagtgctgaacttcatggtacatatgcttactgaataaagcagcat

SEQ ID NO: 66393 - DNA, 1078 bp, Homo sapiens
tggtctctatgtgatttttattttgatacactattttgaagttacaaatctaggaaactaccacactgatcttccaattaatctcccactgatgtcaaaaatgtcaaattttgggactgtgcttttatgttcagacattaggcattaagccagcaaatacattttgagtccctcctttgtgccacattctgtgcttagcatttggaatacaccttagaagatgaaatttatttttcccccagaaagatctggtgaaataggcaaagaaataaacagttgctgtaaaatagggtcatgtaatatttttgtggtgccatacacatgaagtagcagatttccagaggaaggagcacctctacctgtccgtaatagtcaggaaaggcttttgaagaagaggttgcttgagctgcctcttgatggattaggagtttatttatctgttaagggatgggaagaacttgtaggcacatagaacaactcacacaggggtacagaaggaataaattataaggatatgtttggagagttgccagtagtttagtattgctagagaagatggtgcaaggtaaaaaataatcaggaatgagactggatgtgtcagcagggtctacatcacaaagggccttaccttgatgtaaaattactttagagctgtctttttaagagagtattactgtcaatgtagattaaacacacaaacacacccagaccaagaggcaacaggatggagtataatctcctctattggattccttaggagccctgagggatttgttgaattactggtcccatgaacaaaatagctgtattgagagttggtcctttttatgtgacctaagaaatcatcaataaatatcaggcaatttctaaaagtaaagaatatatcatgaatattttcagggtttagggtaataataataatgttggcagaggtagtgatatcatcaaatgcctaagaaaatgaacctctcatatatatgatgactttcaggttaggattgatgaccaccttttaaaaaccgaggtaaaattcacacacagtgaaatgcacagatcttaagtgtaaaatctgtgagtt

SEQ ID NO: 66394 - DNA, 1068 bp, Homo sapiens
ttagggctgggcgtggtggcccacgcctgtaatcccagcaatttgggaggccaaggcaggtggatcacgaggtcaggagttcgagaccagcctggccagtatggtgaaaccccgtttctactgaaagtacaaaaaattagctgggtgtggttctatagttcattgttttgtatcacgtacgtaagggtaattttttccccctgcatggatatccggttgatttagcatcatttattgaatagtcttttcattccccatttaattgccttgacatgtttgttcaaaatcaattgatcatgtatatgtgcatctatttctggattttcttttctgttccattgatctatatgtctgtatttccccaataccaaactcacttattatcatagatttgtcatcttaaaatttgacagggtaagtcttccaactttgttaaaacttctgtggtttttctgggttctttatatttccaactgaatttgggaatcagtttgtcaatttctacacacacaaaaaaaaggtctgatggaattttgataagaagctgtagataaaattgtggagaattgctatcttaacaatagtgggtccttcaatccgtgaacatggtgtatatctcttttacttagatttctctctaattctctttataatgttgtagctttcactgtagagattttggacatcttttatttatttatttatttaattttgagacggagtctcgctctgtcgcccaggctagagtgcagtggcgcgatctcggctcactgcaccctccgacttccgggttcacaccattctcctgcctcagcctcccgagtagctgggactacaggcgtccaccaccacgcccagttaattttttaaaaatatttttagtagagacgggggttcaccgtgttagcctggatggtctccatctcctgacctcgtggtctgcccgccttggcctcccaaagtgctgggattacaggcatgagccaccgcgcccggcagatgttggacatcttttgttagagttattctgaagtgttttatgggagttttttggcaggggaggcatta

SEQ ID NO: 66395 - DNA, 1118 bp, Homo sapiens
tgtaaagaatcataacaggaaagtttgcacagttttatgccctttatttgattttcatccagtacaatgttggacaaaaaaaatagtaagaacaggaatcctcaccttgttcctggttttgaggagaaacaactcatcatttctctgttaaatatagtgctaagaatgcccttcattaattttaggaagttcctcttattcctagtttctgagagtttttatcacgaatagaagatgaattttgtcagatggtttttctatatccattgcaatgatcatatggttttttctttattctcttaatgtgattaactttttggtttattttcaaatgtttaacattgcatttctggaataaacctaaattgattataatatataattatttttgtattttgttggatttattcttataaatttttttccttcgtattgtcttggatttgctttggtaataatttaaggaattttgcacttgtatttatcagggatgttgtgatacaatgttttgaattgcgttttcagattttggtagtaggattatggtagcctggtaaaattagttgggcagtgttctttttttcctattccatcttgcccaggagcagaaatctggaccttttaaatattttctagttctctgctgatatttcatatccttttattcactataagaatatttcaatttttgtcgacatatatgtatgagtggctttaaagtttttgtaattctaacatctggatcatcttggggttggcatatgttggttttctcctccctagagagtgagtcacattttcctgactcttcatatattgggtaatactgcatagtattctggacattgtgaatgtaatttggtggaatctctggattttgttactttgttccaaaaaatgttgatgtttttattttagcaggtagttaacttggttaggctcaaactgtcatgcctgcaatgaacattggctcagattacagtgtagttcttttactcttaggcacaagcttctttctgtttgtctcatgcatgtgtagtataggattcagtcagagacttaggttgaatttaaacagaatttggggtgcccattctctgccttcctctattctggta

SEQ ID NO: 66396 - DNA, 1055 bp, Homo sapiens
ctatatttgttatccatagtctatatcttctatgagaggaccagtttgttgcatacttattcttttacaccagaagcagagctcctgtacattttattattatatatttttgctgtatcctcctggctaaatccgggttctaagcctgttactgctaagtctgtgaaattaatggataggaaatattttctgcggaaatcttttccttttcttagtggttgactaggtgtaggtccagtagaaacaacctgtaaatgacatttaaaagcagatgtgttaacttttgggacagctgccacaattttaaaaccttttttctgattgttatttattttcaatttggggggaagaattactacaggtgaagataaaatataccctaagctgtcaattctcaaagttattggtctcaagacctctttgtacccttaaaaatctcaaagaattcagtaatacatttttatgaaaaataagcatatttttctgaacaaaaggtttaattagcattacattgcttaaatattttgtgaatttaactgctattaagctaatgtctagcctaataaaagacacctggattttcacatctgcttctgcagtgaatctgttgcaatatcgtaagtctcgcagactctggtaaactccatcatacacttatgagaaaatgagagtggaaaagaggcatacagcttagtaatatgcgaatatgttttatcttacaagactctgtaaagatgtcaggaaccctcacaattcccaggaacatgcttgaggaacttttgacctaaggcaaaaagctttagctccaatatgatcaatgtgaagacacttgttccattactggttgaacatctcaaatcaaaaatccaaaatccaaaacactccaatgagcattttccttgagcatcatattggtgctcagaaagtttcagattttgtagcattttggacttcagattttaggatttggcatattcaacctataatatgttatttatacgttagtcatctttctgaaatgaatgtttaacatttcccatttttttggcagagac

SEQ ID NO: 66397 - DNA, 1029 bp, Homo sapiens
aacattagtgtgcttttctaagtgggtaagttactgttgcagtatgccaaggagacctggacacagtgggagaaaaatgtccagtgaagggtgttcatctgagttccactgaccgagacatttagcttaaaaaaaaaatgtttgtgtgtgtgtgtgtgtgtgtgtgtgtgtgtgtgtgtgtgtgtgtgtgtgtttaagtaatccataacacgagagccttttgtggtaatgagacccagatttccttctgtgtctgtatccctttatgcaggcatgatttcttggaaaggagagtccatatgtcaaacaatgtctcattgagaacatggaatgattccatagatgctgtggcagtgattagagtcttaaatattttgtcctgtctggatcagtgggtgcttggttccttaacaaatcagctgcctcagtgattgggaaggcaggatggtaagagcttttagatcacttattgtacttggatgcgtttgaatattaatagtttgtccaacatataaatcaaaggaacatttgaatgcatttataatgttatggccattgcgtgtttgtggaatttgttgtcataaaaattatacaaaagctacagccttgagtggttacctacattttaaaaataaaccaggaatatttattatgaggaaactgggttttaattttattttcaagccccttaaaagtttgttggaattagcatctttttcacatacctgagtcttaaggttcattcgtgtttctccctggaccgtccactcctgctccaacttctcactaacaaaactattgtctgtgacctttctaacccccagaacagcataaggtacacaaacttctgctctgccttaggtgttagggacgtcattaatgcttactggaaaagcacaccccagagagctgggttttggctgtggcaggtaaaaaaatctttcagatcttgcaatgctggaaaccttaaaccttttggttttttagctaaagtgattggcaacagaatgtgacatctgaggttgcatg

SEQ ID NO: 66398 - DNA, 1032 bp, Homo sapiens
atcactcatagtttctacctatgtggctttgaccaagccatttataccacctgggtctcatttctctcttctccaagttggtagcatcagagtcagtgattgtgaaagtttctcttagttctattattgtatgataatgaatttataatgtaacaaatttataatgtaaagtacttttagtccctaaggtagtctgatgtacgggtttcagcagaaggaaagtgttgtagtagtattcaaggtacttgggtgggactggggcaagaggacacggtctctaaaaataattaggattctagttagttagagcatgactcagtagttggttgaaaattactgctgtttgatttttttccatgggtttgttttagagaacagacattccttgagaagcccattttctgttgagtactatgcaagtcatcgaggactctcagactttttatgtgctctttgctcttactagaaaactgtgaagaaactaaggtggtacacgtgtgtcatatgcttggtacattcgaggctcccaagttaaaaaattgttatatgctgggcacagtggcacaaacctgtagtcccagttacttgggaggctgaggcatgaggattgctcgagcccaggagtttgaggtcggcctgggcaacatagtgagacctcatctttttttaaaaaataattgttatattaatgtttaacaataaatttatgagacagtacagtagactggttaatcgtggaagattgggtgtcaagccaacctgtttactagctgtattactttggaaggattccttaatctctgagccttagtttgtttatctgtaaaaggaatgcaatagcatttaaaaggtgtttaacattgttagtgaatgaatgaatgtcatatataaagtactatagacagttctggacagaaaaaagtatatatataaaaaaatatataaatagttacctatttttataagactaccaaagaaaaacaaatagtctgctatggtagttaagggtagagaattcactgaggaatggat

SEQ ID NO: 66399 - DNA, 1026 bp, Homo sapiens
agagggcaggctgttgtcttcaagacctatgctgagctggagaggagggtggggccaaggcaagtcaaaaagctgcaaaactttcttcctggttttgagtttcttttttcttgatttaatgttcagacaattgatataaacctttgactgttttccggggttttgacaaagttgattttgacaatttttcttgattttttctttttagatgtttccctggagggataggtctttggctatatctactgtaccatttttgctgacatcatttggtttgtttaatgatgaaaaacatggcttataagggatgaagggacgcctagatgattttaagcaaaagagaataccatgaccagatatatacttaagaaagatcaccttgtagttctctggagactgggatatttccaaccagccttctcctagtgccgtaatgttcaaattaagtgtctttccagatttttatcaaaatttttcatgataatcagactttaaaattagttatccaggaaaatcactttgcgagcttgcaggaagggtgttccttgagatggtaaatattcttgctccagatcagttgcacactttaatttgtgaagtagcaacttaatatgtgggcaatttcaagtagcatgccccagtgtgagtagcagcagtgatttattaattgattggttgattttctcgagtgatctggtaaggccagctggttttaggtgattatgttatcccttttttccttggcagccagaggaaccacaggaattgcattttggtgaatgaattttatattcttcctctatcttcctccttttgctgaaacacaaattgtattttgttgattttgatatatacattttgggcattttaatattgataaaaatgagatgcatcttataattaatgggcatgtcatattataattgatagtacttttcttagtgttacataagttaatgatgcattttacaattgatgctgtcttagattttaggaactcttaagtgttttagctggttttatgca

SEQ ID NO: 66400 - DNA, 1031 bp, Homo sapiens
accccaagagttgccctttttacctgattgattctgatttcaagacagaatttctaaagtataaagaaattgtgatgtgttcaaaatcagataatattgggccaagatcatagtcattgcatgtggacctgattctcattagagtggaatggtctaacaccttttttgtgactaggtgcataaggcggtcatatatcctatgtataaagaggttggccaaacaggtccccaagtcttatgacctgcgttttttattattcttgcagccacatagacaggtcaagaggattatggaccttcccgttctgcatagctagtttgcattttaccaagagggaagagacaaaggagttttcagagtagcagtgagcaggctgattccttatctctgtattccctcagcctacctcttggctgagcaacactaacttgataaataaatgaatgaaaatgtctttctgatggcctcttcttgaaacaattagaataccttgagctttatttgtataagtaataagttttctgtagaaatagtgagtggcacccagaattttattggtaaaaagcttatattgaaaacataaatgaaaattccagaactctagttttcagactgctgtaattctgactcctcatttctattattacctgcttcaggcatacttaaacacctgttgacaacatcttatattaagaattacatattccttcctataaaaattctcagcttctgtttgttaatcaagctattttagtgcagagagttcagaaatgattgttgttttcactagattagcatctgtttgctttcatggcatccaattaaatctgatggccttcttccagaaatggggaattttcatatcatgcttaggcttaaatgctatggccttcatttccaactctcttctgtgtatcctataaattagaacatttcttataacctttcatcttcattttattgtaggttgttgctcagatgttggcatttagagcactcagtagacccagaccctaaacctttaaattgg

SEQ ID NO: 66401 - DNA, 1918 bp, Homo sapiens
tgatacattatatggctctgctcaaaaaaataacatggttataatactgtaatgttgcatactgatttaaccaaaaattatgatgttgaccctagtgaatggattggaggaaggggaagtgtaggtattttggaagaggtggggaagcagtgtgtaagagagctatatcctcatcttccccagtatattgtcagtagatcatttttaaagccatagggtcgagaaacaggaataaaaggatattaattagaaacatagagggaaaataccagggggaaaaagcagcctaaagtgatgagaataataagcttggaggtctaggaatggagataaagctctagggtattttaactaataaacatgtaaactaatgtttttagtatcaggcttgtagaacattttgttttttcaaccatgtatatgttttattttgataaaaaaacattgatttttaagtgtgcttttggtggcttcatttgtacaaagtctttgcaaactaacaatacaattcagtgaacatttattcaatacctgctctgttagaccattgtacaagagacagacatgtaaacatatgattgtaaaacaaagcctaatgtgattacctgctcccaaatgatgaataaatactgatatctcatagaagcacctcacttcttttgggactaggggaaggcttcagagaggatagaacatttgcactgggccctgaagggtgggagcaatctgaagaggaggttcagtgccagctgtggccagtgttgtccaatcccaccatcactggaaaaggagatgtgtttaggaaagaagtctggtggagctgtgggaggctgttttgacttctctgcctctcctagacatttatattagtcatttcttcctgaggattttctcctccctgccctatcacccagacacccttaattttagtattgactttaccatgctgagttatattgtggttctctccccactggcaccctgcctcttaaacttttggtctaatttagagaaggacaagggaagggaaaagaaaatattggtttcacctggccagatgtagattcccgaatataaagataggaactctctttcctaacctcataggctactaggtatagctgttatcttttttgaggcactaagattaaactgtcattttcacagtttgaacgtaatttttagaaccctcaagagtaatataggacacatctaattttttcaaagaagtataattgtttcacaactataaaatatttctctgtgaagatgcttttcagaagtaactgggcaagtcattatggtgtgtgtacatgtgtaacatcctccaactttagaattttgtgccctggatttgttttcttttatattgttgggtccaaaagaggaaaggctggcttagaactaaatagcagaactaaaccatatgttttataccaaattagaaacaggtgaaggttgttaaaatccagcaagcacttagaaaagcttgagacacaagtttgtattaaaggcaggtggttatatgtacaataaaaaacagtcaccagcacactggctgattgatacatatgtgattgatctttttggataaaaacaaggaggagttaataaatcactgcacatagctataaagatgtttgggcttgaaagcctagcctgtaagagcaaatgtgggccctgaaggaaatttatgaagcctagatccttttagctttacttaacagctaacatctgactgacccagggggaccatggaaatttattgctgggccattcaaatatttaagctgttgtgtgatgcagaacaggtaaagattagcccaataacaaatatgaggctataaaataaaatgagatttcgatgacttgtaagtacttgtcagaggtcagctccaaatgactggtcagaaatggt

SEQ ID NO: 66402 - DNA, 1039 bp, Homo sapiens
caggttcatgctattcccctgcctcagcctcctgagtagctgggactacaggtgcccgccaccacacctggctaattttttgtatttttagtagagatggggtttcactgtgttagccaggatggtctcgatctcctgaccttgtgatctgcccacctcggcctcccaaagtgctgggattacaggcgtgagccactgtgcccggccagaaatatacaaatcttaaatgaactattctgagttccatcaaatacataggcatctgtgcagtccagcacgtcaagatacagatcattgactctcccctgaaacttccctctctcttttttctagtgaatcactgtctttcccagtcccctgcttaaccattgtttaaccgtaagcatgcagtatgaacttctttacataaggcttctttcacttggcatattattgtaggttctttcatcctcaacacttaggtggttttcagtttttggctattgtgagtaaagttgctgtgaacatttttgtacatggtatttttgtgggcaaatgttttcatatttcttgggtaaatacgcaggaacagaattgctacatcataggataagtgtatgtttagttttataagtaactgccagacctttttccgtagagcgtaatgtacattttatactcccactcaacaatatataagagttctggttgctccacatcttaagtctcttttaatctgaaggttctctccttctttatttttccttgcatttttttccttgttgtataagttaaacttactctgcagatccctgtaaagttcctcacattttgaattttgctgatggtattaacatgtttatctttcccctgtgttacctataaactggagataaaaacttagttgatcatattcagttttcttggcaagaatacttcataggtgttactgatgctcccttttatatcacatttggaagcatattatgtctagttatcttttttgtgtgtgtaatgttaaaattgattagtacccctggccactcttagtctaatctgc

SEQ ID NO: 66403 - DNA, 1492 bp, Homo sapiens
caaacacacttctttcttctcaagggcccaaaaggatggtatgccaaaagatcatataaagtgttgctaagaataccacagcttgctttgggagcaagaccaagatggaggctatgtgcaggggaaaacttagcaaagtcagccctcctcatcagactctcaactctagggcctgtttgatccccacttcccaagaggcctctgactttattattaactgaaccagggccacaagtatgctgacctagttttactcatctgagaaatggattgcttgtagtaattgtgtatcctctccagctttatatatgctctttgaaaattgagagaacaatcaataggttaactactctgaatccatagggagcaagtatcctcctctgtggattttctttttttaatcacactggaggcagttttaaaaggaggggacagtaaacttcttaaaaactggcttttttatatttcaaaatgtattcgggaagccctttaagcagttagaaacttttagaacagttgtgacctttcactttttttgcttcagctctgtctgttctgtctctcgctgtttctcagggaagctttcattttgtctttgaccttactgccatcactttttcacgttttgatttgtaacaaatgaaagaaccattaattgttatggctcctaagcgagcattgtagcaatcaggtatttccagcttttgaaggtttatttttatagacatatagactaatatatgttgtcaaaggggagtttgtcttctcagccagttccatatgtacccatcttttaagatgtgaacaaatcatactattaaaatggcctcacctcagtaatttataagccacattagtggaggtggatgaaagcattggcatgtgttaaagtgccagagaaaaaggagtgaagtcatttaatactgcatccataacttggttgaggatttgaatagtcaataggacctttcatcacaaccagaagtagtagtaaaatcacttttttggtagaggaaatgacagaatttagtaatatttgttacttcagtatttgggatcagtccagcccaagttttgaaagcacaagcttagagagacaggccttcaagtagaaatcctcaagtgttgtttgaagagctgagagcactggtaaggcctgcttgccctcttcatgtcactgctgtctaaaggtgtgtgtgtgtgctggattaagtactgagagtgagtgaagcaaaatgccttgttttcagcaccatatattaatatttgttaagtgccagcctcttcagttagaaatagccttccttcttggctagcatgtaatgctataggaatgggcctgtcaaaattcaggtgcagtataattgacgttgactttaaaaaccagatcctgccataatttcagttagttcataagtacattatattagaatttgtatagagaacagaaatttgcttttaattctcagagcataaaaattaaatggaaaac

SEQ ID NO: 66404 - DNA, 1050 bp, Homo sapiens
tgagagccatcattagctattaaccaatgtgctagacatttttaatgtcattgactatgattactgtactctttgattgctgaaagtgtaaattgataaaactttttatctcagttggacattttttccttttaaactgaaactacaaatacagtgccaaaaatatatttccaaatgaaaaataaaacaattgtaacttacatatatagcttattttagggcacagggccctttcacatatattatttcttttatcctttgcagaaacccttaaagtgttggtattattatcttcattttacatttagataaactgagcctctgaagggtgagtcttttgctcatagtcacacagctgttagataaacaaagaaattcagaccctaatatctgactctaagttcaggagaccgtacttgctgctttccttttgtcagacaggaagaaacatcttacataacaggcttccctttttttctgtggctaatagctcaatataaatttagcaccttacttggcttaccatctttgataacatctatctcttcctttatcctagttgttttaaaagattcactttagcctttttacttgttcagtaataagattagccttttccaaagcaccaccatgagtgacatcttttgctgggaggaaaatatttaaagaatgtacctcaactgaaatgaaatatgcagtgctagctagttcagagaggatggcatataaattctcactatactttttatgattaagcatcatgaaatgaattatgagctatatgaaaaatgaatttggtctgattttagttggcatcaaagtgaccggcatagcttaggtgtaagctctttaaagagatgagctccaaaaaaatggtttatattgcctgattcaaaacccaaagtctctagattttaggggaaggtagcacagtagatttgaaattctaaattttggaacttttaatgatgttatgttttgctaatttatctttttgaaagagagactactttcaccaacatacccacagttatctgtggatagacccat

SEQ ID NO: 66405 - DNA, 1015 bp, Homo sapiens
ctctgttgcccaggctggagtacaatggcgcaatcttgactcactgcaacctccacctcctgggttcaggccattctcctacctcagcctcccgagtagctgagattacaggcacctgccaccacgcccaactagtttttatatttttagtagagacagagtttcaccatgttggccaggctggttctgaactcctgacctccaatgatctgcccgcctctgcctcccaaagtgctgggattacaggtgtgagtgaccgaccgcacctggccaagttagtctctaatttttctaagccttggctccttctaaaataagaaacttgaagtaaataatcttttcatttccttctaacagtaatattctacaatttctcccagtctagttttgagcacatgtatgattttaaaaaaaaacaataataaaccggttactcttaaattagaggtgatgggagggtagattgatcatttaaaaaaataatttgacattatgcagtgaaattgaagatttgtatatgagaatgtttatagcaccactattcataatagctgaagattagaaacaacttaaaatatatcgacaatatgttcatcattaattaaggtatatttatgtaatcaaatactgtgcagccatgaaaccatagcaatgatagggacgaatttcaccagcatgatgtagagtaaaagaaccaaagcaaaaaaaaaaaaaaaaatccacaatcatcctctatttatgtatagttcaaaaccaagcaagattaaacgatattatttaggaatgaaaactatacaaaaaaacaagggtagtgactaactacctctggaagtgagaaggggttataatgagaaaggggcttgtggaaggcttctggggcaccagcagcattgtatttcttgaccgagtggtggtaacacaggggtttgctttataatcctgatcctttaaacaatgtgtatgtgtgtttcatttatttttctatatgcatattatatcttgccattaaaaaatc

SEQ ID NO: 66406 - DNA, 1048 bp, Homo sapiens
tgtcttctctctcacgtttcagcctcaactcctgcaaccacttaccccaaaacctccgccactggccctttatgccaggaaagctgaacatcactgaaaggcccatcttctgcttttgcttttatattccctttgcctgaaatttccttccccttttgtccatgtggtaaactcccactcattctccaggatccaaccaggccaacttctcttctgtgaagcctttctttgccctcctgaacagagttatcacccatcttctattcttcctgctcaccttgttttaaaaaacaagtaatcgatcaaatatgtgaatattcttacatttctgttgttattttgcatgtatgtctcccctactaaattaataagttccttaagggccagagactgaggttcattcatctctttatccagacacagtagctagcacataacatggactcaggaaaggtttgcacatgcatgatagactgaaccagtgaccttcctgcatggactaaaaacttaagaactcatctctgaaaggaatagccttccatttaaaaggcaaagggagttcacatttgtatcaaatgaaattacagtcttacttatagatatgcctggctttgcttgtgtctaggaagataatgcagggctttgagaagtggggtgagattaaggagaaattatacagtaagcgaacattttccccaaaatatatgcctgtggtaataagttgttatatgttgagtgactttttctcttctagtcagagagctgacaaatattttcaaagtgttatagtgttttctaagtgttattctttcactgacaattttatttaataattttagatacagtagtggctctagagctaactgaattactggcttatatgtaattcagctagtatattcatattgacagtataggagagatgattaccagctcacaaagaatgcatgacgcgatgccatttgaagaattgaaaatggaaggaagggggtatgtgaatttagataactcaaccctagagttctggcctattagccctttggtttta

SEQ ID NO: 66407 - DNA, 1028 bp, Homo sapiens
caagatggtccttacccttgtttatacaaaggggagggctgaatggaagctggcaatatctaaaaagaaacactggttttctggtatatgtccctggagttggtgttagcaaaccctaccagggtctgggggtagaaaagaaggctagatacaggggtctttgaaatatcctcattccacagttggtcactcttagtcttctctaagtttagggggcaagagaacagtaagtagatgaagaggctaccttaaataccatcgtaatttaagtgggtgtgcatactcatacacgtgcttatctatatgtcaaatacccagtaagtggaaagtactgtgaggctgataatagtatcaaacatttacatttcctcttttagagttcaaaaaaataacttgtttagtggttcatttttccgaagcttataatctgccaaaatatctttaattctattttttcaccttcacagctaagatatcaacatggactagggactccagacttgcggcaaacccttcccaacctgaaaaacttcatggagcatggactaatggtcaggtggtgagtacctttatctctgataaccagaaactgtaatgtggataggatcctgaaaatcttttctgacttccacattgctccacacctgcctctgagttttcttctgtaatgagatatgggaggaaaatgaaaggcgccatcacagttggggagatctaagctcccgtctggctaaggaggatgtagcccccttggagggaggaggggccaaggggatattgcttgaactttgggaaggtggctgagcaaggagcccttgagggcattgctgagacaaactggaagacagccagtatgattcatggtaagggagacccagagccccttggacctttccaaagaacaggtgaagggcctgattatagaatgagcatcaggaccatggctgtgagcattaaaggaagaaagcagataaggaataggtcagggggtcaggacttagtttgagaccagtaggtacattctgaaa

SEQ ID NO: 66408 - DNA, 1052 bp, Homo sapiens
agtttattagagagctgatggtaggtcagtgttagtagtatctttcaaagacttcatctcacagattctgtcactggccctgggagtctaatgcatcctttagctcccttccaagtctagtttttaaactctgaaagcattctctgaccagggttttaatttccctatcgagttccttctgggggctgggttctgtgagattgttgttcctctggtttccctggcaaaggcagaggttttgggtttttttgtttttttttttcattttttccctggttttcagcataaacagtttattattcccaagtatcaagtgttgtccagatactccgaggggtccccaggtatcattcctggcatctctttcctgttctttccatgttctcgtgtaggatgttacttaagccctatataaatgacatcaagatgggctatgtctgtttctacagaccattttacagtcctcataatgttggttgcctgactgtgattttactacattaatttgtatgatgatttcttaaagtgaaagctgatgagtgaagtggttgacttgacccctcccaggacctctctttatctccgtggaggatcactgtgtattccctgatcccatggagctcagcctggagcctgagctggcctccagatgggctctcggcaataggcaccccctcatcctctgtccactggcccaagctgggccatggaggcctgatggccaagacctcacatcacaaagcctggtgaactggatttcttcagcttgcttattttgtcttttgcctgtggaactttctctttcaccaattcatctttccatcactacttggtttaaataaaatccaaaggctgccttgttcagttatacctttttatactctgtttttatttagacagactttggtaggaaaccttccaagcaaagccccgggggaaaagtgaccattggcacagatttcagcctgtgcttttggcccaatattgtttctatttttattttgtttcatgtttttgttaacatccagggcaaagattaagtacttacactt

SEQ ID NO: 66409 - DNA, 1120 bp, Homo sapiens
tttcttttctagggcacttcttgctattgtaatttgaaaatgtattatttgaataatgagggatgtctttctcctgcaggactggtagctccttggaggaagggcctactggtcttgcatctgtctccctaccccaaggccaggcacatatgggaactatttgttgggtgtgtgtagtttcaagttctgcctctacccctgcctagtggttgcccttctgcaagccacttaaccctctatgcgtgtttcctcatctgaagcacgcaagtcaaatgatctgtgtgtgcctccctctgcctctggacccaatctgttcatatggttgtattgaagctaatttcatccacatacaagaatgtctagagctagcatagtgtataacatagccatcatttccaggatgtagatactctatttccattaactgattattatttattatttcagactttaccctgctttctctatagggtttttgtaaagactaagtgaaatgatgtataggaaattacttcagaaattataaagtttgtataactgaacaatgattgttattgctggcccaaagataccctcctgagaagaaactcagacccaaaagacagcattgcagaccaagtattgtaaaacatatgtgtggctagccccatcaaagaatgtatttcccaagttagtttttcattttaaaaaaaaaaaaggaacccctcaaaaattttttttaatttttaaaatataaccttgactctctctctctccctccctccctccctccctccccctctccccctccctccctccctccctccctctctctctctctctctctctctctctctctctctccctccctcctctgccagtcctctaatgcaaggtggttagcatttgggtgttggcaaggttgttggtcatgaaatccttctcactgcctcactgagcatgggcaagtcatgtaaattctctgccagatgaggatgcctgcttttcaaagctaaaataagaattgaattgaatactaaaacaagaatgagattatggatagcccttcagaaatatgaagttagttatatccttcacatgtttttcttgctagatccagcctgtccagttacttcacctc

SEQ ID NO: 66410 - DNA, 1067 bp, Homo sapiens
gccatctgtgaggtagatgaagaagcagcatagtggtctccttacatctaggcctaactgtccctcttcctgcccccgggtaccacagtccacctttagaccctactgtcgccccatcttctccgtggatgggccatgcgtcctgaaaacaggacatcagattcactggttctgtaacccagtagctgtgacgttccatctcttctaaccagccatggccttcccctcctctgccatacccttaatgcggccctcagattagatgaaaaacttgctcctggtggatcccaagggaccctcaaggacctcgaggttactgcagtcagatgccatctcatcccctgtgggggccaaagtttttatgtgggcagatgctgtggtcaggaactaggcatgctttctggcaatgcactcaccagacaaaaatcccttgatgtaaatcccatgttaatttattaaatttcagtcagaaggtcagcatttacatgacagaatgtatgtagagagttggggtgtctggtaggcaaactgcaaggcagttgagatagttggattaagaggctagacgagacatagaatactattggtatgtgtgcaatttcatgaatattaaattatgtttcgaagtccagttgtcattcccgcattcagatttcatttgctgttgctttatacgttacgtacccaaggacattgcctcagggttgcaaactctttaaaggaaaatttatccatatatccatgtattatatagaagaataaaaattgagtttacttcacccgacctgatttttttttaccagcttggaaattcctcttgaacctacgtctccatatgtcacatcatgacaggactagcctgaacaaaagccatgtctatctaagcggaggctgttgacttcattcagtttgcatattgtatatagcaacacaaacacttgacaggtatatactccagtcgccacatttgtcctgcataacagcttcactcacaggcctcaccgtcactttattttgtgtccaagcattcctgggctcaagtttaatgtatagctacattgttgttt

SEQ ID NO: 66411 - DNA, 1037 bp, Homo sapiens
tgcagggtttgtgggtcctctactcgttcttgtttgtcattcatccatccctccatccctccaacagcagccaagcccgcccctggagctgcatgacccagtacgggcactgtgaggcttagagacccttagaggtgacgggggcaccacccctccatgtccacatatgagaactgaggtccagaaaggggcaggagggagccctaggatgatctgagacagccccagagcctcaaactgctcagggtgacctctgcccctgccctgggtctgccggggtctctcaggcttggggtgagtccagtgggatggggtccaggccaccttacaggctgggagtaacccagctcctgccgtatagctcccattcagggcccagggtggggcgcccaagcagggacagcgtggggagggggtggggtgtggaggaggtggggggttgtccgggggtggcgaggctccgccccatggcgctgcagcgcacatgatattatctctggcctgggctcagcctccagcaggatgcggctttcaacaccttcctcccctcggacaggccggggctttttgagtttctcacacatggatggaggggctgggcctgggcagaggaggcccccagctgaggcgcccccaccctgagcccccgtcatcagtcacagcccctcgagtgagagagggaagggccgtggtgcgtgagaggcagagggttgcatgcatggttcccctgagcgtctcccccaccccctcccctctgctctgttgtccataatcctgggcgcctgttcaaggaattctccacccgtgtgttagtgatttatttagactcggctcatcccgccagcctgcccggcgggtgacaggcccccactccccacccccaccacagaccctgggaccattttcatctccagcacggcaggcctggctctgctccaggccactccagatggtaggggctctgcttgagtctgcaggctttcatgggaccctggaatctcacttttgggggcccaggtaaccgcttcatgttcgtg

SEQ ID NO: 66412 - DNA, 1044 bp, Homo sapiens
cctgacccgcgagctcaggcggaaggtgaccccgtggcctgcgcggctgtcccgggcgctcgtacaagggacaggaacagtccgtcaggacccagaggctcgggccaggcgctgcctccccgcgcgacgagcttgggcggcggagggagagccttgggacagccggggctgcaccgaaagagctgggcggggctggaggcctgggtccccgtccgctgtgcgacctagggggctcctcctctccctgggagaccaggctggacacagatcccccgctgtgagtccgcgcgcctccgtcctcttgcagcccccgccccctccccacccaggaatgccgggtgccttcggggggcggcgcactttgggagaggggaagacggtgactggagttttgattcccccctccatatccagcggatatttttctcgttctgagaagtgcaagaaacttgcaggaccaggaagacaaaggatttggatacaggctgggtgggaggacgggactgggttacaccgagaacccctctgagacccccagccttgacggcatgtttgtcgcaggcgcccctgtgctgggcgctagctgcggggctctgcggaggaaaaaaactgtacgatccaggcttctcctcgccttcctgtgggttttgccgacaggctccagaaaacagtggggcttcccatctctgcgtgctgactacccacgcgcaggaacgcgccacgcaggtggcgtcgcggtgcaaatagcagaggggcgctgagccccgcaggctgcagggagacggggtcctcgggggacgcacggcgaagccccattcctcgttcttatggaaggggacaccgaggctggggtggctgagggcttgcccaagctcacagagccagataagaacgtcccttttctgctccagcgcccccactaccgtgggcgcctccttttccaactccccaaacccttagaaaggaatccctttgtctctgctcctcccgaggggagaggggctggggctgtgtctgactccgggcgaacgccaggtgttggta

SEQ ID NO: 66413 - DNA, 1047 bp, Homo sapiens
actccccacctctgctttgctatacccagaggggctggctgtgagaccctccctctccaagggcttcagagccacctttcacttcacctccagagcctgccccagctctggccttgcatttccgctgtaagccatggcctcagcccttccattcctcctttcctggtcttggcttcaccttccccttatcccctagggcttgttatgccccccaaggatggcgattccccaccctgcttccaacccaaagcaggaaacattcctcagtgaacgggtcctgggatcctagagctcttgggttcctcagtgactgaggggcagaggacagagggagtatagaggtagaattgtgttactcctcacctcccacaaaaaatacgttgaagtcctaacaccaaatacctgtgaatttggccatacatggaaatggggtctttgcagctataactagttaagttgaggtcatactgctgtagggtgggccctaagaagagaagacagagagacacagggtagaatgccatgggacaacaagcagagactggagccatccagctgcaagcaaaggagtgccaaagattgctaactaccaccagaagctagaaagatacaaggagagctcttccctagaaccttcagtgagagtatggtgcagccaacgccttgatgttggacttctagcctccagaactgtcagaatacgttctgttgttgtaagccatccagtgtgtggcactgtgtatggcagcccttggaaagtaatacgagaccgtacagctggctgcaggcttcacccagctgccctcccggcctgagtgctctttgtagtgggggaatcagagctcgtccctccccagctcaccactcttctctggctccctgtttcactggcttccacgcgccacttcatagctgatccagccaccttctctggcatcctctcgcactgctgtctgccttctttcagttctgggtaccccaaatgatagctgtggttctctcctccatgtctttgcttatgctgtgccagaaaacacatctttaccc

SEQ ID NO: 66414 - DNA, 1850 bp, Homo sapiens
tgaagagaaggaaaacaaagaatacctaaaatctctatttgaaatcttgattctgatgggaaagcaaaacatacctctggatggacatgaggctgatgaaatcccagaaggtctctttactccagataactttcaggcactgctggagtgtcggataaattctggtgaagaggttctgagaaagcggtttgagacaacagcagttaacacgttgttttgttcaaaaacacagcagaggcagatgctagagatctgtgagagctgtattcgagaagaaactctcagggaagtgagagactcacacttcttttccattatcactgacgatgtagtggacatagcaggggaagagcacctacctgtgttggtgaggtttgttgatgaatctcataacctaagagaggaatttataggcttcctgccttatgaagccgatgcagaaattttggctgtgaaatttcacactatgataactgagaagtggggattaaatatggagtattgtcgtggccaggcttacattgtctctagtggattttcttccaaaatgaaagttgttgcttctagacttttagagaaatatccccaagctatctacacactctgctcttcctgtgccttaaatatgtggttggcaaaatcagtacctgttatgggagtatctgttgcattaggaacaattgaggaagtttgttcttttttccatcgatcaccacaactgcttttagaacttgacaacgtaatttctgttctttttcagaacagtaaagaaaggggtaaagaactgaaggaaatctgccattctcagtggacaggcaggcatgatgcttttgaaattttagtggaactcctgcaagcacttgttttatgtttagatggtataaatagtgacacaaatattagatggaataactatatagctggccgagcatttgtactctgcagtgcagtgtcagattttgatttcattgttactattgttgttcttaaaaatgtcctatcttttacaagagcctttgggaaaaacctccaggggcaaacctctgatgtcttctttgcggccggtagcttgactgcagtactgcattcactcaacgaagtgatggaaaatattgaagtttatcatgaattttggtttgaggaagccacaaatttggcaaccaaacttgatattcaaatgaaactccctgggaaattccgcagagctcaccagggtaacttggaatctcagctaacctctgagagttactataaagaaaccctaagtgtcccaacagtggagcacattattcaggaacttaaagatatattctcagaacagcacctcaaagctcttaaatgcttatctctggtaccctcagtcatgggacaactcaaattcaatacgtcggaggaacaccatgctgacatgtatagaagtgacttacccaatcctgacacgctgtcagctgagcttcattgttggagaatcaaatggaaacacagggggaaagatatagagcttccgtccaccatctatgaagccctccacctgcctgacatcaagttttttcctaatgtgtatgcattgctgaaggtcctgtgtattcttcctgtgatgaaggttgagaatgagcggtatgaaaatggacgaaagcgtcttaaagcatatttgaggaacactttgacagaccaaaggtcaagtaacttggctttgcttaacataaattttgatataaaacacgacctggatttaatggtggacacatatattaaactctatacaagtaagtcagagcttcctacagataattccgaaactgtggaaaatacctaagagacttttaaaaataggctttcttatatttgat

SEQ ID NO: 66415 - DNA, 1563 bp, Homo sapiens
tatgctctgtgtatctcttccatgctggtactttcaccttctgcttctcagggatttctcatcacttttgtgttgagtcctgagattcagcaacctccttcttatgggacatctccagggttaaattgggaagtaagatgatttgtgtcctcttgaatttaactccaagtgccatggtgtatttttgtgcctttcattagccagtaaacacttataacccaaagttacgatgatttaggtagaaaataagcaaaatgatgtattcttttttccctaagactttgttataaccttggagtcattaacagcttattctggttttctcattgtctgtttgtttgaagaatgtgtactatataaagaatttatgctcttgaaagaattaaattgactcagaataggcatttgtatttgtgagtctaagatgatacactagaggtcagttttttaaagatgatttgtttttttctttttttttcttgacatttagagtgaagatgaaatcaggacactgaaacagaaaaaaagtaagtgatagtgttaatgactcaacttctgaatgccttttaaaaaggccttgacctggtaaggacaaataaatatgttctgtgttgaaaacctaccttgagaatgaatgtaggagtgtgctcaattttgtcctgtgttttggaattatctatgagactaaagtctaattttagtttgtctttattgagtgctgcaatgccacacactatgctatatgcaggcctcatggaggtgacgcctcctctctcagtgtggtaggggtggcaggcacacagtgctccattgtagggaaggaagggcaacagtagaggcatgcactgaatctctttttctgtccacccagttgtggtatgtaataaattctttgtaaatgtttaaggactaaatgctgtgggggcacatagtgccattgtgagtagtggtcacaacagcctttctggaggtgctgatgtccgaattatgtcaccaaaggacgagggctagaagctgtttttcttcttgtcagttattagttactcctcctcctctgtttcttcctcctattgctgttattattaacgtagcattttattgagtgcttactgatgccaaatcattgttctaagtgctttacttgtattaattaatttaattctcacaatagccgtgagataagtactgttatttccctctttatggatgaggagatatggacttgggcaaagagagggaaaggtattctgtgcacgaaacagggtgctgttttggggaactacactcattttagtgttgttaaagtttgtgataacccattatggttagaaaatagcctagagaggaccccagaggccagaacttgcagacttgtgggctattagcaatagggaaccactgaggggtttataagtaggtgataacagggacctgatttccatggtacatagagtactctgttggattagaaaaggtaacactggaggcatggaggctagttagactgtcaactgaccaaataaaagttgaaaggccttgaattaaggcaatggtagagagagt

SEQ ID NO: 66416 - DNA, 1391 bp, Homo sapiens
ttgtagagatggagttttgccgtgttacctaagctggtcttgaactcctggggtcaagccgtctacccggccaaggcctcccaaagtgttggaattacaggtgtgagccaacattcctggccaaaataaatatttgtaaaatgtcatttttttcattcatacattctgttttctgatctataatatctttgctttatttgcaaatagaaaatcaatttgatttgacttttaaaaatttgttaaaatgttttattcctcccctccttatttaataattagtaagatatcaagaattgactgtgtatgtgtttttgcttattttggggacatttgctcggtgtgaaagatgggggagctttgaatataataacttgtactcccttcagtgattgtgtccctaaccaattcctcattcagcctccctagtagactcaggatcacgagcccagcactagaagttgagtgttactaggaagtcagagaatcatctttgtgttttctattatggcatggaattgaactagaaaatattgactctgaatagaaattcatcccaaatgtgtttaacaactctttgggtacaacccaagatagtgtgttccatttagatacatgttttcccttcatgtcttcccaacctcccttccttgggtgaacaaatttagaagttgttatttttgtttggcatgttctttgagcatgcttagatattttgaaataatcactgcttcaaagaaagcttatttaaatgaagtatgtcttatctttatcattccaaattcaggaagaaattaaaggcactattctttggactgtctgaggggagtgtaatagcagttatttattactgtccctcttaataagcttcttgtcttttactcagcctcctcagggctggcagtaggaccgttaccatctaagtatgcatccagcttctagccaagttggatgaaattaacaggaagtagggtagagtatgatcattctttcataagatgattaggacttgaaagagatacagaaatacctagattagcatttgcaaaaatgtgattatgtatatcagtatcacttgtggcgtgagagttggtttcatgtggcagatgaatcaatttttattttagaagttttgtagtatgtgttaaaaacatgtttaaaaacttttttaaaaacataagataacatcagatcattcttcctacagttttattacttaagacagtgttaactaaaaaatgagtagattgtgtaaaaatacagatggtaatataactgaaatggcaagcattgtgatcattagtatgtgaataatttcattttaggaaatgttgatctagttcaataccagaattttattcagaaaaagaaactggggcccaaaaagggaaagt

SEQ ID NO: 66417 - DNA, 1128 bp, Homo sapiens
gattacaggcgtgacaacacgcccggcctaattgctgattttctacagtgacagtgttgttttgtatgcttgttgaagttgaaatcctgaagggaatgttaagctgtgagccttgtggctgtgcatgcagctttctgcttgttctgctgatggttgaatcttctctgatgttttgggagttggaagatgcaggtttcagttctagttctgctgatgattttgtacttccctccaaacaagttacttcttaaccttgtctgtaattgaaatgttggtactaaatgacttctaaggttttttccaactgttattttgttattaatcaaattctccaaattatgttctcagggaggggagcaggaatccgttgttattaatgtatgtttgccttaaaactgaaggctgaaatttaaatgctgagctcattttcataattgtattttggttttatttatagatgccagaagtgggtggagaactgtaggagagcagacttagaagataaaacacctgatcagctaaataaacattatcgattatgtgccaaacattttgagacctctatgatctgtagaactgtgagtaatagaagagcttggtgtctctctgtttgacttgatttctctctctcactgtgtctggttggaaatgtaagtatttaccaatgttggaaggtattcctatatcctgccactttaagatgaagacagatttggagctgaaaagtatctgttttgttcttaaaatcctgattttgccgggggcctataatcccagcactttgggaggccgaggcaggaagaccacttgagctcaggagtttgagaccagcctgggcaacatggccagatgccgtcgctacagaaaataccaaaaaaactagcgaggtgtggtgacgtatgcctgtagtcccagctacttgggaagctgagatgggaggatacttgagcccatgacgtcggggctgcagagagttgtgttcatgccactacactccactctgggcgacagagtgagcgcttgtctggaaaaaaaactcaaaatgattaaaacaaaacaaaacaaaacaaaactcttcggttcctggtgccccatttctactcacccaaggtaactactttttttttt

SEQ ID NO: 66418 - DNA, 1015 bp, Homo sapiens
cagtgccagaatgagtgaccgctatttagaacaaaggattagtatcaaattttgcgtgaaattgaacaagtctgcaagtgagacccaccatcttttaaaagaagcttatggggatgaagtcatgtcaagggccagagtttttgactggcacaaaaggtttaaagaaggacgggaagatgttcgagatgatgcccgaagtgggcgtccagtcacccaccgaacagatgacaatatccagaaggtcaaggacttggtttgttcaaacaggcagttaaccgtgaggatgatggctgaagagttaaatttagacaaagaaactgttaggctcattttgaaagaaaacttgaacatgaggaagatttctgcaaaagttatttcgggtgttttgaagggtgagcctaaaccacgaaaacttgactttcggtccgatctttcaaaggaaactaggaaaaatagctcatgtttgaggaaaaaggtaacaggttctgaaacatggagttatctccagggtgaagctggtggggaaatgcccctgccggtatcccatcccagagtccactactctgccagtcagcttctgcaggcgtcatcttcaacaagccttccccccagggtagctgagaattggttcaccccatggtgagaggaatgtgagttagctgaaccagaactaggatgctgcctcactgttaggcaccttctttggctgctcacgtatttttcagtcttcaccactcctccctatgtgccatggccctcctcattactctttgctggactcttggaccattttccttgctgttctccataactttgaaaaacttttggctgttcccttctggtatttgcttgttcttgatttcttttgctcaacaagtttggatttcttctctgcccagaccttagcttgttgtggctgtcctgttcctttgttctcaaccttctgcctcagaggatcatgccagtgagaagagaggaacaggatctcctggaatctgtatctctgtgcccaggg

SEQ ID NO: 66419 - DNA, 1010 bp, Homo sapiens
tagtaggagagatataaaataaacaaatgaaaaaataaaatattgggttataaatgtcaagaaggagccagctttggaaaatttaggggaagaactttctatacaaagagaacagctagttccaagatcctatgggggtaactcctgtttgctctaggaacaaaaggaaggaaactgtggccttgtgcatggaaaatgctttcttctttatctgtaaatgaaaatattcttatgtgtcaggatgtagttcaagcattgcctctttagggaaatctatcctgatttctcaggtagaagtgaccactatctcctttcctcctcaccgcccctgagtagacttctgtgagcacacctgtgacactttgccattcttaccacattaaatcattgtgacttcctagtggacctcagtctcattcaagggcaggactgagcttcctaactaaatccctaatgttcaggatagaacctggcacagagtctgtgatcagtaatggtttgttcctagaatactgaactgtcacccagcaccctatcagagcctcactagtgatgcttatttggaattgaaaacaatttattgatcagtgccaggccctgtgctgggtactttccaccctgctcattcttataagtctcacagtcaacatgtccagtaagtatcactattttattctataactaaaactcaggccagactcagtggctcatgcctgtaattccagcactttgggaggctgaggcaggaggatcacttgaacccaggagttcaagaccagcctgggcaacagagtaagaccccatctctacaaaaaaataagaaaaactgggtatggtagtgcacacctgtagccctagctagtcgggaggctgagatgggaggatcacttgagcccaggaaatggaggctgcagtaagctgtgattacaccactgcactccagcctcccaaagagggagaaagttagagaattaaagtgattatctgaggtggctcagtaagaagaaaca

SEQ ID NO: 66420 - DNA, 1021 bp, Homo sapiens
aggagtcaacttgccccaggttggtagtaccacctgtttattaaatgaaatgccagccactatgaaagaactttatatatagtgttctttaatacgcgtaacaaactgggtggtattacctctgttttatagatgtgtaaagcttaggcttaaccagtaagttgaaaagttgggactagaaacctagaggtgtctggctctaaagcctgtgttctttccactgtgatagttcaaatgacttaattcttgatttctcaaaagttggaaagtgtggtggtgagaaaggattgtaaaatagtaatatctttttggtttacttcttagcctgtgactggatctccaggtgagtggccccttgaatgtactttggtactttggtaatttgactttttttttttgttctggtagggaggacaagctctttggggctaccaaacagaagcagcaatgcctgttgtgtggccaacccttctggatctcagcagggatgaatgcaaaagaattcttcgaaaattgggtatgacgttcattgtttgttttttacctctctctgataccttttttccctttctgcctaggtcatagctgtttgcatggatgtcatatctcacgctacatcagaaattctttggagatacagttcccatcttactcattgttgtttccctcagtgcctaacatagtgctttgtaaatagtaggtgtgtgaattgtaataatactagtagctaagatttattgagggctacttggctattctgagtcttttttatacaacatctaatttaaatattttaagaattagctttgtcctttgaaagcctaaaaggtaggtgttttttgtttgtttgttttgtctcgtctccattttacagatgaagcttagaagccaaggtaatggtgatagacatggagtcagtatttgaaccagggagtatgctttcagtctcactttaacatactcttaaccttcatgattgtatgtgtcaattacatactatttctgaattctaagttgatgt

SEQ ID NO: 66421 - DNA, 1060 bp, Homo sapiens
gctggagtcagaatattttgttccaatattttttccattgcatactatttacagtactttcgattacacaggagggaggtagaatatagtttgaattcttaggcaagcctaaggaattattttaagagttgattaatgaagataccttttagtaatgctgaaaacgtctcagccttgttacatcagttggtgcctattcccagttgttggtatcatttgtgttatatgttttttagtgacaatgtgtgaaacaaaatatctactgttagatttttctacctaaacattttatatacatgacttctgtgaggcaatgaaaaacaaaatataaaattataaaagtcacattttaatgttattagataaaatttttgaaaggaatttaaaacaatatttttatttaattatttttagtttttttgccctgaagtttcactatacatagccatagtattaaaatattaaaggcctatcttgataaaataattttcttcttttagaattggaggcatatgctggagttatcagtgcacttcgggcacagggggatctcaccaaggaaaagaaagatcttcttggagaactatcaaaagttcttaggtaaattattgtaaatgtttgtgagactctagaaatttcattttgggggattttattacttatcactctcaaattaagtaactgtcaaattaagttgaagaacagaggtgttcaaattgttggtgctaagagactccatcccagttgtgtgctctgttacagaaaattgtataatttaccatttattgtgtaatccagaatgaatataatccagaatgaagagcgtgcaaactcttcagaaagacttgaaggcagtttatcttacttttagcccacctggataagggaggtgcttttgacataggtgaaggaaagaagagcagtaactggatgtgatgatctagagtggcatttgttggagggaagaggtgatgtgaggaagatgccttaatttacataaatgggtagtgattatgtggtcatggccttaaacatagtcttttttaagtgaaaatatgga

SEQ ID NO: 66422 - DNA, 1488 bp, Homo sapiens
ggaaaggtattgtggggcaactagttgtaagttgatgcatcagtttcatacttaaaggataacatttatttagtctccttttccttttttcccctttaaagaatgaatttatccttatatttgggtgaaagaccaagttacaggtatgcaaataggttattattatttcaggctttttcttgtatttatttccaaattgaagctctcaattattcaggggcacattattccatttatgaattaaccatgccccttgctttccttctcttcccctcctccccctcctaatactgcccaccctttagccattttgctgcttgggagtacctctagtcagagggtgggaagggagaggaggtgaaaattttaattagtcattttactacttgttagttgtcctggaaaaggtttggtggaagaatttacaagtatttgccaaaatatttttggataatatatgagtttctttaatctatttgacctctccctttccctcctctctccatcagcatggataattgagagttggcttttatctgcctgtgtttcctcttttttctctcctttctgatttctttaatacataaatttcatttttttgaaaagagtttacttcagtgtataattttgagcttcttaggtttttctatattcttgttttaatatattattgttttagttggatcagatgttttatctacttgttgagctcaaggggtcagtgagtggggattggtgaggaaggaatagatctctcattctttccatctcctctgccctcttcccctcagaagtagcaacagagcctagttccaaagattatctataggagggcttcatactccaagcctagaaaaacaactaaaggaatgcgcctgaactgactgcattccctttctcctcccctcccctccccccactcaaaataggagttaaggcctgaaggaatgtggttgaaaggtgatgagaaagctgagaagattgagcacaaaggagggggaaacaaaaggagtgggatatctgggatcaaagaaaagcctttcttgtggcttgaaacataacacgtgtttattgtttggcaccaggccacttattaagtagtttgatactcttaattcagtttttaattatgtcagaatgttacagtattaacgccttggatgtcaaggagcttcggattttttaattggaccactcttgcccatgttgtctctagattcaggagaaagtgtctatctggaatttctgctctcttaatcctttccccatcactcagacattcacaggatactgggtcagtttctgtgtgaggatgaggatttcttactggtgccttatacaccaaaggatatgtgggccaaggtagtttcattagtataatcttagatttctcagaaaagggactggagcaaggtttcccctgtcatacttagtataaatagagagacacttttatactcacactaaagtatctcagtgaagccctcc

SEQ ID NO: 66423 - DNA, 1010 bp, Homo sapiens
gtttgcttagagagttgaattgtctcaattccttcttagagtgaagggtggtataaataaataaaattaatggtgcgtttcttctagtgtcgttagatctagtctgtttttaacaggaaggataataacaatacattgtcagtgacacatacggttatatatacagcactcttctgttcttttctacttaggctcccttgtttactgcctcagtttcccttgtttgaaagccttagaacctctggccatgcaggcagttagataattttcaaaaggttcagtgaattccatccttaattaaggaaaatctgacttttaaaattataagtgctttttactttcttgtgttaattataaaattaacttctaaaaattagttgaaatactagttttcattagtgatagcagatttaagttaatgaaaccaaggccgatatttatttagaaggcataggaagatttcttgtagtttcagttatgttcatgataagattcagattatagaataaactgtgtaagaacctaagtgtgtgacattccttgaattataattattcataattttgatcttgcttgcttaaaataaagcctctcctattcactcagggcactttttataatttaaaaagttatatatgtttgagcatatatgtttgatttgtttttagtgattgaaaacccttgtagcagcgctttcttttttgtttagtatgtctggacctaatagctcttcagaatggtccattgaaggtcgtcgattggtaccactgatgccccggctcgttccccaaaccgcctttactgtaacagctaatgctgttgctaatgcagctatccagcataatgcatctcttccagtgcctgcagaaacaggaagcaaggaaggtgagtagaaaaatatgcctgtgttagagattacttttcttagaatcttcaagaaaatttcaagaaaagttgtcttatttttcatctacttttattctagtgtttaaaggttatgaaacatagta

SEQ ID NO: 66424 - DNA, 1004 bp, Homo sapiens
tcatctgaggtcaggagttcaagaccagcctggccaacctgacgaaacctcgtctctactaaaaatacaacaacaacaaaaagttagctgggcgtggtgacacatgcctgtagtcccagctactcgggaggccgagacaggaaaattgcttgaacccgggaggcagaggttgcagtgagccgagattgcgccactgcactccaccctgggcgacagagcaagactctgtctcaaaaaaaagaaaaaaaaaaaagaaaagtggttaatttggctcacgattctgctggttggaaagtccaagtttgggtgaggatcttatgctgcttcaactcaaggcagaaagtggaaagagagcaggtgtatgcagagagatcccatggtgagagaggaagtgagagacagaaactgaggaagccagaatcttcttaaattttattttttgctttgtttttcctgtcaactggaggtgattaatatttgattttcatttttctcaatatggttataaacttgatttctttgtaacttagaggtaaagtttgctgttttagacaggaacaattctaggtctttgtcggccctgtttaaattaaaagttaaaaaattgaaggtgtaggggttatattttattactaatttcatgagtcatgctatataattgtttatgtctgctctgcagagattttctatgttaagttgctgtgtttcatgtttctcacttgatttttaaaaagtctacaaaaacagttgaggctttagttcataaagaaaaaacgcagaatctaggactattaattaaatttatatctgatttctgcagatttagccaaggtggtcttttaaaataactgtagagacctactttttgatcatttttaaaacactaggctggagccgggctcagtggctcacgcctgtaatcccagcactttgggaggctgaggtgggtggatcagttgaggtcaggcgttcgagactaacctggccaacatggtgaaactctg

SEQ ID NO: 66425 - DNA, 1039 bp, Homo sapiens
catataatatgtagttttaagtaacaggaagattattgctttatgctcagaagtcataccaacaacattagtttgagatgtaattgtttatttacctaactttgtatgtgcaaggcactatactggggaaacaaaccaataagacttagtcattaccctctgggagccccttactaatgggagatatgtagacaatcacattgccatctggtaagtggtacagcttaggggagaggtggattagctttgcttagaggaataagggaaagcttcactaaggagatggcttgtaggatgatgattgcagaatgatgaagaggtcattgatgttaggtggtattccccaaggaacaatagtatatggatactcagagatggatagaatgtggttaaggtggctttggggaatggttagcagttcagaatcccaagattataggggtacatggggttggatgtaacaggtattgtgttcttggaaagatatggagtcttgaatgatatggtaatgattttgtgcctcatcttgtagggagataaaaactactaaaggattttaggcagtgcataggcatgatgagatgtgaaattttgcaactagtagtaggattgagggtagatagaagtggacagactggaagcatggacatcttttaggtgattgttgctaagatacaggcaggagataagaaggcctgacatggccataggtttaaagaaaggagggaaggccaggcacggtggctcacgcctgtaatcccagcactttgggaggccaaggcgggtggatcacctgaggtcaggaggtcaagaccagcctgggccaacatggtgaaaccctgtctctactgaaaatataaaaattagctgactgtggtggcgggcatatgtaatcccagctacttgggaggctgaggctgaggcaggagaatcgcttgaacctgggaggcagaggttgcagtgagctgagatcacaccactgcactccagcctgggcgacagagtgagactttgtcttaaaagaaaggagggaaggcag

SEQ ID NO: 66426 - DNA, 1112 bp, Homo sapiens
aaaaaaaaaaaaaaaaaaagaaaggagggaaggcattcagagaccacttctctgagggaagattgatagaacttattggctaatggcttaagacagagagaggacaaggatgatataaagattttaaaaataaagtgtataatgcaagattagtttggtatacatatagcagtattgtcattgcccttcaggtgtaagctgttcagatgaagatgaaaaacccagaaaacgaaggcgaacaaactcttccagctcctctcctgttgttctaaaggaagttccaaaggccgttgttccagtctcaaagacgatcactgtgcctgtgagtggtagtcccaagatgagcaacatcatgcagagcattgccaactccttaccaccccacatgtctcctgtaaaaataaccttcactaaaccatcaacacagacaacaaacacaacaacacagaaggtatgtggtggagggagtctctgcctgccaattgtttctttcagacagtatgattcagatttaataaacatgcactgagtgcttactatgtgcttggcattatgctggggatgttcacatcttttactttgtttaattttccagataaggctttgggataggtattattatttcagttttgcagatgaggctttgcgatgttaaatgacttgcataatatgacacagccgaatctcttctaagaattgtgctctattttatagttgtaatcctatttggaaaaaatttaaaatagaaaaaaattttaacctatatttgtatgaccttccctgtagcaactcaggttttaatttgccaaagtagtaaagttgtcaggtgtttcatagaagaaaggaaggatataattaagtgaataacttttgttatcttctttttaaattctttgtatgctgttattaattcattcctaaactcttctctaaatatgttgaagtcattattattttgtcagtttcatgtttttagacccctctgtcttcccacactgatctggatggaccataatggctctctaggcttgttgtacacctatatttctgggatctctctttaaccatcattctgatcttctttgttagtttctttgcttattttgccagag

SEQ ID NO: 66427 - DNA, 1290 bp, Homo sapiens
ctttttttatggtttaactaggaaaagtattctaggttggaagtgattttccctgtgaatttttgaagatgttgttgctctgttggcttccggcttccattattgattttgggaagtccagtaccattctaatttcagatactgtttttctctttacaaactttcagtaactttcagaattctgaaatttcaaggtaatgttccttggtgtgggtctttatttcatcgattaggttgtatactcagtgggcccttttattctgaatatttatgtccttcaattctgatacatttcttgagttatttgatttgtctctgttttctctttttggatcacctgttatttgcctattgaactgcctggattgatccatttatctttctcatttccattttccatttgtttgcattgttttcctactctaatataatggaaaaagcctgtattttggaattggacttcttggattcagatcccagcttttgccacttactagctgcgtgactgtgggaaaactaaactctctacccgagttttctcgtctataaaacagagaaaacaatgtatttattttataggatttttgggtgtaaatacatgaaataatatatgaaaaattgttacagccttgcacgtagtaaatgttcagtatttttattttctttatcatttaattttatttttcactacatttatagagtttttcatttttgctctcatactttaaatttctagtaactctttttctctcaaagttcctttaaaaaaaaaaaaagcatcctactctttcatagaagcattgtattctcttacctaatgagattcatgacaattttttaaatgttttcttctttcatgttctctctgtaagttccttttatctatttgttttgatctcttttatttagttttcttaagtgtctggctgtctgcttacgaatgaaaataggcactaaaaaggtgacagaaagctctgtgtgtatgggtgggacatgctgactggtgactttcatcgtaaattgacctagctggactattttgttcaggaacatccactacccctttacctccaccatttgtcactgtctttagggcttttgtttggactggtaggattgttcagaaatatcccagtctcctgcctcgagtaatataagcctggttggcagtgttttgtttgggggttaaatagagggaaagggctgggtgggctcaccattcatgatatatatactttacttatctcctctgtttttagcgtagtacctggccccccagatgtgcctgat

SEQ ID NO: 66428 - DNA, 1067 bp, Homo sapiens
taaaaatacaaaattagccgggcgtggtggcacatgctactcggtaggctgaggcaggagaatcgcttgaacccgggagacagaggttgcagtgagccaagattgtgccattgcactccagcctgggcagcaggagctaaactccatctcaaaaaaaaaaaacaaaaaaaaaaacttaacgtagtacatacagtgagtgctcagtaaatgtcacctaacactattaacttttcagtcttcttcggtggacttagctaaaaatacgtgtagtagatgaggactcagtgaagtttgtgaactttttttaagttcattgactttaccatatatttatttttattttttttcttctgaattttcaattgagaatggatagttgaggttttcagacttgggatgtttgaaagagggcatatttatctcccaagttatatatgagccataccatgagagttcaggttcagaaccttagatttggcttactatggttaaaaaaaacaaatgtttaaaacaaattaaattaaaaataagactcattcattccacaaatatttattgagcacctactatgttccagatgtaaaactgtactcttttacttcttgtgtactcaatgccattacttttattattttgtggacaagctgatatgggtaggactaataaatgttcttggagttttatgtttttcttttgcttgggtaattggatttttctgaaatctatccaaggctgttgccattattgcattcactttggatttgtcacaaatcctgtataaggcaacttaggaattattgtaggtgaagtgatttttatattaagtataattatttatgaatttgtggactttattcaaattcaaataggtaatatattttcagggtagacacatttccacctgtgttaatgtggtgccttcattttaaatataacattgatgcagcacttatatatcagagcagcagaatttagctttatgccttcatgtgcttgattgatatttttcattttgtccttagggtgcaagtcccagcactcttaaggagtttttgtgagtgctagaa

SEQ ID NO: 66429 - DNA, 1114 bp, Homo sapiens
gtacacgtatcatagaattgttaggagatttaaataagccaatacatattagccctaggagctattcttgattccgttcttttccttaaccctgccattttcattcatcaacaaatcctattctctctacttttcaaaataatctgactttgatcacttttctttatttctactactaacactccggtgcaggcagcctctatcattttctgcttggtctgatgcaatagtttaagtggtctcactgcttcccctcttgcctcttatcatgtagcagctagagtgatcttttaaaatatacatcaaattttgtttttcttcctacttaaaatattcctgtggctttctattatacttagtataaaaatctaaattccacatttgatgtagcctctgcttacttttccaactcctctttgccctatgtgctttttgctacactgctttcttttctgtttttaaatttatcaagctacttctgacattagttcctttccttcatactattctctctgtctggaatgatttgtcactaaatcatctacagttttctagttatactggcaaaaccttgacatctctttcctgcctctctttttctccattcttcatatcaatatacaagcaaatcctgttggctttacctttgcagtgtattcagaatctgttcactttttacttcttccaccacaaataccttgttcaccatcatccctgcctggtttgttacaggagcttcttaatttgtctccctgtttctaccttcattgccctactgtactttttacctaataggtagagtaatgattttttaaaaaatggactttattttttaaaacagttttagatttacagaaaaattgagaagatagtacagagttctcatatactctgcacccagttttctcattctctttgttttgttttttaccaacttcctgataagtctcctttattctgaacattttacattggtgtgatacattgttatagctaataaagactattaatgcattaatgttaattagatccatggtttattcatatttccttggtttttacctattgtctttttctgttccaggataccatattatatttagttgttatttct

SEQ ID NO: 66430 - DNA, 1334 bp, Homo sapiens
cttgacaattttgaggagtactggtcaagtatcttgtagataccccaactgttagaatttgtctgatgttcttctcatgattagactatgattatgggtttttggacagaagacctcagagagaaagtacctttttcatcacatcatataaagggtatatactgtcaacatgctcttacatggtttagtccttcattacttctctgcagttgtctactactactttgtaccctatacatttctatcccgttcactagatctttgaagtttcttgaacataccaagcttgcttctgctttagggcctttgtatttactgctccctgtgctgatggatggtcttctgggtagcaccatggttcatatccctacttccttctggtttctgttcatatgtcaccttactgagaggtctttattgaatacattacttaaaaaatcatacagtgctcccatcattctttattctcctaccatacttttttgtctcttccatttgtctctgcgtgacatatacttacatttctgtttatttctctcccactactaaaatgtaagctacttgaaggtatcagctttgtttcttttgttcattcttctattctccagcgtctagaaccatgcctggcacatagtaggtgctcaataaatatttataaacgaatgaatgtttaaattactttctagaaagagtgtgccaatttatactccctaagtagtatgctgaaatgtctactttcctgtatcttatacagcgttgatgttatcttttaaaatatttgatttgtaaaattgttgcttataaatgcattttgatgattactagtaaaggaaaattttaatatatttttagttgtatattctctgttgaattgcttcttcgtttttcataagctatttttaaattatatataactaactgtgagtctagatacattagtagtttagtaggtacataaaaataacttattttttattccttaggttattatagtcaccacatcaccaagctcaaccttcgtgcccaacattctctccaaatcccataactatgcagcagtcactaagcttgtaccaacgtcagtcattgcttctacaacccagaagccaccagttgttataactgcttcacagtcctctctggtcagtaatagcagcagtggcagcagcagttctacaccatcacctattcctaatacagttgcagtaacagctgtggtgtcctctacaccatctgtggtcatgtcaacagtagcacaaggtgagtgctgtttcacaatttaattctgtcacagttgctatatggaattttgaagaaaacttggtgggtatgtt

SEQ ID NO: 66431 - DNA, 1095 bp, Homo sapiens
ctgcctcccaggttcaagcgattctcctgcctcagcctcctgagtagctgggatacaggcgcgtgccaccatgctcagcaaatttttgtatttttagtagagaaggggtttcaccatcttggtcaggctggccttgaactcctgacctcatgatccacctgcttcagcctcccaaagtgctaggcttacaggtgtgagccaccgcgcccggccgtgaataatattttttacatatttggaataaaaagttcatattctatttggtagcatgctttcttcatatatcgttgcttcgttaacatttttctataaatatcctaattattttcagagctgtttaatatttttattattgttgcataatttattaaatttattataatatataatgtataataatttattaaattattcccttattgttgggtatccagtgtgtttccagggtttgatattctagatttaactatagtgaacatctttgtgaatttaattgagccttccattttcttagaaccagcactcaggagcaggattaccaaatagaagaattggaatttttttgtagagtttactaaataccgtattttgtccccatgaactatataccctttcagaatatttcattagtatctggccactattaagtccttattcttcttgttttaaaaaaaaaatggggcagagggaataattttggcgattaaagaaaaattgagtagcatactgcttaaccagtacagtttgatcatccctaatccgaaaatctgaaatctgaaatgctctaaaatctgaagctttctgagtgccagctgatgccacaagtggacaattccacacctgacttcatgtggtaaattgtaattaaaacacaggtgcacaccacacagtttattcagcgttcccaagggaaaaaagactccttctgccttctgtagcagtgatatatcttttccttgtacacccagattcccctcacacaagcacttccacagagggtaataaaatggcatgtatgcaggctggatgcgccaataacaggttccccgcaatgccccacatggggccaagacctatgtgcatcacttactgtgt

SEQ ID NO: 66432 - DNA, 1483 bp, Homo sapiens
caaacatggattaatgtctttgtttcagtgatattcacagtagcccatttttttgtgtgtatttaaatgtttcataaatttaggctgagtgcattggctcatgcctgtaatcccaacactttgggaggccaaagagggagggttgtttgaagctaggagttcaacatcagcctgggcaacgtagcatgacctcatctctacaaaaaatgcaaaaattagccaggcgtggtggtgtacacctgtaatcgtagctactcgggaagcctgagtcaggaggattgcttgagcccaggatttggaggctgcattgagctatgattgtgccactgcactctagcctgggcattaaaagaagactgtctcaaaaacaaaaacaaagtttaataaagttattgttacagagcccatggattatttatgctattttttttttgtttttttttttattttttagctggatctggagattcttatatggattgttaatatccaaacttacttgcaaaatacgatgtgattgaatgaatatctttacataaatctgcattgatcaagtgattggtttttcacaataaaatttattatctcacaaaaccagaagtccagaagggaggctcaagttaggcattagctcatttgagccatcaaggaatttcttttcacctttctctttgcttttcttggtaattcttgggtaactcttggggcttttttcttgggtaattctcatcctgggcaagttgagtacatttcaggttctacatctagctgtgacaatgtcagagaaaaaagagagaatccccttctgtgggtctgtcttaggaaagaaaaaatctttcctagaagtcttccatgagattctccttatattatgctggccacaactgtgtcatatgtcctacctaaactagttctttgcaaaagtaatggggccaccatgactggcttagatcaattaggaattgcctgtatggctggcttagggccagccctctgaaagtacatgccaatgccttgtggattcttcaggaaagacaacagattctattagaaaagaggagggcagaggagaaaggaaattaggacaggcaaccaagagtgtatgctgcattcgattatttaataaatggttttagaataattgacttttcatttggttctgtgcatgtccatgttacttggttgatggacttgatcagattcttcttgttttctttttttttttttttttggtctacttgttatgtcagttactgaaagggaagtgtaaaagtctgtagctatatttgtggctttgtacatttctccctttaattctgtcagtttttatacacacacacttaggattattgtgtcttcttgatggattaacccccttttcattatgaaccattcctttttatctctggtaacccttgatgttatcaccagtgtttccatgtctgtcttttctgatgttaatatagccactccaactttctta

SEQ ID NO: 66433 - DNA, 15344 bp, Homo sapiens
aaaatctgagaacaatggttacctcccttgaagagtttgaagactagatatcagatatgtaaggtgccacacattttatctgacacttactaggtgctcaataaattgtactttttgttgatttccctattctttaaactattatctactataataaccagaagtaactttaattttgctttcctatcaaattctcttttcccttactccttttctacaggtgtatctacatcagcaatcaaaatggcatcaaccagacttccttcccccaaaagcttagtgagtgccccaactcagattcttgcacagttccctaaacaacatcaacagtctcctaagcagcagttatatcaagtgcaacagcagacacagcaacaagtggcccagccttctccagtatctcatcagcaacagcctcagcagtctcctttgccacctggtattaaacctaccatccaaatcaaacaggagtcaggtaactggaaaatgtttataagatatggtaattcttctttattcaccagtttttttagtcttccagtccatgaacacggtatgtctcttcatttatttaggtctttgactttttcatcagtgttttacagctttcagcatatagattctgtatatgttttgttagatttgtacctaagcatttcattttcttgtcgtgattataattggtattatgattttaatttcaatgtctacatgttttttgttagtatataaaaatagtattgatcttgtatcctttgaccttgctgaactcacttgttctcagagtatttacatagattccttgggattttctgtgtatgcaactatgtcatctataaatagggacagttttgtttcttcctttccaatcaattgctgtttatttctttttggtgttttattttattgtctagaacttccaatactatgctgaatgaataagagtgaggaaagtggacatccttgctttgttcctaatcttaaggagaaaacattcagtttttcaccattaagtacaataccagctgtaggctttttatagatgctctttatcaggtagacggagtgcacttctgctactagtttttggggagtttttatcatgaatgagtgttggattttgtcaagtgctttttctgttcaattaagttttttcttgtttagtctattgatatgctggattatattgattgattttctgttaaaccagccttgcatatttgaaataaatcccacttggtcatgatatataatttttaaaaatacattgctggattcaatttgtctctctattcatgagacattttggtctgtaatattcttattttatactgcctttgtccaattttggtcaggataataccggcctcataaggtgagtttggaagtatttatttcctttctattttttggaaaagactatgtaagattgatgttaattctttaaatgttcagtagaattctccaatgaagccatctgggcccggagagttctgtttttagaagcttttaattgatgaattccatttctttattagttatgggacttttcagattatctgtttcatcttggttttggtagtttatggttttgaggaattgatccatttcttctaagttgtcaaatttttgagtgtaaatttgcttgtagtagttctttactattcttttaatggctataggatcgatattaatgtcctgtttcatttctgatattggtggtttgtatctttctttgtcagacttgctatttattgcatttaaaaatttattgaattttttaagaactagatttttgtttcattgatttttcctttgcttttctgtttttaattttattatctttattatttctgtcctactttctttaggtttattttgctcttctaatttcttaaggtgggaacttagattattgattcaagacatactctcttttctaattacttagcatttagttccatctatgtaaagacatttgtcacaaatttctctcggcactgtgttagctgccttccacatattttaatatgttctgttttcatttttattcaattttttgtgtaagacttcttctttgacccatggattatttagaattgtgttgcttaatttctaatggagatttttctgggtttgtttgtttgttttgctattgatttctagtttgatttcattatggtctgagaacacactgtatcatttcaattcttttacgtttattgaggtttgtttcttcacccacaatatgttcaactttggtgggtggtccatggtgctcgtaaaatatctatgctgccgatgttgggtggagtattctatatatgtatatcaactagattctgttggttgattatgttgttcagttctcctatatctatgctgaattttctgcatagtagttctattagttgatgggagtgaagtaataaagtccccaactaattgttggattctagtactgcaaaaacagctatctcagtttttgctacatgtattatattttgatatatctattgtttgatgcatacatatttagaaacattgtgtcttcctggtatattgatcctgtctcattatgtagcgttcctttttttctgcaattaattctctattttttttaaatataaaggctgattttaaaaaatttccattcttaaaatttaattccaatttaacttgtaaagtctgccatataaattaatgatggtaactagcctgcattagtatatttagtgcatgtaatagagaactatactgactggaggggagtgagttctattgccttgtaaagtatactttatctgtaattaatatagccactcctattttctttttattcatgttcacatagtgtatttttttctcatcctgttactttcaacctacttttattgttgtatttgaagtgagtttcttgtagacagcatacagtgtagttatatatttttatatcaactttgccaataacttgtttttgtttttgagacggagtctcgctttgtcacccaggctggagtgcagtggcacaatctcagctcactgcaacctccgcctcctgggtttaagcgagtctcctgcctcagtctcccaggtagctgggattacaggtgcacactaccacgcccaggtaacttttgtatttttagtagagacagggttttaccatgctggccaggctggtctcgaatgctgatctcaagtgatccgcccacctcagccttccaaagtgctaggattacaggtgtgagccactgcatctggccaaccaatcttataacttttttttttttttttttttttttttttttgagatggagtcttgctgtgtcgcccaggctggagtgcaggggcgctatctcggctcactgcaagctccaccttctgggttcacaccattctcctgcctcagcctcccaagtagatgggactacaggcgcctgccaccacacccggctaattttttgtatttttagtagagacggggtttcaccgtgttatccaggatggtctcaatctcctgacctcgtgatccgccctcctccacctcccaaagtgctggtattgcaggcatgagccactgcgcccggccccaatctttaacttttaaatgatatatttagatcatttacatttaaggtaattgttgatatggtagtggttacatgtgccgttttattttgtttgtttcttttgtttcttgtttcttttttcttgcctatttgtagtttacttgaagaatttttagggtttcatgttgacttattattttaaagtatattgttttgttctgttttcttagcgtttgcttatggtattacagtatacatgtgttggccatgtgaggccaggagtttgagaccagcctgggcaatataacaagacctctgcccttttgtagagaccattttttggtctctacaaaaaatttaaaaattagctagaaatggtggcatgtgcctgtactcctaggtacttgggagggagcaggaggattgcttgagcccagaagtttgaggttgcagtgagctatgattaaaccactgcactccagcgtgggctacagagtgagagcctatctcaaaaaaaaaaaaaaaaccaaacccaaaacaataaaaaaaatacttatgtcgcctatcacatttgaccttttcactgcaaattactctatatttgaaataattttatctttctagtaaaaaagggagatttcaccatatctaatgttacttaatataatacttaatgttacttaatgttaatataatacttaatgttactggctcagagactttgccaaaggatagaaataattcataaaacagatagctcctaatctcttcccaaaggaactaactccatttataccagagcatggagaagttcaagactaagggcattctcaagaacagtgaaggaagtggtgaaaggcaaccagaaggagattcatggatgtaatgaacatatagtctagactgcagacagtttatagagaagaagcagataatataaaagctgggaagagccttcatgaggttagaagaaatatcaaaaatgaaccccagaaactgttccttcaaaggagccaaaattcggattacagagtaatgtatgctccaaagctttcctgaaaacaacagagtaatcaaccagcagttaatagagtttaacagctgggtgtcgtcaaggaaagaatagaaaaaagccaaactaataccactgtcatcccaaagtgactgtaagtatacccagagcagtgtctccatgaggaataatatcagatgcttagatgaaggagcatgggctggagagggaataaaaagacttcactaaaataactgatcccatcactaaacaaataactatgcaaataacaataacaaatccctggtgaggggaaaccagtacccaggtactgcatggtcatccctcagtatccgtggaagattgcttccaggaccctgttgatactcaaatctgtggatgttccagtcctttataaaaaatggtgtagtatttatgaaacctatgcacaccctcctgtatactttaaatcatctctagattacctataatacctaatacaatgtaaatgctatgtagctgttatactatattgtttctgtacttgtattattttttactgttgtattattatttttgttgtctttttcctaaatatttttgatccatggttgcttgaatctgaagatgtagaagttacagagggctgtatgtatattatctaaaatgtctaatttctaacaaagacataaggaggcaggtaaagaaacaggaaaatattacccatacattagaaaaacaaacaaacaacagaaactataagagcaaccagatgtcagacttaactgaaaagtactttgaagtagccattacaaatatgttcacagaactaaagaaaaacatgattatagaagtaaaagaggctatgaggacaatattacatcaaataaagatcaataaagagatagaaattagtttttaaagagagccaaacagaaaatctggaggttaaaagtaaagtcactgaactaaaaaatgcacgagaggggttcacgtgtagatctgaactggcagaagaaagaatttgcaaatctgaaaaacgatcaatagaggttatgtgagctgaagaacaaagagaagaaacaatgaagaaaagttaacagagcttcagagaaatgtgagacattaaatacaccaacatacatataatggaagtacgagagttgggaagagagaaaagaaaagaaatattcaaagaaataatggctgaaaacttttccaaatttattgaaaagcagtaacatatgtttaagaagcttaacaaattacaaataagataaacaaagatcataaacagacacatctcagtaaaattgctgaaattcaaagacaaaaagaaaatcttgaacacagcaagagaaaaacaacatatcacttacaaggaaattgcaataaagttacgtaagagctgacttcccagtggaaacaatgaagccagcaggcagttggataacacatttgaaatgaaaaaaaaaaaaaaaaaacccaccaactaagaatcctatatccagcaaagctagctttcaaaaatgaagaaagactttaccaaataaacaaaatctgcaagagtgtgttgctagcagacccaccttacaagagacactaaaagaagttctatgaatagaaagaataaggaaaaagacagtgatgtctgctgttgacacttatattccatattataccagaggctcaagtaagagaaaatgggcaaaaaaaaaaaaaaaaaaaaaaaagcatccagattgaaacagaagaaactctaccccgtttacagatgacatgatcctttatattatttttttttaaaaaaagcatccagattgaaacagaagaaactctaccccatttgcagatgacatgatcctttatattattaaaaaaaaaaaagcatccagattgaaacagaagaaactctacccctatttgcagatcacatgatcctttatattattaaaaaaaaacaaaaaacaaaaaaaaccactaaggaatctactaaaagatattagaactaataaatgagacgtgtttggaaaggttgcgggatacaaagtcaacacacaaaaatctataaattagcaatatacaatctaaaaagtgaaactaacaattccatttataatagcaccaaaagaacaaaataggaataaatttaacaaaagaaatacaaaatgtatactctgaaaactacaaaacattgaaagaaattaaagatctaaataaataggaaagcataccatgctcacagatcagaagatttaacattgttaagatgacagtgctccttaaattaatctatagattcaatgcaacctatatcagaatctcagcagacttcttcgtagaaattgacaagctaactccaaaattcatatggaatttgatagccatatggttagccaaaacaatctttaaaaaaaagaagtaaaaatcacaggcaggagccccagcatggtggctcctcccggtaattccagcactttgtggggctgaggcaggtggaccacctgaggtcaggatttcgacatcagactggccaacatggtgaaaccctgtctctactaaaaatacaaaaattaactggccatgatggtacatggctgtaatcccagctactcgggaggctgaggcaggagaatcacttgtacctgagaggcggaggttgcagtgagctgagattgcaccactgcactctagcctgggtgacagagcaaggcgtggtctcaaaaaaaaaaaaaaaaaaaaaaagaagaagaaggagaggactcaaatgcttcctgatttcaaaatttactacaaaccaatggtaatcaaaacagtatggtaccggcataagacatatagatcaatggaacagaattgaaagtccagaaataaaaccgtacaactatggtcaactgctttttgagaaagatgccaagatcattcaatgggggaaaaatagtctttttaacaaattctgttgggacaaatgaatagatatgtgcaaaggaatgaagtgagacccttacatcacaccgtatacaaaattaactcaaatgaatcaaacatttacacttagaggtaaaactatcaaactcttagaaaaaaacttagggtaaatctctaacatactggatttggcaaaggattcttggatataacaatgaaagcatgagcaacaaaaagaaaatagaaaagttagatatcaaaaactgctgtattcaatttaatttatttatttatttgagacggagtcttgctctgtcacccaggctagcgtgtagtggcacggtcttggctcactgcaacttacgcctcctgggttcaagcaattctcctgcttcagcctcccgagtagctgggattacaggcgcgcaccatcacgcccggctaatttttttttttttttgtagagatgggttttcaccatgttggccaagctggtctcaaactcctgacttcaagtgatccacctaccttggcctcccaaagtgctgggattacaggcgggagccactgtgcccagctaactgctgtgttttaaaagataccatcaagaaagtaaaaagacaattcagagaatgggaaataatacttgcaaattacatatccgaagcaactgtaccattttacattcccaccagcaaatataaactgtaccattttacattcccaccaccagaaataaaaccatacatgtacatgtaaaatggtacagatatatgagtttttatatatatataatatatatatataaactcttataactcaatggtaaatagacatataacccaattttaaaatgggtaaaagatccgaatagccatttcttcagggaaaatatataaaagatacaaaaagcacatgaaaacatgctaaacatcattagttatcaggtaagtacacatcagaatcacagtgaaatatactttacacaaagcagactgcctagaatcaatgtaacagaataacaagtgttgacatggatgtagagaaacaggaatcctcatacactgctggtgggaatgtaaaatggtactgttgctttggaaaacacgtcagtttatcaaacaattaaattaaacaaagaattaacatatgatcctgagattccactcctaggtatatatacaagagaactgaataccaaaaaacttgcatacaaatattttcagcagcattattcgtaatagccaataggtgaaacaatccaaattcatatcaatggacaaacagataaacaaaatgtgaattttaattagccataaaaggaatgaagtactaacacatgctacaagatggatgaacctcaaaaagattacattaagttcaagaagccagttacagaagaccacgtattatatgatttatttcatatcaaagtccaaattacagaaatctacagacagaaaataactagtggttacttggggctgggggtaggaaactgaatgaatgggtgcaaggagtagtagatcatattatggggtttccttttgaagtgaagtgttctaaaatcaattgttatgatggctgaacatatctgtgaatatattaaataacattacattgtacattttaaatgtgttcattgaatgcttagtcaattatattttgataaagctctttaagaaaagaaaattcggccgggagcggtggctcatgcctgtaatcccagcactttgggaggccaaggcgggcggtcttggctcactgcaacttacgcctcctgggttcaagcaattctcctgcttcagcctcccaagtagctgggattacaggcgcgcaccatcacgcccggctaatttttttttttttttttttgtagagatgggttttcaccatgttggccaagctggtctcaaactcctgacttcaagtgatccacctaccttgttgtaaaactataaaaatatacaatagcgtgataaataccatattccagatagtggctctggggatgtggagagaagaatagtggtattacttcatagaaaataatctaaaagaaatatggcggctgggcacagtggctcacgcctgtaatcccagcaccttgggaggctgaggcgggtggatcacgaggtcaagagatcgagaccatcctggctaacacggtgaaaccccatctctactaaaaatacaaaaaattagctgggcgtggtggcaggcgcctgtagtcccagctacttgggaggctgaggcaggagaatcgcgtgaacccggggggtggagcttgcagtgaaccaagatcacgcccctgcactccagcctgggcaacagagcgagactctgtctcaaaaaaaaaagaaaaaaaaatttcaggccgagcacagtggctcacacctataatcctgacactttggtaggccaaggcgagagaatcacttgaggccaggtgttcgacaccagtctgggcaacatggcaagaccccaactctacaaaaaaaatttttttaattagccaggtatggtggcatatgcttgtagtctcagctgaggctaaggcggcagaattgcctggtgtacttaagcctgggcaatagagcgagaccttgtctctaaataaataaataaaatttaaatataaaaaatattccagggcattaaaaaaaaactttcaaaattctttcttggaaatacacataatgctcaaagaaaaacctggcaaaccctgcacacaaaaaagaaaattacagactgaaatcacatttggttatcaatatattgtattgtctaacctcataccagtttaaattccaaaagacttaaatacaaaaattataaactgtgatggaaaatctggaagcattaaagaccacactgataaattcaactacatataaacaaatagtgttttgcacagaaaaccccatgaagtcaaaagacaaataaactggaaaaaaatctgcaaatcatgaaatgcacagaataccaattatcctgacagtgtaagaattcccagaaattgatccaacaggaaagtggaaaatggatacagatagcacacaaaaagtgaattacaaagggcactaaaacatataaatagtttctcaaactcactcttaataagggaaatgaaaaatgaaaaaaatactgagataacatccacccgcccctatcacattggcaaaaatccaactgcttgaaaatatactggtgggaagggggcactgtgaggaagctgggactcgtacattactggtaggaaaataaatcgaaaatcccgataagatgaaaacttggcagtatctgtcaaaactgacatagcagtcatacttctggaaatttatcctacagatacacatacaaaatgacactatataggcttattcactgcattttgtttgaattttaaaaaaagaaagactggaaacaaccttacaggggattcattacataaattacgattctggcgtactttatagagtttacaggttcagttccagaccactgaaataaagtgaatatcacaacagaggaagtcacaccaaagttttggtttcccagtgcatataaaagttatgtttatattatactgctgtctattatgtgtgtaattgtattatgtctaaaaaatgtacataccttaatttaaaatacttcattgctaaaaaatgctaatgaccatctgagccttcagagaggtgtaatctttttgctggtggagggtcttgtctcaatgttgatggctgttgactggtcaggttggtggatactgaaggttggggtggttacagcattttcttaaagtaagacaacagtgaagttggctgcatggattgatttttccttctgtaaaagatttctttgtagcatggaatgctgttttacaacattttacccacagtagaacttctttgaaaatggaagtcaatcttttaaacgtgccattgctttatcaactaagtttatataatactccaaattgcttgttgttatttcaacaacatccacaggacagggcactattatttcattagaagattccatctcaagaaaccacattcgttgttcatccatgagaagcaactcctcatctagtcaagttttatcacaagatagttatttctctcactgaagacctaaaccactcaaagtcatccatagaggttggaatccacctcttccaagctcctattaatgttgatattttgacctcctcccatgattcaaaaatgttctgaatgcatctagaacagtgaatcctttccagaagattgactttgcccaaatccattagagaaatcattatggcagctgtagccttacaaaatgcatttttttttctttttctttttctttttcttttttttttttttcttttttttgagacatagtctgtcagccaggctggaatgcagtgacacaatcatagttcactgcagcctcaacctcctggctcaagcagtcctcccacctcagcctcccaagtagctgagactacaggcatgagccatagcatgcctggctaatttttttaaaaaaatttttgtagagacagggtctcaccatgttgcccagactggtctcaaactcctgggctcaaacaatccacctgccacagcctcccaaagtgctgggactgcaggcatgagccaccacacccagcctaaaatttatttcttaataagacctgaaagttgaaattattccttgtttcatggcctgcacaacggatgttatgttagcaggcatgaaaacaatattaatcttgtatatctccatcagagctcttgggtgactaggtgcattgtcagtgggtagtaatattttgaaaggaatctttttttttttttatgagcagtaggtctcaatagtgggcttaaaaccttcagtaaaccatgctgtgaacagatgtggtgtcatccaggctttgttgtttcatttatagagcacaggcagagtagatttagcatcctttttaaggaccctagcattttgcgaatggtaaatgaacatcagcttcaacttaaactcagcaactgcattagtccctaacaagagagtcagtctgttctttgaagctttgaagccaggcattgacttctttatctatgaaagtcctagatggcatcttcttccaataaaagtctattttgtctacattgaaaatctggtgtttagtgtagccaccttcatcaatgatcttaggtagatctactggataacttgctacagcttctccgtcagcacttgctgttttgttttgcactttgacattctgtagatggtttctttccttaaaccgcatgaaccaacctctgctagcttccaacttttcttctgcagattcctcactctcctggccttcatagaaatgaagtttattaactggcctaatttcagtatcattgtgtctttggaaacaagcaggcccaaggagagggagagagatgggagaatgtccagttcgtgaagcagtcagagcacacacaacatttattgattaagtacatcatcttacacgagcatggtttgtggtggcccaaaacaattataatagtaacatcaaagatcactgatcaccgattaaagtaacagatataataataaaaaaaaactttgaattattgtgagaatcatcaaaatgtgacacagacataatgtgagcgcacactgttggaaaaatggtgcctatagacttactcgacgtggggttgccagaaccttcaatttgtaaaaaacactttgggaggccaaggagtgcagatcaccggaggtcaggagttcgagaccagcctggccaacatgatgaaaccctgtctctactaaaaatacaaaaataaaccaggtgtgttggtgggtgcctataatcccgctactcgggaggctgaggcagggagaattgcttgaacccaggaagtggaggttgcagtgaaccaagattgcaccactgcactccagcctgggtaacagagcgagactccgtctcaaaaaaacaaaaaacaaaaacaaacagacaaacaaaaaaacacactagtactgagaagcacaataaagcaaagtgtaataaaacaaggtatacctgtatcactgtagaatgaagaagcaatttaattttatgtactgactatattaaaaagatctctaagatacattgttaaaggtgggggggaaagcaaggtgcatgtgttatgttttacaagtgtgtaaagaggggaggtataagaatccatatttaaattttcttgtatttgtggagactctgacaatatataagaaactaagcttttgttaatggcaagggagaactagacagaggacaaggaaagaggacaagttattcactctaactttttatactggtcagtttttaatgaatgctttctctattcaaaaaaataaaatatagaccaggtgcagtggctcatgcctataatctcagtgctttgggattctgagatgggagaattgctttagctcaggagttcaaggttacagtcatcatgccaccgcacttcagcctgggtgacagaacaagacgctgtctctaataaaaaaattaataaactggctgtgtttggtggctcatgcctgtaatcccagatctttgggaggccaaggcagggggactgcttgaagccagagttcaagatcaccctggactataaagcaagaccctatctctacaaaaatagtaaaattagctgagtgtggtggcatatgcttgtattcccagctactctgaaggttggggcaagaggattgcttgagcctagaagatcaaggcagtgagccatgatcacaccattgcactctaccttgggtgacacagcaagaccttgcctaaaattaattaatatagtataatgtaataattgattcacaaataaaaatgccattgatacagaccttagaaactggaaccttgcagaaataggaagtatctagggtggggtaagtgacagacttctctgacagacccctgctttacgcactgagtgctcacagagtcggggtaaggggttggggagcagccaaaggtcctcacagtttgcctcgcttggtggtggagtcactgcctcacaagccagggcaagggctatcagtacttcagtatactcagtggtactgtgcccaaggtagagctttgtccacaaactgggggctgggcagaataagagagctctcacatccatactgctcttgcccagaacttagccttagtagtaggtagctgagtgcaggatgatataatctgaagtctggtttctcctgagaagaaaacctttcaactgggagctggcagagaaggaatcccgagttcttcttcactgcagccatctggaatggaatgtaccccttgctgagctagtagtggggaaggaggaaatgctcttggtttaaataccacagattttgcctttctcaatgaattttttgagattttattgagtagatgttttttcatttattatttgcccttggcacgatttctggaccctttcaatggtggttttataatttttaccagcttcactgggttagggggccagcagagccgatgccgccgtgccagatatcaatatttggaatggctttaagtacattggaattactttctttttaagagactgtagaattctccaatgcaactatctgagcctgctactttttggcaaaggggtacagctcctgaaatttttatctgtggaaatttgtctatttacattttttctcttttctggggtcaatattgataagtaataacttcctagaaaattacctatttgatccagattttaaacttatttgcatataattgagcaaagtcattt

SEQ ID NO: 66434 - DNA, 1052 bp, Homo sapiens
ggtggttagcagtaatggtgcaattatgacaactaaactggtaaccactcctactggtaagttctcttgagcatcagttcatttattcatcatacattcatcaaacagtttctctgtaccagcaatatgcttgacacttgggatatagagattaatgggacagtttttcaaagaggcctttcttgattctcacacccctactgactgccctgacgttaactttcttttgttattctttctaatgatcctttgttcttttcctttatagcacttcccataatttcttaggtatctagttgtatattgatttgtttgatattgttccttttattggaccataagctctgtgagcgtaagggaccatatcctttttatttaccacatatatagagctagtctgtaagtaggtgctcagtcaggatttgctgaatgaattaaaacagtcccaacccacaaggatttcactctgatgaagttgagaagagtatatgttacattacagtttagtaagcgttactgagactgagggaagcacagaatggtattgtgccctgataggcaagcaaccagcatatgctggaggaagtgacagtgttgaacattttggatagtaacactatctaaaatgtgaccttgagcagattacttaatctctctaaatgtttttctttgtttatttgtttttgtttttttccttgtttatttaaatgggataataatacctatgccataacgttattataagtactaaatgaaatcaggtatgtagaaagtccccggcatagtgctcaatagttgtcactattaatattataattagccattaccgttattttaaatgtatgactctttaaccaaactttttgaggatggctagtatttagatgacagaatttaaatagtgtaaaatgatacctgtctcaagcttataagctgtcatttattggccagtgtgtaaaggtcattacagacattgcacttcatatcctttaggctttattatctccattttcagcaacttccccaaggtcatgtagccaaaaagaggcaga

SEQ ID NO: 66435 - DNA, 1571 bp, Homo sapiens
gtggctcttggcaaatgaactagagctctttccagagatggtgctgggaagagtatgcatgtgttgaaataagtaataacaccattggcagatgcttcatgtttcccttaagtaattacagcagatagttaaaattgtgatttttgtaattatatttagctctgaattcacaatgattgctttttagccagctcacgtgggtgctttgtttttactggctgctaagtttagataggcacacgtttagatgatgctggctaaaaattaagaaaaactgatgaggtgaaaattctcaaatcttttcatttccatcttaagtttatggattttaattttaaaaattttaataatttagtaaagtcactgtatttgaacttaatttagttaagttcatgtaaaaagatgttgatttcatgagtgaccagaaaatggtacttaagaataaagtagatgaaagtatagaaaatgatgaaaagttaatggatataagctatctagttaatagactaaaaggatattagtaatatatgaatagtaaaacataggaagcactctgagttttcccttcctttttttctatatgtaaccttatatattattaacaatatataacattctttcctcatggcatatgttcatcaaatttttcctatatataaccttagaaagaatgttaatacctctgctgattttgcttgcccatactttttcatgtagacattctactatatatccttataatttcatatatgtagaacttaggggatgtattttatgtgtgtgcatttagctactggtatattgcacagtaattttctaattacacaaatacttatttcagataaattagaaaataaatatgtatgtgggggttaagacttataatcccaattcttagagacaagcattagcagtgtactataccttcttccagaattttctgactattataatatatgtattccattaatgggatagtgtaataagtatttttgcatgtggtaattttttaaaattcgctcatcagagaataattaattccttctttgggtagaaagttggtcagatgactttctatatcatttcaaccaagtctacgatttttgatttcctggaaacattatactttgttacataatctacagcccttttttcatcatcctggtaaaaccttactgatttttcagtgagaggactttatcatttatatgcatataaatctcttatataatcattgacttcaatttagggagaaaagactattcagacagtgccaacaggagcaaagccagctatccttactgctacaagacccatcaccaaaatgattgtaacgcagccaaaaggaataggttctacagttcaaccagcagctaaaatcatcccaacaaaaattgtttatgggcagcaagggaaaacgcaggtatgctataagatatgatgatttttcttggctcttaaatattttcaattcttataattcccgggtagaaatttgaaggaaaagatcagcaatctttaagaaatcagattgttaaaagttatgtttgaatgtgttaattattcaagta

SEQ ID NO: 66436 - DNA, 1050 bp, Homo sapiens
actccttgtgtctttttgttctgccatcctcagcttgtggatatcattttactatatagtctacagattataaaatgactcctgaagttgtaggcaaacaggcacaaaggttcttgtcagaatcatggctattgcactctggcatgtaccacttaaaacattgtatatggcttacactgtaatttgtctgtagattgaattaccctttgatgagcaatgctgtgcctaaaaagtataacgtacagaatagtttccataccaggaaaatattagtttatgacctagaagtttagcatttttaaatcgttttctaaaattttatctcagtatatttctgcttttctcctaggttcttattaaacccaaaccagtgacttttcaagcgacagttgttagtgaacaaacaagacagctagtaacagaaacattacagcaagcatccagggtagcagaggctggtaattcatctattcaggaaggaaaagaagaaccacagaattatacagatagtagttcctcttctacagagtcctcccagagttcccaaggtaagatctattttacttctgatttatataagtactactgacatagtgcccaaattctaaaatagaggttgcttctacacatttcacaacaaatttgtatgctctatcaattcttttccttttttttttttttttttattgtttgatgttaaatcggtgagctgaaattttatttttggtaaaggttaccattctttcctgcatggaatatgttcatcaaataattaactttagatgatgaatctgtcaggtaggtaatattaaactggatagagttatgattcccagatggtaattttcatattcttcctctctggtttgggtaagtaggagaaaacgtatgtaaagaagtgaatatatattttgaaatggttattgctataccctgagaaagaatcaaggtggtcagaggtagactgtaagtgggctgtaagtagggtgactatacattccaatttgcatgggacaagtcctagtttatgttgttctggcacaattatta

SEQ ID NO: 66437 - DNA, 1066 bp, Homo sapiens
tatctggcatttatccaaagagttcagttaggactgagaaggtactcagtaaaagtttcaccgaatgaacaaatagcagagcagcaaccataataactgtggcattgggttaagctgcagccttataaactcatttttgttgcctgagtccaaaatgttttttttttttttttctggagttccccctaaccttgtgagtgggccttttaagtagtaagtagtatacacctagatatggatagatagctaggtgaccaaacctaatggattaaggccatcctcgcctaggtcacttactaaagatcaggtcatatgtcatatcgttcctgtgcttttcttcctaaatgggctttttcccctttctcatttgggaatggggtagcctagaacgtatttgggaatgggttccagattttttttaaacacatattaaagattatttatattatgctttgtttccaaaaggttttaaggtggattaaaatataagattatattaagtgaagtggaagaaaacaaggagacaaacccaagggcagagatttataatggaataaggcatgagtcaaatacaaaaatgtatcttgtaaagacattgctttgagtaagtcataactcagtttctagaatgatttctttctgaagtttcatgatctcagtacgtcaaggtgagggtggggaataaatccaggttgagcagaaacatacttattgcagaacttttcagagcaattatgtgctaatatgtatatgaaagattaagagtggaagatacaatataaaatgttccccaacttttttgaccatggaaccctttttttgcagaacatcttgaggaacaaatgttctctggaacattttgggccttgctgtctaggcaattaaatactgtgaagtccttgagctttatgacagtgcttcagagggaaggtatatattacatcgtaaaagggatatagatatcttaggtttagtttagaagcaatgatttagatgtgtaaggtgtttagaatcactttgtatgagcaatagttggtggagacaggatttatcatgaagaagagaa

SEQ ID NO: 66438 - DNA, 3057 bp, Homo sapiens
cttagaattcagaacttccaagctacaatagcaacaataataacatttctattggccttcatagtttataaagctcatttccatgtatcatttcattgcatactcagaaattctatgaggaagagagataattttattcccattttagaggtagtgaaactaagacccaaagaatcaacttgctaataattgatgtagttggggctataatccaagactttgagctccagatgttacacttgtcctgttatatcatgctggttctagatcatctgtcttttcttgctggcagtgaacaggatttccttcagtaattcagccatccaataagtgttgacagaatgctcaggctgtaatacaacacatattttcaggtgcattggagaaaataagactcctacagcattttgttcttactatacacaaacatgcactcacctacacatatgcgtatctatttataatagcaattatcacattgagttgtgatttgtctttttacatgtccgtctccccagccagactatgtgcttcttgagcatcctctgattattctgtgagctcctttatatcttcaatgccatatctagattctggcacataagtgtccagtttgttgtgaaatcaatgaatgagtgaatgaataagtgaattcagaagtgaaagacattatgccttctaggggcttatagtcttcttggggagataaagcatgaagtttacaataaatagaaagataagcaaacagacaaaaaaattgtttgtttttttttttttaagagaaactttgtttatagggtttgtttttttttaactaatataaaacagattcccagcctgtagttcatgtaattgcttcccggcgtcaggattggtcagaacatgagattgcaatggagactagccctaccataatttatcaggatgtatccagtgaatcacaatcagctacttcaacaatcaaagctctgttagaactccaacagacaacaggtatgaattcacatgctcaattgaatgaagcatgttttctctagagacgggttgtgctaaaatactaccactgttattatttattattactattatttattattattattgctattatttgagcacatttcccccctctggacttgtctataatcattggtacagtctggtttacttgttagttcagtaagatgtgcacaggaatattgaagtacagatggactatctgtagaaaagagaaaaaaaattgacagctctgtcttgtctcttgcttaaaatggacagtcctattgttccttagcactagaaaggagtagttctatcacttctaagcacaaggctagatacagtacagttgccagttgcattgaagaatagcaggaggcagattgaagggccttgccatcctccttgatattggtggagcacaaaacacctttagtggcccttgctaacattctgatttgttttaattttatcttcagacttatttctttgaatagtataggttagccacttgagctgtcatgcaaagttgtcctcatataactagatcctataagtatttctaattactaaatatctttgataaactctagaacaaacctgtggaagttatactgacttttcctttataataggtcaaagattttcagagtatttaaatgaccttagcaattatgtcatccaaacctttcattttatggataagtaaactgagatctagagaggttatccagttgattagtggcagagtgagactcatcttttggttcctagttcaatgtcctctctacttgtagggtgacttttgtatttttgttgttgttgttgttttacttattttgtttaattgttttgatttttgtcaggttatgtactcagtgggtatgaacattcagtggacttagttactggttaccgtttattgtaacttccaccttgtttgatccaaagattactagcatttaatgtaagtctttggttaatccttctgtcggtgttatttttgaccttagggatttcttcggttctttgtcgttgacatgctgagccatttctcttaatgccttatagaggtggggactttgaacgcatagattttgtagaaaagttgataacaaggtagaaagtgaatctattaatggaaatcattcttgattccagactgttatatcagacatttttctagaaacaaagaagccatttttttctaacaatgaaaatttttattctttaaaagttgttgaagacattgtaacattcctttggagatatcttgaatttttaatagctcaaattaaactggtcactgtgttgtgctattctgggtagatgtgtcctagagcaaatcatgttatgtactgcttattcaccctttgtttttaggttgatgaactcaagaccacagggaataccttgaagaagggtataggaaataccttaaggagagtgtacaagataaaaattcagttgtttggcttagagataaaaaggagatgatttttgtgttattgtatgtaagtccttcttactaggctgctgagtatggttatgcaagttgtgcactaaacagccatacatagcaatctgcttttttcttttcaattcactgtctacttagtcactgccagtgtggcaccccagaggtctggttcattattcctgtggacaactctggttttggtacttgtttgtaataaaagttaacttttcccctgacttttttatgcagtaaaggaaaaattggaatctaaaccaagacaacccactattgacctgagtcaaatggcagtgcctattcagatgacccaggaaaagagacattctcctgagagtccatcaattgctgtggtagagtcagaactagtagctgaatacatcactactggtaggtgtcctcttaaaatgtagtattaaggtaggagaactaccttcctggatttcatgggatgattgtgtgggggagaatatattctttatatttttagctttttcctctttgttttcagagcaaattcacaccatccttgggatttaccctgtctttaatgactaggaaaa

SEQ ID NO: 66439 - DNA, 1037 bp, Homo sapiens
atagaggatgagtgacctcttcaaattcacttggctgtttgatggtagaacaggacaggatccaagcgtgattcttgattcagtttattttctgcattatcacccagacctttagatttttaggaactgtaaggttgtgagacagaatcacttaatacaaaggagtgaatgctactaatgtttttattgcatgtcgaactgagaccaagagattaaagaatgtgtattgccttactttccttaaagatattattttgggattacagaaattgattactgctttgttaccttaatgggatgaaagtcattggagaaagtgagtacagctcatgggaggatgcaactttaaggggtttgttcctcctttgtgataagagttttcacagtgcttccgtatacatttctcatctcatccttataatagctctgttattcccattttgcagatgaggaaacagtctcagagaagataagagactttcttagagtcacacagctcatagatgggcagactgtggtcttctgcctcctagttcacaatactacactttctttctgtgatacaagctcacagacatttgtttaaaatgactactggttacagatgctgtggtgatttctggagaaatatcatcacctcctctattttcagtcagccatcgctcccagccccaacagccttcccagccccagcggaccctgctccagcatgtggctcagtcacagaccgcaacacagacttcggtggtggtgaagtccatcccagcatcttcccctggagcaatcacccacattatgcagcaggttgtatctcttctttttcttcctatcttctgcaactgcccatgcttgaaataagattcagtgtcatcttgtattttaagaggagaaataattggaacgtagagtgtttgtgtaattcttttctaagaaatgagtagaggaaatgaattaagagtcttaacaccagaaaataattctgaaacagtattcttaaatctgtgaactcttaccatttcaaaagggtgagaatgtct

SEQ ID NO: 66440 - DNA, 2062 bp, Homo sapiens
ttgttgggcggcaggtctcagcctggagtccggccctcagctggcagctcctgacattgacctttctccggacacctagaaaggtctgacaggctggccctaaccgtgtcactcaagatgatgcctcctcacaacacttatcactgacactgggcactttgcctttctactgacaggaatgctgttgtcccctcctcagtctccttccgtcctgggagccagggctctgggatctgagcaaaggggcgaggaatgctagtcgagaggtgcttcatgcagaccttggtgaagcctgaagaatgatcttcatccatgcagggggctctctgtggggactggtacaggcacaggtctcagacaatctccctgaccttccagatagcactggacctacacatagccatggtgggcttctctgaaccttggcttttctcgggacctcatggcttggttaccgcttttagagaggttaacatcatgaataggccagacggctgtttcctgagccagggagcctttctcttctttttccgtgtttggttgtgcttgcagggccatcttattcttctaatctgtaagttctggaccctctaagacttttcttatagtagtaagtagaccagttttcgaagcacttacgtctgagagttgaaattgcaagttgcagtagaaagctccttgaggtttcttggcctttctaggttcttctgaaaatttttgagtgaatctcgtaagtctttttcagttaagaggaaaatgtagcaatgtagatgtttttcttatttcattcttactttgtgccttttttacttaggcattaagcagtcacactgcttttaccaaacacagcgaggaacttggaactgaggagggcgaggttgaagagatggacactttagaccctcagacaggtctgttttaccgatctgccctgactcagtcacagtcagctaaacagcagaaacttagccagcccccgctggaacagactcagctgcaagtgaaaactctgcagtgcttccagactaaacagaagcagaccatccacctgcaggcagaccagctccagcacaaactcccgcaaatgccccagctttccatcaggcatcaaaaactcacccctctccagcaagaacaagcacagcccaagccagatgtacagcacacacagcatcccatggtggccaaagacaggcagcttcctaccttaatggcacagcccccgcaaactgtagtacaggtgcttgcagtgaaaaccacgcagcagctccctaaactgcagcaggctccgaaccaaccaaaaatctacgtgcaaccccaaaccccccagagccaaatgtcgctcccagcttcttcagagaaacagacggcaagccaggtaacggaatattgatagcatgcaaagttaaacttctctgttcacggaaaaaaaaatgagaacatcacgaccctatcatgatatcagtgctttctcctggcaagaggaaacccaaaagcctcattacgctggtattactttgccccatcagaaggttgacattagggaagaaatgcacgcattaatatgtaggaagaaaaaaaagcatagcactcaaaacttgatttttcaggcagtttttattgaaatcacttcagcattgaccaacagtgcatagaagcgatatccctaaattatttttattttttggtataaaatatttatttccatgcctataaactctgatttctgtggtaataatgctaagtaaactacagtcttttaaggaacttcattgaacatctttctttgtagtttatatcatagccatctagttaactttattttttagatttatcttctagattacagaggaattattggtggataattgaaagcaaaattatattagcaaaaccagtggctctggagtgatgtatatgtatgtatatattataaatacatatatataggatatgtttgtatacatgtattatgaagcaaaagattggaaaaaatcttctttttattttaaaaagcagaagattatatgaaataatttgagccaggttgaaggtgtactgt

SEQ ID NO: 66441 - DNA, 1053 bp, Homo sapiens
gtttgtttgatatgtttttgacttgtcacaggaagaatcaagccaagacagcaggaagacatagatattatctttgagatggtgtttgacaaatttggtttaacacctattacaaaaatacaaatttatttattttctggaagaggatcagaaaattgatggacattgtcacccagcacactgtaaaggcaataaagagcccatgtgtcagtttgattttgtaagatacaagctatacttgccaatgtgttcactcattaagtcaacccagaagataggaagtttctgggttcaaattttgtactcctcaatttttgctcaaaaaattctggaatgtaactggattgcacttctatttcaagttaatttgggggacccttttcttggaaaaacagttcttgttcttgatccaaatttatgactcaggacaatcaaacctcaactgcaatgtctggagagacatgttctaaggtgatattttaaaataatgtttatatttaatttgggactaaccatgaactttactgtttaattcaatcattgttattaaaaaatcttgtttggtttctgtcatgccttggtaagtacaggctaattaacacaatagaattattcattgataatagatggtacctcacattcccttgattctaaaaatcatctcttgtcatgcataataggtcaagactaaagaattactgagtccaggctaccccttagaagttgtattttatctccctctctccttgcaaggtatcaggttgttttcttgacatttgtcattctttgctaaacagatatatagcttggaaggtatcagaatagcacattttagttaattgagaatttggatttattgaaatgtgagtagactaggatttaccatcaattcattatggtaaactttctctttgccatgatcccaaactatgggagaatgcaaattgacaatgttaaaccaattaaggtagaattaaatatagaggaagtgcttaaaggcaagtagaaatggccattgaattattaaaataatttgtttccctttgtaaaaac

SEQ ID NO: 66442 - DNA, 1930 bp, Homo sapiens
aggaaaagttttttaaaaacttgtatgtttttgcaaatccctggaagtgttgaattggttaaaattttacattttctcagttcataattagtttataaacacctagaataatactggcattaaagaatccttgttggatggtagaaatcagatccctaaccagtgggaggtactttttgggtggcttgtgcattcttatcagttgtgtgctaatttattgtattgttcctttgtgctctaagcagcacacttgccttctatttatttaagtgtaaacatttcaaagcaggccgtactccttctgacaaatttcttgtaaaccaggattgcctacgctttccactgtcgtcgtctccccactttccctcttcctttaagaaaacttactaaaaaatgtttcattgcgaagcagaggaaaagaaacgttttcagacctaaaggaaatgtttggtcatgttaagaaaacaaattattcattcatatgatgctttcttaacgttgaaattgcacattcacattggactgagactttgaaaataacttttacatacttttgtttaagcccctttgaaatgtataaaaagttcatttacagttctaaatgtaatgtttttaagccttctatctttttaggacacagtttgtttaagcaatatgttttggtcttgtgatcactgtctgtcacaagtagagtgaaaggggtaagggggtgggagggtaagagttttgacaagttgtggcaaaggaaactatacttttcatttttaaaaatgtaaatagaaaagtttttaacggttttatatagatttcactataaataagcattttaagactgacaaatgttgaactgtacatacatttatcagcataactgcccagtttttttggtgctgaagtactgtaagtagaattcatcaacggtctcctaatttttgcatctacatctggggggaaaaagctgtgatactatagttaataaattcccactagagtgacactgaagatttaaacacaagcattcataagatgcgctgatctctggtggttgtcactagttctgctaggtgataatgatttacccatagatggagctgttggatattattttattgtacaaattcatgtttaaaaaactttgtgactgtttctagttaagtaattttttaacctttcttgggtcatagacttctttggtaaactatgaactctcaccaaaaagatacacatgcaacatgttaaatacatgttagactttgcatacaattttaggggctcatgggcctctaagcctatccatgtattccaggttaagccctctgttatgatcaatccattacttacagattaagtttttataaaataaagtatcttttaaatattcatggatcaagtaacaagagcaaacttgaataaagttatgttctacatattttggcagcatagcatacctgtgtcccttgagaatttagccttcatatgtttctgcaattggaatggcaaataaaagtgctatcatctacatttttttaaagaattacaaatattaagaaattatcaagtgaaatttaaaatttttcttttaaaggtgttaattccaaatagagcatgcattcatttatttattcaacaaatattaattgagcatcttctgtatgacaagtagtattctgtgcactggggataccatagtgaacaaacaggaaatcctatccttatgaagtttataaacagggcttcctgctcatgaaatggatacaaggaatgaagacaggagaaaataagaacaatacttaggtttttttataaagtggatagatgatgatgccatatatggattttcagacatccctttactgaaagtcttagcattatatctattagtattccacatttaagtacataatttaaaagtaatttaaagtcatctctt

SEQ ID NO: 66443 - DNA, 1127 bp, Homo sapiens
tggccattcatgtatctttagagaaatacctcttcagcttccttgcccattttccaattattttctttttctctcattttaaattgagaatttttgaagtataggaaatactactaatcttaagagaaaagtaatgtttatcacccttaaaatcctaggttaggttctagttctgcttctctaatgtaacaaattgcttagcagtattaaaacagtatagcttcataattgaaaacttgcttttaattacatttctttttgaggttctcacagtagcctgctaaggtaggagacttagtacaaaggaaatagtagtcaggcggtctggatttgacccttagactcttctgtgtattgatcatgtgaattttagcaagtcacatttcctctccgagtcagtttctccataataaaagtgagtatttctaaccccatgggactattatgaagacaagatgaaacagtacacgtaaaaatgccagtgagagtcgggtgctcagtattttttgagtccagtaattacaccactcctactttataaatagaaaactgagggttcaaagaagttaaatgatgtactaaaactcagattaaatgctaatgacatcatgctgagccatgaattactaccttctctagaaggaagtgtttttgttaccaaacaggactggcccttggaaggatggaggaactcggtgttgggctattaacatgtcttctaatcagccttgggtgcctttacacagaggtgctcgattcaggctttttttttttttttagtttaattatgtgtcataaatcccatataagaggaagtggagtgaaaaaaaagcactgtataagcaagacctttcccagaaaggatattgaaaacaaagtctgcggcctctgcttgcaggttcgtaagctttaagtaagcaagacttgatgacctatatattgaaaaagaagaaacacaggatcagatttgtaattgtgaaaagtcttgctctgccttcttccctcttccatgctcacacatacacactataactgaaaacatatacttgctttttttttttttttaaaccagacaagccctgtgagcttggaccagctctaaaaggcataaaacagcagaggacaga

SEQ ID NO: 66444 - DNA, 1049 bp, Homo sapiens
atgattcggccgccttggcctcccaaagtgctgggattacaggcatgagccaccgcgcctggacccttttctgtttttattaatgtcttttgtgggcagcatattggatcatggttttttaatccattctgccatctcttgttttggattggaggctttaatcaatttacatttaatatactattgataaagaaagacttctacaatttgatagttgattttcatatgtcttttaccttttaaaatcctccatttcattcattgctgtcttttgtgttgatatttaaaattaatctatttttatttctttaaaaaatttttctcctaatctctgtgttggtcaattttgtgtttttttttttttttttttgtaatgaaatgttttgattctattctcatttcttttgtggctattttaaagatatttagtattttctttgtggttaccatgggggttatattgaacatcataaatttatagcaaactagttgaattgaaaccaacttaacgtcaatagcatacaaaaaattctgctccagtgtatctttgtcccccttttatgttgtcacgaattatatctttatgcatatgtaaccaataacatagatttataatttttttattcattcatcttttaaatcatgtaaataattgtcttttaactctcctctaggtttttctgggcttttagttggtttagttggttgattatttggtcggaggctgtagtagtccatttgtctagtggctttttctatttattttttcatagattgtattccttttcatgtgtggtcactggtcactgaagttgctcttccttagcttgtgtctaactagggttttgacagatttctttgagtgacaggacctaaacaaacaaaaacacttctctcagtctttgcaggttgcttctgttctctggctctccttcaacacttacgcagacttccactgaacctacggaccaacctgaagtgaaagtttgaggtctttgacaaagctttctaaattcctccatatacaagagtgctttggagtcctttaa

SEQ ID NO: 66445 - DNA, 1566 bp, Homo sapiens
ttggaaacatttctcccaaagtggagaaattcccatctaccaccagaaatttaactatctgtgcccatagaagggacctaggacatagaatcaggagccctgggtcccagctctgccctgctgctcactggcttggggtcactctgtgggatatatggctgtttcctgtaagaggggtaataataagtacagggtttctctttgttagtttatttgtccttctatctgtctatcatctctccatctgtccacccatggaaccttcatcgagttccttccttaatgcccattactgcgctgggtgcccgagatggggcagggagccggatgggtcatccaggcatggggtgatcaggctgcggtgggggaaagttgagcattctgggagtccatgggagaagggttccccagccaggcagggttcctggataaacatgtctggtttcatcccctaccgtgcccacttatgccagctgtctccccaccctacccctccccaggtggacaagaaggtctcgtgccaggttctgggcctgctccaggtcccctcggtgctcccgccagacactgagacccttgatctatctgggaaccagctgcggagtatcctggcctcacccctgggcttctacacagcacttcgtcacctggacctgagcaccaatgagatcagcttcctccagccaggagccttccaggccctgacccacctggagcacctcagcctggctcacaaccggctggcgatggccactgcgctgagtgctggtggcctgggccccctgccacgcgtgacctccctggacctgtctgggaacagcctgtacagcggcctgctggagcggctgctgggggaggcacccagcctgcataccctctcactggcggagaacagtctgactcgcctcacccgccacaccttccgggacatgcctgcgctggagcagcttgacctgcatagcaacgtgctgatggacatcgaggatggcgccttcgagggtctgccccgcctgacccatctcaacctctccaggaattccctcacctgcatctccgacttcagcctccagcagctgcgggtgctagacctgagctgcaacagcatcgaggcctttcagacggcctcccagccccaggctgagttccagctcacctggcttgacctgcgggagaacaaactgctccatttccccgacctggccgcgctcccgagactcatctacctgaacttgtccaacaacctcatccggctccccacagggccaccccaggacagcaagggcatccacgcaccttccgagggctggtcagccctgcccctctcagcccccagcgggaatgccagcggccgccccctttcccagctcttgaatctggatttgagctacaatgagattgagctcatccccgacagctttcttgagcacctgacctccctgtgcttcctgaacctcagcagaaactgcttgcggacctttgaggcccggcgcttaggctccctgccctgcctgatgctccttgacttaagccacaatgccctggagacactggaactgggcgccagag

SEQ ID NO: 66446 - DNA, 1061 bp, Homo sapiens
ctgctgtgtggctgtccaaaagcgtcttaacctaaggcccagttcccttttggtaaaacagagaattttctgccttggaaggtggttgtgagggtcagatgcgaccatgctgtggggcagccagaacagtgcctgacgtgtaacacttgctcagcagagagtggggcaccctgggcacaccctaccctcagccctgtggatgagcccctcacccggggcccgaggtctagaccaaaccagggactctggaccatcagagctggagaggccagcccgagaaaccgtctagtctggtgggtttcaaactgggtttcctaacaccctaggcagggatggtgggcagaagtcgagggcttcaggtccccctcacttcagccagaccaggcccgccttcatctgctgctcttgtttaagaaagggatctgctgcttctagttgaaaattcaccacctggcctcacgccccttaccatacaaatggagaggcagaggccagagaagaactgggactaggaactctggggagtgttccaggaagcattccaggaggtcggggtctgtgacaccttccaacagtgtctagactgggctcatgtcctgtgtggtggctttagaccatctggtgcattcattcctcacctgtggctctctttctagcccccaccatgccgtggcccctgctgctgctgctggccgtgagtggggcccagacaacccggccatgcttccccgggtgccaatgcgaggtggagaccttcggccttttcgacagcttcagcctgactcgggtggattgtagcggcctgggcccccacatcatgccggtgcccatccctctggacacagcccacttggacctgtcctccaaccggctggagatggtgaatgagtcggtgttggcggggccgggctacacgacgttggctggcctggatctcagccacaacctgctcaccagcatctcacccactgccttctcccgccttcgctacctggagtcgcttgacctcagccacaatggcctgacagccctgccagccgagagcttcaccagctcacccc

SEQ ID NO: 66447 - DNA, 1081 bp, Homo sapiens
caacctggtgcccctgcctgaggcgctgctcctccacctcccggcactgcagagcgtcagcgtgggccaggatgtgcggtgccggcgcctggtgcgggagggcacctacccccggaggcctggctccagccccaaggtggccctgcactgcgtagacacccgggattctgctgccaggggccccaccatcttgtgacaaatggtgtggcccagggccacataacagactgctgtcctgggctgcctcaggtcccgagtaacttatgttcaatgtgccaacaccagtggggagcccgcaggcctatgtggcagcgtcaccacaggagttgtgggcctaggagaggctttggacctgggagccacacctaggagcaaagtctcacccctttgtctacgttgcttccccaaaccatgagcagagggacttcgatgccaaaccagactcgggtcccctcctgcttcccttccccacttatcccccaagtgccttccctcatgcctgggccggcctgacccgcaatgggcagagggtgggtgggaccccctgctgcagggcagagttcaggtccactgggctgagtgtccccttgggcccatggcccagtcactcaggggcgagtttcttttctaacatagccctttctttgccatgaggccatgaggcccgcttcatccttttctatttccctagaaccttaatggtagaaggaattgcaaagaatcaagtccacccttctcatgtgacagatggggaaactgaggccttgagaaggaaaaaggctaatctaagttcctgcgggcagtggcatgactggagcacagcctcctgcctcccagcccggacccaatgcactttcttgtctcctctaataagccccaccctccccgcctgggctccccttgctgcccttgcctgttccccattagcacaggagtagcagcagcaggacaggcaagagcctcacaagtgggactctgggcctctgaccagctgtgcggcatgggctaagtcactctgcccttcggagcctctggaagcttagggcacattggttccagcctagccagtttctcaccctgg

SEQ ID NO: 66448 - DNA, 1035 bp, Homo sapiens
agtattcatcccacccccgccccgattaaatcaaaccacacgcacacaaatagaggctctggcacatcctgacagaatatagcctctgggatgtcaggaacccccaacctacggccattggcgtgtctgcaccggccaggaagcccaggcccccggctccttcctggatcacgcccctgccccgcccaagggtgaagaggggcggggccagccggcgccctccgagtgggccttacaccaggtcgggcctggcccggccccgcggcccagcggcgccggtgggcggggcctccgtcagggcagtgtcagtaacggcgccaggccccgcccctcggggaggcagggccgggcggggcgcgagcgagcgcgcgggctgggccggagccggcctggtcgccagcctaacccggcacagtgagcggagcgcctgggcggcggcggcggcggcgtgatggctccggccgcggaccgagagggctactggggccccacgacctccacgctggactggtgcgaggagaactactccgtgacctggtacatcgccgagttctgtgagtgtggcctgaggaggggagtgggggcgagagggcaccgggctgaggagacgccgtgtgaggaaggcaaagagcgaacctggccgcgaagggaggtgccaggcctggccccgggagctggaatgcggcgccctgggccagcgggaggctgagaggagcgggccgggagtccagtgtgtagagggaggagtaccggggtctgggagggaggaagggggcctgaggattgggggggcagaagagcagtgggaagtggggagcccctgctggacctaagggggaaagcctgaagagccgggttgggaatgggaattcctgcccgagagcggagtggggccaggctgggagagtggaggaccctgccccttggaatgagggcccaggacacctgctctgctgttgccaccaccagaagggtacagttcctagcttcgtctttcccccaatccgtgagaattctaccgtctttcccttccct

SEQ ID NO: 66449 - DNA, 1037 bp, Homo sapiens
taaagaccaaattctaacatggcatgaaaagcacttcttttttttttttttttttttttttttagatggaatctcactctgttgccaggctggagtgcagtggtgagatcttggctcagtgcaacctccacctcctgggttcaagtgattcttgtgcctcagcctccctagtagctgggattacaggcgcaggccactacaccgggctaattttcgtatttttagtagagatggggtttcactatgttggccagactggtctcgatctccttacctcgtgatccatccacctcagcctcccaaagtgctgggattacataaaggcgtgagccaccgcgcccggccaacatttcatttttttaagatgaaatttttatgcatacaacaaagttggaagaattcttcagtgaatatccattcacccactatctcaattctaccattaacattttattacacttgtttttatcacataccgattcatttttccattcctttctccatccatcagttcattttattttttgatacatttcgaagtaaactgcagacatctgtttgctttcctctaaatactaaagcatatcattaaagtttaattccttgttttttttttcttttgatgtaaaatttacattcaatgtaatacacagtttttgttgttttttttttttttttttttttttgtggagtctcactgtgttgccgaggctggagtgcagtggcatgatctcagctcactgcaacctccccgtcccaggttcaaacgattctcctgcctcagcttcccaagtagctgggattataggagagcaccaccacacccggctaatttttgtattattagtagagacaggggattacaggcacgtgccaccacacccagttaattttttcatttttttgtagagacatggtttcaccatattggccaggatggtcttgaactcctgacctcaggtgatccacccacctcagcctcccaaagtgctgggattacaggcatgagccaccacgcccagcctgtaatacacaaa

SEQ ID NO: 66450 - DNA, 1030 bp, Homo sapiens
catgagccaccacacctggccagggaggagaactttaatagcctttctagataattgtggatgttctttgacattacgtataccaaaacttgacaagtggtagtgttaaggttaattggaatgtggaatctgagatcatatcattgaatttttcttgccatcatacattaagatccattggcctttcttgcactttgaatggacttttacctatgcatcattttatagcaccatgcatagatcatttggaaaatattggttcactgttgatgcagatcttccaggtgttgagatatttctttatgtaatattaaaaaaaaacacgtgttattattatcatctctgacatcatcagaagtctttaagtattgggaagctgtcaagcttattgtggtagatgcaagttttccaaaattcttatttttgcttgaattttattgctggcaaaaaaggaaaatacacttatttgttctttttttttgaaaggacaaggctcaatttgctcatttctaggaaaacatcttctaaatacccaggaatgaataatcatagtttacttgtcagttcatcttttaggtaaaaatgtggttgatgaaaaaagcggctaagttgagctgacatctcaaaacagtcatacaagtgctattccttgagacaacattatactttgggatatagtagaagttctttatgtaaattccatttaatgatagagaatattaaaaagatgtgcacccaagagttgagatttaatacaattagtaatttttattgcttcataaaaggcactgttaattgaagctgacttttttttttaactatgaatatatggtggtggagaagaatacaattattatagtatagactggttgttactgccctaatttgtgcaaaagtgtacctaccattgcttttgtgccattaatgtaaatgtgccattagtgtaaatgtcaatacagtgcataagttaaataactctaagtattatgaaaatagttttgacctcaaagactccaaaaagggtacatca

SEQ ID NO: 66451 - DNA, 1045 bp, Homo sapiens
ccaaaacctaaccatatcaaatatagaaggtatcttttgtgagattttaacagtaataaatcatctgcatttttaataattaaggttaatttagtctaaatttaaaatgcattttaaaggtcttatgcattcatgatttttgactgatgcattttaattctaagtaaatgaagagtgaatgaaaaattatactgaaattagtttggggtgaaggatgaatctgttaaattaattttggggaaaagaataactttattacatcataactgaaccacatctgaaataatatctattaggttttaaatacctgtactcttgaaaatttggaactagtttaatttgcatgagggcagtctgtctggttttcttttgtattcctttatagagccttttgtagtagatgatcagtgggtatttgctattgaatgaatataaggccactgccctcaagaaatgtaactgaggagataagtcataaatatcagttgatcagatttagtgaaaagagatctgtctatgcaaggcaatctatgctaagtgccaggtgagaggttaaaacggttaagtgctgtaacaagagtggtcattttgagtaggatgattaacaaaaattcaccaaatgtaggtaggatttgatttgggcccttaaagaagtttcggtaaaagtggagaggaagaagggattatcaaaataaccattttcagattatgtcatttcaataatgcctcttcattactgaacatagtttggaaactttccctttttgacctttgaataaatcaaaaatgttcatttcaccaactatttctctagggatttcaagaccctgttacttaccttgttcttctctggctcatgacttcatcatggttatctgttttaaatctttctcagtgtgctcatctttgatccttctctaaagcagcattttagacctgtaaatgctgtttgtacagagtcattcccctcccctgtaacctccctcttgtgaggccagagtttacctaagccgtatctgatatggagctcccaagttcttctctt

SEQ ID NO: 66452 - DNA, 1486 bp, Homo sapiens
tgtaaactgcaatttgttgcttttttattccaagtaacaaaattaagccaatcctgtattcatcatgtcatactgcatccatggaccacaatttcagtgcatcagtataggctgcctcccccaacccattttctgctgtatctctgaggttcttccggagatctttttcttgcttgcctttagaaattaggatttcctttagtgggtttgctggtggaaaatttttagtttcatttgtctgaaatatctttattttatttggattattgtgagaaatttttggtgagtacagaattttttttcagcaccttgaaaatatcttcccaatgtctttctgagaagttacttgtgtaattgttgttaaagcctacgtgaatgtatctttatttaaagtgttattgattaacctaaatgtcttcttatatttttctcttaaagggaatacagtgagtaacctgatcatgattatacctccaatgttcggtgcagttcagagtgttagagacggtctggaaaagcggtacattgcttcttatttagcactcacaggtatgtataacactgtatctgaagaaatgtacagtattcaaatgggccatttttctcattcatttctaaaagcggttttcaattttgtgttattacataacttgaatatattctgaaacttcttagttaaaactccaaaaaccttgccagtgaattgaactgcattttgaataaaatgttttagaaattacaaaatattttaagcatacaaaaaagaatagagataatataacaaatatacccacacatcttactacccagttttgtcaggtcctaacaatttataatatttgtttcagatctttttcttttttaaggaaattactacagataaaattaaaactcctttgtattcctccctgattgtatccccctcagcctcccagcccatcccctaagagctagcctcaatcctgaatttgatgcttatcattttctcatgttttcatgtttatactatgtatgtatatatccttagaagtatacatagtatggttttgcatagttttaaactttttggaaaggataccatccaaccttttgtgacttacgtatattctacttgtctgtgaggtggaggactgtgtcttaatgatctttgcgtccctattgtctggcagtttagtgttcctcaataagtactggatggatgggtaaatcagctataccagagcctaacgtagtgaaatcacttctgtcttctgtcatgttcttgcatcatcataataaataaaaaataccaaatgaagtagattctttctagtagtttcatttcttcattttctattctgttttttttattattattatactttaagttctagggtacacgtgcacaacgtgcaggtttgttacatatgaatacatgtgccatgttggtgtgctgcacccattaactcgtcatttacattaggtatatctcctaatgctatccctc

SEQ ID NO: 66453 - DNA, 1029 bp, Homo sapiens
agccatttgggtcagaagtgcaaaggagtagctaaccagctatgtgcattaaaacttatcctgagcatcagataatacattttacagaaataatggaatattgttagtctagtaagtcacttagtagagggaatttaggagaacttatattgtacttcttttctacaccaaaatttcaccaattatagcacttactcaagagtcagctatatcttgccactagattttataaacttcattatccttaactcaatgctttgaaatgtcttattgtcttctcaggtcactgtccacgcacaaagaatttcatgctaattttttttcatttgtttaatttcagtggtaggaatgggatcctggtgcttccacatgactctgaaatatgaaatgcaggttagtaatgatgaaattgacaaatgcttatttctcttaattcagaagtacttcagatttgagaaaagagcacataactatggctaaaagatgggatttgtaatctctggagttttttacttcaagtctgaggatccaaactgactaagtgaagtaaagaaataagcaggtgagtccataaggaaaacaagtacaaatagtatagggctttttgaccatctctgtgcgggcatataaaattgagagcagcattagagagcagagtcacatggggacatcttaaaaagacataatcagttcaccagaacaatatattcttattctgagatacctgcattctttcatggctgtatggcatccatttgaatagtctgagtccctctatgtagcaagactttaaagcaagcttgtccaacctgtgggccgcatgtgacccaggatggctttgaatgcagcccaatacaaattcataaactttcttaaaacattataaggtttttttttgcaatttatttttatttttatttttcatttttttgagtcaaagttttgctcttattgcccaggctggagtgcagtggtgcaatcttggctcactgcaacctctgcctcccaggttcaagcaattctcctgcc

SEQ ID NO: 66454 - DNA, 1112 bp, Homo sapiens
tctatttatgttcctacttatatattcttttaaaagtttctttctctctttttttcaaggtttgaatgtttcaagatcaagaactcagtaaactaccatctgctttttaccttagttctattcagtttaatagtaaccacagtaagtcatattttgtttctaacagattaagcatgtaaattcaccatttatggagtttgacatattttacttccagtatttgcttcatgctgtcaaactgaaatctttctacacaaaacaagaatatcacactgacaaatattgctcccttgttctctgttcaaatgttacttctcactgtaattgaaatacttttaaaaatctgtttagtttttaaagggaaaaagcaaaaaagcaaatatttagtagcaataattgggaaaaattaatttttctcatagatggacatattagctcctatttgttaaaaatgagagattggctctgctccattggtccaaatgtgactgttgtaatggttaacttttctctagtaagttgagatagctagtcacttctaattctacattaatgctttttttctcaagtaaattgcattttatattatgaaaatatttattgcagaaaacatttattgaaaacttaccatgtcaggcactagaaatacagagatgattaaaaagcagttgctatctgtgaggagctcattctgttagagattttagacatgtacacaaagaattgcatcaaaagataataattgcaataataggggtaaaaactacttatatggtgatgagataaaggaggttcaatcaaggcttcatgcatgagtcaaggaaagcttctgagatgaggcacttgcactagaatttaactgatgattaggagttcatcagacccctgggcaagagtgcagtgaagaatttgtagatagcactattgttttttcataggcagagaactttgaaacaacatagtgaactaccattttcaatcacttactatatgccagatattgtaactatgtactttaccttcattgtctcattaaatcatcaccactggtagaattgggcaagatttaatatggctggaacatatggtaattgaagagcagtgaatgagtc

SEQ ID NO: 66455 - DNA, 1102 bp, Homo sapiens
attatataaaattttatgggattgctacattaaatgaggatatagaaatatctaaatccagtacttaatatcaaagatattatagtcttgtagggagagaaacaaaccattaaatgccacaaagtttatacatgaagagtaatggtagaaaggagtgtgactggttgcttccgctgtatagagaaaggatcagaaaaggcttcaagaaggaggtatagtttgagttgaatcctaaaagataagtaatgaatagaggaggatttctgaacaaagtaaagagcagcatgtttaaaaatacagaagcgtgaaactagcacatttgaggaagcacagtactttctggagacttggatgaggaggaaacaagaagacaatagtgagaccaaatagaaaggaaggaatcatggaaggatttgaatgttaggttaagaaatttgaactttgtcttacaagtgatgagagtcatggcagggtcatgacttgaattttgattcccctgtaccatgtcatttaaaaactgtactcctgtagggcaatacatgcatgttaaatcttaactaggcattgagcttaatcatccacatgacattggaacctacaactagggtttgtgtaactgcgaatgcatctagaaggtgagttagagatttctggaagcataagaaagcataagaaatttgttttaaatgtcttcacttactgagtgcctactgtatgctagacactttcaggtattttagcttatcattcctcatcactattattgttcattatccagatgaggaaggatgcgtcttctagttaaattacttatccaaggcatgtagcaagtaagtggcagaagttgaaatttactcctatctctaagtccggtgttctctctgttgtagaacagatctgctttggggattgtcaacataacctcttcactcctcatgagaatccatatatccttatctctccttgatactgatgcagagtttggagtggtccacaacagatctaaaacattcgactcaccataacagggctagcactgaggaaatcctcctgtagatactagctctcctgtggcatgccacttgatctgattgcttttaca

SEQ ID NO: 66456 - DNA, 1923 bp, Homo sapiens
aaggataataaatatttacatttaattgggaaggctattttggtaggcaaaatagacttcctttgccaaacaataatgattgtactaacctcattttccgttcctatttaggtcatgtatggaatgttggtctttacattagtacttcgatctatttatattgttacatggtaagtagtttggatcatctgcaccatgactgaagtatattcagacctataacagtaaatctatagcctaaatcaaaataacacataaaagctcacttcagtagagatgttggaagaaaactataacccaacatttattgttatattataaggaatactgggtcttcagacaagttgttaatgggcatcatgtgaaaactagggttccaaaattaaagacatgggaaaattaaagagagctgtcgacgatggccttgttttgaatatttataaaattcattagatattagagaccttaaaaatcctatagttaaaaaaaaattgtttttgtctttcttaaacctacttgactagggaattccttttacatagtacctccaaggaaggctgttaatgtcacaaagaattagtatttcatgaaagattatttgggaaatgggtataatctttaggcattcatgaaaattaaataagaaataacattcatgagattaccttaaatagggcctggccacacaacaggtgttcaataaataagtagtatgatttgtgggtttgttttttttttcttttttattaaacttttagtatctagataactgtaaaaatgcatacatttgtaaaaaataatagatcccagtatcctttaccaatctcctccatttgtaacatcttacaaaactatattacaatatcaaaaccaaggcttgatatgaatacagtcaagatacaaaacatttccatcatcagaaggatgtctatgttgcccttttataaccagacctacttccctcctgccccacctcactcctcactccctgtccttaacctctggtgatcacttaatctgttctgcatttctgtttttgtcatttcaagaatgttatataaatggtatcagatatataacctttgagactggctttttgaactcagcataattatccaagttgttcagtgtgtcaataattcattcctttctattgctgagtagtattccatggtatagatgtaccacagtttaaccattcatctgttgagtaacatctgggttgtttccagtttgaggcaatcatgaataaagctgctatgaacaattgtaatgcaggtttttatgggaacacaagttttcacttctccggaataaatgcccagagtgaaattgctaggttttgtagtaatttatgtttagtttttctcaaaactgctgaattgcttttcagagtagctccaccatttttacattcccaccagcaatatatgtgtgatccagtttctttgcatcctcaccagaatttggtagtgtcactatttttaatgaagttttttataatttgcatttccctaatggctaatcacgttgaacataccttccatgtgcttatttgccatatgtatatgtattctccctggtaaaatttctgctcatgtctttgcctggtttctctttttttataagagataataaggacagttgctattgtttttacagttgagttgtgagattctaattctttattaaatatgtgatttgtgaattctttctcccaatctataacttttcatcctctctttcaatgagcaaacatttttaatttcaatgaggtcaaatttatcagttttatggattgtgtttttggtgtcaagtctaagaactctatacctacctatagatcccaaagatttgttcttattttttttctaaaagactgtatagttttacattttacatttaagtctgtggtttattttc

SEQ ID NO: 66457 - DNA, 1051 bp, Homo sapiens
acattgtatacatatgtcaaaacatcacattgttctccataaatgtatataattatgatttatcaatttaaaataatattaattttttaaaaagaaaagacatggaactcaccactgtatcatttctcaggtcccaaaatccctagttagtctgcttcttctcaacacctttcagggtcttcttatgtttgtcttatatataatgcccagcagttttagttttacttagtggaacgaatatgaaaaagtatatccacttcatcttcccagaagcccaagtcccagtttattctgtttttaatgtagaccccttaggtaaatataaagaagcataaaatacagtccttgacttaaatcaagtctgatagacagggtaccaatacttttagaaacacaaatgacagacctttaaaaagcacttaacagtggcaatcctatgaaataaaagcaactttcttccatctgtcttgccacaacttctttcctatatgtccatttgttgatcatttcatttagcactggtcattatttccttatctgtctgctcaactagactgtgagcttcttaaagtcttagttatcttggtaatccctggatcccaggatagtgcttacccataaatgtttttaaaatcaaattgaaactcttaaaacttttgttacttttgtctgatgaaacatctgaaaattcctcctgtaacaaaacacctagaaattctaaatataatataacaaacatcctttaaatgcccagatgagttcacaagaacataaaattccaggctgggcatggtgactcatccctataattccagcacttagggaggccaaggcaggaggattacttgagcccaggagtttgagaccaggctgggcaataatagggagacctagtctatacaaaaagaaatttaaaaattagccaggtgtggtgatgcatgcctatagtcctagctacttgggaggctgagatgggagaatcacttgatcccaggacactgaggctgcattgagccatgattgtaccactgcactccagcctgaacaacag

SEQ ID NO: 66458 - DNA, 1925 bp, Homo sapiens
ctggaggtcttcagccaaaggcccagtctctctgacctcaccttccagccatcttgctcacttcattttggccctggccagtacctgtgtactgtctccccacctgcccaccttcctcttggccttgggcttgtgtcccgtggtccatcacatcacctgtcccttgtcagtgtcattcactcattcatccgttcattcattcattcattcgatcattcgttcattcattcaacaagcatttctgaggcctctgtgtggcaggccccgttctggttgctggcctagagtaatgacaagacacacttcctaccctctcaggactgtgtgtcacaggcaaaaactgagcaactcaacaaataaaaagcagaatgtggtgctgggaaggttagaaacagctcccccatgtggaggaaagggaagcctcccatggtagttccttagccaagttgttcccctctcccctgcccctccagctacaaagcaaaaggttctgtgaggatcaggcagtttgacatctagctgtatggttctctcaaatacccttgggggaatttctgccaatgacccccagaactgaccccagggcttgcagtgtggttttaacaggaccgggtattctgtctcccttggtgcccctctgctgttcaggtagcccaggatcccactgattgattagccaccatctcacaattgaccgtgcttgtggtccactagacccttcagattgttttccgttgtgataccttggccttgactctgtcctcttttctgtgtgtggcgtgttgtggcgacggccgctccccaactcccatccccactctctccccaactccggctccactcacactccagttctttcatttccccagtataaaggctgagcttctggttccgccccgggccctggggatataaacatttgccagattcttcctcggcccctgggggaaactgaggattaattcaggtggagtaagtggtgggatttgggtagaagtgaagccttgtcctgttgtggccatggtgcagggctgcggcacagccagccatcagtgtcatccgggtcagtaatgctcaaggcacagtccctggcccagcagcatgtcacctgggaggtggttaggaatgcagattctcaggcccacagagccctgataaaccaggagttctgggagggggtccagcaatctgtgtgttaagtcctgagagtgagtctgatgctcactcaagtcttgagaaccacgggtctgggtgagagatacggtagctgggctgagatcctgtcaatgggactggaggggaagggtcccggggtgtttgggaagcagaatcgacaggctttggtgattgggtgtggaggagtgagagggaggcgggcgtcaggggtagctccaaggtttaacttaggtgacttcagatctccaatcaccaagccctctctggtcctgccttctccacctgctcctgcgggtcttgcatcttctcctgtgtacctccagtgaggagtggtccccaccaccctccccatcagtgcacttacgaagtgctctcatcttcacaaacaagccagcacccagcccagccctggtagtcagggcggttgccacagcaattgacatcagcgacctggtccccaaggaacctgccaccttccgcctgcctgcagggcctgcattatcgcttctgcggggactggagtggaggcagatggggactcccacccctgacacacaccccattttgagaactgagtggggctgggaagagccagtggcaaagggaggggaagagggaagggcagaaagtaggtggggcccccctttggtggcctcttctctccacggccccaggctccagcccacttgggtccttggcgttggtggcagcagcacttgggccatggcggaggacaggccgcagcagcc
